United States Patent Application Publication US 2005/0228172 A9 - sequence listing, part 200

SEQ ID NO: 905467 - DNA, 617 bp, Homo sapiens
tgagaaacttctttgcaatgtgtgcgttcatctcagagagttgaaactttcttttcattgtgcagttttgaaccactctttttgtagaatctgcaagtggatatttggagtgctttgaggcctatgtttgaaaaggaaatatcttcacataaaaactacacagaagtattctgagaaacttctttgcaatgtgggcattcatgtcactgagatgaacctatcttttgattgagcagttttgaaactctctttttgtagaatctacaagtagatatttgaagccctttgtggactatggtggaaaaggaaatatcttcacataaaaactacacagaagcattctcagaaacttcattgtgatgtgtgcattcagctcacagagttgaacgtatcttttgattgagcagatttgaatctctgttttcatagaatctgcaaggggatatttggagccctgtgcggcctatttaggaaaaggaagtatcctcataaaaactacacagaagcatgttgttaaaattctttgtgatgtgtgcattcacctyacagtgttgaacctttcttttgattgagcagttttgatacacgctttttatagaatctgcaatgggatattt

SEQ ID NO: 905468 - DNA, 667 bp, Homo sapiens
ccaagtggatatatggcgtgatttgaagcctatggtggaaaaggaaatatcttcaaatagaaactagacagaagcawtctgagaaacttctttgggatatgtgcattcatctcacagagttgaacatttcttttgattcgtcagtttccaaacactatttatgtagaatctgaaagtggatatttggaacgctttgaggcttaaggtggaaaaggaaattgcttcacataaaaactacaaagaagcattcatctcacagagttgaaccattcttctcattgagcagctttgaaacactctttttgtagaatctgcaaggggatatttggagcaatttgaggcctgttctggaaacggaaatatcttctcataaaaaccacacagaagcattctgaaaaacttctttgtgagttatgcattcaactcacagagttgaaactttcttttcattgaagagttttgaaacactctttttgtagactctgcaagtggatatttggagcgatttgtggcctctagtgaaaaaggaaatatcttcacataaaaactagacagaagcattctgagaaacttctatgtgatttgtgcattcacctcaaagagttgaaactttctttagattgagcagtttgaaacacacatttggagaatctgcaagtggaaattt

SEQ ID NO: 905469 - DNA, 667 bp, Homo sapiens
ccaagtggatatatggcgtgatttgaagcctatggtggaaaaggaaatatcttcaaatagaaactagacagaagcatwctgagaaacttctttgggatatgtgcattcatctcacagagttgaacatttcttttgattcgtcagtttccaaacactatttatgtagaatctgaaagtggatatttggaacgctttgaggcttaaggtggaaaaggaaattgcttcacataaaaactacaaagaagcattcatctcacagagttgaaccattcttctcattgagcagctttgaaacactctttttgtagaatctgcaaggggatatttggagcaatttgaggcctgttctggaaacggaaatatcttctcataaaaaccacacagaagcattctgaaaaacttctttgtgagttatgcattcaactcacagagttgaaactttcttttcattgaagagttttgaaacactctttttgtagactctgcaagtggatatttggagcgatttgtggcctctagtgaaaaaggaaatatcttcacataaaaactagacagaagcattctgagaaacttctatgtgatttgtgcattcacctcaaagagttgaaactttctttagattgagcagtttgaaacacacatttggagaatctgcaagtggaaattt

SEQ ID NO: 905470 - DNA, 667 bp, Homo sapiens
ccaagtggatatatggcgtgatttgaagcctatggtggaaaaggaaatatcttcaaatagaaactagacagaagcattctgagaaacttctttgggatatgtgcattcatctcacagagttgaacatttcttttgattcgtcagtttccaaacactatttatgtagaatctgaaagtggatatttggaacgctttgaggcttaaggtggaaaaggaaattgcttcacataaaaactacaaagaagcattcatctcacagagttgaaccattcttctcattgagcagctttgaaacactctttttgtagaatctgcaaggggatatttggagcaatttgaggcctgttctggaaacggaaatatcttctcataaaaaccacacagaagcattctgaaaaacttctttgtgagttatgcattcaactcacagagttgaaactttcttttcattgaagagttttgaaacactctttttgtagactctgcaagtggatatttggagcgatttgtggcctctagtgaaaaaggaaatatcttcacataaaaactagacagaagcattctgagaaacttctatgtgatttgtgcattcacctcaaagagttgaaacttwctttagattgagcagtttgaaacacacatttggagaatctgcaagtggaaattt

SEQ ID NO: 905471 - DNA, 595 bp, Homo sapiens
tgcaagtggatatttggatcgctttgagtcctatggtggaaaaagaaatatcttcaaatagaaactaaacagaagcattctgagaaacttcttcatgatctgcacattattctctcagagttgaacctttcttttgattgagcagctttgaaacactctttttgtagagtctccaagtggatatttggagtgcttttgagacctatggtggaacaggagatatcttcacataaaaactagacagaagttttctgagaaatttttttgtgatttgtgcactcgtcttacagagttgaagctttcttttgattgagcagctttgaatccctctttttgtagaaactgcaagtggatatttggagcgcttttaggtctgtggtggaaaaggtaatatattcatataaaaactagacagaagcattctgagaaacttcattgtgatgtgagcattcatctcacagagttgaasctttcttttgattgagcagttttgaaacactctttttgtagaatctgcaagtggatatttggagtggtttgtggcctatggtggaaaagttaatatgttcacataaaaattacacagaagcgttct

SEQ ID NO: 905472 - DNA, 601 bp, Homo sapiens
gaaaaactggaaactctaaaaagcagagcacctctcctcctctaaaggaccagagttccttaccagcaatggaacaaagctgcatggagaatgactttgatgagstgagagaagaaggattcagatgatcaaattatgccgaactatgggaggacattcaaaccaaaggcaaagaagttgaaaactgtgagaaaaattaagaagaatgtataactagaataaccaatacagagaagtgcctaaaggagctgatggagctgaaaaccaaggctcgagaactacgtgaagaatgcagaagcctcaggagccgttgcgatcaactggaagaaagggtatcagcaatggaagatgaaatgaatgaaatgaagtgagaagggacgtttagagaaaaatgaataaaaagaaatgagcaaagcctccaagaaatgtgggactatgtgaaaagaccaaatctatgtctgattggtgtatctgaaagtcacagggagaatggaaccaagttggaaaacactctgcaggatattatccaggagaacttcaacaatctagcaaggcaggccaaccttcagtttcaggaaatacagagaacaccacaaagata

SEQ ID NO: 905473 - DNA, 587 bp, Homo sapiens
cacataaaactagatggaagcattctccgaaattttttgtgaagtgtgcattcaactcacagagatgaagctttcttttgatggagcagttttcaaacactcttttagtacaatctgcaagtggacatktggagcgctttgaggcctatggtggaaaaggaaatatcttcacataaaaactagacaaaagcattctcagaaacttctttgtgatgtgtgcattcaactcagagttgaacatttcttttgattgagcagttttgaaaaaatctttttgtagaaagtgcaagtggatgtttggagcactttgaggcctatggtggaaaaggaaatatcttcacataaaaactagacagaagcattctcagaaaattctttgtgatgtgtgcattcaactcagagagttgaacatttcttttgattgagcagttttgaaacactctttttgtagaatgtgcaagtggatatttggagcgctttgaggcctatggtggaaaaggaaatatcttcacataaaaactaggcagaagcattctcagtaacttctttgagatgtgtgccttcaacacactgagttgaacatttct

SEQ ID NO: 905474 - DNA, 632 bp, Homo sapiens
aatccttctgtccagaattcatgtgaaggtgtacccttttccaccataggattcaaagcgctctaatatccacttgcagattctacaaaaacagagcttcaaaactccacaatcaaaagaaagtttcaactctgtgaggtgaatgcacacatcacatataagtttctcagaatgcttctgtctagttttcatgtgaagatacttccttttccaccatagggctcaaaacaccccaaatatccccttgcagattctacaaaaattgtttatcaaaactgctcaatcaaaagaaagtttcaactctgtgaggtgaatgcacacaccacaaagaagtttctcagaatgcttctctctagtttttctgtgaagatatttcctttttctgtacatgccacaaagcgctccaaatatccacttgcagattccaaaaaaagagtgttttaaaactgctcaattgaaaggaatgttcaactctgagtgttgaatgcacaccatcacaaaatagtttcccaaaatgatcctttctagtatttawgtgaagatattaccttatccatcacagggcacaaacctctccaaatatccaattgcagatgctacaaaaagagtgtttcaaaactgctcaatcaaaa

SEQ ID NO: 905475 - DNA, 632 bp, Homo sapiens
aatccttctgtccagaattcatgtgaaggtgtacccttttccaccataggattcaaagcgctctaatatccacttgcagattctacaaaaacagagcttcaaaactccacaatcaaaagaaagtttcaactctgtgaggtgaatgcacacatcacatataagtttctcagaatgcttctgtctagttttcatgtgaagatacttccttttccaccatagggctcaaaacaccccaaatatccccttgcagattctacaaaaattgtttatcaaaactgctcaatcaaaagaaagtttcaactctgtgaggtgaatgcacacaccacaaagaagtttctcagaatgcttctctctagtttttctgtgaagatatttcctttttctgtacatgccacaaagcgctccaaatatccacttgcagattccaaaaaaagagtgttttaaaactgctcaattgaaaggaatgttcaactctgagtgttgaatgcacaccatcacaaaatagtttcccaaaatgatcctttctagtatttaagtgaagatattaccttatccatcacagggcacaaacctytccaaatatccaattgcagatgctacaaaaagagtgtttcaaaactgctcaatcaaaa

SEQ ID NO: 905476 - DNA, 589 bp, Homo sapiens
aagattcaactctttgggctgaattcactcatcatgaagaagtttctgaaaaagcttctgtctattttttatgtgaagatatttcctttttcaccatagccctcaaagyactccaaatgtccacttgcagataccacaaaaagagtgtttctaatctgccccatcaagagtaaggttcatctctgtgagttgaatgcactcatcacaaagaagtttctgagaatgcttctgtctagttttatgtgaagatatcccgtttccaacgaacacctctaagcggtccaaatatacgctagcaaattcagcaaaaagagtgtttcaaaactgctctatgaaaagaaaggttcacctctgtgagttgaatgcacacatcacaaagaactttctgggaatgcttctgtgtagtttttatgtgaagtgatttcgtttttctcctttgtcttcaaagcgctccagatgtccacttgcagattctacaaaaagattgttacaaaactgctctatcaaaagaaaggttcaattctgtgagttgaatgcatacatcacaaagaagtttctgtcaatgcttctgtctagtttttatgtgaag

SEQ ID NO: 905477 - DNA, 589 bp, Homo sapiens
aagattcaactctttgggctgaattcactcatcatgaagaagtttctgaaaaagcttctgtctattttttatgtgaagatatttcctttttcaccatagccctcaaagcactccaaatgtccacttgcagataccacaaaaagagtgtttctaatctgccccatcaagagtaaggttcatctctgtgagttgaatgcactcatcacaaagaagtttctgagaatgcttctgtctagttttatgtgaagatatcccgtttccaacgaacacctctaagcggtccaaatatacgctagcaaattcagcaaaaagagtgtttcaaaactgctctatgaaaagaaaggttcacctctgtgagttgaatgcacacatcacaaagaactttctgggaatgcttctgtgtagtttttatgtgaagtgatttcgtttttctcctttgtcttcaaagcgctccagatgtccacttgcagattctacaaaaagattgttacaaaactgctctatcaaaagaaaggttcaattctgtragttgaatgcatacatcacaaagaagtttctgtcaatgcttctgtctagtttttatgtgaag

SEQ ID NO: 905478 - DNA, 626 bp, Homo sapiens
cacaaagaagtttctgagaatgcttctgtctagttttatgtgaagatatcccgtttccaacgaacacctctaagcggtccaaatatacgctagcaaattcagcaaaaagagtgtttcaaaactgctctatgaaaagaaaggttcacctctgtgagttgaatgcacacatcacaaagaactttctgggaatgcttctgtgtagtttttatgtgaagtgatttcgtttttctcctttgtcttcaaagcgctccagatgtccacttgcagattctacaaaaagattgttacaaaactgctctatcaaaagaaaggttcaattctgtgagttgaatgcatacatcacaaagaagtttctgtcaatgcttctgtctagtttttatgtgaaggtattccttttccaacgaaggcctcaaagtggtacaaatatcaacttccaaattccaccaaaagagtgtttcaaaactgctctatgaaaaggaacgttcaactctgtgagttgaaagcaracagcacaaagaagttcctgagaatgcttctgtgcagtttttatgtgaagatatttcctttttcactataggcctccaagcactcaaaagtccacttgcagattctacaaatagagtgct

SEQ ID NO: 905479 - DNA, 666 bp, Homo sapiens
cattacaaagaagtttctggaaatgcttctgcgtagtttttatgtgaagatatttcctttttcaccacaggcctccaagcactccaaatgtccacttgcagattctacaaaaagagtgcttcaaaactgctctatcaaaagaaagtttcaactctgtgagttgaatgcaaacatcacaaagaagtttctgagaatgcttctgtgtagtttttatgtaaagagatttcttttttctccattggcctcaaagcgctccaaatgtccactttcagattctacaaaaagagtgttacaaaactgcactatcaaagaaagattcaagtctgtgacttgaatgcactcatcacaaagtcgtttctgtcaatgattctgtctagtttttatgtgaaggtattccttttccaaagaaggcctcaaactggtacagataccgacttgcaaattccacaaaaagagggtttcaaaactgctctaagaaaaggactgttcaactctgtgagttgaaagcaaacagcacaaagaagtttctaagaatgcttctgtgcagtttttgtgtgaagatatttcctttttcaccayaggcctccaagagctccaaaatgtccacttgcagactcgacaaaaagattgtttcaaaactgctctatcaaaagaaaggttcaactc

SEQ ID NO: 905480 - DNA, 666 bp, Homo sapiens
cattacaaagaagtttctggaaatgcttctgcgtagtttttatgtgaagatatttcctttttcaccacaggcctccaagcactccaaatgtccacttgcagattctacaaaaagagtgcttcaaaactgctctatcaaaagaaagtttcaactctgtgagttgaatgcaaacatcacaaagaagtttctgagaatgcttctgtgtagtttttatgtaaagagatttcttttttctccattggcctcaaagcgctccaaatgtccactttcagattctacaaaaagagtgttacaaaactgcactatcaaagaaagattcaagtctgtgacttgaatgcactcatcacaaagtcgtttctgtcaatgattctgtctagtttttatgtgaaggtattccttttccaaagaaggcctcaaactggtacagataccgacttgcaaattccacaaaaagagggtttcaaaactgctctaagaaaaggactgttcaactctgtgagttgaaagcaaacagcacaaagaagtttctaagaatgcttctgtgcagtttttgtgtgaagatatttcctttttcaccacaggcctccaagagctccaaaatgtccacttgcagactygacaaaaagattgtttcaaaactgctctatcaaaagaaaggttcaactc

SEQ ID NO: 905481 - DNA, 639 bp, Homo sapiens
cagatccatttttcataatgtttctgtgtagtttttatatgaagakatttccttatacgaaaagagtgtttcaaaactgctccatcaaaagaaatgttcaactctgtgagatgaatgcacacatcacaaaaaagtttctctgaatgcttctgtgtagtttatatatgaagatatttccttttctacaataggcctcatagcactccaaatatccatttgcagattctacaaaaagagtgttgcaaaactgcgcagtcaaaagagaggttcacagctgtgagaagaatgcacacatcacaaagaagtttctgagaatgcttctgtctagtttttatgtgaagatatttccttttccaccgtaggcagcaaagggctccagatatccacatgtacatattacaaaaagagagtttcaaaactgcactatgaaaagataggttcaactctgtgagttgaatgcacacatcacaaagtagtttctggtaatgcttctgtgtagtttttatgtgaagatatttccttttccacaataggcttcaaagcgtgcccaatatccaattgcagattctacaaaaagagtgtttcaatactgcccattcaaaagaaagtttcaactgtgtgagatgaatgcacacatca

SEQ ID NO: 905482 - DNA, 561 bp, Homo sapiens
aaagtaactcgtatatgtgcacaagcatattgcattttttttaactaaacagccaatggtatgttttgattgacatcaagtggagacgggatggggaaaaatactgattctgwgaaaatatccccttcctccattagtggcatgctcattcagctcttatctttatattccagtaagttattttgctctcactgttttaacaacaacaaaaatataaaaatccttgcataccttgttcaactagagaattttaatgattttcatttatcattgtaaaaccaaggacaattgtgtaacttttttgtatgtagctgttgcatgtagcgcaatctgtctttaggtagggataaattactctaaaacaaaaaacaatcctagatagttttcccttcaagtcaagtgtcttgttgtttaaataaaattcttgtttaaaatgaaaagaaaaatgtagaatgcaaaggccaagaatgtcctttatttcatgttagggatcagggactatgattatgtcactacagaataaaataaacggaaatggatatctgacagcggtgtgagcaa

SEQ ID NO: 905483 - DNA, 662 bp, Homo sapiens
taaatacaaagattttaaggaatttagaaaggtaaaagttaatatttcatcaccaaaggtgaagaagaaagtgtgacctgagcagtagcacacggtaagagtaacttgcagtggcgtcttccctaaaaataaaaactaaaccaaaatcaaaatatcagcaataatttttatatgctgttattaaaacagaagaagccctgaaataacatgtgctgtctccatattgtgccataaaatcataaatatagggctttgcaataaaagatgacataattctaccttttattgttttagtaaatttatgggtagagagtggaaaatctcctagagtgattgcatatcgctttaaatttagctcaatgatttcttccctttatttcccaggacctgtcctatctgatcagtctattagacatttctccagacactttgcaaagtgtgatctaacagcggtacactacttacttctaatgattctaattaagcttgtgaaaaagccaagattgaaaattaggaaacttgtcttaaaatctcattttggggaaatcacttaatttatctcaatgtttgtttrtctataaattaaggggcttgcagataaacgtcatagccacattctttttctcaaagtatggatggtgaaagctgcattggggatgtga

SEQ ID NO: 905484 - DNA, 496 bp, Homo sapiens
attgaaggttctatcatgacttcttggatcagtctctctggggtagccagccatattgtaaagayactcaagtagcccgtggagaggcctagtggagagaaacagaggcccctatccaatagccagcaaaccttgacacacatgtaagcaagccaccttgaaagcggaacttccatcttcaaccttggtttcaaatggctacagcaataatttcagcaaaggtctaatcaagtttccggtactttgcacgcactggataaattagaaattctgttaatattgtcattggacaatactggagattcagcagaaggtcctggtacagagagccctattctgtgcccacaaggacagtgtgtatattatctttgctttcccagggcccagtaggagttcaataaaatatgttttttgaatgccaattatatgccaagcactgttctaggcagtgaatgaatgaataaatgcctaaaaaactttccaactattccatcac

SEQ ID NO: 905485 - DNA, 612 bp, Homo sapiens
cttttcacaaggacctctccctgctttcctcagtccctccaagatgcacccatatcccactgcagggatgcaatttgcatacatagccagggacagtgtcatctggccacagccactcccagccacctgtgtcagcagagttccccgttcccatctaagacattcacctcatcaggcatctctcctggaccatttcattgacattttccttaactccctttatgtagtgtttatggagttcaggcctgcactggttgctctcttctttaactcgcttcaagccctgcaggcacatactgtcattttcagtttcctaaggaggggaaggccatctctccattaaatatcttgccccaggcctcacagtaaacagaggtctgaattgaaacaaggaccttcagtcttcatctttaacaggcgggctctttgtcttataccaaaagtgccccagtaggttccgtgtaattctgtggagtctttgaagacgtggctgccttctgggtagctgctgtgggtcccttaccctttgcactcatgggaaagagarctggatcagaatgtctgtggtgtcaaactcaggaaaagagctgccattagccagcgctagcattg

SEQ ID NO: 905486 - DNA, 577 bp, Homo sapiens
ctttggctccatatcagaatatctccataaaagatcacatatgcctatcaaaaaatcagggtrtggggagtgagaatgagagtgaatcctgttaaataaattaatagttgcttccacacttcagcattacatcacgcctgtaatcccagcactttgggaggccgaggtgggaggatcacaaggtcaggagatctagaccatcctggctaacatgatgaaacccggtctctactaaaaatacaaaaaattggccaggcgtggtggcgggcgcctgtagtcccagctacttgggaggctgaagtgggagaatggcgtgaacccaggaggcggagcttgcagtgagccaagacagcgccactgcactccagcctgggcaacaaagcgagaccccgtctcaaaaaaaaaaaaaaaagttggattctctgattagagtggttcatatatttaataccatgagaagaatgtcattagatttttaaatgtgaactatgcctgaaacagacaagagcttgatgttaaaaaaattttttaaatcttatttcttgtctatttctgatcctaaaagcgaaacgtaatt

SEQ ID NO: 905487 - DNA, 669 bp, Homo sapiens
ttttagtggtagtagctaacatgtgygatatggttttgttgtgtccccactcaactctcatcttgaattgtagcttccataattcctttgtgttgtgggagggacccggtgggagaaaattaaatcatgggagcagtttcccccatactgttctcttggtagttaataaatctcatgagatttgatgattttataaggggttttccctttcacttgtctctgattctctcttgtctgctgccatgtaagacatgccttttgccttccaccatgattgtgaggcctccttagccacatggaactgtgagtccattaaatattttttttctttataaattacccagtctcaagtatgtctttatcagcagcataaaaacagactaatacaatatgttatgcatttatctgtgcctggcttttttctgtatacctaattaatataaccttatgaggtcataggtattacaagtgtacagttttgctgaaatgattaggtacagatgtgtttaaaaaattagaggttttaagcattcagaaaaataatacagtgcatatattatagatatatatcacccccagaagggtctgggggcagcacaacacaatcaaacagattaacatttctatgaagaaacttgtaaatgttcacactacatgagaaaatattgc

SEQ ID NO: 905488 - DNA, 616 bp, Homo sapiens
tcctaagtaataaataagttctccttgtttaacatcacactagattgtaaagtccttataaaaaatagatttgcttattttatccataactgaatatatagggcctcgaggagttctgagtatctgagaggtactcaatacatatttgttgaataaaagcatggccaaaaaaggataaattattttgtgctctccctgatgatttcaataggatgtacttctgggtctatttattttgttgtttgtgtttcggtgggtacatgcttttggtgtgtttttactttatgtacctggctacctttgatcgagctaagcattacacataattaactgtataattaagcataattaagcactgcataattatttgtaggaataattagaggactgagatgaaggaaagccttcatccagagaggatttctgtttgtttcagtcaacgggggcattacttgtcctcagtcacattcaacaatttgaatacgttagattactgaagcctccagacttttaaaattgggctacaawtcttcaagaaagccaatcattttatttttttttattcacctttgtcccaaaggtgtatttattaggtagcaacttattgtgggacact

SEQ ID NO: 905489 - DNA, 617 bp, Homo sapiens
ctttctttttttcctcaaggaaggacttccagagttagcaaagagagacaaagaacaactcttacagccatgtgttaaagtgccttagggcacattacagagatragccattatctgtgtgtgtgtgtgtgtgtgtactgggggaaccagcccccaatatttcaatgtaggttctttctattttccctaagtgtcgactggtctgagacataaagagaaagagtacaaagagaggaattttacagctgggccgcctggggtgacatcacatatcggtaggactgtgatgtcccctgagctgtaaaaccagcaagtttttattagggatttcaaaagcggagggggtgtacgaacagggagtaggtcacaaggatcacatgcttcaaagggcaagaaaggagaacaaagttcatatgcttctgaggccagtaaagaccacaaggcaaagggcaaagcaagatcacaaggaaaaagggcaaaattagaattactgatgagggtctatgtttggctgtgcacgtactatcttgataaacatcttaaacaacagaaaacagggttcaagagcagagaaacggtctgacctcaaattcaccagggcgggatttttttcccca

SEQ ID NO: 905490 - DNA, 605 bp, Homo sapiens
tggtgttgacacaactcaaataagggagtttargagtaaactcaagtctatataggaatttactatttgataaagttgacatttgaatcaatcagaaaggctggaatggcaagttagagaagggagatgacagttgaaacaggagcaaatgacatacacacacatgcacacatatacccatagaaaatatatcaaatatatagagacttttgctttgcatggtgttggaatccatggctcaactagcatgattattttggtgacatccatggctcagttcttttgagagtgcaagaaattgctcaagtggccagagtaatataaatggcaaaatcctgttccaatagtttacctgatttcctctagatagtagaccctgaagattgtagactacgaaacctaataagctccatgaaggcagagacaaggtcagtcttattaaaagttgttctcctaaccaagtaggaactcgatatgttgaataatgaataaatgcttggaaattgtttgtctttctttccattaggtagcaggcctcaatctgtatttctttgtgtttttaagttgccttatgttatatctggctacattatcattagctgagg

SEQ ID NO: 905491 - DNA, 605 bp, Homo sapiens
tggtgttgacacaactcaaataagggagtttaagagtaaactcaagtctatataggaatttactatttgataaagttgacatttgaatcaatcagaaaggctggaatggcaagttagagaagggagatgacagttgaaacaggagcaaatgacatacacacacatgcacacatatacccatagaaaatatatcaaatatatagagacttttgctttgcatggtgttggaatccatggctcaactagcatgattattttggtgacatccatggctcagttcttttgagagtgcaagaaattgctcaagtggccagagtaatataaatggcaaaatcctgttccaatagtttacctgatttcctctagatagtagaccctgaagattgtagactacgaaacctaataagctccatgaaggcagagacaaggtcagtcttattaaaagttgttctcctaaccaagtaggaactcgatatgttgaataatgaataaatgcttggaaattstttgtctttctttccattaggtagcaggcctcaatctgtatttctttgtgtttttaagttgccttatgttatatctggctacattatcattagctgagg

SEQ ID NO: 905492 - DNA, 621 bp, Homo sapiens
attaataatcctgtattatattcaggaattttgctaaatgagtagattatagctgttcttgccaagggcatcgggcagagggtaactatgtgagatgatgtataygttcatctgttacattttagtaaccattttaatatgcatgtgtgtcttataatatcatgctatatatcataaacatacacaatgaaatttatttttttaaaaagagagagtaggaacagggattttagagacagaaattatagataaccctctcatggagctttgctgtaaagggaaggtgagaatgaagtgttagctggagatggatataggatcaggaaaattgctttgtttgtttttgtttttgaagattggagaaataatacatgttggaaaattaataggacacagtaaggaggaaaaacttatgatgcaaacgagaaagagaggagtagaagagtggtgtctgtgttcaggcttcagggcaggaatcaagaggagagattggccttagcttggaatattgttcatccataaaaagtgggagtggtagagtaggtaggcacagataagaatatgggaatttatgatacttatcttctgttgtttccattctttagtgaggctcagaagtga

SEQ ID NO: 905493 - DNA, 670 bp, Homo sapiens
tgatgcatgacccaaagctaatcagaaacacttaaccctttgaaaggaggyagcaattacttgcttatttctttttctttcctctttttaagatagaaaatacatttcttacttcatctacaatttttaagacaccttgtttctgttttgatgtacaattattttccttgctggataagttgaagcgtaatcattcatcgtggctccctcttaaagtgtagagtgtttgctttaaaagcatactcatttctcagagagacaatgcaggaacagtgactaattttgttacccattttttaatgtttttgtcctgtgtagatatttacttcatcaaacagttcttttattattagtgtccctggcccaatgataatggcttgggatattcatgtttccacaaatcaagacaagcttaaagccctcaatcatatttcctgtagaatgagatttaatttcatgtcagtttccttttctgatgaccagtgaggaagatgctctgggaaacagaatgctagtgacaggttcactttaatggagcgaaaacctgagcaatgtagaggagatggtggcattcctgggccaccacactcctcttcacccaagagaagtcaagtcataagggcttatgtttctttctagttcttacaaaaatagtactcttagattgtgg

SEQ ID NO: 905494 - DNA, 457 bp, Homo sapiens
ttataaacaggagttcccctggcacaaggtgtctcttgcctgctgccgtgtaagacatcagtttactcttccttcatcttcttccatgattatgagaccacctcagccatgtggaactatgattccattaaaccacttttctttataaattatttggtctcaggtatgtctttattagcagcatgataatggactaatacagggcctttcctaatctttgaattttctgtatacggtgactcttgaataaaatatttattataaaattagagtgtgtccttgtttctattgatccttgtcctcagttacttgacccattttctaaacaamtttaaacctcatcttccctgtcatctcctctgcaggaacacagctgcctcctccctgcaatttctgacactctcaggatgtgggttttcacattgtgtctctcacacagtaatacatggccgtgtcc

SEQ ID NO: 905495 - DNA, 457 bp, Homo sapiens
ttataaacaggagttcccctggcacaaggtgtctcttgcctgctgccgtgtaagacatcagtttactcttccttcatcttcttccatgattatgagaccacctcagccatgtggaactatgattccattaaaccacttttctttataaattatttggtctcaggtatgtctttattagcagcatgataatggactaatacagggcctttcctaatctttgaattttctgtatacggtgactcttgaataaaatatttattataaaattagagtgtgtccttgtttctattgatccttgtcctcagttacttgacccattttctaaacaactttaaacctcatcttccctgtcatctcctctgcaggaacacagctgcctcctccctgcaatttctgacactctcargatgtgggttttcacattgtgtctctcacacagtaatacatggccgtgtcc

SEQ ID NO: 905496 - DNA, 489 bp, Homo sapiens
aactctatttttaaaacctaatcacaaaacattatcacatttaaaaattaacaatcatttctcagtagcaacaaatccaacagtgttcaaatcctcctggttgccttatatgtttttattttacagtttgaatcaggatctaagtatggaccataaatttcagttgtttctacatctcttaagtcttttccactctatatatgaccactcctttctttctttcattttttcttttattattgtagttgttactgaagaaaatgggttgtttatctgggttttgcagattgcacccccatggtatgattaacatattcatttattctctatgtatttcctataatttaataattagatctagagtagtgaagagtagtgatctgtttcagatttaacattttaagctagaaaacttcttaggtcatctcatgtaactagcatcaagaggtacrtaagaatggtttgtctctatttatgttaccagctatg

SEQ ID NO: 905497 - DNA, 668 bp, Homo sapiens
acgtcacaagaagcccaaaccacaagcagagaccacattccctcagaaaccacttcaaagccccaactgagctcccagccaacagagcrtatcaactgccagccaggtgagtgagccaccttaaacatctagcccaactgaactgtcagatgtttgcagttgcaatcaacaccagagagcgacagtatgggagctcctaaattataactgtccagctaagcccaggtaaccaaacaaccctgttttaaaacataaaatttggggtagtttgttaaacaacagtaattaaaacaactggcatattcttccttattcaagacaaaagaccataagatataattccatttatatgaaatgtctagagtagacaaatctacaaagacaaaaattagattagtagctatctaggttagaagatagtggtgggaagtgatagataatgggcatgggcatttttatgaggtgataaaaatgtgctaaaattgattgtcacaatacttgcagagaattgtgaatatactaaaaatcattcaattgtacactacaaatatgtaaattttgacatgtgaatgttaattatatttcaggacagccattacttaaaaaaaattagactgaaaaaaattaggacttctgctttcagctccaacacatgaacagcttggaag

SEQ ID NO: 905498 - DNA, 669 bp, Homo sapiens
ttgttaagtacatgcacattaagaactgttatactttggagaattaacacctttgtcatttatgtaatacccttctttgtacmccacaattttcctcactctgaagttttctttgtctgagattaatatagctaccctagctttctttttgttagtgttaacgtggttttttatatattcctttacttttaatctgcctgtgtcttcatatttaaagctagactccatcttttaattggtaatatttagaccagtattaaaacataaagtgattgttcacagagttgtattaatatgtttcacagagttgtattaatatgtaccatgtttgtaagtgttatctgttcatttcacttgtttcttttttatcttccctctttttctgccttctctggtttcgattgagcattttatatgccttgattatatcttcatggcatattaattctacttctttttaatacttttatgtggttgcactagagtttgcaaagtacatttaaaacgaatctaaattcacttgcaagtaacatgtgaggggcagtgcaggcaccttgtaatagagcattcctagttcctccctccctacccttataatgttgttgtctttcatttcacttatccatatgctataatcacccaatacattattgttatttttgcttcgaa

SEQ ID NO: 905499 - DNA, 590 bp, Homo sapiens
aaatataagatctgaaactgtaaaactactcaaagaaarcatgggagaaaagctccatgctgttggtctgggcaatactttctggctatgaccccaaaagcacgggcaacaaaagcaaaaatagagaaatgggattatgtcaaactaaaaatattttcacagcaaagggaacaatcaacagagtgaaaagacagcatacagaataggagaaaacatttgtaaaccatacatcagagaaggagttaatatccaaagcatataaggaactcaaacaactcaatagcaagaaaacaaataatccaatttaaaaatggggaaaggacctgaaaagacacttctcaaaagaagacatacatggccaatagctatatttttaaatgctatactgaaatcattagggtaatgcaaattaaaactacaatgagatattacctcacacctgttagaatggctattaataaaaagacaaatgataagtgttggcaaggatgtggagaaaagagaacccttgcatgctgttggtgggaatgtaaattagtatagccattatgaaaaacagtatggaggtttctcaaaaaattaaaaggaat

SEQ ID NO: 905500 - DNA, 672 bp, Homo sapiens
acagggaaatcagcctggaaatctgttcaaaygccacttgaggctttggccaatttctaggctgtacacgaaaactgtcagaaactagcagctggaaatattgtggtactgaggaggcaaagataggaatttaaggcctgccaatgtcaaatggccttggtaaacatcccagactctcagctgagacatcagaaggtctataacctagaagtaaagacaaaatgaaataaaacagctccaaaatcaatcttcaacaggattaaggtgatctgcaagtactccttgctgccaaaagaggtcttaaccctcttagaaagaagataacaccatacagactctctataattttaatggaatcaatacacaaggtccagcgtccaactacaatgtatgaagtatgttaaaaaaaagaaaaaactagtgaccgaagccaagcagaaacagagctacagatgattcagatattagaattattaaacagggacattagaataactatattcaagaaaagagagaaaaacaatttcagcaggtactaataatctatattaaaaatcaaatggaatgtataggtctgaaaaatataacaagtgaaattaggaattcaacagaaagatttaatagaaacttagacagagaggaaattagagtttgtaaactagaatacaggcc

SEQ ID NO: 905501 - DNA, 632 bp, Homo sapiens
tgagggtctgtgtcttacacctacctgtatgctctacacctgagctcactgcaacctctgcctcccaggttcaagcaattctcctgtctcagcctcccgcgtagctgggactacaggcgcacgccmggctaatttttgtattgttagtagagatggggtttcaccatattagcccggctggtcttgaactcctgacctcaggtgatccacccacctcagcctcctaaagtgctgggattacaggcatgagtcaccgcgcccggccaagggtcagtgtttaataaggaataacttgaatggtttactaaaccaacagggaaacagacaaaagctgtgataatttcagggattcttgggatggggaatggtgccatgagctgcctgcctagtcccagaccactggtcctcatcactttcttccctcatcctcattttcaggctaagttaccattttattcaccatgcttttgtggtaagcctccacatcgttactgaaataagagtatacataaactagttccatttggggccatctgtgtgtgtgtataggggaggagggcataccccagagactccttgaagcccccggcagaggtttcctctccagctgggggagccctgcaagcacccgg

SEQ ID NO: 905502 - DNA, 502 bp, Homo sapiens
aataggaggccatagatcaaagagcaaatgcttcaggggtgttcaacctggctctcaccaaagggcctagatctaacacatgatttaaaccattattaaaggcagagactgctgtgtgtgaaggccactgccaaccccccaacccccactttttttttttatgactctgttgcccaggctggaatgcagtggcaagatctcagctcactgcaacctccacctcctgggttcaagtgattctcctgcctcagcctccctagtagctgggattacaggcacacaccgccatggccaactaatttttgtatttttagtagagatggggtttcaccatgttggccaggctggtctcaaactcctgacctcaagtgatccgcccacctcagcctcccaaagtgctgagattacaggcatgagccaccgcgcccggcctccaaccatgtttaaaccagactaattaaaatatcagactggkggggcccattaggaattcagatccaga

SEQ ID NO: 905503 - DNA, 580 bp, Homo sapiens
ttacccagtctcaggtatgtctttatcagcagcatgagaactgactataacaacaaggactaaatgaaacaaactaatcctaaccatcgctaatgagggaaggcagagcctacatctatttcacaggaggttttattaaaagcacctgtctgtgtggggcgctttgggctctggtttctgctctgccactaagcaccattgtgcaatattgtataagccataaactctctgaatcaaaatttcttggtcttttgattatctataatagactgggtattttaaataacatatctccaatccttcaaacaaccctgtaatgtagaaattattatttctactttatagatgaaacaatagaggctcaggtcagttaggtatttcaaggtcaagcagcttctaaatggcataaccagaacttgaacccattccctatagctccaaagtcagacaagtctttttcatttttttctccttcttcctgggagccatgaaagaggggtttgggataaatcattgctgtcttcatggtttcttacagmtctaaacatttatggtgtacgctactatcctcatttgacag

SEQ ID NO: 905504 - DNA, 643 bp, Homo sapiens
ataagtacctctgcataaagtttaaaygaatgcactcttaatcgttttccttcttgaccagtttcaccttctactcagttcagagtgtactttacttgttcatattatgccttcattttaaaattattttatatgttaaaatataattaattcacagataaagatatagacagagagaaagagatagtatatgaataggtataggtaggggtatgagaaagtgtatgtatagatacagatctggatacggtttaaacatacagattttattttatatacacaagattagatatgtatatgattttatattgatactattttattttaggtgcagcagctcaatgtagggggcacagaagcaaagtctgttaagccaaacaaaagaacctcatatcctcccttaggaacttactcattataaagacgttgaaaaatggcttaaattctctaactaaaataactccttcattgtggaattcttgtatttaaggacagtgtttgtaaaattccagcacatagtaagttcccagtgaattgttattattattacacttttcacaagtcacttattttttctgcaatgccagacattttaaatcacaataataaacaaatgcctgctgagttggatattgccatgatt

SEQ ID NO: 905505 - DNA, 591 bp, Homo sapiens
ttctatgaagccagcatcaccctaatacmaaaaccaggaaaggacataaccaaaaaagaaaacaacagaccaatatccctgatgaacatagatactaaaatccttaacaaaatacttgctagccaaatccaacaacatatcaaaaagataattcactatgatgaagttggagaaatggaaactctaaaaattataatagtaacaaacatttgtttactatttttaagtgcatcatatcaattataagacaaacattagcaacccattaaaggattgttattttaaaatatactttagcaaaaaatttgaagcttacacagattagaaaatatgctcaatgtcccctagctagtgattagcaaacctggtacttgaacccaaagtcctgagttcagggcccaactcttaaccaccctgctgtcaacatctgggctgggtgcaggggctcatgcctgtaatcccagcactttgggaggctcaggcgggcagatcacctgaggtcaggagttcaagagcagcctggccagcatggtgaaaccccgtctctactaaaaatacaaaaattagctggacgtggtggtgcacacctac

SEQ ID NO: 905506 - DNA, 775 bp, Homo sapiens
taataagggtaggcagaaccttaaaagagaaaagtaataacatatgtggaggctaaaaaataagataaatctatctggaaccaaaaactgaacagaaatacaaagtcataaaaggagctgaaaatggaggcctgttggactctgtttccgaaataggcagtggctaccaagagctaggcttctatgtgtcaacaaggaccaaaggaaaggcacacaagcgaggcaactggaatcaggagtgacagggatccagtgtctggggagaaacttttccatcccattggcagcaccattttcctttttcaactacaggctgcagttgttttccacacactcccatcttaaggcgcctgtaagtgccgtgttcataattcagtttctatttcccttcccataccgctacacttttattgaatgtacattttgcattcctgtgaaaaactcacagtgatttatactgatatcccagtggagcaggaacctcaaggtgacattataaggactcagggtccagctgctgaatgtagacaactgaaagagggagcaagaggagggaaaagagggaaggagagaaaagaaaataagaacaataaacaaaagtaaattaaatactgattcatctgcagcagaatttattcctgaaaaaatctrttttataaaggaaactgacaatggctttaaaataaatgtttcaggtatttaaagacaaaaatgagtaaaaccatgaacataatagattacaacacatagacttgggagaaaagaaataatgatg

SEQ ID NO: 905507 - DNA, 609 bp, Homo sapiens
catcatgtcttttctccactgtcctaagcctgcttctttttggagaagctgaagaaattgaaatgtatggatactttttgcactaagatctcaaaatacactagtccccctttgcctrtggaagatgtcttccaagactcccagtggatgcccaaaactaaatagtaccaaaccttatatagactatgttttttcctatatataactatgataaagtttaatttacaaattagatacagtaagagattaacaaaaactaggaataaaataggacagttataacaatacccagaacagtgtgccatttaaaacttatgaattgtttatctctgaaactttccatttagtattttgaaccacagttgcccatgggtaactgaaaccatggaaagctaaaccatggatgaggagggaactactgtagtcatttaccctttcccaatgagagaagtagaagctaatgtaatgatccctacttcatagatggagaagctgagaaattgagaagctaaggtcaaaaatcaaagtggaaactgagggtaaatagaggaagtacttaatatatacagaagaacacataggacacagttagacataaaatactataat

SEQ ID NO: 905508 - DNA, 609 bp, Homo sapiens
catcatgtcttttctccactgtcctaagcctgcttctttttggagaagctgaagaaattgaaatgtatggatactttttgcactaagatctcaaaatacactagtccccctttgcctgtggaagatgtcttccaagactcccagtggatgcccaaaactaaatagtaccaaaccttatatagactatgttttttcctatatataactatgataaagtttaatttacaaattagatacagtaagagattaacaaaaactaggaataaaataggacagttataacaatacccagaacagtgtgccatttaaaacttatgaattgtttatctctgaaactttccatttagtattttgaaccacagttgcccatgggtaactgaaaccatggaaagctaaaccatggatgaggagggaactactgtagtcatttaccctttcccaatgagagaagtagaagctaatgtaatgatccctacttcatagatggrgaagctgagaaattgagaagctaaggtcaaaaatcaaagtggaaactgagggtaaatagaggaagtacttaatatatacagaagaacacataggacacagttagacataaaatactataat

SEQ ID NO: 905509 - DNA, 612 bp, Homo sapiens
tgggttgagatcggctggggtcacactgatgcaggagctcaaaagaaattatttaggcagaggagtgagagtaagagagtcctcggcagagcttccctttaataaaaagcagcccccaaattatttcttttctaatgaaaagcagactgatacatcaagctgcagacaatagataagcgagctggaagcttgcacaggtgaatgctggcagctgtgccaatgtgaaagggctacctggaagccaggcatgttcaacatggaggcttcgtcttcctttttctttgtcagcatgtgtgtagtaaggaacagacaacatggtgcccaccaggtagaaagcccgtctacataataaaagattagggtgggggtggccagattcttgtgtgctatgcaaatggcacacctggtccaacccatctttcctcccctatgtaaatcagaaaccagttcctcaagctctctgtaaaaccccatgcatttcaccacaggactagcaacccatttttctctgggacccctctytttgcagcagagagggctgcttttcttttgtctattaagcttctgctcttaacttcactctggtgtgtctgtgtcctagttttcatggcc

SEQ ID NO: 905510 - DNA, 619 bp, Homo sapiens
tcccaaagtgctaggattatagacgtgagccacygcacccagccagagctaagatttttgtttgttttcaccattgctgcattttaagtgtctagacactttggattctcagtaaatatttatagaataaatgttgttgaaagagagtggtacaaattttggtaggaaaggcgtaagattgaatgtaaaagaaaaagataaatatctgaagaaaaacagtttgtgtgtgtgtgtgtgcgtgtctgtctgtctgtctttatatgtgttaaagacataatttcttggattgtgacttaggaatattgtcagcctcagggctctttcaacatgtgtgccagtcaactattgctgagccctttccatcacagcctgcagtgaagtcagttctccacactgtttacactaagaggtacagatcagatttccaattagcaagaatttgaaatagtcagttgaagctaagtttcatcttggtgctgggggaaacagctgcctgtttgtgctgaaaggcagttagagaacaattcgttattcaaacgtctcaaatctacttcctgaggacacaaatgaactactaattaaaggactctcttaacctaagcagaggatgggaatccag

SEQ ID NO: 905511 - DNA, 611 bp, Homo sapiens
tgaaagagaaatggttttttctctaggaaatttgcactaataactttttcccaccatcccccgaccagtaactttttgacaagaaaatgaacgtggcctattaatttatctaaagctatttcataaaattttcttccttcaatccagattattggaaatgccatgtgaataatgctgttttatgaaaatagaaaccatattttatggtcagggtacaactgacacgatttccaacaaaacctactcttctgcatttatggagcactttctttgaatcaaatcacatggaaataaatcttcttttcatttaattgaagacaaaagggagcagtaatgaagccactgagacattcttgttttattcccagacccctaaatcagaaaacccgatcgaatactgagcataatttcttcattgacatttgtctctaaatgtcaagttgttctggaaattttttcttgattttatgattccttgccttattcatttgagacaaactgagttagcatgatgttgtcggaggaatctccagtatgagaaaatgcataatggcctgaaggggraaaaaaaaggaaataattattgttactctgttgaaatcaagcatgag

SEQ ID NO: 905512 - DNA, 543 bp, Homo sapiens
atttcataaaaatcagaaatgtttaaatttgatttcgtgtttaaaaatgatttggtatttaaataaacactaaatcaacaccaaatagaacagttaaaaagagacaggccgggcgcagtggctcacacctctaattccagcactttgggaggctgaggcaggcagatcacgaggtaaggagatggagaccatcctggctaacatggtgaaaccccgtctctactaaaaatacaaaaccttagccgggcgtggtggtggtcacctgtagtcccagctacttgggaggctgaggcaggagaatggtgttcacccaggaggcggagcttgcagtgagccgagatcgtgcactgcactacagcctgggcgacagagcgagactccatctcaaaaaaaaaaaaaaaaaaaaaacagaagcaggctgtagtttgtatttctgtgtggtcagtggtgatatmccctttatcattttatgttgtctatttgattcttctctcttttcttcattagtctagctggtagtctattttgttaattttttcaaaa

SEQ ID NO: 905513 - DNA, 543 bp, Homo sapiens
atttcataaaaatcagaaatgtttaaatttgatttcgtgtttaaaaatgatttggtatttaaataaacactaaatcaacaccaaatagaacagttaaaaagagacaggccgggcgcagtggctcacacctctaattccagcactttgggaggctgaggcaggcagatcacgaggtaaggagatggagaccatcctggctaacatggtgaaaccccgtctctactaaaaatacaaaaccttagccgggcgtggtggtggtcacctgtagtcccagctacttgggaggctgaggcaggagaatggtgttcacccaggaggcggagcttgcagtgagccgagatcgtgcactgcactacagcctgggcgacagagcgagactccatctcaaaaaaaaaaaaaaaaaaaaaacagaagcaggctgtagtttgtatttctgtgtggtcagtggtgatatcccctttatcattttatgttgtctrtttgattcttctctcttttcttcattagtctagctggtagtctattttgttaattttttcaaaa

SEQ ID NO: 905514 - DNA, 706 bp, Homo sapiens
aaacaccatttgacccagcaatcccattactaggtatatacgcaaagtaatataaatcatcctattataaagatacatgcatgtgtatgttcaytgcagcactattcacaatagtgaagacatggaatcaacccaaatgcccatcaatgatagaatggataaagaaaatttggtacatatacaccgtggaatactatgcagccataaaaaggaatgagattatgtccttttcagggacatggatggagttggaagccgttatcctcagtcaactaacacaggaacagaaaaccaaataccacatgttctcacttataagtgggagctgaacaatgagaacacatggacacatgttgggaaaaacaacaatttctcatatcttagaggaagaagttgcttatttattttcactttgattctcagcctttcttatttacactgcgtgatcctgatgagctctcatagtctctcagcctctgttatattaatatttaagacaatctttctcattaggcaaatcacaatgtgtcactactcttttaaaacattttgatagccttttatggcctaaagaaaagtctcaaatcctcatcatgatatgtagaactcaccacataaaagttccactcgtttttgtttttttttaagtacagtattatttcaaatcaacgtaataatgagtcaaatgatctcctgaaactctctc

SEQ ID NO: 905515 - DNA, 729 bp, Homo sapiens
gcatagcatcatagcgtcttttttttttttttttttttttaagagtctcgctctgttgcccaggctggagtgcagtggtgctaacttggcttgctgcaatctccgcctcccaggttcaagcgattctccatcctcagtagcttggattacagtcacccaccaccatgcccggcttacttttgtgtgtgtgtatttttagtagagacagatttcaccatgttgaccaggctagcctcgaactcctgacctaaagtgaactgcttccttcagcctcctaaagtgctgggattacaggagtaagccaccatgcctggccaagcatagcatcttaatacttacctatattgcttctatttttttgtatctttcttatggttgtttcagctctttgttatgcaaaatgtaagactaaaaagtgatttaggttttctctcagctgtgctattttccagtttagaatgacattttggggaactgttctctgcttcggattatcacagttctcaaaagaggagtatgcatttgcttgctccaattcctcttcttctacactctcttaagcattcctcaaccagtctaatatctcatagttccccaaaactgctctgttcaagaccattagtaagatctttgatgttaatctgtggaccgtatctctgtccttattttacttgaagcccaacagcamataaaaaagttgttctcctctcctccctgctacactttcct

SEQ ID NO: 905516 - DNA, 729 bp, Homo sapiens
gcatagcatcatagcgtcttttttttttttttttttttttaagagtctcgctctgttgcccaggctggagtgcagtggtgctaacttggcttgctgcaatctccgcctcccaggttcaagcgattctccatcctcagtagcttggattacagtcacccaccaccatgcccggcttacttttgtgtgtgtgtatttttagtagagacagatttcaccatgttgaccaggctagcctcgaactcctgacctaaagtgaactgcttccttcagcctcctaaagtgctgggattacaggagtaagccaccatgcctggccaagcatagcatcttaatacttacctatattgcttctatttttttgtatctttcttatggttgtttcagctctttgttatgcaaaatgtaagactaaaaagtgatttaggttttctctcagctgtgctattttccagtttagaatgacattttggggaactgttctctgcttcggattatcacagttctcaaaagaggagtatgcatttgcttgctccaattcctcttcttctacactctcttaagcattcctcaaccagtctaatatctcatagttccccaaaactgctctgttcaagaccattagtaagatctttgatgttaatctgtggaccgtatctctgtccttattttacttgaagcccaacagcaartaaaaaagttgttctcctctcctccctgctacactttcct

SEQ ID NO: 905517 - DNA, 782 bp, Homo sapiens
tttcatagcaatgactataaaaaataatcagttataattttatttctatcttaaataatattgaaaggcacaaccttaaacagtagtttcccattgtgattcaayatataattaaaactaaataggctttgtaatatacttatcaatttttttattttaaaacattataattggaagatgtaataatagtccctaccttataaggttgttacatttcaatgaattagagttcatgcaaaacgcctaaaatcatgcctgaaacatagtaaacattcaataaattatatttattacacaattaacaatagaatttacagtttgcctgacaattacagttagagttgagtacggttttatgctccaccattaatctttttgacaaatgttcaactttcctatatttagattgagctcttaatattcatttaaaacatctagggttatgtctttcatttcagtaaatacttcctaaaccttcacaaatgtagtgactaatctataccccaaatattctctataaccatgatctggtagctaggccacataaataaaacataaaaattacagaaattcgccaattaaacatgccataactatatcttaatagcagatgcttttttcaataaaatgtatatagtgaataatattttaagacggagtttctccttaacgtttaaaaaatattcctccccaggtaaatgttacaccaaaggcaaattttgttaatgttcgattctcacacaggaaagtttataacaaatatcaactggcacaaaaactga

SEQ ID NO: 905518 - DNA, 715 bp, Homo sapiens
gagttacaattagcaattatcttggcaagtgtcatttacagacakaatttttacagtagaatgtattctgttgaaaacacaagctttcttcaaagtcactcagtatagctatcatgtgcaactgataatgagtaagttaactggtccattgttagctttctaataagcctttagatttaaaaacccataaatacaaggtactgattccacagtcctacaaataaaaataaagccattttcttatgacatcacataattaaatggttggatattgtaattcccaggcatcttcatgttctatggcagtaagaactggaaaattcaaagcaaccatgcatccattgtaacaaacagaaaaacaaaagagacgcattttaataatgatatatcaaaatgaattatcatttttatagtgagaaatagccaataatgtatgactgtattacaagagtattttaacagtagtcagcttaattcactgcatggaagacataagcagtttcactttcctactacttacttaaaattattatttgcctggaaagcactgatttactatcaccaacttacttgtatttcaaaggtccccaactcggcaagcttgtggccttatcttgacagccctgctatgttcatatgttcttttagttgacacaaaagagttcaacctgaaagcatacaaccagagtttattcctcacaaaatcagatttctg

SEQ ID NO: 905519 - DNA, 442 bp, Homo sapiens
aaagaaaagaattttcaacccagaatttcatatccagccaaactaagcttcataagtgaaggagaaataaaatcctttacagagaagcaaatgctgagagattttgtcaccacsatacctgccttacaagagctcctgacggaaacactaaacatggaaagaaacaaccagtaccagccactgcaaaaacatgccaaattgtaaagaccactgatgctgtgaagaaactgcatcaattaatggacaaaataaccagcaaacattgtaatgacaagatcaaattcacacataaccatattaaccttaaatgtaaatgggctaaatgccccaattaaaagacacagactggcaacttggataaagagtcaagacccatcagtgtattgtattgaggagacccatctcacatgcagagacacacataggctgaaataaagggatg

SEQ ID NO: 905520 - DNA, 503 bp, Homo sapiens
gcaaaactatcattctaaaggtaaggaaaagaagagacatttctagataaagagactgagaaaatttattgctagcgcatctgacttaaaaggaagtccttcatgctgataggaaatgacaccatatggtaaattgaatttatagaaaaataggccaggtgcagtagctcatgcctgtaatcccagcactttgggaggccgaggtgggtagatcacctgaaagtcaggagttcaagaccagcctggtcaacatggtgaaaccccacctgtaatgaaaatacaaaaaattagctgggcgtggtgacggacgcctgtaatcccagctactcaggaggctgaggcaggagaatcacttgaatctgggaggtggaggttgtagtgagccaagattgtgccactgcactmcagcctgggcgacaaaagcaaaactccatctcaaaaagaaaagaaaagaaaaagaaagagcataaagagcagtggaaatggtaaatatgtgggtcaat

SEQ ID NO: 905521 - DNA, 603 bp, Homo sapiens
taacagtatgcctaatatgtytatgtatttatgtgttgtgtacacaatgtttcactactgaaaatatataaaagagccctaattaattaacttaaagaaaactaaaagcacttaaatcaaatactttatcagaaaaaaggaaagactagtcaaatgctttttcgagtttacatgacttaagtaaaatctttaataaatgagctagctttaaaattattgctaaagtaatattataaatgtcttaagaattgccagcatacatttttgtttgcatttattgattaagcaattttatatttatccctgacaaatactataaggtgtcaaaatttggcataggggtcaactgtaaacccggccaaaaacagaatgatctttgcttgtctaataaataagacatcgatattggtttaatgaaaatagctacatcttgaattatttactaaaattaccatgacttctaatcttgtgactttaggcagtctagtgcacttgtacgaaggatgtttgtttagggaaaggactgttattgtctttgtttcaaagctaaactataaactaagttcctccctaagttattagattggtgcaaaagtaattgtg

SEQ ID NO: 905522 - DNA, 572 bp, Homo sapiens
atttccctaacatttaaggttgtttcatttccaagattttagtcattaattaaagaagccaggcaaattatagacttctttgatataagggttaagggtaagaggatgtcaacaacaatatacatgtccccagcttatgcagaagtgtagcatcatccaaaacaaagaacactgaaagaaggccagggtttactggtctgtttgtctgcatgattagttagttactttgcttattttgggaaactggctgacttttcgttacgttgaatgtgtcacagatgactagttatcagccaaggattagtgcttgacttttcacagtgaagagtcattatgagaaattagctgttctaccaataactatacttcccaaacctccccacccctctgcatttagctgggactctgtggttggtcctcactaatggagtatggacaagagtactatgtarcatttctgggccaggaagcataagcagtctacaagcaaaagtccacaagccttaagacaaagtaaagttgagaattaacttccctgactcatcatgtaggaagctgcttgctgactagaa

SEQ ID NO: 905523 - DNA, 599 bp, Homo sapiens
attgatatggtttgggtttgtgtccctgccctaatctcatgttgaatcrtaatccccaatattggaggagggggtctggtgggaggtgattggatcatgggggcggatttccctcttgctgttctcctgatagtgagttcttacgagatctggttgattaaaagtgtgtagcacttcccccttcactctcttcctcctgttctggccatgtaagatgtgcctgcttcctctttgccttccaccatgattgtaagtttcctgaggtctccccagtcatgctttctgtacagcctgaggaactgtgagccaattaaacctcttttctttataaattacccaatctcaggtagttctttacagcaatgtgaaaacagactaatacagatacaaacagacacttcccaaaagaagacatacaagcagccagcaaacgtgaaaaaatgctcattctcactaatcatgagagaaatgcaaatcaaaaccacagtgagatgccatctcacaccagtcagaatggcaattattaaaaagtcaaataacaacagatattggcaaggctgcagagaaaagggaatgcttatacactgttggtgggaatg

SEQ ID NO: 905524 - DNA, 591 bp, Homo sapiens
tcaatatttgaagcattcttccttgtatgacataaagatttttaaatgtggacaattataggaaaacatttcacaatgagtcttgttctgaagtgaacaacatttacatgataattataaagcaagggcaaaaaaagcagatatagaggagacaaaggaagagaattaaataactaggagtagtaaagcgaagggtgagtgttctaaaatatcttctagtagtaacattctatgtatgatataaaaagaaatccaggtttatgaacattattgtcatatgcagggatgactatggatgatttttaatatttctgtaatgttgaggaagagggagcctggaagtcctctatcatatcaagacaactaaaaacatttttaaaacatttaaatgaatatataacaacaagcatattctttagaaatactgaataggcagaagcagatccatctggtgtatgtgagttgaggataaagatatgccaggtatgggtttattacttctcattataagtttttttggatcatttgactgttgaatcatgcacatctattactttgakacaaattaaagaattataaaagaaagtaaag

SEQ ID NO: 905525 - DNA, 614 bp, Homo sapiens
gttgaaagaatatcaaagcacaaatacagatatattttatgagaaagttttatttggatgcgttatgtygagtatctatattactagaaacttaaacttacttaattcttaccagtaggtttcaatgacaattggttataggaagaagagaatatcacattaagaatctaaagtcctagatcccatactaaattctcctggaaattttgtatatgaccttggttaagaaaaactgtgcctgccctaaccagctcataggattttgtgaaaatgtgataaaattgtaaaagtattctgaactgtaaggagctagtcaaatttaacatatttttattgcctaatttttttctcgaaaaagtgttgatttttgtcagtgagcaccttttacttatgttggttttaactgacatgtgagtgtatttaagaatctgaaatctattttatgaatagctttaaagtgtcaaggccaggtgcaatggctcatgcctgtaatcctagcactttgggaggccaaggcaggctggatcacttgaggtcaggagttcaagaccagcccggccaatatggtgagaccccatttctactaaaaatacaaaaatgggccaggcctggta

SEQ ID NO: 905526 - DNA, 662 bp, Homo sapiens
taaatcacaagcaagcggtacagagctcaaattttyttttatgtgactctgactcaatccactaatcacttttcctttagttataaaaatacttaagccatcagtcactctttttcagttgggagcactaagatagaagctttccatagttgctttatgaactttggctttaatggtgcagatttacccatagagccaaactcttgaacatcggggacaaagagtgtttgattgaccacggtataatgagaagttggccacagcatctccaaatgcaagcaccaattccaggtacctgctagaagcacacggtctcacgatttttccgcataggtagagtgtggatctaaatgctttcttccatccttgcgagatgggagcaaaattactatttcgagtttcaccagcagtctggatttctatatttacaagcttgaataaatcgaacatctcattctgagaagttctctgcccttttctttctcttcctttttttccccctctagcaacagatgagcctttacattttttcagcatttactgatgcaaactgcggattttttttttttagaactatgctgtggctagcttcctcaggctataaatactccagcctggctgttttagagacataatttataaattttgtgaaaaccagggta

SEQ ID NO: 905527 - DNA, 549 bp, Homo sapiens
ttgaaatgtgatttccagtgttggaggtgggacgtattcgatcaaggggatggatctctcctgaatggcttagaccttggtgatgagtgagttcttgctcagttagtctatgagttatttcaggtgagatgtggttgtttaaaagagtctgggacctcaccttctctctcttgttccttgtctcgccatgatataccttctcccccttcaccttctgccatgattgtaagctccctgatgcctcatcagaagtagacactggcaccatgcttcctgtccagcctacagaattgtgagccaattaaacttcttttctttataaattacctagcctcaaatatttatttacagcgatgcaagaatggactaacacagcctccctcctgggggagaaagcctcaggaatggcatccasaattagagacttatttctcagatgggccagcctttctttccctctccctacctcacagcaccctatcttgaccaagaggaggaggctggggtcccactgtccagctagaagtggccctgtctcttactagctgg

SEQ ID NO: 905528 - DNA, 683 bp, Homo sapiens
atttgcctgtagaatctctttcctcttctagataagacaaccatatcatttccaagcaattcctcttttatttcttccttttcaatctttacatctcacatttctatattatcagcttttcctaggaactccacaaaaatgtgaaataccacctatcagattgccaaaaatgcaaaaatctagcaaatgtaagcattgatgaggacataaaagatcagtaagaaggctgttaatgggagggtaaattttaaaaatacgtttaagatgcataaataccaaattctagaatatggtgatatatagagagaggtcttcaaatctatataatgtttcaagtcctaaaaaagttctcagaatatagtaatatgaaattctaacgcatgacacaacatgaataaaacatctgaaaactgaaaaacatcgttgaaagaaattaaagaagacttgaataactggacaaacatctcatgttcatgaattagaagacttaatattaagatggcaatatcctccaaagtaatctacagattcaacacaatctccataaggatctcagacgaattctttgtaaaaattgtcaagttgattctaaaatccatayggaattgcaaggataaccagaatagctaaaacaataaagaaaaagaagaatacagtaggaagactcacactttatgatttca

SEQ ID NO: 905529 - DNA, 581 bp, Homo sapiens
aattttcctattagaagaacatcaaccatattggattagggctcatccataaatcacctcactttaacttaattggactgtaaaaatgctattttcaaatacagtcacattcataggtattcagggttgagacttcaacttatctttttttggttggggattgggggggcggatcacaattcaacccataagggctaataatgcatgtcacatagtaggtattcacatatttgaataaatggaaaaacagtctacatgtgtattccataatttaatagtacctactttgtgcttatgtttgtcaacatatagcggcatcctaaagttgttccctgcatttaatcatttgaatttaaagaagtctcctgctgtatcactgcctagttcccattctccctaaatagtctttcatttgtattttaaagcttttgatctgaagccgactgctattgtgactttgctgttataggcctgagccaagttcatttaatcagtattagaattggcccattaatctattttattacaaatcatggagaaaaaatcaracccaaaagaaacaaaaaatggtgttgtacagt

SEQ ID NO: 905530 - DNA, 680 bp, Homo sapiens
tagattgtgcagatttttgtcccattccgtgtggtgggttgtcaactctgctgactgttccttttgccgtgcaaaagctctttagtttaattaggtttcagctatttatctttgtttttatkgcatttgcttttgggttcttggtcatgaaatccttgcctaagccaatgtctagaagggttttccaatgttatcttctagactttttatagtttcatctcttaggtttaagtccttaatctatcttaagttgatttttgtataaggtaagggatgaagatcatttaattctccttcatgtggctagccaattatcccagcactatttgttgaaaaacgtgtcctttccccaactttatgtttttggttgctttgttgaagatcagttggcagtaactatttgaatttacttctgggttctctattctgttccattggtttatttgcctaattttataccaataccatgctgttttgataactgtggccttatagtatagtttgaaatgagatagtgcgatgcctccagatttgtttgttctttttgcttagacttgctttggctatgcaggctcctttttggttccatatgaattttagaattttttgttctaactctgtgaagaatgatgatggcgttttaagggaattgcattgaatctgtagattgcttttggcag

SEQ ID NO: 905531 - DNA, 497 bp, Homo sapiens
aatatccagccacaaactgcaccttcttagtcatatactgtttcacattgaagtaatgccaaaattccacaaattatttaaagacttatactacttgattagcagaaagaatcatcatttactagcttaggatatttattatataactcatcagagtctgaataatgcatttttcaatgtatttaaggtattagaatacataacgttaaaaaacaggtgtccaaacagtaatatgactcaaatgcacaaaacaatcaaaactgctcatagaccatactctaggactttgttccaaagacaacaatttccccaagttttcaagccactaattaaatttagatatttattcactaaaaattgaatttagcctttttaacaaggtcatttaagtagggttgctgaatacaataaaaatcttamacatttcaactagatttttattcctcataaggctttaaatatccctcagtctgtctactctcagcaacagacatttc

SEQ ID NO: 905532 - DNA, 595 bp, Homo sapiens
gccctgctggcagctgattagaytgtgcccacctagattgagggtgggtatgcgtctcccagcccactgactcaaatgttaatctcctttggcgacaccctcacagatacacccgggaacaatgctttgcatccttcagtcaatcaagttgatactcaatattaagcaccacatagacctacactctgccctcctcataaaaaaaaaaaagttcgctttttgtacacctcatttctgctgtcagtacacctatcccttccctcatctgccaagcccacctactgtgacaccccagctgcatgaaatcataggcaaatagactatccagtgcaaaatattttcagctggggaagcctggaattactaacctatctggtaagcagcatcttgttcaatctgaacaagatgactctctccccctaacctaaggaatttaacttctgtcagtacctttcatcagaggttccatcagactttcacccatagaagccctggtgcttattttaaagaagaaaatctgagcaaagacaaagatttcctcttttgctgtacatctcagtatgtatactgtaaatgcttctcttttttttctttt

SEQ ID NO: 905533 - DNA, 608 bp, Homo sapiens
ataatttaaagtatgcttaaatggatagcaattaaaactgatagcataaatccaaaaaagactattagtgatccctaatgatttatacaaagagcagtcatattattctattctttcaaagatgtacacaaaataaagccaagcattctcttttaagtcattatataaacctccgaatctgtttggtctgattgggagttcaccttgcctaaagatattgtattaaataggattagcaaaatgtgaaagaacatgaatatatatatatataaaaatatataaaacatatatataacatgaatatatgttatatgttaatatatatttaattctaattaatgtgtataactattttaagttctttttatttttaaagctcttaaaatcacagtaaattcaggttccccttttcttcatagttcttgaagtctatagaaagagatattctaaaatatcccaagcatttcaaacactgtataattataaaatactattctttaatagactctatttccgaccatgccctggcccatattatttgtcattggaaagacaagagggaggagaagasagggatatagatgactttttcgaaggtggcaaagaaa

SEQ ID NO: 905534 - DNA, 652 bp, Homo sapiens
atttaccagataccattggtagcctagggattaaaagaagctrgagagtgcaggcgtcgatcctgctacctcttgcatgctaagcaagcgctctaccgcttgagccaattcccccacaccgcatttgtcttttctgcctgttttgataaccgggacacaaatgtcgttccatgtcccacttaagtttccagcttttcaaacacctccgggaacttccctaccaaggcgaagcgaggaatgaagtttctgggagacagcctcagacctggaaggcagtgaccatcctctgctttttcaatctgagtcgggatcctgagaaagagagaaaagatctcattaggaaagcactagttctaatctgatttcactctcccattagatgaaagagaaggaagtaccgtccctaattagcagttacctcaaatgctctgttgaatgcatcactttttaagaacacaaacctggaaataagcccaagtatctttttatcgattgatccttcaagtaacttatctagtatctgtgttactaattgtttctccattcaggggagttgagatctgttgttacctattaatccttgatagatttaatttgcatttttgtactgattaatgttgttgaacatcttttagtgtgccttattggccat

SEQ ID NO: 905535 - DNA, 597 bp, Homo sapiens
tttttccatactcagttgcctgggaccatttgtttaaaaaactcattaaataacattttacctctgtcataaatcagttgaccacatacgttggtctgtttctggactatctgttctattccrtcaatctgggtaagtatccttgagacaataccacattattttgattaccttagctttataataagtcttgacatcacctggtgtaagtcctctaactttgtttttcttttcctaattatttaggttactctaggtcctacagaataagcttgtcaatttctgtaaaaacaaacaaacaaaaagaaaagaaaacaaaacaaacaaaacaaaaatctcctgctgggatatttgttgggattgtagtaaatctatagatcaactcagagggaaaaaaatgatatcttaataatattacctttttcaatctgtaaatatgtcaaacaacaccaattagtcaagctttcctgagtttttctcagccatcttttgtagattcctaggtacaagtcctgtgcacactgacaagtttatctctaaatatttcatttgttttaaacctattgaaagtggtaatttaattttccatttttttga

SEQ ID NO: 905536 - DNA, 593 bp, Homo sapiens
gcttaggattgctttggctattcaggctcttttttggttccaaatgaattttagaatgacttttttctaattatgtgaaaaaatgtcataggaagtttgatagaaatagcattgaatctgtaaatagctttgaggagtacggccagtttaacaatattgattcttcctacccatgaatatggaatttttttgagttgtttgtgttttctttgatttttttcagcagtgctttataattctcattgtagaggtctttcaactccttagttagctgtattcagaggcattttaaggcattgaagggacatacatcaaaatagtaagagccatctacaacaaacccatagccatcatcatactgaatgggcaaaagatagaagcattccccttgagaaccataacaagacaatgatgcccactctcaccactcctattcaacataatactggaagtcctagccagagcaatcagaaaaaagaawgaaagaaaaggtatccaaataggaagcgaggaagtcaaaatatctctcttcacaggcaatataatactatactagaaaaccccatagtgtgtgcccaagggctcctagatct

SEQ ID NO: 905537 - DNA, 593 bp, Homo sapiens
gcttaggattgctttggctattcaggctcttttttggttccaaatgaattttagaatgacttttttctaattatgtgaaaaaatgtcataggaagtttgatagaaatagcattgaatctgtaaatagctttgaggagtacggccagtttaacaatattgattcttcctacccatgaatatggaatttttttgagttgtttgtgttttctttgatttttttcagcagtgctttataattctcattgtagaggtctttcaactccttagttagctgtattcagaggcattttaaggcattgaagggacatacatcaaaatagtaagagccatctacaacaaacccatagccatcatcatactgaatgggcaaaagatagaagcattccccttgagaaccataacaagacaatgatgcccactctcaccactcctattcaacataatactggaagtcctagccagagcaatcagaaaaaagaaagaaagaaaaggtatccaaataggaagcgaggaagtcaaaatatctctcttcacaggcaatataatactatactagaaaaccccatagtstgtgcccaagggctcctagatct

SEQ ID NO: 905538 - DNA, 593 bp, Homo sapiens
gcttaggattgctttggctattcaggctcttttttggttccaaatgaattttagaatgacttttttctaattatgtgaaaaaatgtcataggaagtttgatagaaatagcattgaatctgtaaatagctttgaggagtacggccagtttaacaatattgattcttcctacccatgaatatggaatttttttgagttgtttgtgttttctttgatttttttcagcagtgctttataattctcattgtagaggtctttcaactccttagttagctgtattcagaggcattttaaggcattgaagggacatacatcaaaatagtaagagccatctacaacaaacccatagccatcatcatactgaatgggcaaaagatagaagcattccccttgagaaccataacaagacaatgatgcccactctcaccactcctattcaacataatactggaagtcctagccagagcaatcagaaaaaagaaagaaagaaaaggtatccaaataggaagcgaggaagtcaaaatatctctcttcacaggcaatataatactatactagaaaaccccatagtgtrtgcccaagggctcctagatct

SEQ ID NO: 905539 - DNA, 605 bp, Homo sapiens
ttcaggcgtggagaacgtatacacaaataaggataatgggaagtgcacaatctgtttcatggaccaaaaaaaatggccatcagaggcaggggaccacacagataactcttttcgcagtctctcaaaagggaatattattgggaatgatagtaagaggagttaaaaaaaaaaaaaagacacaatatgccccagtctgagggagagattacgaagaagagacagattcaagaaaatattattttcgtaagaatcacattcccattattttttcttattttaatatgttaaaaatatgaaaggactgacatatgctatatgtattttatacacatcaatattatatacatcaacatacacaataaaatattagaaaagaaaaactagaaaaagtatgaatttcatcatgtaactaaatgtgctttaaactactttatgaataactttcaaatattcaagtatttggcattttgttgcaaaagtgaatgtttacattattcataaaatatgtggcataataaataactttttaaaggctaacactatgctcaactttcagacaaaatatctgacactaaaactttayaaaactaatatatatcgttttt

SEQ ID NO: 905540 - DNA, 618 bp, Homo sapiens
acaaaagcatgcagcaacattttgtrtcaggttcacagcttccaaggcaatagtgtgaaagtcacaatacaggtatctttgaaatgtttcattgactttatgctaactttattaatttaggtctttatttttaaatatatttaagttgtcaccttatttcaagttttgaaagctctgctatctcataagaacaaaataatgaaattcaatccagactctttcaggttctttataaaggttgtggtatttattcgtagaacaattaccagcatatgtcataaacaaagtagcataacaaatgttaatattaaaaactaaaaataaaaggttatgaaaaaaagatctttcctttttcagtgacccttgacaatgaccttaaacttgtatcttatcttagaattttgcaatatagtattttaatatatgaggttaaaattgtttaattaaattacttttaaggaaaaaaatactgtgctaaatgtcacttgttaatgaaaggaatactaaacataaaaataatcgaagattattggtattatgcctacagtattttaagccttcttaaggtacctttatattttcaagggtattaatgtaccatttctttttacactttgg

SEQ ID NO: 905541 - DNA, 556 bp, Homo sapiens
gggacctggtgggaggtaattgaatcatggggcaagtctttcctgtgctgatatcatgacagtgaataagtctcacaaggtctgatggttttaaaaggaggaattcccctgcacaagctcctctctgcctrctgtcattcatgtaatatgtggcttgctcctcctggccttctgccatgctcatgaggcttcccagccatgtggaactgtaagtccaattaaacctctttctttgtaaattacccagtcttgggtatgtctttatcaacagtgtgaaaatgaactgatacagtcaattggtaccagtagagtcaggtgctgctgaaaagatacccaaaaatgtggaagtgactttggaactgggtaataggcagaagttggaacagtttggaggcctagaagagggcaggaaaatgtgggaaagtttggaacttcctagagacttgttgaatgactttgaccaaaagcctgatactgatataaataataaggtccaggccaggtggtctcagaagttgatgaggaacttgttgggaactggagcaaaggtgactct

SEQ ID NO: 905542 - DNA, 543 bp, Homo sapiens
gcataaactgtttcaattccaagtagttatgtaatatatcatcacactttgcggccataggtaatatatgtgtgttctgccaaaatacctatacagttgcccgagttgctgggaatgtcctagtttctgctgcaagagaacagatcgactatatataacatgaagaaattacttctgggataattagaatgtcaaagagcctccattacagaagaaaacctcactttatgatttattcctgcattctattatcaaacatcctttgtaaaagtcacagcctgggtttttactatctaatattttaatgctgttatgtgtgggttatatatctctttttgttgggaaggaaagaagatcctcatctatctcagctttctagcacatgttcattctctcctggaggttcctgcatggaaaatgcacattgtaaatcctcagagttcaaagcactcaaagaacaaaggcaacaactgaaagcatgacctggctgccctgctaatcccyactacccactgtgtctccttgcttgccccacccaaaaga

SEQ ID NO: 905543 - DNA, 543 bp, Homo sapiens
gcataaactgtttcaattccaagtagttatgtaatatatcatcacactttgcggccataggtaatatatgtgtgttctgccaaaatacctatacagttgcccgagttgctgggaatgtcctagtttctgctgcaagagaacagatcgactatatataacatgaagaaattacttctgggataattagaatgtcaaagagcctccattacagaagaaaacctcactttatgatttattcctgcattctattatcaaacatcctttgtaaaagtcacagcctgggtttttactatctaatattttaatgctgttatgtgtgggttatatatctctttttgttgggaaggaaagaagatcctcatctatctcagctttctagcacatgttcattctctcctggaggttcctgcatggaaaatgcacattgtaaatcctcagagttcaaagcactcaaagaacaaaggcaacaactgaaagcatgacctggctgccctgctaatccccmctacccactgtgtctccttgcttgccccacccaaaaga

SEQ ID NO: 905544 - DNA, 602 bp, Homo sapiens
ttacaacagaaataagttattatttttattargttaagctggaagaagcctgcgacttatagtgggaaaaactcctttactcgtactctaggaatgaattttaatggagccaagacaagcattgtgttcctaaaagaagattcatttaatggtgaaaccaagttaaaggaatacatatttataaaatgttatgtttcagacttttgaatgtgtacaaatatattttgcctttttttcccctaattctacaacatggctattctttggcttaattaaatatcttaaacaaatgtgtgcttggtttaaacaataagtcacaaagctatttgccagcattattttcaaattgcatgtagaatctctccatctttatgttaaaactcattccaatgcacaggcaggacaagattgatgtaattatttaaacagaaacaaagagggttctgttcatagttgcaaatcatattggtgcaaatccactgccctggcactgagtgatgagtgctgtggagataagaggttgtaagcaccagaaagagtcatttatggagtaattccagggaactatagcagtacttcagatgcacagcattccttaaaga

SEQ ID NO: 905545 - DNA, 532 bp, Homo sapiens
tctctgagttttgtgttatggtcaaggtatcccactctgtgtgaaagccctaaccccaaatattactatctttggagacaggacctttaagaggtgattaaagttacacraagtcctaagggtgcagccctgctccgctccaatagaattaatgtgcttgttctttttttttttttttctttttgagatggagtttcactcttgttgctcaggctggggtgcagtgactcgatcttggctcactgcaacctctgcctcctgggttcaagcgactctcctgcctcagcctcccgggtagctaggattacaggcatgcgccaccacactcagctaattttgtatttttcgtagagctggggtttctccatgttggtcaggctggtctcgaactcccaacctcaggtgatccgcccacttcaccctcccaaagtgctaggattacaggcgtgagccaccatgcctggcctaatgtgcttgttcttataagagacactagagagctccctttgtctttctccctgccctgtgaaga

SEQ ID NO: 905546 - DNA, 654 bp, Homo sapiens
aaaagaaaataatttcaagaatttgaatattatataatgcatttggggaaatatatttagagttgctcaaataattgttgttgatggtgaggttagagtcatgtaaccctgaattaacatattctacatattatataaactgtaccaagggcaattttgcttcaggacaagttaaaggcaatgatagtcttatgtatatattttgatatctccatagatagttggaaagaatatttatcttaacatgaatttggaagttttgaccagtgtgagtcttgacactttattttattttattattattatttttttgagacagaatctcactctgtcgccaggctggagtgcagtggctgtgatcttggctcactgcaaccttcatctcctgggttcaagcaattctcctgcctcagcctcccaagtagctgggattacaggtgcatgctaccacacccagctaatttttgtatttttagtaaaaacggggtttcaccatgttggccaggctggtctcgaactcctaakctcaagtgatcctcctgcctcggcctcccaaaatgctgggattacaggtgtgagccactgcacccggccaacactttaattcttgaacagatattttggggaggatcaaaatcatggaaaattttggta

SEQ ID NO: 905547 - DNA, 528 bp, Homo sapiens
tgacaaaaaatatattttaaataatatgacaatgaaaaaaaaatccagaagaggtatcagcctttactgtagaggatttggtttgacatctatggaaacagtgccatgctttcattttaggtaattgggctattaaaatcatcaggccgagtgtgggggctcactcctgtaaccccagcactttgggagactgaggcaggtagatcacttgaggccaggagctcgagaccagcctggacaatacggtgaaaccagtctctagcaaaaatcagccgggaggggtgacatacacctgtaataccagctactcaggaggctgaggtgggagagtcacttgagctggggaggcggaggctgcagtgagccgagaccgcaccactgcactccagcctgggcgacagagagagactgtctcaaaaaaaaaaaaaaaaaawaacaacaaaaaaagtctctcttgctttagtccataagacaagtgaaattttaaatattttaaatatttcctgtaagttattgactccctaacga

SEQ ID NO: 905548 - DNA, 528 bp, Homo sapiens
tgacaaaaaatatattttaaataatatgacaatgaaaaaaaaatccagaagaggtatcagcctttactgtagaggatttggtttgacatctatggaaacagtgccatgctttcattttaggtaattgggctattaaaatcatcaggccgagtgtgggggctcactcctgtaaccccagcactttgggagactgaggcaggtagatcacttgaggccaggagctcgagaccagcctggacaatacggtgaaaccagtctctagcaaaaatcagccgggaggggtgacatacacctgtaataccagctactcaggaggctgaggtgggagagtcacttgagctggggaggcggaggctgcagtgagccgagaccgcaccactgcactccagcctgggcgacagagagagactgtctcaaaaaaaaaaaaaaaaaataacaacaaaaaaagtctctcttgctttagtccataagacaagtgaaattttaaatattttaaatatytcctgtaagttattgactccctaacga

SEQ ID NO: 905549 - DNA, 559 bp, Homo sapiens
cactgcaccaaagggaactttatattttgatcaaagatcaagtcgcgttgcatgttgcttttcttatataaaggaatgtaagggatagaacaacttctcttaatcacatctctgaagagcctgaaaataaaagtatttaaaagataatttgacattcacacgtatatattgttcttcctttccaaacagctcaggttataagatttcgctcatagaaaagtcacctttgtagcctgtaaagagatcttcattggtctgaggagcgtagtgaagcatgttcattggctaaaaccaataagcatgtcataaagggttacatatatggtaggcagaataaaaaaatttagtcattaatgtttagaggacacaggagatgacacaatatttattagggtgagaaattgagcagtctcttctgtgttactaatacataatttatgaataatcaaatatttgcttgaggggacactcagcagcagaccctaagcrgactccttctatcccttgtctgttggagaggagatgctgcctatctggtggtgagagaattcagccttgc

SEQ ID NO: 905550 - DNA, 643 bp, Homo sapiens
ttgatttaattttcaaatacttaggttatctctttgggttaaatgtggataattcatctattaaaaagtaggagtttatgatctattgtccctcactgttcaaggaccacttcaatgttccctgaccactattctgttatggaaaattaaatgaaaccctttttacccattagcaaaggaatgcatattatatgcaaagagcattatctctggactatttttaatatagattttgaactatgatatctcatgactatgcttacttatatttatattagccttgcttttcctgtaacatgcagttttgtaaaaatgtttctcagagttccatttctctttttgtcaggaatgcatttcattgcaaataacagaaagccaactaacatgtatagatttatttttctcacttaataagaaatctgtcagtaacagaccagagctagtgtacgagcttcatgaggctatcagaaaccagagactttttaatatttggagtgccatttctagcatatgtctttccackcccagcccaagttgcaagatgattgctgtacttatttatatgctcctagcaagaaaaaataaaaaaaaggcaaagggggcaaaagaggaaggcctaacaagcctctttcttctaagaagg

SEQ ID NO: 905551 - DNA, 624 bp, Homo sapiens
tgcataatattttatatgtcaaaatactgtatttaaaagaaaaaaatttatgcatatttgttcacatttagaacagaacagaaatttcttaagcaatttacttaaaaaaattcatctctacmcaattttatgtggcatgaaatataatttctactttgcagttgagaatcaaaggcttaaacagataagttgaagtcttatatacaagtcttatgagagcagaagctggtatttcaacccaggtctgatatcaaagtcctgggtcttaattgcaaagttgcaatgttgtcaaactctgttgaataaaataaattatttcaatgcaaatatttcagttaatgaagagggagggggaagttgaggaggacatgaggaataatataaatgactctttttcagagtatgatttgactgacaaagtgagtccattaggtaagagttagatgagtcttaggtgtctgagatttcttaacataaacagcaaaaatgagtaactatgagagaaatgtagtaatgctcaggaaaaaaagataactttttaccagcaaggaaaagtacttcattcagttccctcgagatcatcaggagagaactaagtaggttccagatagagtgattggaatt

SEQ ID NO: 905552 - DNA, 671 bp, Homo sapiens
tccagtcactttcaagtacaccattcaaatgtaggtttggacttttcacatagtcccatatttcttggaggctttgtttgttccttttcattcttttttctctaatcttgtcttcatacttgatttcattaagttggtcttcaacctgatatgctttcttctgcttgatcgatttggctattgatacttgggtatgcatcacaaagttctcatgctatgtttttcagctccatcaggtcatttatgttcttctataatctgattattctagttagcaatttatctaaccttttttcaaggtttttagcttccctgcattgggttagaacacgctcctttagcttggaggagttctgaatttgtcaaactcattctctgtccagttttttttcccttgctggtgaggagttgtgatcctttggaggagaagaggcgttctggtttttggaattttcagcctttttgcactggtttctcctcatcttcatggatttatctatctttggtctttgatgttggtgaccttcagatgaaggataatggatatgacgtttctgaggggatgtcttttttgttgatcttgawgttattcctttctgtttgttagttttccttctattagtcaggcccctctgctgcaggtatgctagagtttcctggaggtccactcc

SEQ ID NO: 905553 - DNA, 681 bp, Homo sapiens
ggtttattttccaaaacatttaaacaatttctgaacaaaaatcgttaagaattggataaagaaaccaacaggaaagaatagaagccataagcagatgtttcatagtagacaaaacattaatawctagtaaatatatgaaagttatttaacatatttaatagtcaagaaaatcaaagataataagataatgtgaaactccacaggattaggaaaacgtgaaatgtccaattccatttttattgaatgttgtagcaacaggaatgcttatctactactaatgtaaggataaattaacacaatgactttgctacctaacaaagttgggagatgtgcgtacctaaaacctagcaattttactgcaagattataattgagacaattttcaaatgtgcaccaggagacattaaagaacaatcataatccattttttggaattacaaaaaaaaatgaaagcaacctaaatgtccagatgcaggagaatgattaagtaaattatggtatattacaatatgatatgaagtacagcaatatacattaacaggtcttagtatcagaaaaatgatgctcaatgaatgaagtaactaagagaataaagatcagtattattccatttctctaagtgccataaaaacataaacaaaatactacttggggatacacacacagtggtaaatatacaaa

SEQ ID NO: 905554 - DNA, 650 bp, Homo sapiens
cctctccaagctcctgacttyttggcattatccaccgggttctccatccaagacacacctgccccttttcgggtgctgaatgttacataccccaagccccatacccaaagccctcaggtcccattgtctgcctgtgttggggatggctgggtgtggagggaggcgggtgagtaggggaccaacgcgtggcacctgcaggggaagaattctcaaggctctggggcaaacaatggagaagaaggggcagaccagaaacttcgcctccatcccaccctgctgcccttcgtcaggagcaagctctgggagcgggaatctgcgcagctggctcagaacgcggccgtagccccatgtgcccaaaaggagacattgtgcttggcgagtgtgggaagtgtccctcctgggtgcaaggaaggctttctgacaccagttcgcaggcaccctggaggaataaagcgctggcgcagtgaggagggcctgagggtgcggagtgcagggtgcagggtgcaggtgtgaggacggaagctgacaaccccgccgagggccctttgaatcccagggatggggaaaccacggcgctcctggctcctggctcgggaaagaccccggcaggcactgacccgtctgtgggctgcggagcccggacgggcccc

SEQ ID NO: 905555 - DNA, 650 bp, Homo sapiens
cctctccaagctcctgacttcttggcattatccaccgggttctccatccaagacacacctgccccttttcgggtgctgaatgttacataccccaagccccatacccaaagccctcaggtcccattgtctgcctgtgttggggatggctgggtgtggagggaggcgggtgagtaggggaccaacgcgtggcacctgcaggggaagaattctcaaggctctggggcaaacaatggagaagaaggggcagaccagaaacttcgcctccatcccaccctgctgcccttcgtcaggagcaagctctgggagcgggaatctgcgcagctggctcagaacgcggccgtagccccatgtgcccaaaaggagacattgtgcttggcgagtgtgggaagtgtccctcctgggtgcaaggaaggctttctgacaccagttcgcaggcaccctggaggaataaagcgctggcgcagtgaggagggcctgagggtgcggagtgcagggtgcagggtgcaggtgtgaggacggaagctgacaaccccgccgagggccctttgaatcccagggatggggaaaccayggcgctcctggctcctggctcgggaaagaccccggcaggcactgacccgtctgtgggctgcggagcccggacgggcccc

SEQ ID NO: 905556 - DNA, 696 bp, Homo sapiens
agccaggtagtggttatagtgggttttgggtgagacccagttctgtgctggcttcaggtcagtctgacacagcagagacccagtggtagtggctcaggggtgcttgtgtcactccttccccagctccaggcagctcagcacagacagggagagactctacttgtttgggagaaagtaagggaagagaacaaaagtctatccttggtaatccagagaattcttctgtatcttctccaagaccaccaacgtggtatctctgcaagtctgaaagaaccatagcattactaggcttggggtaccctctaatgcccatatgactgcagtaaccaaaaacttagatcataacacccaagtccgtttgaatacctagaaaggctttccaagaaggatgggtacaaacaagcccagattgtgatgactacagtaaatacctaactcttcaatgccagacactgatgaacatccataagcattaagactatctaggaaaacatgacatcaccaaactaaccaaataaggcaccagagaccaatcccggagagacaggtatataagacctttcagacagagaatacaaaaataggttttgaggaaattcaaagaaaatcaagataacatggagaaggaattcagaattctattggataaatttaacaaagatrttgaaataattaacaagaatcaggcagaaaccc

SEQ ID NO: 905557 - DNA, 646 bp, Homo sapiens
taagaaccttgataaaaagttagcgagaggagccactaactagaataaccagtttagagaggaacataaatgacctgacggagctaagaaacacagcatgagaacttcatgaagcatacacaagtatcaacagccaaattgacaaagtagaagaaaaaatatcagagtttgcagaccaccttgctgaaataaggcatgcagacaagattagagaaaaaaagactgaacaagaatgaacaagaatgaacaaagcctccgagaaatatgggactacataaaaaggccaaacctacaattgactggaatacctgaaggaaagggggagaatggaaacaagctggaaaacacacttcaggatatcatccaggagaacttccccagtttagcaagacaagctaacattcaaattcaggaaataccaagaacaccactaagatattccacaagaagatcaaccccaagaaacataatcatcagattctccaaggttgaaatgacaaaaaaatgttaagsgtagtcagacagaaaggccaggtcacctacaaaataagtccatcagactaacagtggacctctcagcagaaatcctacaaaccagatgacaatggaggccaatattcaacattcttaaagaaaagaattttga

SEQ ID NO: 905558 - DNA, 595 bp, Homo sapiens
ttaatgtgctaaaaaatggattttaagtggagaatttgcttgccaatataactttcagattagttrattaaaataagagacatacactgtccacacgtggaataattaaatcagttaacattgtttttctttgtttgtaaaagaagaatcttattggattcttacacaaagtgtggcaagcataaaatttgttacaaaatatatcttataagttatatttaaaagagagttagtggtaagtaaggattctaaatttaattttctatgatacagcacgttacatttttatacagactcctatttttaagtgtaaatgttaaatgttgaaaaataataaaatgtactctgttgattagacatttgaagtgtttatttttcatactgatattacaatttggagaaaatttttactgttgtataatttttgaagttggtgaagttcagtctacagtttttatttttagtcacctcactgtaggcaactctttggtcattttctctgaaaaaattttggagatgaggttacgatggctttcagattaaaacatttcctattattttgcatgcaaacttgtttactgtgttcaaacagtgg

SEQ ID NO: 905559 - DNA, 615 bp, Homo sapiens
agtgttttccaacttggttccattctctccgtcactttcaggtacaccaatcagacgtagatttggtcttttcacatagtccttatttcttggaggctttgttcatttctttttactcttttttctctaaacttctcacttcatttcattcatttgatctttgatcactgatactctttcttccacttgatcaaatcagctactgaagcttgtgcatgtgtcacgtagttctcttgccatggttttcagctccatcaggtcattaaggtcttctctatgctgtttattctagttagccattcgtctaatcttttttcaaggtttttagcttctttgtgatgggttggaacatcctcctttagttcgaagaagtttattactacccatcgtctgaagtcttctctcaactcgtgaaagtcattctccatccaactttgttccgttgctggcaaggagctgctttcctttggaggagaagaggcactctggyttttagaattttcagcttttctgctctggtttctccccatctttgtgggttttatctacctttggtctttgatgatggtgacgtacagatggggctttggtgtggatgtcctttctgtttgttag

SEQ ID NO: 905560 - DNA, 541 bp, Homo sapiens
cccagctactcgagagactgaggcaggagaatggcatgaacccaggaggcggagcttgtagtgagccaagatcgcaccattgcactccagcctgggccacagagcaagactctgtcccaaataaataaataaataaataaataaatcgtgaagtttcaaataagtacacggcaacacagcactaatgcactcccagcttcccttggatctaatgatggtggccacctaacttattctgagctcttggatgcagaaaggagataagcaacttatttggatcatatgcaaaagagaaaattacttgtcctctatttcttctttcttttgcaagctgcaatattgacacagtaggaatgattctatttgaccatttaaatgagtaaaacaccctaagggacagtagaattatatgatcaaataaactgggttttagataacctcttagactagaggcagttagtcactgtgatctgtccatttatctgcagrgttcctttcttgaaaattttgtaaaaaagtttctctctcttctactcataac

SEQ ID NO: 905561 - DNA, 649 bp, Homo sapiens
agaaatgtccctttgtacattctaccaaaagagtgttttcaacctggtgaatcaaaacacagtttccattctttgagaaaaatcagtacaacacaagtaatcttcaaaaatagyttgtatctattttttaatatgggatattcaggttttcactctaggcttaaataagttcagaaatgtcacgttgtagattctacaaagtagtggttccaaactgttgaattaaaacactggttccattctgtgagatgaatccacagatcacaaagcattttcacagacagtttgtttctaatttttattgtgggatattcggtttttcaggacaggctttactgggctcagaaatgtccttttgtagattctacaaaacgagtgtttccaacctgaccaatcaaaactcctgttccattctgtgagatgaatacacttatcacaaagcattttcacagatatcttgtttctagttttaatcgttggatattcaggttttccataaagacctcattgggctgaaaagtgaccctacggagattctacaaaaaagtgtttccaatctggtgaatcaaaacacaggttccattctgtgatatgaatcaacacatcaaaaagcattttcacagatttcacaattgtttctagttgttat

SEQ ID NO: 905562 - DNA, 628 bp, Homo sapiens
aaatcaaaagtagaaataaaacatttagtaagtttctaatataagacaggtatgtttctagggaattttcatattaaaatatataaatgaattttttcataatcatctaaggtacaaaatatctgcatcttagagatttaaaagaaaaatttaaatctcagaaaatgtaattttctgttcaaacagctgctaaaagtccatgcctgtctgattgtaaaactcattttttttttctgctctgtcatgttacctcccagctggagatcaagtactggctgtgcttgaacttgaacttatttatgatgagtttttcttaactttaaaaggtctataatacttgcttactccagtgaggtgatataagaataaaatgaagtatagtacctgaaagaacaagttaggcctgtagaataatgatattaacttaatatcattaccataaaaataaagttgccaatttctcaaaccccataaagtcccctgatcttctgttttatactgtgacaccatcccttgtataccattccatctcagcttgttcattcagcaaagattttaaccacctactatattctaaggaattgcctcartgctataggcctaccttcggagaattcaaacccactaa

SEQ ID NO: 905563 - DNA, 541 bp, Homo sapiens; identical to SEQ ID NO: 902389

SEQ ID NO: 905564 - DNA, 589 bp, Homo sapiens
tcgtctctctgctgctcctcaattctctgcaatgtggcttcatactatagtactacatgaaagcctctcttacagagattaccagtgacccagttgtcaaatgcggcaggtactttttggatttatattacatgttctctcctgtgtattttacactgttgaccattcctttttattgacattttttctttggttttcatcatgtcactttctcagctcttcttcttcttcctaagtaatcttcattatccattatttggctttgcaaattttctttctgatgtttccaaaggttctgtgctcattcttctgccattctatatcctctatattcaaggcttctagtgtcacttccatgctgttgactctagactgctccttgagcttgagaccaggatatttagctgcccacaggaaaactctacttggatgaccctacactgctcaaactgaaaatgattactaataaattattgttttataaatccatgtccagaacttgttcatttctctacgtattcarttctgcttttcttactgtttactagtttttatgtacaagaaatgaccatgtatttcctatagcata

SEQ ID NO: 905565 - DNA, 774 bp, Homo sapiens
acttttcagagctgttgtgaagattaaatgatttgaaacatacaaaggagattagaacacaacagggtctgccacagggtaaggcactcatcattatcatcatttacaaacaggaaagtttattttactaaaataaagctactaaataaggacattttagatttgtggtaatatccaagttacacgcacatacatattaagtcagataactggcttatgctataaacaatgaaagaaattacaggtaatgtatcacagattaatttatcagatactaaaaacaaagatttttgataaggaagacagagaaaagaagagtgaattaccttacagtagggtagcagataaccatgtaagagtgacaggccctggttctccaaggaataaagattttagagaaagttgggtgtcgtttggtcttgggtcagatttgcctattagcttaagtgttaataagagcatcagaaagtgactacaatctatttttcattatgcaaatcactcacagaattttagcaatgaagggactttaagaaatatttaactgtaccccttcatttatctgatatagagaaaagtaggtgccttattcaatttgcataggtaaaagccagggcctctaaatccttcctattaagcattcttttcactgcatatagttaccctcaacctttagtttgatttttttatagtatatagagacttaataattttagctttatctctatagaggttcacagaaaragataagtataaaatgaaagagaaaaagac

SEQ ID NO: 905566 - DNA, 664 bp, Homo sapiens
aacacttatgcttaccagtttattatgatggatatcttaaaggatacaagtaaacagccagatggagagatayatagggtgaggtttgggacagtcctgagtacaggagctactgtccttgtggagttgggggtttgccaccctgcaggcacatagatgagtacatcttcctgtcaacctccatgtgttcagtgctttgggagctctctaaccctgtcctttgggcctttgatggagactttattgattgtccatgattgaagcagggacaactgtgtcaaaatgtgattcaacaaaaagagtattatctaaacccagcgcattagtctgttctcacattgctataaagaactacctgaaactgggtaatttataaagaaaaaaggtttaattggctcacagttcttcagtctgtatgggtaggctggctggggaaggcctcaggaaactttcagtcatggtgcaaggcaaaagggaagcaggtatatctccacatgaagcaggagagagatagtgaagtgagaagtgctacacacttttaaacaatgagatcttgtgagaactcaatcactatcacaagaacagcaagggggaagtctgctcccatgatccattcacctcccacttccaacactgaaagattacagttcaacatgagatttgt

SEQ ID NO: 905567 - DNA, 629 bp, Homo sapiens
ctatgggtgtcactgcatgtgagatgggttttttgaagacagcataccattgrgtcttgcttttttatccagcttgccactctgtgccttttaattggggcatttagttcgtttacattcaaggttagtattgatatctgtggatttgatcctgttattgtgctgttagctggttattatgttggcttgtgtgtgtggttgctttatagtgtcactggtctgtgtatttaagtgtgtttttatattggctggcaatggtctttcctttccatatttagtgcccctttcaagatctcttgtaaggtgggtctggtggtaatgaattccctcagcatttgcctatctgaaaagaatcttatttctcctttgctgaggaagtatagtttgtctggatatgaaattctttgttgaagagttttttctttaagaatattgagtatagcctcgcaatctcttcttgcttgcaggaattctgctgaaaggtccactgttagcctgaaggggttcgctttgtagatgacctaccctttctctttagctgcctttaacattctttctttcatttcaaccttggaaaatctgacaattatgtgtcttgggcatgatcttcttgtgtagaatcttgcagg

SEQ ID NO: 905568 - DNA, 693 bp, Homo sapiens
ggccctatcttcaggattctgagattctggaaggtaaccatactgaggtggagaagaggcatsggtaggaaagagaataaatcagaaagtgagagaaatactctataggattggagtttaatgaattgtggtatgcacttgctagagtattttgcctatttaattttgactagagacctataactttattatgtgaataacttatactttaggccattacctagcacagctaaattaaatatttatttcaagatgagatttgttggatgaatatttaatgataggagctttattactgaaaattgttattatgtcatttttgatcaacactgatcttttagctttgtatctattactttttcatttattttggtatctataagaaagatgtattttatttttattttcacacattgcgtattaaactgaacattttatttgttcctactgtctattttttattttcgtagagatggagtctccccatcttgcccaggctggtctcaaactcccagcctcaataaattctcccactttagcctcccaaagagttgggattagagatgtgagtcgctgtgcaaggccctcagatcttcctattcttaacagtggttttactattactttcctacccgtactataacttgatttcagaccagagtttccaatcagaagttaaattgtcatattgaa

SEQ ID NO: 905569 - DNA, 544 bp, Homo sapiens
ggtgaggttctggtctgagtctgaagatctgtgaacyagaactgatggtgtaagttttagtccaagtctgaaggcctgagacctgggagcactgataatgaaccaggtgtccaggggaaggagaaggccaaagtcctggctcaagctgtcaggcagagagtgaattctttcttccttcaccttttttgatctattcatgttctcaaaggattggatgatgcctacccacactggggaggacaaactgacttactcagtctactgattcaaatgtgaggaaaccccttatagttatacccagaaatagtgttttaccaatgatctgggcaccctatgacccagtcaagttgacacataaagttagccaccatagacagagcttccctttactcccatcatgcaaatccctcttttatttgctgaccaaagactgaagctgagacaaggaagctccaggaaacccagttaagtcaacatcttctgctttttaaatatattcgagatcccttttatagttatctatgacataattggagcatgggtc

SEQ ID NO: 905570 - DNA, 593 bp, Homo sapiens
ggtaggaagaatcaatatcgtgaaaatggccatactgcctaaagtaatttatagattcagtgccatccccatcaagctaccattgactttcttcacagaattggaaaaaactraagttcatatgcaaccaaaaaagggtccgcattgccaagacaatcctaagccaaaagtacaaagctggaggcatcacactacctgattcaaactatactgcaaggctatagtaaccaaaacagcatggtagtggtaccaaaacagagatatagaccaatggaacagaacagagccctcagaaataatacctgacatctacaaccatctgatctttgacaaacctgacaaaaacaagaaatggggaaaggattccctatttaataaatggtgctgagaaaactggctagccatatgtagaaagctgaaactggatgccttccttacaacttatacaaaaattaattcaagatggattaaatacttaaatgttagacctaaaaccataaaaaccctagaagaaaacctaggcaataccattcaggacataggcatgggcaaggactttatgtctaaaacaccaaaagcaatggcaacaaaag

SEQ ID NO: 905571 - DNA, 645 bp, Homo sapiens
gtaaaaagcatggagagtaaaagtgcagatagggaaggtagaagggtgatgagtaagtacaatacaaagaaggaaggagaagaggaggaatctgctgctctccctgactctgaaatgcaacatgtgcttgttaggccttgtttggactgtcaccaacaggaacagtgattagttgtaccaatcaaattttgagcagacagaaaaacattgtgtctctagctcaaaggttgacatataataatctggaatcaagaaattcttaattcttcactgcaaatagcttccaaatgtcctcaggggcagagaaaaatattactggggtcaggtgaccacacgatagtgattgtgacagctgcaggccttcgcatttacttagtgcaacaattggcttttaaacaatgtctttccaatttgttttcaacattgcagccagggtgctcttttcaaaacacaaatctgatcatgtcaccaacctgcttaaaatccttgaatggcctcccactgatgttggaataaagaccaaatmtttaacaaggagctgccctgcttggcccctgtggaggttgggagtgggggtggggttcacccttgtgcaagctcttctcaggatctgggatgctccccccgccacccacctgcttcttg

SEQ ID NO: 905572 - DNA, 588 bp, Homo sapiens
tctcaggatctgggatgctccccccgccacccacctgcttcttggttagcttttactcagccttgttctttagatctaagctcaaatagcccattctccaggaagccttcccaggtctatgccccccactcggagtcctttgttgttgcttcttagaagtctccattcttttccattaaagcacttatctcagtttgtaattatacaatcatcagtgccattatttgtttacttcttttcccctacccccactaacctctcagctccatgcaagtgagaaagacctttctgttcaccatcttgtcctagagcctaacactgtgcctggctcatgggaggccccccaatgccttctggttgaatgagtgacggactgcctaaattgtgttttcctactgcaattttgaattctgtaaagggaggaaagtgttaacttgacatgagaacaaaattcttagttctatttcctatgcttctatgcaatgatttattttaaaatataaaaccctgtgagctgtaatcttccttcatattatatagaaatcagttcaycaaaataactttctaactctacctggtatgctcatt

SEQ ID NO: 905573 - DNA, 598 bp, Homo sapiens
gtgtgatgacctggtttgaaggtcaaggatatcacattttcttacctggtcttagaagttatggagcatcccttcaaccacaktatgtttctaataattgggtgactaactcaatcctatatttagtaggaaggaaattagattctaactcttaaaagaagtatcaaataatttgtgtatttattttaaacactccatacatactttacactccattttgtgtatatattagcttagaacatctaaattaatccaataatgtcttctagaatcttctatttcctatctattgcacaatgctatcaatgttccccaaattcttttatgttccctcatgctctgttgtaatataaaacggatcactgattattcatacacttaatatgaatagttcacatttgtttatagatttcttctccgtttgttaatgaccttttttgtttgtgcttatatctaagggcaaatacagatttccagtacttctatattcccaaagaattgctgatttaatgtaattttattttaatacttcacttcattctctcttggctgcttagctttcttttctacttcaaatttcagttctgtattcaccagg

SEQ ID NO: 905574 - DNA, 658 bp, Homo sapiens
aaaaaggatgagttcatatcctttgtagggacatggatgaagctggaaaccattgttctcagcaaactatttcaaggacagaaaaccaaacaccgcatrttctcactcataggtgggaactgaacaatgagaacacctggacacaggaaggggaatatcacacactggggcctgttgttgggtggcggtagtgggcaggatagcattaggagttatacctaatgtaaatgaagagttaatgggtgcagcacaccaacatggcacatgtatacatatgtaacaaacctgcatgttgtgcacatgtaccctagaacttaaagaataataataataataaaagaaaatgtggatatttgattcccctgaattatcaaaatgtaaacactgattagaagtatgcttactctgaataaaaacaaacatactggtatcaatgatttaatcttttcagctcttccctaatttcccatttttctaaaacatccacttttaattgcaatcttgcaattaataatcttaaattgagcttattgattatcagcaggaattaaaaacaaaaattagtcaccagagtctggatgaacatagagctatctcctaataccctagtggatatattggtgaattctgacagctagaaaaatcatcattaaactat

SEQ ID NO: 905575 - DNA, 593 bp, Homo sapiens
tattgagcagtattgaaacgctctttttgcagaatcaccaagtggatatttggagagctttggggcctgttttggaaaatgaaatatcttcaaagtaaaactacacagaatcattctgagaaacttctttatgttgtgtgcattcaactctcagggttgaagctaccttgtgattgagcaatttggaaacactctttttgtagagcctgctagtggatatttagaacgatttgaggtctattgtggaaaagcaaatatcttcacataaaaactacacagaagcattctgagaaacttctttgggatgtgtgcattcaactaacagtgttgaacctatcttttgattgaacagcttagaatctctctttttgtagaaaatgcaagtagatatttggggctccatttcaccctgtggtagaaaacaaaacatcttcacataaaaactacacagaattattctgagaaacttctttgtgatgtttgcattgaactcacagagtcgaacatatcttttgatagagcagtttttatctctctttttgaagaatttgcaagtggatatktggaaagcttgaggcctattgtgaaaaagg

SEQ ID NO: 905576 - DNA, 608 bp, Homo sapiens
ttctagattgtgtgcatggagctgtttttaatattatctgatggttatttgtatttcagtgggatcagyggtaacatcccctttatcatttctgattgtgtttatttggatctcttttcttttcttctttattagtctagtttgtggcctaattatttttctcaaaaaaccaactcctggattcattgatcctttgaatggtttttcatgtcttaatctccttcagttcagctctgaatttggttacttcttgtcttctgcttcctttgcagtggttttcgcttgcttctctagttcttttaattgtaatgttaggttgttaatttgagatctttctaactttttgatgcgggcatttagtgctatacattttcccacttaacactgcgttagctgtgtcccagagattctagtatgttgttatttttgctcacattagtttcaaagaacttcttgatttctgcctaatttcattatttacccaaaaggcattcaggagcaagttgtttaatttgcatgtatttgtatggttttgagtgattttttaagtcttgatttctatttttattgtgctgtggtctgatactgtatttggtataattttgatt

SEQ ID NO: 905577 - DNA, 452 bp, Homo sapiens
aggagaagagaaggaggggatgaggtcagagagctgatggggaacccttcaaagtagggcctttgaagacatggtgaggacttgggtgttgtgttttgagggcaaggagaagcctccagaggccactgggcaaaggagtggcagaaggccctggaagttgagcacaaagactctaacatacagctggaattcaaaacctactcctgccatcactagcagctcaaacctatgagccacacccatctatagtggttttaggattttccattttagataacctggcttctaccacttcacaataactcacaagctaaccctgtttgcttctttcaatacccactyccaccggaaaactttgtctttttcaaggtaaagtgccatattcagtgtgattttctagcttatttgaatagaggtgtttatgttattctcttatggcaattggtattgct

SEQ ID NO: 905578 - DNA, 661 bp, Homo sapiens
gttcaagtcctgaatatcctttttaattttctgtcttgattatctaatactgacagtggagcattaaagtctcccactattattgtgtaggagtctaagtctctttgcatgtttctaagaacttgttttgtgaacctgggtgctcctgtattgggtgcaaatatatttagaatagttagctcttcttgttgaattgatccctttgccattatgtaatgcccttgtctttaaaatttttgttggtttaaagtctgttttgtcagaaactaggattgtaatccctgcttttttctgctttccatttgcttgataaattttcctacatccctttattttgagcctatgtgtgtctttgcacatgagatgagtctcttgaatacagcacactgataggtcttgactctttatccagtttgccattctgtgtcttttaattagggcatttagcccatttacatttaaggctaatattgtcatgtgttaatttgatcctgtcattctgatactagctggttattttgcagacttgttgaggtagttgcttcrtagtgtcattggtctttgtacctcagtgtgtttttgcaatggctggtaacggtttttcatttccacatttagtgcttccttcaggagctcttgcaaggcagggctggtagtgact

SEQ ID NO: 905579 - DNA, 630 bp, Homo sapiens
ctggtagtgactaattccctcagcatttgcttgtctgaaaaggattttatttctccttcacttatgtatgaccacatatgaaattctgggttgaaaattctttgctttaagaatattgaatattggccctgaatctcttctggcttgtggggtttctgctgagaggtccactgttactctgttgggcttccctttgtaggtgacctggtctttctctctggctaccctaaatattttttccttcattttcaacttggagcatctgatgattatgtgtcttggggttgatcttctcatggagtatcttactggggttctttcaatttcctgaatttgaatgttggcctgacttgttaggttggggaagttcttcaggatgatatctttaggtatattttccaacttcgttccattctccccacctttttcaggtaccccaatcagttgtaggttcagtctttttacataatcccacagctctcagaggttttgtttgttcctttatttcttttttctmtaatgctgtctgcctgtcttatttcagaaagataggcttcaagctctaaaattctttcctctgcttattctattcagttattgatacttgtggttgcattgtgaagttctcgt

SEQ ID NO: 905580 - DNA, 624 bp, Homo sapiens
tctctctctcgctctctctcactctcgctctcgctctccatctacaagtggttatttttgttttgttactggaatgtcaacattcaaattaagatccatttcaaaggctgcatcttctttgaataagaaatttatttgttattacaactatgaaaataatttaaataaaaatgggatataaaactctgagaatcaccaggaagccataatttaacataaaatccactctgtagcaagatcgtaagaggcatgtcatattcatctgagaaacacacaattagaagaactgtgataactaaagcaatgtaacttttaaatttaccattcagattttggttttcccaatcaaaagaagaaaacaatgcattcctaaagtaaaggttctaaccctaggaaaagctgaaatggcttgttcctccaaacctcccatgatgattcacatgacaagactcctctttgccaaataaaactctccttatcattcaaggcccaaataaaatgccatttcttcttagaagacttctctgatttccccttggcagaattaatggttccttgttttctctttctgtgcrctacccatcacacaaccactacacatatcccactgcagcacagtcaagc

SEQ ID NO: 905581 - DNA, 605 bp, Homo sapiens
accgcaaaacaactagaaaacaaatcacaaaatgccagaarcaagtccctatttatcaataataatacatgtaaatggactgaattctccaatcaaaggacacagagtggctgaatggattaaaaaataataataatctgttgtctataggaaatacacttcacctataaagacatacatagactgaaaattaagggatggaaaaagatatcctatgtcaatggaaaccaaaaatgagcaggagtagctatgcttatattagacaaaatagatttcaagacaaagactataggaagagacaaagaagatcactgtataatgaaaaagggtcaattcagcaagagaatataacaattttaaatacatatgcactgaacactggagtacccagatatatgaagcaaatattagagctaaagagagagagagagagagagaccctaatacaataatagctggagactttagcacctcactttcatcattggacagatcttccagccaaaaaaataacaaagaaacactggactatagaccaaatggatctaacagatatttacagaatatttcatctaacggctgcagaacacacattcttctcagaa

SEQ ID NO: 905582 - DNA, 671 bp, Homo sapiens
gaatctcccctctccatctgaagtctttgttctttccaatgsatttatagcaatttacttcctcatgaaaaaagaacttgcattcctgaatctctgcaatgaactgaagaagctaactgtacaactcaatcctgcccacaagtgggcaaaccaacaaaaccctttgagaaagttatatcctattttatctaataatggtcaagatgcaaaagacgtgaatgtcctcttttatagcaaggacaaaaaactccacgaagatgagtgtatttaaaaaacaaaattgaggccaggcgtagtggcacatgcctgtaatcccagcactttgggaggctgacgcaggcagatcgcttgagtccaggagtttgaagccagactgagtaacatggcaaaaccctgcctctacaaaaaatgtaaaaattagccgagtgtgatggtgcacacctcagtcccagctacttgtgaggctgaggtgggaggatcgcttcagcccaggagatcgaggctgcagtgagccatgattgtgcctctacactccagcctaggcaacagagtgagactctgtctcaaaaatagtaataaaataaaataaaataaagctgcttattagttgtttgacctagacataaattcatttaacttaccatagccttgatttcttctctgacaaaatg

SEQ ID NO: 905583 - DNA, 642 bp, Homo sapiens
atcacacaccagggcctgtcgggaggtggggggytgggggagggaaagcattaggagaaatacctaatgtaaatgacaagttgatgagtgtagcaaaccaacatggcacatgtatacctatgtaacaaacctgcacgttgtgcacatgtaccctagaacataaagaataatacaatgaaaaaaagaatttctattaaaaacaaagtaatggagaatagtgtgaaaactgcatacaacaaagctcaatctcaaagactgaaatcaacaaggaaaagctgcttaccaccacttgggaagggccgggggtgggcagtctctgtgttcaaagtgattttagttcaaaaaatgaattgatgttagaagggcacgcttttcctgaggctgttactggtgggctgctcagtgtcactagggtattttgagtccaagtgccacctcctgtggagtaacgtgttctggttcccagaatagccaacccggcaaaaggaagacagcaaacagagccctttgactctgaaacatttgtgcttttttaggaaagcaaggactctaaagatctgggagtctggggagttgtttcttttttttctatttgttgtgctaagatgaaatctggagaaatgtcgcagcttttagagaact

SEQ ID NO: 905584 - DNA, 556 bp, Homo sapiens
ggagtgaattcatctttaattatgcaaggccgatagacagagccttatatgctgccattagacgaggacattctctgggctgagtggcttatcatgtgtaacaaaagacattctcaccttcttgtcaattcattttttttaagtgttcataaaattgtgaagttgactgtatctgcttcttttaaataacacttcagtgtaaaaacaactgatgctgagttgttcaacttataacttcttagatccaaaatgttgtcaggatgaagtggcaggttttacaaagccaataaactctgtgatttttcttagatggaaacaatgaaaatccataactgaataatgatattcaaaaaggagaaagccccccccccacatacacatttgaggcagttattaattaagctccttattctaaaaatatatgtctaatgggaaaactttaacacttatcctgcttttccagtaagactatwtttcaggacaaccaaaaaacaccatttcatctagtggggttttataagagaatatcatctatgaagagagataaaaaactgaa

SEQ ID NO: 905585 - DNA, 416 bp, Homo sapiens
acagctattctggctagaagggaatgaactcaacaaaagtctattctggtgcaatacatcttctaattgcagattgtccgccccagtaaacgtctattgtttgggaaatggggtaaggakgaggcacacttctttgctagttaatggcctagcatcaactccagctgaattttggaggtagaagagtgagtctgtgtgcttctgcactgtacgcatgcatgcatgtcagtttagtgggtggcatgtctacttataagctgatgtgcagacagtatgcatgggtattggtcatgtgtgcagaccctcaaggtaaacatgtgtggcatttgttggatgtacgtgtgatttctttctgtatccacatatgtgtatatccatgtgcatgtttatgcacatgggcatactgtgcagcaatg

SEQ ID NO: 905586 - DNA, 652 bp, Homo sapiens
tctcaggtatgtctttatagcagtaagagaatgaattaatacagtcttattttccaattttayttttatttttctggtttaatattgatttggctgttctctgatttttgcttcttcatataaactttatagtaagtaagtttgtcaatatccacaaaataatttgttggatatattatttttctgaaagatataaagctatggggtgacttgatggaaatatttattatattccagagtagagagagttagtaaaattattctttgaattattcatgattttatttctatcataactatatagaaaaattttaatactaataatgataataaaatttgtaatatcactttggagtatgcatttaataattttttcgttgtgttcatgtgattgcacacatttttatttcataggatttagatcataaagttttatgaactatagcctcataatctgatactttccaataatattatgaccaatttcttattaaaatattaagagaacagttttactagtaaaacaaaattacatttaatacatcattcgtaattgacttgattttttaatcaatttttatatttattatatagaaaatatccctataaatgaaaatacatgtaataaagaaagaggtgttcattcttttca

SEQ ID NO: 905587 - DNA, 618 bp, Homo sapiens
ctatagggccttttccccattgtcttggctattagtacttcccttccttttagttatgcaaatttctgcagcctgctttaattccttccgtgaaaatgggtttttcttttctaccatatggccaagctgcaaattttccaagcttttattctttattttccttttaaatataagttccagtttcaggtcatttctttgttcacatatatgaggataggcttttagaagcagccaggacaaatcctgaaggctttgctgcttagaaatttattctgccagataccctaaatcatctctctcaatttcaaagttccacagatcactagagcaggggcacagtgttgccaggttctttgctaatgcataacaaaagtgacatttgatccagttcccaagaagttcctcatttacatctgagacctcatcagctggccatctctgtccatatcactatcagcatgttggtcaaaaccattaagtgagtctctaggaagttccaaactttccctcatcttcctgtcttctgagccttccacactcttccagcytctgctggttacccagttccaaagtcatttccacattttcaggtatctttatagcaatgccccactccta

SEQ ID NO: 905588 - DNA, 625 bp, Homo sapiens
taattattataaagctttctggtagaattctttctggccctaattgaaatttatagaacctttgccttcaaatgcaataaatctgtcatcaccagggaagcagtttgyacctgaggctaccgcctgacattgtaatatggggctgacattctgatgaagaggctgtgagtggtagtcaggctaatatgaactctagcaagcacaaaggccactgttaaaccaaggaagggcctggcctgtggtacacaggggccctaggcctgcgaggagaagaaagttgaggcctacctcactggacttcacaacccctcatccagacacaccaatgagctgttataagttcacctagctaatctgcaattttcctcattcctccccaaaactttatcacaagtggggttggaaacatcaataaacatttaattaaggagagtttgggaaattgtaccttttaaagctaataaacagtcactttaaatcttatttcaaaaataacacatgctcattttaagacatttagtcaatataaacaaaaatgaaaaattaaaaagtcaaattattgttagaatagcctttaggtcttttttctatgcacacataaacatgtgatttccacaaagcaata

SEQ ID NO: 905589 - DNA, 625 bp, Homo sapiens
taattattataaagctttctggtagaattctttctggccctaattgaaatttatagaacctttgccttcaaatgcaataaatctgtcatcaccagggaagcagtttgcacctgaggctaccgcctgacattgtaatatggggctgacattctgatgaagaggctgtgagtggtagtcaggctaatatgaactctagcaagcacaaaggccactgttaaaccaaggaagggcctggcctgtggtacacaggggccctaggcctgcgaggagaagaaagttgaggcctacctcactggacttcacaacccctcatccagacacaccaatgagctgttataagttcacctagctaatctgcaattttcctcattcctccccaaaactttatcacaagtggggttggaaacatcaataaacatttaattaaggagagtttgggaaattgtaccttttaaagctaataaacagtcactttaaatcttatttcaaaaataacacatgctcattttaagacatttagtcaatataaacaraaatgaaaaattaaaaagtcaaattattgttagaatagcctttaggtcttttttctatgcacacataaacatgtgatttccacaaagcaata

SEQ ID NO: 905590 - DNA, 624 bp, Homo sapiens
gacatcttagggatgggggagaggttgtaattattctytttaccacatgtagtgtttgtgtagtcatttgcatttgcttctaatgtgaaggccttgaccaacaggccatgttggatttaaatagctcctttaatcagtttgcatcctagatattattttgaccattgaggaggctttgcctaccacagtttgattaattatacactgttgttttttctctggtgaattcctagaggagaatcttgtgttttgatttctaatattttaattgaatttaagtaagaaaaactcacaattgcccacatgcaatcagcataatagagggggttgtattttagaccatgggtcatcagattaatcagactattactagtcctgccagccatttagccattaaaacaagtacacatacacaaaacaaggatagttactgaagtgacagaattggcccaaagctagactgaccaaagttttgaataaactgaagaaccaaactttgacatgcttatctgaatgtaattggaaattcagatctctatacagtcacttatccttaagttctaagtcatcgcatttcatctgttatttataatctcatttgtatttcagaaaaaaattcaatac

SEQ ID NO: 905591 - DNA, 604 bp, Homo sapiens
cagaatattaaataaagttctttaggataaagggaaatgataccaaaaggatgattcattatackttaaacatcatagattaataggaatgttaaatgtgttagtaaatgcaaaagactatgtcttaaaatttatttaagttatagtcctataaagcaaaaataatatttagtaagacaaaaactttataaattaatatttgacaataataatacaaaaacttgagggagtgtaaaaaaatttgtactattatagatttcttacactagaagtgaagtgtactgtaactttttcctaatatataatgtaatccataaataatttttttaaatactttaaaaattttatatagagacacagtctcacaatattgctcaggctggtctcaaactcctgagctctagtagtcctcttgccttggcctcccaaagtgctagggttacaggaatgagccatagtgcccagccatccataagtaatttgttgaatgtaaaattaaaaacaacaacaacaacaacaaaaaaccacatagctaaaagtccaataaggcagaaatacgttaataactaaaacaactaaattattgattaaccaacataaattt

SEQ ID NO: 905592 - DNA, 604 bp, Homo sapiens
cagaatattaaataaagttctttaggataaagggaaatgataccaaaaggatgattcattatactttaaacatcatagattaataggaatgttaaatgtgttagtaaatgcaaaagactatgtcttaaaatttatttaagttatagtcctataaagcaaaaataatatttagtaagacaaaaactttataaattaatatttgacaataataatacaaaaacttgagggagtgtaaaaaaatttgtactattatagatttcttacactagaagtgaagtgtactgtaactttttcctaatatataatgtaatccataaataatttttttaaatactttaaaaattttatatagagacacagtctcacaatattgctcaggctggtctcaaactcctgagctctagtagtcctcttgccttggcctcccaaagtgctagggttacaggaatgagccatagtgcccagccatccataagtaatttgttgaatgtaaaattaaaaacaacaacaacaacaacaaaaaaccacatagctaaaagtccaataaggcagaaatacgttaataactaaaayaactaaattattgattaaccaacataaattt

SEQ ID NO: 905593 - DNA, 604 bp, Homo sapiens
cagaatattaaataaagttctttaggataaagggaaatgataccaaaaggatgattcattatactttaaacatcatagattaataggaatgttaaatgtgttagtaaatgcaaaagactatgtcttaaaatttatttaagttatagtcctataaagcaaaaataatatttagtaagacaaaaactttataaattaatatttgacaataataatacaaaaacttgagggagtgtaaaaaaatttgtactattatagatttcttacactagaagtgaagtgtactgtaactttttcctaatatataatgtaatccataaataatttttttaaatactttaaaaattttatatagagacacagtctcacaatattgctcaggctggtctcaaactcctgagctctagtagtcctcttgccttggcctcccaaagtgctagggttacaggaatgagccatagtgcccagccatccataagtaatttgttgaatgtaaaattaaaaacaacaacaacaacaacaaaaaaccacatagctaaaagtccaataaggcagaaatacgttaataactaaaacawctaaattattgattaaccaacataaattt

SEQ ID NO: 905594 - DNA, 672 bp, Homo sapiens
ttaatattttccttttattgattaaaagtatttgttttgttgttgttgttgtttcgagagggagtctcgccctgtcacccaggctggagtgcagtggcacgatctcagctcactgcaacctctgcctcctgggttcaagcaattctcatgcctcagcctcccgagtagctgggattacaggcacttgctaccaagcccatcaaatttttgtatttttagtagagacagggtttcaccctgttgaccaagctggtcttgaactcctgacctcaggtgatccaccccaccttggcctcccaaagtgcagggattataggcatgagccacaacgcctgaccaaagtatttggttttaaagcagctttacaaattgttagtctgtactccctgggatggacattggatttccccccaggttttcactaatacaagtaaagctacttataacatttgttttgggtaaatacctaggagtgaaatagctgggatatggagtaggtgtttaactttaaaaaaaactatgaaactgtatccaaatttgttgtgtgcactagcagtaaatgaaagttcaatttgtatcacatctttataaacatttggtagggtcaatytttcaaatttcagccgtgctggtgggtgtgtagttgttttgcttgccttaccttaatgacta

SEQ ID NO: 905595 - DNA, 577 bp, Homo sapiens
tgaatatgccacaatttacaaaagcacttccctattattgagagtgtgtatttatttaattagctctaaatgctccctgggtttaatatacccctccttactagaataactacaataaaataattatttttgtgtctattcaattgccatgacagtattttttcaataactcttattcctttttgatttgtgctactgtctttatctgattttaaagttttacacagttaatttctgggttacatattatatttcactaacctatcaattcttaggccaatattttgtttattttaattaccatatctataaaataacctaactacaaatatatgttaaaatacttatgattttaatgtgtttaacatgggtcagtttattttactcatatatcttataaccacagtttggtttttagagctgggtctgtcgtttgaaaacactgccaataataatgataccctgctttctctctaaacagtatttatttcacagctccatcaaatgtattgtgttatttgagwcctaaatggggctattatgacattcttcagattagccccattcaactactcag

SEQ ID NO: 905596 - DNA, 614 bp, Homo sapiens
agccaagatatggaagcaacctagatgcccattatcaaatgaatggataaagaaaatgctgtatatatatatacacaatggaatattattcagctttttaaaaggtggaaattctgtcatttgtaatcacatggataaacctggaagaaattatgctgagtgaaataagccaggaacagaaagccagatagcacatgatctcacttatgtggaatctcaaagtcaaacccatagaggtagagagtatattggtggttaccaaaggttgggggaagggggtggctgagggagggaagatgttgatcaaagaatatacagttttagttagacaggaagaatacactttagtgatctattgcacagaaaggtgactataataaaaatgcattatatatttcaaagttactaaaatagtagattttaaatgttttaacccatcaaaataataagtatgtgagctgacagatttgttaattagcttcatttatccattccataatgtaaatttatatcaaaacatcacattatrtcaaataaatatataatatatacaattatttgtcagtagttgaaatcaaaaagaaaaaaattacttgaagatgttttttgtatag

SEQ ID NO: 905597 - DNA, 623 bp, Homo sapiens
acttaagttactaaatggagataatagaacacacaactkttaggaatattgtgagaatataattagataatacttgtaaagtattcaatgttctacctagcatattatctaaaaatcattaaaattcacctaataactgagtatactctaatagaaacattttttcatttatctctgaatatgaacccctaaatcaaaattgcaaatatcttgaaaaataattttgttcaagtcagtgttatatgaaagagaagaccagttgcaataatagttaacatttctaggtacctatcaggcacaaggctaaacattagtaaagattttaaattatgatatatctctgtatttgccacatccactatataattatctaaaaacgcttatacctgccttatttaaaaatcaatatacatataaattgatagaataagaaaaaagacaaaaattggtgtattacttttaaaagtctcattactattatagtagtataagagacagatttcagaactgtgtccttgacttacccagtaaagatagtaacaataataaacatttgacagtgatatggtttggctgtgtcccctctcaaatctcatcttgaattgtagctcccacaattccca

SEQ ID NO: 905598 - DNA, 557 bp, Homo sapiens
ggaagaatttcaagctcaccatcagaaataggaaacagttgaatgagaggaatctgattggtatggatttattgatagagacttgattatgttttatttcagaaagttctatctgttgctgtaatgagaaaataattaccatgcaaaagctttttatcaacaaatactctcttcacatattggtcctctgcatatagttgacatataacaaaaattataactatagtaatttcatgattacttctttacaaattaatgatgagaatagaaatagcttccagcatatttaaccttctaggcctgaactatatgtttgctgttttaactttatataacattcatccttgctatcatccacatttacattctatgttacacatatatatattaaattttagattcagggggtacatgtacaggtttattacatggatatattgtataatggtgaggttagggcttatagtgtacctattacccmaatagtgaacgttgtacccaataggtaactttttaatcctcaccctctaccctccccactcaagcagcccccagta

SEQ ID NO: 905599 - DNA, 617 bp, Homo sapiens
tctcaaatgagttcacagatcacttgcataatggtcacctggggatcacatgaaatacacagaaacaccagctgctttgcttgccagacctgctgaatcagaatcactgggtggaagcttagaaatctgcatttttaataagcaccccaggtgatttttatttttatttttatttatttatttttgagaggagtcttgctctgtcccccaggctggagtgcagtggtgtggccttggctcactgcaacctccgctcccgggttcacgctgttctcctgcctcagcctcctgagtagctgggactacaggtgcccgccaccacacccagctaattttttttgaagtagagacagggtttcaccgtgttagccaggatggtctcaatctcctgacctcgtgatcctcccgcctcagcctcccaaagtgctgggattacaggcgtgagccaccgtgcccggcccaccccgggtgatttttatgcacactaargtcagaggaccactatgatatgaacagtgtccaaaaagaaaataattactcagagctaataaaggtgaagataagagcaattaggcaaagataatttcctatgtttaatatattttttgtttgaatta

SEQ ID NO: 905600 - DNA, 596 bp, Homo sapiens
aacgtgataacctttggaagaacttttaatatctgttatatcgcaggatctaagagggtagatttcaagtgtggctactcccaatttttataggctactatttggaaaattgagtaacactgaaaggttttacactagtgatattgtatatttcaggacatgggctctattttctaaaatagagctacccaaatgcatttcaccatggaatctctttaaaaacacaatacattgatgaaatactaaaggagatgatgagatatgatctacttttggattaaagttgcaagtacaataatggtatcagagataaatttattctgtgagtaatgctcaaaagcatttctattttgataacatcagataatgttaccaatatatgctgaaataaaataattcatataacagtgaccagatcttaccaaaaagattagaaagtaaatgcttcctaactcactaatgcctagattgaatatcatgtatcgtatgctcccttgtctgattrtctggcatttgagggttaagtacaaaatttttaaaggtatattttagcacaatatatataaatatcattagcaattttttacatttgttcc

SEQ ID NO: 905601 - DNA, 634 bp, Homo sapiens
gccacttccagggtagtctgaatgaactgaagacaagattgtataaatagattctactcaattagggctggcaagagaactaatcacaagtctgctctgtgatctaagtcttgagtgcaatacacataaggagaaatattctgttccccaaacacacatctctgtccttgctctagtgtggtgattatgaaggagaacagggcagtggctagaactctgtcaacactggcgatatcaaatggcatagcaggagctgcaggaacaaaaagcccaggccccacattcagtgtgactctggagagtcaccacgagggagccaggagttgagtcatgattgttcctgagtcagtgcaggaatcctgaaataaataggagctaatgacttcagtggagcgggagcacctgcgtttttgctcaaagagatttccccattgcttgccatggactgtccagattgcctttgatattccttgaacataccagtctgtttccacctaatgaccttgttgcaactcttcccagaacttcacctgaaaggatcctttgtggcctccaggtcatagttttgatgtcwttcctttagagaggcactgtctaatcaaatcaacagccttttcccaatgctcatgtccca

SEQ ID NO: 905602 - DNA, 559 bp, Homo sapiens
ttttacttgaatttaaattaatttgtcaatatccactaagaaagtagaaaatccatatgctctaggacccagaaatcctgcctttagcgattccctactgaagttcctgcccatgtacaccaaggagatctgaacaaggacattcattgcagcattgtctgtaatagaggagaattagaaacaactgaaatgtccattaataggagaatggatatataaattgtgctatatgcttgtgatggaattcaaatgtagctgttaaaatgaactaagtctacatgtgtcaacatgggtgtatctcataaacattatgttgaatggatgaaaagttgcagaatcatacagactatatgacagcatttaaaaatgtattggggacacatatagatgtaataaaattgtaaacatatgaaataggatacacagtaaattcctgagtgtggtagctttgggagagaggaagaggaagaggaataaatgctcttgtgaggggtaacaaaaggggcttaaactttatctgcygtgctatagttcttttatttaaacaaacagaagcaag

SEQ ID NO: 905603 - DNA, 665 bp, Homo sapiens
tgctataaacaaacaccggagactggataatttatcaagaaaagaggtttgatcggctcacagttctccaggccgcagaggaaacayggtgccagcatttgcttggcttctggaaaggcctcaatgcttgaggagcttttactcatggtgggaagtacaacaggagcaggcacgtcacatggagaaaataggaggaagagagagatggggagatgccacacaattttttttttttttactacggagtctcactttgtcgcccaggctggagcacagtggtgcgatctcagctcactgcagcctctgcctcctgggttcaagcgattctcctgccccagccgcctgagtagctgggactacaggcagatgccaccatgaccggctaattttttttatttttttatttttatttttttattttttaatttttttagtagagacggggtttcaccgtgttagccaggatgggtcttgatctcctgacctcatgatcctcccaccttggcctcccaaagtgccgggattacaggtgtgagccaccgtgcccggcctgccacacacttttaaacaaccagatcttacgagaactcactattgcaaggacagcatcaagaggatgatgctaaaccattcataagaaatccatccccatgagccattcactt

SEQ ID NO: 905604 - DNA, 662 bp, Homo sapiens
ggcactggtacaagaaatgtttgataatgttctatgaagacgtaaggatcttgtaacataataaaaattacttcacttagcatattaggctttgtttttgttgctgttgttggttttagcaagaatttctcaataaagatgcagtacattaatttacattcttgtatgttcatttatatttatcctggactgataatttctgaatctactctgagtagcacagatatacatgacatggataactaatgaactagacataaatactgtaatataattctaaaatatgtatttagcaaaaaaaaaaaaagcaccagtaattcacactaagtttccctgtacttaaagatctaaataggcaaactgatctatattaagcatattgactataaaaagatgattatcttgaatgttggcaagttggttctttataatgaatatgttgtacctatgatcaggaaaaaaaaaactgacaggaaacttggggttgccactaatattctataggttgatttgtttgatagttacatgggtttaaaattcgtaattatttttaacattttaaatgtgtgccttatgcaactttatatgtttgtgggctatatctcacattagacaagatttsaataaagaagttatctgtgtgtaatgtccaaactaaaaaa

SEQ ID NO: 905605 - DNA, 582 bp, Homo sapiens
cagcctcccaagggggtgggactataggcacccgccaccgctcctggctaatattttgtatttttagaaaaaaccgggtttcaccttgttagccaaratgggcttgatctcctgacctcgggatccacccacctcagcctcccaaagtgctgggattacaggcgtgagccaccacccctggccctggatatgtgttttaatctgtgttattaattttggaatattcttggtcatcattatttcaaataattctgctttattatcttctgttactccaattgtatgtgtgttacactttttgaaattgttccacagtctttgaataacttcttttttattgttttgtttctgcctcatttcattctaggaattttcttttgaaatattgaagctcactaattctttccgtagctttgtccagcttactaataagcctataaaaggcattctttatttaggtcacagtgttttggatttttaacattttcttttgcttctttcttagagtttccacctttctgcttatattttccatgtgttcttgtgtgttatctactttttctaatagagccactaatatac

SEQ ID NO: 905606 - DNA, 638 bp, Homo sapiens
ttctctgatattcataggtatcaaaaatagaaagattactggcatactttaagacatggttgtcctataatgatgaaraagtgtttatgtgtgtttgactggatacattcttcactttgttaccatatgtgcaacatggtcagatggttaatgagttttcagggctgaaatgcatctggtccaactttaaacttatggtttataatacttcactggaaagcatgtaattaatctttcagaggataatctaccataactcctaaactaattaagaatagatattctttttcaacaggatttgaaaattaagctgtatacaggttaagaaaaagataaagtctctacattgatagaagagtaataacatctaagataaaattggcctctcacttcctcctcctctgccatatcctgttgatagaaatatgccccttcattgaatgtatgctttcagatagcctttcccttaaggaaaaggtcagtctcttatacatctttgaatcctgagcatctggtaaagagtaaaagcatagaaggtgtttatagatcaaaatatgggagttaattcagagagaccccaccttgcaatccatgaattttcacaagtatgtgggaaaacatgtacacaaatctattta

SEQ ID NO: 905607 - DNA, 499 bp, Homo sapiens
ataacataaagagttattacattgcaattgaatygatttcatctatattttttaactttctagtcatattctgcttctcttttttaaaaaaattaatgcacatacatatttgagagtaaagacataaactcctgtatgtatgaatatctccagttagaaaaattatttaaatgtggctgcttgcctaagctgccaaagtagtcccaaccctaacaaagatttagaagggcaaccaacctttagagcagaagtgaggactatttttgtactgcaaaagccttggttttatgtttatttgtaaaattctggcagctattttgagatgtttctgcgttgcaataagaaacattatgtccatgaatttgaaaaaagagggaaaaattaaaaataaaaatgattttagcgtatggatttttttaaaatttaaattcattatcaaacagattttgatattcttgtgtgggttttgtgtaggggggatgtgtctcttctagctggc

SEQ ID NO: 905608 - DNA, 645 bp, Homo sapiens
gtcaccaccctgggagtgagcatgggaacatggctgaacaccaaaagtttgggttctttttttttttttttgagacagagtctcactttgtcggccaggctggagtacagtggtgccatctcagctcactgcaaactctgcctcccaggttcaagagattctcctgcctcagactcccaagtagctgggattacaggcacgtgccaccacacccagctaatttttgtatcattagtagagatggggtttcaccatgttggccaggctggtcttgaactcctaacctcaggtgatcctcccatcttggcctctgaaagtgctaggattacaggcatgagccactgtgtgtggccttgaagttggggttctttcccaccacatggcacccctccaaggagatgatggcagggcctgagacacccctgggaccacagcagaacttctggaacctttcccaccactgaccaaggtgctaggtgccatcctaattgttgacacaaccctctgggtaggcaccaatacaattccactatgaagatggggaaactgaggcacagagcagcctgctctcacctrgggtgggatagccagggctgcggcccagcagtctgaagtcagaacctatgcttttcacccctgttccac

SEQ ID NO: 905609 - DNA, 620 bp, Homo sapiens
attggctctgcttaatgaacctgctgatgcaaattttaaaagtgttgaggttaattcaattattctttaaaaaactcgtaaatatgtaaattttatggcatcataggtttttgttaaggaaaatgaagagtacaaattaagcttcttatgtagaaactagtgcagtacaggaagtaattcaacagtttctcagttttaccaaatgaagtttttgatgattaatgccctttactgaagaaaatgtatattttaatatattaattatactaaatatgtatacattatataatattttagtaaataataggctcatattttatttaaaatcttctttggaaggtcaactgaaatttaaagttccagccaagaaaagtataaaacactacatgtgtaaaatgacaaatgatttttttaacctgagcagtagggctactgaggggaaatcagtaagcaaaacagatagatagatagatagatagatagatagatagatagatagatagaaaaaatattaattaatagaaacaggyggttgaaaagatagaaagaaatgaaacaattatcaaacagaatttgtttgctaattttttagaaaaatagtgtgtctacaatatttccaa

SEQ ID NO: 905610 - DNA, 516 bp, Homo sapiens
tatgtttttgagacagagtcttgctctatcacccaggctggagtgcagtggcacgaccttggctcactgcaacctctgcctcctgggttcaagcaattctcctgcctcagcctcccragtagctgggactacaggtgtgtgccaccatgcctggctaattttttgtttttttgttagagacagggtttcactgtgttagccaggatggtctcgatctcctgatctcatgatccacccgcctcagcctcccaaagtgttgagattacaggcaaaaaccactgcacccagccctaaagctattttttaaaacaacaatgtccaaatatcagtggacacatagatggtaataagtgtattactctccccccctctagcccaaaccacacacacacacacacacacatacacacactctacatatgcagcttcttatgtttatcttgtttctatcttgaaataatctgtttatttaaagaagaaaatcaagaagtggtagttttagaaaatgtcaattta

SEQ ID NO: 905611 - DNA, 603 bp, Homo sapiens
atccacccgcctcagcctcccaaagtgttgagattacaggcaaaaaccactgcacccagccctaaagctattttttaaaacaacaatgtccaaatatcagtggamacatagatggtaataagtgtattactctccccccctctagcccaaaccacacacacacacacacacacatacacacactctacatatgcagcttcttatgtttatcttgtttctatcttgaaataatctgtttatttaaagaagaaaatcaagaagtggtagttttagaaaatgtcaatttaaaattattaatcttaatttagacactggctttattaacagttgaccatcttttctctaaatctctgcatgatttaacaatattcttcaacattcagtggttttcattgagaagggtctgacaagggcattaagattgttcttagattacagagatattcttcccatcaagccatattccctggctcattgctgcttcatcctgaagaaagaagctcccttttatccagtttgcacaaaaatgcctgtatgtgctagtagcaaactcatttgttaataaatcgattttgtataaaatggaatttatttatgaaaaaa

SEQ ID NO: 905612 - DNA, 681 bp, Homo sapiens
ctccattctccccccacttttttctttttttttttgcttgtagttcccaaaaattactgtagaatgtgttgaaaatgcaatatctgagataggagatagggaggtactggctagaacagcccaggctctgttccagtcctctttcccccaaaagagaatgacattcaaagttttagcccagcatatctcattgtccaagtgtataaaacccaggggttgaaggggagactgttttccagggccctcagctgtggtacaagttgggcatgcgtagtttagactccatctgccctggactagcattcttgagctttgcaggaccatttcacaatgaaatctaggctttttccttgctgcctatctgtaagtaataaacccatttcatgtaacttgtgtgtgggtgtcctgttgtaccagactcaggctagctgctaaccagtgcacagtgaacctcttcacattactattcttcttgccataagtaactgttcaatgattcataacattaccaaggcatctaatttcagcatctttctctcattcatataatgagacttttgttcccattgaattggkaaaatttagaccactgtgcaagaattatcttatgtttctattaccacatgaatgttacttgcatctttattgtccttgaccatgtcctttacttctctcctaatc

SEQ ID NO: 905613 - DNA, 634 bp, Homo sapiens
gaaggacaagacagaaggaatctgttgctatggtagaagtgacagatgatgaagggctttagggagttgcaggagataaaacacagaataggctatagaatatgggctgtgggatatcaccgcttgatgtgaaatccaggcctttctaatctctaagcatgtgacatggattactgttattactgtaccttaatttcatcattagtaaaattgaaatggtgatttaaaaagtctctttatagagttataaattatacatgggatgataagtaaactaagcttagctatatcaggaagcataggaaaacaggtagattcaaaaaacatatatgcaggcaatagattcttggttggctaatatttatgtaattaatgaggaccactcgaatgtcacataatgatatacattctgattctgggtgattttatctctttaactatggaagcaaaagtttctggtctacttttcgagtttttaccaggcatcatatactcaggcrttgtttaatgatcagggaatgattctgataaatagatctttaggtgatttagtcattgtgggaaaatcagagtgtacttacacacatcgagatggtgtagtcctactacacacctaaactagatggtatagcct

SEQ ID NO: 905614 - DNA, 248 bp, Homo sapiens
gcttgccccgtgctcctggaaaagccacagacactcaatgctggtctgtgaaaaaagtcaagagggaggctgcaccctgcaaagccacaggggtggagctgctgaagaccatgggaacccatctcttgcatcaaagtgacctggatgtgagacattgagtcaaaagagatyatttcggagctttaagatttgactgcccctcaggattttggacttgcaagaggactgtagcccctttgttttggcca

SEQ ID NO: 905615 - DNA, 662 bp, Homo sapiens
aagagaaatgataaaatataagtaagcatttagtaaatttagcaacttttcttcttttaagagacaggttctcgctctgtcaaccaggcgggagtgcagtggcatgatcatggctcactgaaactcaaactccttggctcaaatgatcatcccacctcagcctcccaagtagctaggactgcaggtgagcaccctgccaaggtaatttttttttagagacgaagtcttacaatgttgctgaggctggtcatattattattttattactattaattatatattagctggtacataatattccatagtgttctgggctacatatttgtgtaccctgagaattcctgttgaaatcctaaacctcaatgagatggtttcaggagatggggcctttgggaagtgattagttcatgtaaatcctcataatgggtttaatactcttgtaaaagagactcccccgcaaaaaaacagagacctcagagctcttggccctttctttaagaagacagcaatatatgaaccataaaatggtgctccccagctaccaaatctgctggcaccttgaactaggacttcccagcctccagaactgtatgaagtaaatgtctgtggtttaagccacccagcytatggtacttttgttatagtagcctgaactataacag

SEQ ID NO: 905616 - DNA, 500 bp, Homo sapiens
gcttgaacctgggaggtggaggcggcagtgagctgatcacgtcactgcattccagggtgacagtctgagactccacttcaaaaaaaaaaaaaaaaaaaattcaagatggattaaatagttaaatgtatgacccaaaaatgtaaacctactagaagaaaacatacggaaaacacttcaagacactggtatagagtttgtggtcgagacctcaaaaacacagggaccaaaaacatacgaatagggctacattgaactaaaaatcttctgcacgggaaaggaaacaataaccagagtgaaagagacagtctgtcccccagtttgaatattcagtagtttgaatattcaatagcttgcatattcagtagtttgaatatctgcaaactattcatccaacaaagggctactatccagaatgcmtaagaaactcaaactaaacacacacacacaccaaaaatccaaataattccattaaaaagtgggcaaagaacattaataaacat

SEQ ID NO: 905617 - DNA, 636 bp, Homo sapiens
aataactaaaagaataacattgaatacatttwaaaaaatataaatgaacaacaaaaccaaattctagtttcttaaaaagatgagtactatttataaatttctcacgaaagcgatcaagagaaaagcaggaaagccacaaatcagcataattagaaatgaaaaagaaacgtaactatagataagttacaacttatgttaatactatgaacaatctttccaatacatttgaaaacatgtgaaatgtaagatcttctaaaaaaaaagtttaattaccaaaatgactaaaaaacaaatacattctgaatagataagcaaccattaaataattttaatcagcagtcaaaaaatctttcccaaccaactacacagaataattgtattaaatccacgaaacccccaatctctatttttaacaaatatttttcaagaaaaaaatgtaagaaaagcattcctttttataacatcattaaaaccatatgccaaatcagtctatgacagtgcaaaaattattttaaaacccaactcatttataagcataaatgcaagcataatacaatagtagtaaatcaaatccaatactgtataaaaataattcatcatgaatgagttggatttatattagtaagacaaagatat

SEQ ID NO: 905618 - DNA, 656 bp, Homo sapiens
aataatacaagtagtactagacctaagaaaacagtttgacagcaatacaattataatgagggacttcaacattttactgacaatattagacagatcattgaggcagaatatcaataaagaaactctggatttaaacttgactctagaccatatggacctaacagatatttacagagcattctatccgacaactgcagaatatacatttttctcgtgtgcatggatcattctccaaaattgaccatatgcttgaccataaagaaagttttaataaattcaaaaatatcaaaataatgtcacgtattttcttggacctcagtggaataaaatcaaatgtcaatgccaaaaggaactctcaaaagtacacaagtacatgcaaactaaacaatttgctcctgaatgactttttggtaaataattaaattaaggcagaagtcaaaaaaatttcagggaataaaaatagggacccaacaaaccaaaaactctgagaggcagcaaaaacagtgctgagacaaatttaaagcattaaacacctacatcaaaaagacagaaatatctcaaattggcaacccaatgttgcacctcaaggaagtagaaaaatgagaacacatsaagcccaaatctagcagaagaaaagaaataacaaagatcagagg

SEQ ID NO: 905619 - DNA, 523 bp, Homo sapiens
tataaaacatgcgaggaatgtgatttctaatagggaagtgttggccatattaawgaaaccctaagtagttattggatatctgagtagaacggaagaagtactatgaaataatgtggctgtaccacaccttaaatatcagatttatagcctaagtgaaaagcataggtttatttatcttgcctcagcccacccagatgtctggtttatgtgaatcattactctggatgaagattgtccagaccttccctagtacaattcccactctccaacctcttcagggcctcaggagttcgagatgacaaaggacaagacatgaggacttactgtgacttatttccaaacatcccagcccatttacccatatttcctctcccttccgtaaaacagacacaagagtgtggttctgcagcccttgaactgaataacttcaacttctgttattttgctccaaagagcatttcaaaatcacctgacatttccataccacccaccttatttttctcttctcttctcaatagttcct

SEQ ID NO: 905620 - DNA, 553 bp, Homo sapiens
aggtcgtttagtttccttgtagttgtgtggttttgcacgagtttcttaatcctgagttctcttttgattgcctgtggtctgagagactgtttgttatgaaatctgttctcttgcatttgctgaggaatattttacttccagttatgtggttaattttagaataagggcaacatggtgctgaaaagaatgtatattctgttgatttgggatggagagttctgtagatgtctattaggtctgcttggtctagagctgagttcgagtcctgaatatccttgtttattttctgtctcattgatctgtctaatattgaccgtggggtgttaaagtctcccagtattattgtgttagagtctaagtctttttgtaggtctctaagaacttgctttatgaatctgggtgctcctgtatcgggtgcatatatatttaggatagttagctcttgttgttgcattgatccctttatcattatgtaawgcccttctttgtcttttttgttctttgttggtttaaagtctgttttatcagagactacaattgcaatttttgcttt

SEQ ID NO: 905621 - DNA, 671 bp, Homo sapiens
tattgtaaactggcctttagaaagcatgagccagtgtccacataaagataatgtgtaatcaaaagtctcatttcccatttccagaatgataaaatcattaatttaaaaaaatttgattgatgcagcagagtgataattctttgttttaaattgcattacttcaattgtttacacaattggacatttttcaaaattcttctaaaaattgactatgatttcttcttttagaaatgcttatttatttatatttttcatttaaaaattatttggctttacttttatgatatttacatttctacaattaaagaagtaattatctttcataagtgtttaaaatattttttactcatttttaaattttatttaatagccacttcatattgttatataaataatttacacattcaaatcttttccttcatgcttacaacttctattttcatgtttgtagagctcgtctatatttagagaactctccaacattagatgcatttacctaaatttgctttttaactcactataattttgaaaatatggtaatatctgatctattttattttagattatattttgaacrtaatctaattggcatcctttagtattaaacaatgtgcatacttctatttctttaaaaaataacctttcctcactaattgaatattacttttgaa

SEQ ID NO: 905622 - DNA, 566 bp, Homo sapiens
gatagttggagtggaatgtgattcttcgctaaatgtttttttgaaaataaaaatttacctgaggggttggatattggtttatatggggcactgaaaacagctattatgtgggttgccttctgttagtgtaaatgtgtacttgtcctggcacttggtgagagctgtcttatgatttcaattgtcatcgatctgttcaatgttaaaggatgtcttagaaaatcagtccaaagccagcctcataggctacaaatctagttttagtgctattataattttttgtggccaaggtaacagaaattccataatcctaacttggtataaccttttcttttccctataatgtattcaaaaacatatatacataatagactatgatgaatgggaattcaaaacatcaatttattattattggttgagtttatgcttaaaattcaagtgcagatttctctgtaagctaaacaggcatatgtggcctagytagaaggcctaagggactttactctcttgctaaggccaactacaaatctaaaaatcttacccctctcctgcaaattacatatgactgg

SEQ ID NO: 905623 - DNA, 584 bp, Homo sapiens
ttaaagcagttatcagaagaaagtttataccttaattctttacctaaacaaaaatttaatgatttttaaaatataaaacatctcaatgccacctaaactgtttctgacctataatagtaacttaataaayacatctttaatacattttaaatatcagtttaaattttcaacggatacattcaaaatttatatgttaataaaatacaaaaaaatgtaaaggattagaaaacattgtattactggacagaaaatttgaaaagctaaacgtaaacaataatgagatattatcaaagagtattaagcaacaattggtgtaaaataaaatatttatttacagaaaggcacaattagaaataatagaaagcaaacaacaaatggaaaactaccaaaaatattcttcagatgttaatattaataaaaaatgtattacaagccgatggagaaaataacaaactttgaagaagaaaacagataaaagcatacagtttataaaatagaaatagaatgcatcaaacatataaaaatttatgttaaaaatatattttaacttgaagtgtatttcaaataaagtaaagtagagatat

SEQ ID NO: 905624 - DNA, 584 bp, Homo sapiens
ttaaagcagttatcagaagaaagtttataccttaattctttacctaaacaaaaatttaatgatttttaaaatataaaacatctcaatgccacctaaactgtttctgacctataatagtaacttaataaatacatctttaatacattttaaatatcagtttaaattttcaacggatacattcaaaatttatatgttaataaaatacaaaaaaatgtaaaggattagaaaacattgtattactggacagaaaatttgaaaagctaaacgtaaacaataatgagatattatcaaagagtattaagcaacaattggtgtaaaataaaatatttatttacagaaaggcacaattagaaataatagaaagcaaacaacaaatggaaaactaccaaaaatattcttcagatgttaatattaataaaaaatgtattacaagccgatggagaaaataacaaactttgaagaagaaaacagataaaagcatacagtttataaaatagaaatagaatgcatcaaacatataaaaatttatgttaaaaatatattttaacttgaagtgyatttcaaataaagtaaagtagagatat

SEQ ID NO: 905625 - DNA, 619 bp, Homo sapiens
ctccccaggctcctcaactgaggccacctttgagaaactggtgayattattttttccaaaatgaacttgactcctaattaaccccaagacaacagctccagtgcagtagatctaacctcaggagtccagtgtttacagtacatgcttctaataaccacatcccacgttggtcatcagaacttctgaagatggtgacttatctggagaagctgggagtcctgatagatggaggaggctagctctgttgattcagatgagagtttctatctcaaggcagcttccctctcatttgctgttatttcctcaggctctgatttgtggcagtggtgctacttgtcaggagactgccaaatactgaatagctgcttctctctaaattagaagggagagagcaatgtaagtacttaccgagcagtgggaacattgacctagcttggggatttgtggggactggacttgaatgatgggtagtgtttgagaaagcctctttctgtgcctcccatggagatcagtgatggcatttctggtaagtagcagagttaaaaaggagaatcagaggctacctttcactgaacttactaagagtgactgggaatggcctttataattctcagaattt

SEQ ID NO: 905626 - DNA, 614 bp, Homo sapiens
ctctattctgggctctcacatcaacttactatttcctggggctactcttcttctcagccctgtgaattgctctgtcatcttcatccttctttttttttttttttttttttttttttgagacagagtttcactcttgttacccaggctggagtgcaatggtgcaatctcagctcactgtgacctccgcctcccaggttcaagtgattcccctgcctcagcctcccaagtagctgggattacaggcataggccaccacgcccggctaattttgtatttttagtagagacggggtttctccatgttggtcaggctggtcttgaactcccgacctcaggtgatccacccacctctgcctcccaaagtgctgggattacaggcatgagccaccaagccttgccatcttcatccttctttatgccatgtgctgtacatggtgctacacagttgtgtgttctaacccttccagggtgttctcagataagttcccaaagtcttactggatgggttggattggaggtggggcgggggctgaaagagggtcatgacaggttagaatgtctgaaagatgtaaaagacagtcctttttttttttttgccgmtataggtttcaggtt

SEQ ID NO: 905627 - DNA, 677 bp, Homo sapiens
caacaaggaactaaaatttyttgccagtgtatgagtgaatctggaagtggattctccagccccagttaagcctttgtatatcttgagccctgtcccacatcttgactgcaacctcatgagagattctgaaccagaacccactagctaagttccttccaagtttctgactcacagaaactatgtgagatagtaaaaattttaagccactaaattgtggcataatgtgtcatgcagcaatagattacaaatacagtgttgtatggaaacttttgaaggtactatcttctctcaaattctagagcgctaataaaataattgactttgtttatctagtgtctatgtgtacaatttaatctccatttgaaaatgttttcagaattctggaaattttatttctttaccttagtatttaccaaattttaacaatagcacttgatgattcaaaagttgggccttggaatcaacaaattttagtttaaatcacagtcctgctattcattaccagtacgacccaaagaaagatgggcctctgttttcttgtctgaatcatgattataataaacacctaacctaaaagactaacatgaggattaattagataattgcaggatcccctagtttcctcttgctttcttcctgtgtccttactgaaaatcacagagtgccttgaccatttt

SEQ ID NO: 905628 - DNA, 580 bp, Homo sapiens
gaaacccattgttttgtgctgtttgcctgcatttagcctttaagtcttgcatttttttttcatgtacattagttgaggtgatgttggcacaaaactttttagttggattggaatcagattgcctggggacagtgttggaagtgataatgattttgagaaagagactcagtatccttaattttgatattcctccaaagatcttaaattcctggcaaccggcaggatgactaacttctttatgtaactgccctactcagaccaaacaagccatgcatttgccagctataactgccatgatttaactttctagcaaggattgtgttgatctccctgagttctcttcactttccaaaaaaaggtcacaggaaaccccaggcaaaggacttggtttacaaccaggtgtattaaaaaagtacggttgcggcatgaagctactttcagtctgaaggacactctttgatggaagcatgagattctcagtgccatgytcaggacacattaggagatagctctaaggatacttaaagagacatttgatataggacaaaatatggctgcatgggatgaaggggttgtttga

SEQ ID NO: 905629 - DNA, 541 bp, Homo sapiens
aagggatgcctctgggaagctttctcattaggccccagcattttttttttttttttttttttttagctaagctaacgtttccctttcttggcagggagctttccccaattccttgcacagcgcctgtggctggccgtaactaacctcggcatcacaagcctcgccctgcccctcggagccgcgctagaccccgctgggcgccttctcgtctcccagcacggacctggtgttcgcagggactggggctctttgggtccgggcgggactgcgtggccgaacccgcgggcccagagccggcagccggggaaagtgggctcgagtttccgcgcccgagaaacgagcgccggcgccggcgggcggggccggggcggagggatctcctgcgctcggggagcgtgaggcgccggcgccgagctgggcggccgggcgcggggagagggcgcggggagagggcgcgggagcggctcgygcggcaggtaccatgcggacgcgcgagcccggcgagggccccggcaggcccggtccctgctcgggggcgcgc

SEQ ID NO: 905630 - DNA, 641 bp, Homo sapiens
gggcagattcagtaacatgaattccctttcctgagacttggaagttaatgtctctgatctgtaacaaagaaaaactattrcattgaactagtttagattcattgatggcctatatttgataagcttgaaatcagggaacatcactaatgaagaaagcattccaaaatataggagatagaaattttaaaataaatttattatacaatttatggtatatagtaattgtgtagaggatatatctatttactatggcttttataatacctagcccacaaattggatttgactccacacttagtcttttagactcttccaagctagttatgtatatattcagtcacacacagaatctttctcaaaaaattttggtgaagactttaaaagttaagtcatgttaactggttatctcaataaatgtaaaatacatggtagttcttttcatcacaacatttacactagttcacaaataaaggaaagaatcaccaaggcaaatttaaaaaaatacaacgttgaaggattacatcactgaatactgagatattataaaattgtagtaaatatgataggatagtatttgcttatggattgagatagatcaaagtaattatattgaaagttcagaaatcatccataaatatatg

SEQ ID NO: 905631 - DNA, 651 bp, Homo sapiens
aaagagaaaaaatggcaaaaacaaaacaatacagaaacaaaaatcagaatagaatttacaaaaaatatgaaacaactacaaaaaaatgaatatatgcctaattaaataccagaaggaggagagaggaataaagcaatatttaaagcaacagtgtcagcaaatttccccgaatttatcaagcaccaaaccatagattcagaaaactcagagaccagacgcggtgtcacatgcctgtaatcccagcactttcgggggctgaggagggctgatcacttgaggtcaggagtttgagaccagcctggccaacatggtgaaaccctctctctactaaaaacacaaaaattagccaggcatggtggtgcatgcctgtaattccagctactcaggaggcttaggtggaggatcactggaacccgggctgcagaggttgcagtgagccgagatcatgccactgcactccagcctgggcaagagagttagattctgtctcaaaacaacaacaacaacaaaaacaaaaacaaacaaaaacaaggaaacaaaaactcaaaaccaaaccaaaagcagagtaagtgcaaaaaaagatagaggaaaaaaaaaagaacacacctgtatctagacatatmatattaaaacttcagaaaatcaaagata

SEQ ID NO: 905632 - DNA, 630 bp, Homo sapiens
aggaagttaaagtagttacgatttgtcaacatgtattctttgcttagctcaaagcatattttcagactatcagctggttttatgaatggggttcgactttttgaatttaacttgcttctaattattgactcccatgctcagtgcaagtttcccatgaccaaatgaagtaaaaactttagttttctatcttggtattcaaggatttccctagaattccccaatttatctcttgcccatatttctcaatcctctcttacatttagccaaaacaattgtccaagtatgctgtcccacaaacacaccttgtcctttgtttctttgcctttacttacctctttattctctacctgatgcttcctcatgatttcaactcttcaaaaattgtatttgtctttcaacttaggactccaaccaattccaggagcttattagaatttctgtttcttgaacttccactctactttgtgaataatccttgtcatttatttcagtctggcttctactgcatttttgtttatcccctacattcttgtatatttcctgatgagacatgaatccacttgcagggygaagttgccaggagcgggatgtgagaagtgagatctgaagccccccaactccaccaacaaa

SEQ ID NO: 905633 - DNA, 657 bp, Homo sapiens
ccacacacaatgaattcattttcaacaaagttgtcgagaayatactctgtggaaaagacagtctcttcaataaatggttctgggaaaactgaatgtccatatgcagaagaaagaaactagacccctctctctcacagtgcataaaaaccaagtcaaaatggattaaagacttaaatctaagacataaaactatgaaaccactacaggaaaaaattggggaaaagctccaggacattggtctgggcaaaaagttcttgaataataccccacaaacacaggcaaccaaagtaaacatggacaaatgggctcataccaagtcacaaagcttctgcatagcaaaggaaacaatcatgaaagtgaagagacaacctacagaatgggagagagtatttgcaaactacccatctggacaagggattaataaccagaatatataaggagctcaaacaactctacaggagaaaaaaatcttgtaatctgatcagaacataggcaaaagatttgaatagacatttctcaaaagaagacttacaaatgacaaatatatgaaaaggtgctcaatatcatcgatcatcagagaaatgcaaatcaaaactgcaatgagatatcatctcactctgggttaaaatggcttatatccaaactacaggcaataac

SEQ ID NO: 905634 - DNA, 639 bp, Homo sapiens
atttcgtggcctacccagtttttaagtccaaaaagaaaagcctcctgcttggtctgtatccaatagaaagtcatttctctatcagattgatgccactcttttaggtagacaaaaacactgtttcttcaactcagttttagtcatcattgcacactgagttacataatatagtagcatactctttctaataaaccctctttctggtagaaataaaaagaaatttatttgcaacttcagcaaagcctcaggatacaaaatgaatgtccaaaaatcacaagcgtttctatacaccaatagacaagcagagagccaaatcatgaatgaactcatgttcacaactgctacaaagataacaaaatacctaggaatacagctaacaagcgatgtgaaggacctcttcaaggaaaactacaaaccactgctcaaggaaataagagaggacacaaacaaatggaaaaacgttccatcctcatggataagaagaatcagtatcatgaaaatgaccatactgcccaaagtaatttatagattcagtgctatttccatcatactaccattgatattcttcaaagaattggaaagaaaaaacyactttaaattttatatggaatcaaagaagatcccatatagccaagacaa

SEQ ID NO: 905635 - DNA, 610 bp, Homo sapiens
tctccttatctcaaggtaaatattcttaatcacatttacaaagtcccatttgtcaggaaaggtaacacattcacaggttctgaggattagggtgtgatcatcttctgggaccattattctgcctatcacatagacaaaattgtgaaaatttttcaccaacagtcactaaaataaataccaaaagcagatcttcaggaagaagagaaattattctttaaaataagcatgacaatacagtaataaacaaaagtcatcaaaaagagtaaatacatgaatagcataaatgtttaagatgataataacatcttgagaagttgaaggatatataagttccagtgacatactggagccagctagcactggtttgtagaaacttactgctaaacattcagtaattctgaaagctggtggttaaatgccttatttttttaaccattattaaaaattaaattgtatacaattataattaaatacatgayatgaaaaacaaatgtaataaatactcaaaagtcatcacttcctaattattttactacattttattatatctgtgctcctgaggttatttgcttctattaaatctttatgatgatggcctgggcatagtggc

SEQ ID NO: 905636 - DNA, 632 bp, Homo sapiens
gggaagtggagagaaaatggggaaatacaggtcagggaattcaatgtagcagatctgtaggacaaacaagtctagagaacaaatgtacaaatgaggactataggacataaaagtgtactgtatttgggattcatggtgagtagattttaactgctcctgccacaaaaacaaataaacagataaatatgtgagatgatggatgtattaatttgctttattccagtagcctttttactatatgtatcccacaacatcatgttgtataccttaaatatacacaacatttatttttttaaaggaggagatacttccatatttggcatatttttaatagctccaaaaatgtcttcctgactccagaaagttccatatttaaaatcccactacacacaacacaatcttttattacataacagaatttgaaaagcaaaacttaaaacataaatcttcctagaagagtctatatttcaattagatttttattaaagttaaaattactggtagctgagcttttcctgagagaccactgtgatcacagaaaattactgacatcytaaattgaagggtgactctttggagagaagagaagggtagaaaaagaggagagatattggccactgtcccattttacc

SEQ ID NO: 905637 - DNA, 586 bp, Homo sapiens
aaaaactaggcaagagaagttcacatttgcatagcctatcaatagtgtctgccaagatatttccattttttagtgtatcagaaaattgggcacacatgactaacgtacttttttcattttaaatagaaacgtgtgtgcatatatatataaaatatacatatttatgtgtgtaaatatgtgtgcgtgtatatgtgtgtgtgtaaaaccaatcaacttctgctgaaaaacttctgtaaaactcatttttttttctctagtatgtttcctctgaaggcaatcttcacatctagggaatattaatggtaataataacagcattgatttattgagagttttcctatgtaacaattactatataagcttattttcattcagtatgccatttaatctatttctccagtttcaatattaatattggtacttaataaatgagtaaactgaaaataataagtttaaaatcttttttcacagctaatcagcaatacaamtgggatttgatatcagattcatgcgattccgaagaccctgaccaccaaatgcaaaaggtacatggcaatagctgattgcaatgagagaaaaacaacta

SEQ ID NO: 905638 - DNA, 562 bp, Homo sapiens
tttcaatgcatgaaatgtgacatcattctatttaattagatctttaatttcagcaaagttttataatttttcagtgcacaagtcttatacttcttttgctaatttttttctaagtattttattccttttgaaactgctatgtaaagacttcattcttgattctttttaaattattccttgtatgtagaaatgcaattgatcttgacttctatagttctgatatatttgtttgatgtatttgttcttgttacaattttttgagaatttcatagattttccacatacaaaattgtgtcctctgcaaataaagagttatacattttcctttccaatttgaatgctcctctcttggtttttcttgcctgaatgcactgactaaaatctcctgtacaatatttaaagaagtaacgagagtcatcaatcttaccttgttcactttcttagggggaagcccttcatcatttcacaattaagaatggtgttcttataggtttttttgtagatgcttttatcaagttgaggagtayccttttcattccaagtactttcaaaattttactat

SEQ ID NO: 905639 - DNA, 670 bp, Homo sapiens; identical to SEQ ID NO: 904418

SEQ ID NO: 905640 - DNA, 639 bp, Homo sapiens
agaaataataaggcaaatgggttctgctttctgtgatagagatgyagggctgtttaagagtaggacatttttattataattagatgaaaaacgttactgtaatgttctatcacaagtgacaggtaagagagattagaaaaattttttaaaatattatctattaatgaattactttatagctagcaactaacaaataaaaatgccatgtaattctaagttttgtggtaattgtattttccagtggaaatgcttttatttacatgtttgtaatttagaaataagtaatccgctttacttttttatatcagccgaagaactggattcacttgcatatgcataattataaaaacatatcagagtcccagatgaggctttgttgaataatattatttgaaatattgaataatcttcaccagttcaacttctcaaagtagatacaatcattttccctgtgacttctcttcattttatttttctctaaccaataccattaatgttctaatcccaaggttgcaccatctgtgctattctttaatagaaatctggctcatattcactgactttattataaagaaagtccccattacttgccattctactttctaaatatgtctttacactgtactttaattagcattc

SEQ ID NO: 905641 - DNA, 670 bp, Homo sapiens
agacaagtaaatcccattttctgaagagaaattcaagccagctgcagaaatttgtataagtaacgaggagctgaatgttaatctccaagacacccagggtccccatgctgtatgcagcstagagactttgtgccctgtgtcacaccgactccagccatggctgacagggactaatgtagagcttagaccgtggcttcaaagggtgcaagcctcaagccttggcagcttccacatgatgttcagcctgccactgcatagaaatcaataattggggtttggaaacatctgcctagatttcagaggatgtatggaaatgcctggatgtccagatagaagtttgctgcaggggcagggccctcatgcggaacctctgctagggcagtgtggaaaggaaatgtggggccagatcccccacacagagttcctactgggacactgcctagtggagctgtgagaagagagccaccatcctccagaccctagaatggtagatccaccaacagcttgcaccatgcacctgggaaagccacagacactcaatgccagcctgtgaaagcagccgggagggaggctctactttgcaatgccacagaggcagagctgccaaagaccatgggaacccccctcttgaatcagcatgacctggatgtgagacatggagtcaaaggag

SEQ ID NO: 905642 - DNA, 613 bp, Homo sapiens
gaatgttaatctccaagacacccagggtccccatgctgtatgcagcctagagactttgtgccctgtgtcacaccgactccagccatggctgacagggactaatgtagagcttagaccgtggcttcaaagggtgcaagcctcaagccttggcagcttccacatgatgttcagcctgccactgcatagaaatcaataattggggtttggaaacatctgcctagatttcagaggatgtatggaaatgcctggatgtccagatagaagtttgctgcaggggcagggccctcatgcggaacctctgctagggcagtgtggaaaggaaatgtggggccagatcccccacacagagttcctactgggacactgcctagtggagctgtgagaagagagccaccatcctccagaccctagaatggtagatccaccaacagcttgcaccatgcacctgggaaagccacagacactcaatgccagcctgtgaaagcagccgggagggaggctctactttgcaatgccacagaggcagagctgccaaagaccatgggaacccmcctcttgaatcagcatgacctggatgtgagacatggagtcaaaggagaacattttggcactt

SEQ ID NO: 905643 - DNA, 606 bp, Homo sapiens
ttgtcagttcagaacaattttcttttatttctttcttattcttattctttctgttcggctactctgcattttatgtgtgcattttttgttttaaatttgcactcacgtgtggattttttttctaaatttgcatttaatttttacttttttgtctctcaagaattccaattttttaatttccttggttcttggagaaatgttcagtttcaaacatctgaaacagtttttagagcattcaatcaacttttcactgcctccttttaagtattcatttttgaaaattcttataaaatctttcttgatttcagaatattcatttttcacaactgatgctcaatttttatacctgtgacaacttcttgaatcatgtcaataataggaatgagaatacttctaatttttttcttccacccaagaaaagatagcaccacccttttgaattgcagcattattttttatgtgtgtgaggatatgttcctatttatatgtcctcayagctgaagaaagaaagtcagtcatacttggcctctgctagaacagtagaagccaaaggagataagacttcctccatatccctaagataaaaacctttgatcttctaattat

SEQ ID NO: 905644 - DNA, 606 bp, Homo sapiens
ttgtcagttcagaacaattttcttttatttctttcttattcttattctttctgttcggctactctgcattttatgtgtgcattttttgttttaaatttgcactcacgtgtggattttttttctaaatttgcatttaatttttacttttttgtctctcaagaattccaattttttaatttccttggttcttggagaaatgttcagtttcaaacatctgaaacagtttttagagcattcaatcaacttttcactgcctccttttaagtattcatttttgaaaattcttataaaatctttcttgatttcagaatattcatttttcacaactgatgctcaatttttatacctgtgacaacttcttgaatcatgtcaataataggaatgagaatacttctaatttttttcttccacccaagaaaagatagcaccacccttttgaattgcagcattattttttatgtgtgtgaggatatgttcctatttatatgtcctcacagctgaagaaagaaagtcagtcatacttggcctctgctagaacagtagaagccaraggagataagacttcctccatatccctaagataaaaacctttgatcttctaattat

SEQ ID NO: 905645 - DNA, 641 bp, Homo sapiens
ttagttaaaacgtaagatatgatttgcacccattatctcgtaaaaatcctaaatgtgtgatgcctcttcaggatcagaaatatatttaaaatcaaattcatcatcgttttttctaaactttcccctcttcttgcttcccttcactacccacccctgctatgagtaccaatttacctcaataactttgattccatatgcctttggcttctctctttcctgtactctgtgtcattgaatactgccaccaaatccctttgattgttcctgtctctgatcaaatgtctcttctctttcctatcctgcaaaatgtagttctggcccttattacttcctgtctagacaattacaataaattccagtcaattttccacttgagcccaacctaaacaataacactacttctgtcttaatcttaaaaccttcagtggctccccattgactaaagaatgcacccaaaacccttaccttgtattcaagtccttcaccactgcagccccagccaaaccctttctccatgacattttttgtttgactggtttttttattgttattgttattttttaaacaacccccaggtaattgcaggaaatttgtgcagaaaattrtgacaaatgatataaatctcatccctattttctcca

SEQ ID NO: 905646 - DNA, 623 bp, Homo sapiens
cacaaaatctcagttgtatattgatatatggtcagaaaattctgtagaagaaataaatccacttttgtatgcaacagttttcatccgtgaggcttaatatggttagcacctactcccatcccagtgggtaaaaccaaaaatgtcagcctatgtttctccaacttgaagagcaacttctataatagtagctttgagcaactatataacaaaggaatctaaaacttttgcttctatccattaatactcttactcatctataaaacaagtaacttaaaaaaaaaagtaacaaaaaagaagtagaaggaaaaacaagttttacttttttgaatcaatcaatgaatactttcaagattggaattgtataatgttggcattcctagccaaataaatgcttatgaagtggactggtatttatgtgcatctttgtttatgtgtgtttagtatccttgggcctgggtttttttccatgtaaactaataagttttgttaaatgyctcttgaattaagttaagaaggctatttgttagcaaaatgtatcactctcggcaaaggctgtcatcacatgagctacataacaagcacaagaacaaaccaaaattccccagaaaaatcttgctcatcag

SEQ ID NO: 905647 - DNA, 666 bp, Homo sapiens
cttcccttatataactgaatatataaccctataacctttatataacctttaacagcactcaagtcacttcctcaatgttttactccttagaagttttttctgccagttacactaaatcatctctctcaagttcaaagttccacaaatctctagggcaggggcaaaatgctgccagtctctttgctaaaacataacaagggtcatatttgctcccattcccaacaagttcctcatgtccatctgagaccacctcagcctggatttcattctctagatcattatcagcatttttgtcaaagccatcccacaagtctctagagactgctaaactttcccacattttcctgtcttcttctgagccctccaaactgttccaacctctgcctgttacccagttccaaagtcagttccacattttctggtatcttttcagcaacaccccactctaatggtaccaatttactgtgttagcttgtttttacactgctaataaatacatacccgatactgggcaatttataaaaggaaaagrtttaatggacttacagttccacatggctggggaggcctcacattcatggtgaaaggcaaggaggagcaagtcacatcttacatggatgtcagcaggaaaagagagagagcttgtgcagggaaattccccattat

SEQ ID NO: 905648 - DNA, 597 bp, Homo sapiens
cctcagataatattaaatatatgaatgtgcttagctcaggtcttgacagagtaaatactgagtgaatgtggatgtaatgaatctgcttctacaggggttgtcattggggcttccgtgagaggagcaagaggatggggttataaggataaggaagtagcacaattaattcttactctcgctcacatcataggccaggctgtgtttgctcagttctttaatttcagcactaccactctttgaggatttttacccagagatgggtaaaaattattatgggtaacattattattatcataataatcttattaatgaaactgtctttgtctcacttttctggaacaatgcaattttgcaacctctgacaatctaaggcagctatatatactgcccacatagtgaccctcacctcctgcttccacaaagtgaataaattgaaataccctcattctgtttccaggcttctacaaacttgcacatttatacgacctgaaaatatttctgaccacctaaacatctgtagtttgtgtaattactcagattytaaacacttccacctagctttactgcagattttacattgccattcacttgctgcac

SEQ ID NO: 905649 - DNA, 601 bp, Homo sapiens
aagatgtcagaaactcatttctaatcattatwattagggcatagacaagtgatccatctctggctaatataataaaataatatagtttgttttgttctttatattcatattctttaagcattttattatttttaattttctttttacttttcaaactttctgttgaaaactaagacacaaacacacacattagcctaggcctacgcagggttggaattatcaataacactgtcttcattgatacagtgatcaatatcactgacaaccataaaattatgccactggaaggtctttgggagctgtaacatgcatacagccatcatcttctatgatcacaatgccttctgctggaaaacctgctgaaaaacagtcggcctgagactattttacacataacttttttttttttttttttttgagacagaatttcactcttgttgcccgggctggagtatagtggcacgatctcggttcactgcaacctctgcctcctgggttcaagagattctcctgcttcagtttcccaagtagctgggattacaggcacccaccaccactctttaaaataacaataaaaagtatagtatagtaaatacataaa

SEQ ID NO: 905650 - DNA, 599 bp, Homo sapiens
aattcctggacccatacaacttaccaagattgcaacataaaggaatatacgacctgaacaaaccaagaatgaataacaarattgaacagtaataaaatgcctcctatcaaagaaagcccaggaactgatggcttcactggtgaattctactcaaaattcaaagaagagcgagtaccaattctactcaaactatttaaaaaaattgaaaagaaggaatactttaaaactcattctacatggccagcatgcctccatactaagaccagagaagaacaaacaacaaaagaattataggcatatatctctaatgaacattggtgcaaaacccctcagcaaaatactagcaaacttaattcaacaaaagattaaaaagattatgcaccatgatctagtgagattcatcccagggatgcaaggatagttcaacataagtagatcaataagcatgatgtgttacattaacacaatcaaagaccatatgataattttaacagatgctgaaaaattattctgtaaaatgtaatactctctcatgattaaaaactcttaagaaacttagtatagaagcaatgtattagactcataatcccaaaagacac

SEQ ID NO: 905651 - DNA, 564 bp, Homo sapiens
ggtggaggttgcggtgagccgagatcacgccactgcactccagcctcggtgacagagtgagacctcatctcaaaaaaaaaaaaaaagtttcttctctagtagccatgatattcacagtcatgagcacataccatgtgccaggcactgtactgcatgtattatattcatcatttcattttatcttcaatccaaaccccatgaagtttagcagacctttcagtatttcattatttaaaaaaaataggtatgtaaagcctctgcagaattccagaatggctcctgaataatgcacagataaactgttcagtaaacataatggttagtttattttgttgttttctatcctttgaaatagaagcattgaaaaaaacatgggtggtaaatcctcccaacagaatgcttggttttcaagaacacattgttctcttaaactgcacaaaagcagttactgtgtgtagagcagataatggggcatataaacttaaaaggacctcagataccacctagtgaaaacccttgattttacaaatgaraaaactgaagacaaggaggagaaatggtttg

SEQ ID NO: 905652 - DNA, 675 bp, Homo sapiens
gatctaaaaagtgcttagcatgactctcatcttttcaaatacattgaatatattaacttaaggcaaaaaattaacatatttagaaaaggttaaaaaaggagaaaatatgagagcatgctcaagtaacttactactatgcagacatctggaattttaaaatagtgatcctcccgccttggtctcccaaagtcctgggattacaggagtgagccaccacaccaggcctaaatttttaatgtggttgtttggttttatgcttgttaatttgctttactttcttatagatgctaaatgttaggcctttgtcagttgcatagtttacaaaaattttctctcattctgtaggttgtctgtttactctgttgattattttgctatgcagaagctctttaattaggtcccatttgtcattttttgttgttgttgcaattgcttttcatgtccttgttatgaaatctttgctgggtcctatgtccaaaatgatatttcctaagttatcttccagggttttttaatttttaggttttacatttaaatatgtaatccatyttcagttgatttttctatatggtgtaaggaaggaggtcctgtttcagttttccacacattgctagctagtttatcccagcacgatttattgaatagaagtcctttttccattgcttaattttggaa

SEQ ID NO: 905653 - DNA, 617 bp, Homo sapiens
agcttggatgttggtggtatatagaaatgcaactgattttcatacattgcccttgtatcatttaactttgcttacattgtttatcacatcaagaaacttttgggcagaggctatggggttttctaggtatagaataatataatctaaaaaaaaggatagttggacttcctttctttctattttgatgcctattatttctttctcttatctaattgctctggctaggacttccagtaaaaagtttgagtggtgagagagagcattaatgtcttggcctgcttctcaagggaatgtttccagcttttgtcccttcaatgtgatgttggccatggatttatcatagataaattttattattttgaagtatgttcttttaattattttgaagtaaagtttctagttttttgaagatttttaacaaggaaggagttgaattttatctaaaaccttttctgaatctattgagatgatcatgtagtctttgtttttmgttctgcttatgggatgaattaaatttatttatttacatatgttaaaccaaccttgcatctcaggggtaaaaaccaacttgattatggtggataaactttttgatgtgctgtttagtttggtttgct

SEQ ID NO: 905654 - DNA, 585 bp, Homo sapiens
ggtctacgattttgtcctacttggaattcattgagcttcttgtaattgtatatttatatcttttttcaaatttgggaagttttccatatttatttattcaaataatttttctgttttttttttttctttctcttcacctcctgcaagttcctgatgtagtttgcatgctcatcacctctaaatcccatgttgaaatgtgatccctaatgtaggagatagggcatagtggggaaggtttgggtcatggaggtaagtttctcatgaatggtttggtgccctactcacagtaatgagtgaattctcactctattatgtcatgtgaaagctggttgctgaaatagcctggtacttcctcccttcctctctcaccatgtgacatgctagctctccttacacctcctgccatgagagtaagcttcctgaagccctcaccagaagcaaatgccagcactatgcttcttgtrtagtctgcagaatagtcagccaaaataaaccttttttctttataaataacccagcattagatattaatttacagcaatgtaaaatagactgacatactaacacaagatatattttgatctg

SEQ ID NO: 905655 - DNA, 635 bp, Homo sapiens
attggttagttattgagtgcatgggcactcaataatcatttgttggataaataaaataatgatgaataaataaaagaataaataaaactggctgagaaaagaacaaataaatgaaaggataaagagcaagcattgatttgaccaatgatgaagagtaatttaaactgacagaaattttagttcacacttctatgttgaacactggttaggctttgttaagagtcaactttgtactcaagagggacattgaaattttgaaaagatctagagaagagacaactaaatgattaagggatattattagaaaaatctaaataaaaggcttttttgagtgaaaggaaagaaatgctgtatgatagctgtatggtagtcagctgtggtggtcttgaagtattaataccaattgcctcagtaaccagcaattgaaagggaaccgggccagaggtcacataaggcttgtaatttggcactaccaccaaaaatgtgaagggacattcagggtccacggtgggtttcctctcccaacactgaagtaagttggtttaaacacaataaggggggatttactttatactaaacaaagtaaatacacatgmactgcaattgaggtatttctgtgatacctattgatagtt

SEQ ID NO: 905656 - DNA, 597 bp, Homo sapiens
tttatgtaaaatgattttaaacgtggcattttagtaatgcttgctcttcagtgagttaacattgacttcatctttttttgtaactaaatgaaaacaaaacagaagttgcaaatatttactgaatatcttaaaaacattaaaaagatatctgcatgttaattcaaattaaaatccctaatacttaggcccttggtttaggaatatgatcgactccaatttttggtttgtgactccaattttgattcatttccaatcattttctttgagcacagagatgcaatatcatagttcgtgtaaagacttgtaagaggccttcttaaaagcaatgaggtaaaacagtaagcccttttactacgagtttccgctcttctttccaaaatctcttcagatgtcaaagctgtatattaaagttttagaataaagtctccacacaacgatggaaatggtcagcacgttgtttaggggtyggtgtcaataagcggatgtgaactctagctataacttgaaggcaatttttatgtataactttaggaatccatttctgtgtgaacaaattatagtgatttaaaacatcctttcactcattataatgttgta

SEQ ID NO: 905657 - DNA, 625 bp, Homo sapiens
gagttgcttttttcttgctgctctccaaattctctgtttgtctttgtctttcaacagtttagacacaatgtatctcrgtaggggtctctttgggttcttgctacttggatttcattgagtttcttggatatttatactcatggcttttatcagatttgaaaagttttcagtcattattttttcaaatactctatgtggccctttctcttttccttttgaactcttataatgagtgtgtttgtctgcttgaagatgttccatgggtcccttggtctctgttcaattttctttagtctttctgttctcagactcaataattttcattgttgtgtgtttaggtttcctgattctttattccacctgctccaatctgtctctgagttcctctagtgaattttttatttcagtttttgtacctttcagctccagaaagtttcccaaaagggaggaaagagaaaaattgaagtggatggggagaaggaaaagggccccagccttttaaatcccctagaagtcacttcaatccaagagaaagtggcttagaacaatgagaggaagtgtaacaccattagctgccaccattttgtctgcttttgtgtgatcagaagcagcaatcagtgatcag

SEQ ID NO: 905658 - DNA, 548 bp, Homo sapiens
acagcatgggcaaaggcagggaagtagggaggagcggagagcagggagactggccctgtgggatggagggcaaccttgggaagtggagaagaggcagtggagaggcaggggttggggcccagagagctggtggaagagaatttgcttgaaggtgaggaatcttccctgggattctccttctggattctgaacttcttccttcaataaagaggagtttgtgaattagctcatggcttgatttaaatcaaatgcaggccaggcggcaccgtggctcacacctgtaatcccagcgctttgggaggccgagtcagatggatcacctgaggtcaggagttcaagaccagcctggccaacatggtgaaatctgtctctactaaaaatgcaaaaattagctgggcgtggtggtgggcccctgtaatcccagctactcaggaggctgaggtgggagaatcacytgaacctgggagacggaggttccagtgagccgagatcgcaccattgcactccagcctgggtgacagccccatctcaaaaacaaacaaacaaaa

SEQ ID NO: 905659 - DNA, 553 bp, Homo sapiens
tccagtgtctctcccccagcaccatacaacagcctgctttgtgtttcttctgcctacctcttcccctaacttcacctcttgtttaggtgcacatttctttcaaaactagaccattaacttcttgaggaaagtcctaagtcttttcctttttgtattacctcatacatatactttacctccaatcagaaaaaaattgtcttctctttggtctcatagctgttatttctttccagctttggtctgtcaaaattaatgttatttggaagaagaatataaaaatagaaaaacacaatagttgagtcaagcccatgaaagcaaaatgctctctaagaggaaccactttcagggctctaggctaaatgctatttgaatcctgtgaactggaattcctctgagagatcttctctgccttcctcaggcaggccagtcttggcyggacacctctggttttgccaagaaagcacagttcctgtctgcaaacagcacaagcatagtaggtcagcagacgggcagagctggctcaaatttattaaaagcatcttcatattgtagc

SEQ ID NO: 905660 - DNA, 620 bp, Homo sapiens
aaatatctttccagcttttagtatcctcttcaatttctttcwtcagtgtcttatagttttccttgtataaatctttaatttcttgggtcagattgattgctaagtattttatgttctttgtagatattgtaactgggattgctttcttgatttcattttcagattgttgtgtatatataaatgctactaatttttgtacgctgatttttaatcctggacatttactgaatttgtttgttggttctatttgatggaatctttaggttttcaaagtataaggtcatgttgtctgtcaacaagcttaatttgacttctttctttccaatttgcatttttctttttctttttttttttttttttttgagatgcagttttgctcttgttgcccaggctggagtgcaataatgtgatctcagctcaccgcaacctccgcctcaaaggttcaagtgattctcctacctcagcctcccaagtagctgggattataggcatacaccaccacacctggctaattttgtacttgtaatagaggcagggtttcaccatgttggttaggctggtctcaaacttctgacctcaagtgatccacccacgtcggcctcccaaagtgctgggattac

SEQ ID NO: 905661 - DNA, 620 bp, Homo sapiens
aaatatctttccagcttttagtatcctcttcaatttctttcatcagtgtcttatagttttccttgtataaatctttaatttcttgggtcagattgattgctaagtattttatgttctttgtagatattgtaactgggattgctttcttgatttcattttcagattgttgtgtatatataaatgctactaatttttgtacgctgatttttaatcctggacatttactgaatttgtttgttggttctatttgatggaatctttaggttttcaaagtataaggtcatgttgtctgtcaacaagcttaatttgacttctttctttccaatttgcatttttctttttctttttttttttttttttttgagatgcagttttgctcttgttgcccaggctggagtgcaataatgtgatctcagctcaccgcaacctccgcctcaaaggttcaagtgattctcctacctcagcctcccaagtagctgggattataggcatacaccaccacacctggctaattttgtacttgtaatagagrcagggtttcaccatgttggttaggctggtctcaaacttctgacctcaagtgatccacccacgtcggcctcccaaagtgctgggattac

SEQ ID NO: 905662 - DNA, 574 bp, Homo sapiens
ggaattgccgatcccagtggtcacaacttgagttcccacagacctttccacaaagtggtaaactgctctgagtctctaagtgaacttgaaaggcaggctargccacaaggactacaactcttaggaaagtcctagtgctgaactgtgcccagagacagtggactggggggagggtgatgtgacctgctgagataccgggttgaggcagtcaaaagagtgctggcatcatccctcccctaaccccagtctgctcagctcacagctacaaaagagacccattacttctgcttgagaagataagaaaaaagagaggggaagactttttcttgcatcttggataccagtacagccacagcagaatagggcactgatcagagttatgaggtctctcttccaggccctagctccaagatgacatttctagacacaacctgggccagaagaaaacctgctgcattgaagggagggactcagttctggcatcatgcatcacctgctaactgaagagcccatgggcccagaataaacagcagtgataactaggtactatgtcgagggccttgggtgagcctct

SEQ ID NO: 905663 - DNA, 574 bp, Homo sapiens
ggaattgccgatcccagtggtcacaacttgagttcccacagacctttccacaaagtggtaaactgctctgagtctctaagtgaacttgaaaggcaggctaagccacaaggactacaactcttaggaaagtcctagtgctgaactgtgcccagagacagtggactggggggagggtgatgtgacctgctgagataccgggttgaggcagtcaaaagagtgctggcatcatccctcccctaaccccagtctgctcagctcacagctacaaaagagacccattacttctgcttgagaagataagaaaaaagagaggggaagactttttcttgcatcttggataccagtacagccacagcagaatagggcactgatcagagttatgaggtctctcttccaggccctagctccaagatgacatttctagacacaacctgggccagaagaaaacctgctgcattgaagggagggactcagttctggcatcatgcrtcacctgctaactgaagagcccatgggcccagaataaacagcagtgataactaggtactatgtcgagggccttgggtgagcctct

SEQ ID NO: 905664 - DNA, 641 bp, Homo sapiens
acaaacaaatggaaaaactttccatgctcatggataggaagaatcaatattgtgaaaatggmcatactgcccaaagtaatttataaattcagtggtatcccgatcaagccaccattgactttcttcacagaattagaaaaaactactgtaaatttcatacgaaacaaaaaaaagagcccgtatagccaagacaatcataagtaaaaagaacaaagctggaggcatcatgctacctgacttcaaactatactacaaggctacagtaatcaaaacagcatgatactggtaccaaaacagatatatagaccaatggaacagaaaataggcctcagaaatagtgccacacatctacagccatctgatctttgaaaaacatgacaaaaacaagcaatggggaaaaaattttctatttaataaatggtattgggaaaactggtgagccatatgcaggaaactgaaaatagaccccttccttacaccttatacaaaaattaactcaagatggattaaagacttaaatataaaacctaaaaccataaaaaccctagaagaaaacctaggcaatacccctcaggacataggcatgggcaaagacttgatgactaaaacacccagagcaatggcaacaaaagacaaaattg

SEQ ID NO: 905665 - DNA, 593 bp, Homo sapiens
taccatttcaatctcgctgctagttattggtctgttcagggtatctawtttttcctgatttaagctacgaggattttaattttccaggaatttatccatctcttctaggttttctagtttatgtgtgtaaaggtatacatagtagccttgaatgatcttttgtatttcagtggtgtcagttgtaatatttcctgtttcatttctcagtgaggttatttggattttctcttttcttttattggttaatcttgctaatggtctatcaaatttatttatcttttcaaagaaccagctttttgtttcgtttatcttttgtacttttttgtttgtttcaatttcatttagttctgatctgatcttggttatttcctttctcctcctgggtttgggtttggtttcttcttgtttctctggttccttgaggtgtgaccttggattgtctatttgtgctttctcagactttttgatggaggtgtttggggctatgaacttttcttcttagcactgccttagctgtttcccagaggttttgataggttgtgtcattattgccattcagctcagaaattttttaaattttcttcttgattttg

SEQ ID NO: 905666 - DNA, 690 bp, Homo sapiens
aatttccgtgtaagctgtgtctgattctgaagtatgcttttaatcatattgtgattcttaatttcagagagttagcctctggttaaagatgacagattgaacttatatgtttacctgttctctctcctgaaatgtaaaataacagtaatgggatatttaaaaatgcttaatccacaggtggtggcaggatggtagaggtaaaataacaacaaaattttggaaactagaaagcagacggacaaatctacttaatgactaaataataccaaggaaactaagttctaagccaagaaacaacccaatttacattgcagaatttcccaaaggctcaggacattaccaaattagatatctctagaagcgaggataatattgggatgagaaaaggaaatattggtcaaaactctttagattcatgttaaacctttctttatgccacacatcttaagtacctgaacaccactctcccctggcctacagtataaaactggttagaaggtgaagaaatttaagggaaggcttacatatggaagagtaaaacattttacattcgttttgctttcagtgcccaatactggcagccaagtttatacccttcagaaagacaggtgagaaatccttctttggkagtatctaagcagtcctagaaggcttctccacaccagttccttctccacaaccagggccaac

SEQ ID NO: 905667 - DNA, 663 bp, Homo sapiens
atttctctgatgatcagtgatgttggcattttttcatatgtttgttggccacttctgtcttctttcgataagttcatgtcctttgcccactttttaatggagttacttgttatttgcttgttgaattgtttaagttccttatagattctgaatattagacctttgtcagatgcatagcttgtgaatgttttctccctttctgtaggttgtctgtttactctgttgatagtttattctgctatgcagaagctatttagtttaattaggtcccatctgtcaattattgtttttgttgcaattgcatttgaggacttagtcataaattctttcccaaggccaatgttcagaatggtgctttttaggttttcttctaggatttttatagtttgaggttttacacttaaatctttaatccattttgagttaaattttgttattttcgattcttacttttattttttatagttcagctggtttcacatcaattgagttaaattttatatatggtgaatggtagggctccagtttcattcttctgcatatggccagtgagttatcccagcaccattaattgaatagagagtcttttctccattgcttatttttgycagctttgtcaaagatcagatagctgtaggtgtgtggctttatttctgggttctc

SEQ ID NO: 905668 - DNA, 590 bp, Homo sapiens
tttaagcagctgtttcaatacttttatatttgctgttgagctgataactgttgtcccatgatgaaaccctagcttgaaaattccctcaaacttggaaatcccaagcaggcacccattacttaytgactgggcagtcactttacctttgttctcaagggttctgtcgcaatctgttgctgagttcctcataggggacaccagctgctgggttcatgctgcagaccctggctgagtgactgatgaaaagagtactcagacacaggtatgcagtgtaagagaagctaggggactgtccagcactagtggctgaagaatgagcagtcccaaacagctggggctgcttgcttttattcaatagagacataatgctgaaagcctggagtaaacacaatctgcgggtaattagcatcattccacctttcagggagcagtcaggcagcatggatgatcaaaggtcagctcctggtcaacataagtaaacaaacctgtttaagataaattcccctacccttccttgaacccactccttgccctctgcctcagggttggagaacagctgccttcagcttattctccctcaaagctgtgca

SEQ ID NO: 905669 - DNA, 658 bp, Homo sapiens
gcgggctgaggtctgcacatgcatatgtwtgtgatcccacagaactgggcagagatggggctgggaaggaagagggacaggcatggactgaaaggtggttctcctcattctgccaagttctattttagagctcagaggaatattatttaaagctaaaccttaattttcaggttactttaaaggaatatttgccaacttaggaggatagaacatgttttatttaacagcttgtcagctagatttcaaaggtttaaatatttagacacatgctatgtgggcctccatttgtattcttatgcataggcctgcagtttcagtgtcaggtatttattttacaggtactgaaatggatcaagtaagtgacttctcttacttctctttctccttctacacaacagcaatatacagccttaaccaaacaggtttaacaacaaattgtacccaggtgtattagtttattctcatgctgctaataaaagatattactaagactgggtaatttataaaggaaacagatttaatggactcacagttccacatggctggggaggcctcacaatcacggcagaaggtgaaggaagagcaaagtcacatcttacatggtggcaggcaaaagagtttgtacagagacaactcctatttataaaatcatcagatc

SEQ ID NO: 905670 - DNA, 558 bp, Homo sapiens
tacctaactgtattcttgtacctattaaccaaccccttcttatccmccctttcccactactctacctactgtctcataaccaccactctacttcaaaacttttaatattttaaaatgcattgtgaatctctaatgttattggcagtgaatctgtaagagtctgctgcaaactccatccttgcttcctcagaggaaataattcagctgaggggcagaagtaggtgtaaggcagagggagagactcaggcaagttttagagcaggagtgaaagtttattaaaaagtcttagagcaggagcaaaagggagtaaaggacacttggaagagagccaagtgagtggcttgagagagtcaagtgccctgccctgttcggcccttgagttggcgtttatacattggcatggttccggggtttgtgtgccttctcccttgattcttcccttgtggcaggctgtccacatgctcagcggcctgtcagcacttgggaggggccacatgcgtagtgtgtttactgacgttgtgcttgtgcttacatgaggtgtttttcccttaccagttg

SEQ ID NO: 905671 - DNA, 607 bp, Homo sapiens
caccaggaataccaggaaaactaacatggaacaacagtgatatgtcaatgtaatttatttgaaagcaacatagataacctctatctgacagawtcctagattatatttctctttagctatagacagatggagatgtttttattttcaacacaagggtaccccttgtaaatagttcttcaatctaccctatttgatcatagttatatgattaatcaagtaattattcttgaaaaactaaaattatgtaagaataattttagttatttaggtatttttccatccattattctattttctttccaaagttttctccaataatgaaattatgttcaatttattccatataaatcaataattattgcctttctgtgtttcctgattacatttatcatgttaagatgcacttccaaattcagtttaggcttacatttaatcatatgtaatgcacttatttggttttctaaccacacaggctatcaaatggacttttaatcaaacctcatgcttatgaagtttttgacctaaaacataaggttataggcatctggctaatattaatgagatatgtagaacttataaaaacaaaataaaaccatttctactttaa

SEQ ID NO: 905672 - DNA, 605 bp, Homo sapiens
ctgatgctactgacaccagggcaacactttgagaagtttcaagacaatggtccacacatttccagtgggattagagataataacttttggccaggagygatggctcatgcctataatcccagaactttgggaggccaagatagtgggatcaccagaggccaggagtttgagaccagcctgagcaaaatggcaagaccctatttaattttttaagagaattaaaaacaggtaacatttttaaaaagagagagaaccagttttaatgcacagcaaccaaccaatttgaaggattctttttttaatatttaagggaaggaaaagatacaagctttatatgactctatgcatgttgtaacttttcagttctaccttttcttttcctctgagtacattttctgtggtcgaacctgttactcagatgtgcatttggtgaaacaatttctatgcctaccttggaaagtctgtgcccctttcttcaggctaaaaggcatgctgcaggaaaccacatccaaatgtattcctccctttctttgtgccaaagagttggagtttcttagaactctagattttgacggaagtagatttcaatatctgcttcatcacta

SEQ ID NO: 905673 - DNA, 676 bp, Homo sapiens
cttaaaacctagatgacaggttgacaggtgcagcaaaccaccacgacacatgtatatttatgtaacaaaccttcacgttctgcacatgtattccagaacttaaagtaaaataaaaatgaaaaaaagaaataagaatcgtctgcagtttaccaatgaaaaaacagaggctcagagtagttttctttataataagagtggacccatgcttatttacattgcatcaatggggagaagaggaaaaattacaatcttttcttaacagaagagtagataagaaaaatagagtatttctgacttgcttggcctgttgtgcattttgttcagtgatttctagattattacggtagttcaattttatagttagaagcaaatcaaaaacagttaaatgtagaaaaaaggcgaagcaatgttctagaagattataccccaaaatatcttctcaaactgattcaaccacatgatcatagttaattaaaattatagattattccctggcactccccagctcattcagggattatgagtccagacaattaaaaaaaaaaaaaaaaaacaacgaaaacacccgaggaggtttaacaaagasaacagtcattctccaattgtctaggagtacttttgtggctcttatatgtagtttcatgaagataacttctaattctcataagattttcaa

SEQ ID NO: 905674 - DNA, 605 bp, Homo sapiens
actgtcaatttcacctacattaaattagctaaagcaagtcgcatggccaaaaccaatatcagtgtgatgagaagtrtggaaattagtgtggatgctgagagcagggtaggtatgtaaagaaccgcagcagtgcttacatccaccatagtcacccttccttttcttctcatgctcactgaaatgtcattggtttctgagtgtggcattaaaagaactgaatttttctacaaattaaaacaagattttacttttatgtctcattaaagttataatttcagaacatttttgctatgttaatcataaagatacagagacttgtatgattagagacatgggctcagtagagattgtgattactgtttataaatgattatggcaatatggatagtaatagccaacccaatttgagagagaaagacaaagttaaggttcatttattttttgaagacattatattaatatatactacatgagaaacagaggcaatctgtgtattgaaaaagtttattaaaagctcttttgatgctttatttggtagagctgtgacttacaatccttttgttctagatagaactacatttttgcagtgtgtacaactctactta

SEQ ID NO: 905675 - DNA, 657 bp, Homo sapiens
agaaagtcatataagcatagaaaaatgtctgaaaatacatacacttagttgttttcagtaattctgggagcagaatttgacttttagctttattgctataataagaataaacagccttgttgaatgttggttccctgaaaatactaccaaaacaatctgctgataatccatttaatgaatacataatacttttgtaagaatatcaagaaggcacatgaagcaacatgtaaagtacatttaaacattttgtgtaacatctgaaggcttctgtaatctgatattattctatcacctcttaaagaaaaattatctctccaatttccaagatcccaaatctaaactaaaacagatcatcttcctcataattccttgggaacttgaacaggtgtaattgggaatctccaagctcagggacacttacatctctaaaagggatataaaaatgccctgtcagtccacccttaggctgccttttgcacaacataacaagaatcagaatgcttggaaagaatatagttgacaagagccattttctccccctgtgtctagtctcagcagcactttaaccasttgtcagctaattggagttttctacttggctggcctagcagagaaacactacaccgactagtgtggggagctccatcttcacaatag

SEQ ID NO: 905676 - DNA, 657 bp, Homo sapiens
agaaagtcatataagcatagaaaaatgtctgaaaatacatacacttagttgttttcagtaattctgggagcagaatttgacttttagctttattgctataataagaataaacagccttgttgaatgttggttccctgaaaatactaccaaaacaatctgctgataatccatttaatgaatacataatacttttgtaagaatatcaagaaggcacatgaagcaacatgtaaagtacatttaaacattttgtgtaacatctgaaggcttctgtaatctgatattattctatcacctcttaaagaaaaattatctctccaatttccaagatcccaaatctaaactaaaacagatcatcttcctcataattccttgggaacttgaacaggtgtaattgggaatctccaagctcagggacacttacatctctaaaagggatataaaaatgccctgtcagtccacccttaggctgccttttgcacaacataacaagaatcagaatgcttggaaagaatatagttgacaagagccattttctccccctgtgtctagtctcagcagcactttaaccacttgtcrgctaattggagttttctacttggctggcctagcagagaaacactacaccgactagtgtggggagctccatcttcacaatag

SEQ ID NO: 905677 - DNA, 687 bp, Homo sapiens
ctttcttttttgaccctgccctatcttaaccctgcagttgttctgtggtctctggcctcaagtyctgtggttccacacccacatcccatgttacataggatggcccatgcccagtgtttgaaatagtccctggtttcctacctggcctatcctggactctgagtatatctcacactagatgatcatgattatgatgagcttcttccatttttttctccttaaaaacaaaggtaaaaagtagagtgtgctaaactaatctttaggatcaagttgcagtctgtttttcggaaagttcagtgttgaaatttgaaacctatctcaggaaaaaaaaagaaaaagaaaaagctgttctgaaagtcatgttgaactttgaatttttgaccactgttattttttataattaatatgagtatttatcacagtgctgtcagcaggtccatatgagacccctttaataatttattaccagtgtggggatgctaaagaagcccttcctgcatggaacaaggagaaacactttttggaaaatcaggtaagccttttttcttatgacccaaggaagtttttaaagttcacaagagacgaagaactaatgtgtttccattatttaaacaatgtcatggtaaaagtataggtgggggaagaaaagtgacttactagaacaagagacacaaacaggagtggcaa

SEQ ID NO: 905678 - DNA, 655 bp, Homo sapiens
gatttaaaaaaaattaactttaaaaggctcagagaggttggtgtacmtcttcacacacgaccaagctggagactgacaaaccatgtcaagaaactgcagatgagagattttctggctgaaggaaggtgatgtggtttggctgtgtccccacccaaatctcagcttgaattgtatctcctagaattcccatgtgttgtgggagggacccagtgggaggtaattgaatatgggggctggtctttcccatgctattctcgtgatagtgaataagtctcatgagatctgatggcttttatcaggggtttctgtttttgcttcttcctcatttttctcttgctgccatcacgtaagaagtgcctttcatctcccaccatgattgtgaggcatcgccagccatggggaactgaaaatgcaattaaacctttttttttccacagtttcacgtatgtgtttattagcagtgtgaagacaaactaatacagtaaattggtaacagtaaagtggggtgttgctgaaaagatacccaaaactgtggaagtgactttggaactgggtaacaggcagaggttggaacagtttggagagctgagaagcagacagaaaaatgtggaaaagttaggaacctcctagagacttgctgaatggctttgacaaa

SEQ ID NO: 905679 - DNA, 617 bp, Homo sapiens
aaatatgactgcactatatattgtgaaaagatgagatagaggtaagaacaaacagtttccagcatatggtgaattttgaatttataactaatgagcttgaatattttttcaatacaccattggaagactttagaggcttataatgtagggaataagattctccattctaagttttaggaagaaacctattataactggagaccagatgtgtacatttgaggaggtagagagggttaagtgcagttattgctaaattgggatgatgacaatgaaaattaaaaataaatggtttaagagattatcaagtagatgaactttccagaagaaattaaaatgtaaatttaattatattatgaatagtcttttctgaagtatgacaagtccaaatgaagcagaaatttccaaactgttatttactgatggtttccagatgttcttggcttctatttcatttgtctatatgcaacaaaggaaagtactaaacaggacatggggaaaccagcagttgctgccccaacacatcygtggcactgtgacacatattaaaaatggctattggcagctatctggttaacttgatcaaaatagatcaagcaaaccagaaataaatcaagcaa

SEQ ID NO: 905680 - DNA, 610 bp, Homo sapiens
tctagtattttattatttgcttaacttcttaatcatctatagtgatgtgttttttctcatttctgatattgaatttgaccatttctttattttttattcaaagaacacaacattgatccactctgttgtacatctacattctatttcattaatttctgtttttatcttatttttcttcttgtacttttgttgggtttattttaccatttactaaattcttgagttgtatgcttagacatacatattccctttcttcttctccaacaaagatatttaaggttacaacttcccttcaaatgactgcgttaacttaatcataaaattttgatgttgtatgcagtgtttttgttatttttgagtccacaatatttgtaaacttccctagaacttttttcttcaactaataggttatttgtaaacatactccttaattttcaagcatgaggcttttctttttatattcagtctgtagaattgttgtctgagaacatactgtgcatgagtacagttctttgaagtttgttgtcatttgctacatgactttttaaacatacttaagaacacraaaaattgttatttctaatttaatttatattttttctaagtacgg

SEQ ID NO: 905681 - DNA, 614 bp, Homo sapiens
tatgctatctacctgttaagtaatattttactctagttgataatgagacacagctgtggatatttgccattctcaggcaagttcctcttagccagctttgtttttgtttttttttaaacacagtcttgctctgttgcccagactggagtgcagtggcgccatcttggctcactgcaacctccgcctcccaggtttcaagcaattctcctgtctcagcctcctgagtagctgggattacaggtgcgcatcaccatgcccagttagtttttgtatttttagtagagatggggttttgccatgttggccaggctggtctcaaattactggcctcaagtgatccaaggttgtcagcctcacaaagtgctgggattacaggcgtgagccaccacacccggccttatctaactattctagttgccccccttctgaaatattagtcttctaattcaaagtctatgaagatatagagagtgctctgcatttatatgccattttggtacccttcaggtggctgttttgtggaagcaacaatcattcccttaccttgcttataaagccccaatagcagagcatatgcaaactaagaagagatyctgggcacaatcagaaattat

SEQ ID NO: 905682 - DNA, 606 bp, Homo sapiens
catctgtactgtccattatggtagccactggacacatgtggctatcaaacacttgaaatgtgcctagacctcattgaggtgtgttgtaagtgtaggtacatactggatttcaaagaytgtataaaaaaacagaatgcaaaaatctcattgatttttatattgattacatattgcagtaataatattgtggatatattaatgggttgtagaaaagatattattaaaatgaatttcccatgtttctttttacttttactaatgtaactgttagaacacttaaacttacacatgtgcctcgcattatggttctgctgggcagcgctgtggtacatgttttgtaaagagggctctggcagctggtgaatagacagcaggaagcaagagcagatgtgtgggaacctgcgctggaggctcttgagtcgcccatacagtgccaggtgaggcaaaatgttggaggaagccccagagaagtccattcgataaattttgccctccaattcttcttgaacaaattggagacagaaaagaaacacaagtccaaaaactgaaaaatggtgctaaatgacatatgatctattgccctgtttgaatgtcagaaatgcatga

SEQ ID NO: 905683 - DNA, 584 bp, Homo sapiens
tccttatttttagcatctaaagatttatcttgttctttcatttggaacatatttccctttttatttttattgactctcagtgttggtttctgtttattagatgagacagtagcatccctcagtccttttagactggcctcttgtaaaagaagaacctcaccaatccatccagtcagagatcctaaagtgcctctcaaatctctgtgtttgtccaaactgctgactctgtttttagtggccatctggagacaagagtatgccaagtcttgtcagtacctcagaatgggtaagctagaagccagtgtctctagatgcagctggaaaggttggggtgttagatgtttgttctagtttcttctatcctcaggataaagctgacagcagaagacaatctctcaccttccctacactaagcctggaagaagatctgtggaaaatgcctgcattctccttcctactataccctttgattctggcagaatattttctgtaaatgggtcctctgaatgtgyccacctctttgttttctgtgatatagggagactcaagcatgcagagcctcatcaactcctgaatctaggtgg

SEQ ID NO: 905684 - DNA, 587 bp, Homo sapiens
caaagagaacagatgtttatccagaggtaaaggagtgatggcagagcatatgactacagatccaggcagctagggagatatcacagagggagtttttgaaagttcatgttgatcgcttctacttttatagtcagagttatctcctgagaatacagatgagagaaagctattaaaccttaagggaaagtatgaaagaatcatccagtgggttgagagaaggtataagtcagggaaacataatatgattattttgtagcattaagaactcactggaggctgatgctaatgaatttaaaataaaacaagccagtatggaagtctgaacaaacatattaagtatgttcacctgtaggggtgcaggcctgaagtaggagaattgcattatataactagagttgacattttgttcatcaattgataaagaggaaaaaacgtttagggtatatgcaaagaagtgattatagtggtgctatggtctgaatattagtgtccatgtcawattcatttgttgaaatcttaacccctgtggtgatggtatttggaggcaggatcttgggtcacaagggtagaaccctaatgaatggcaa

SEQ ID NO: 905685 - DNA, 670 bp, Homo sapiens
atgacttaataagaaattacaaaagttaaacttctatttgttctcttctggtattttgttggttttccaattattattatttttattattatcattttgagggggaggagtttgcaatcacttgggtctctgggtgattaggaaaaatagtcaccaggcacttctacaagatcctaatgctgctcaaataggccagttgttcccagatgctcaataataacaaaagatttaatgaactgtgaacaaacatgtacatccgtcagcttttaagatcttgttttgatcggccccttctgtacatacctgggcccaggtcttgggcagtgctagcaggcattatctaagagaacagacacatggaactgtgtaggaaaaattcaatatcgttgccatttgttttccctaagtttatctcttatttagaataatttttaaaaaggtgatacagggatttcttctttccaatgaatagcaatatagtgtaacaagaaaactagtcatgacattacaagtttctgtctacttttgatttttaccgcctgagtgaccacggaaaatcgacttcacttgtctacagcttagtttctttatatatacagtgtggatagtttctgctgtgcakgtctatcttgtagtgcttaggcacatatcagatacatgcaaaattatg

SEQ ID NO: 905686 - DNA, 702 bp, Homo sapiens
ataattgggggtaaaagggctggggagtggtgtgaggtataaaggtttcaggcatagcaaacrgtatatgcgaacacccacatcagtcggggttcaggcaggaacagctggcacacctcaaagagaacttaatgaaggggcttttgatgaagatggaggcacagtcaaggaagccagccaggaacaagcaacagtggcaaacagtgatggccctggcccaaggaggcggagacagggaagtgaattatagtgatatggaacagtgcttcgtgcaggaacttcatgggacaaacccaggcactgtcacaggaggaagaagctggggataggaatatctcaacctctcttttctcactgtctaatctcctactgtctctcctattggttgaacccaactggaagccagagagaggacgaaggagcctctgagtaatgctgttcatagctttcagcctctaatggtacagggcagggcagaaaagtctagacaatggatctggaggggcaaacagagaacaacccatatagccaggtaggaactgagaaagaccagtaggaaagcctggagccacaagcctaaagagaattcaaacagcacccactaagtgcttaaaattcagttctcagaggacatcagtgaggtggctactatgattccattttactgatcagaaaactgaggctcagagaggttaagtaact

SEQ ID NO: 905687 - DNA, 614 bp, Homo sapiens
tcagagctcaaaggctggttcttcaaatmaactcatttgacaaaaataaaggaaaaaattaatttttacaaaatgaacagaatcttttataaatatgggattatgtaaagagacaaaatctatgacttctatggcattcttgagagaggagagtgagaaacttggaaaacacatttggagatacagtccgtgaaaaacttcccaatctcactagagatgttgacatgcaaattcaagccatacagataactcttataaaatacaatccaaaatgaccatcctatagtcaccagattcaccaaggttaatgtgaaagaaaaaaatcttaaaagcaactagagagaagggtcaggtaatgtacaaatagaaccataaaggctagcagcagacccctcaacagaaaccttacaagccagaagacactgagggcctattttcagcatccacaaagaaaaggaattccaacgaagaattttatatccttccaaagtaagcttataagttaaggagggctaaaatccttctcagataagcaaatgctaagggaatttgttataactagaccagctttacaagaaatccttcaaggaatgctaaacatagaaaaaagagaa

SEQ ID NO: 905688 - DNA, 626 bp, Homo sapiens
ttcagctgaaagttgaaatgcgtgaatacatacaagaaaaaataagccacattttgctgagtgctttgatgattaaaaaaaaaatggctgcagartttagcccacataacagacatttaccatcatatgatacagtggaacaagcatctgtaagactctggagaaacatttttataatataatgagatttttggattttaagcgaaattgaatctatgtgaaaatcaggttgcaaaacgaaattttgaaatgttcctattgctgcttggtattcagagagtaggtggctatcaacaagacattaagtcttattgtaagaaaactggatgatttgcccaatgaagttatacagttttttttccctttcaacacaaaatatgcttgggtggaaattcttttctctgaatcttctgctcagcctgaaaacttgattttgatagaagaggaagaattttgcctggtgagtagctaaaataatattttgaggtctttatgttctaatgccaatatatgtcatctagaattttgtctgtattgattatttttttctcttgcaaatggatcatgctttcctatttcttgatacatttcataattttgaattggattctggacattttgaatgt

SEQ ID NO: 905689 - DNA, 373 bp, Homo sapiens
ttgctagcagtgaattctgagaactggagggaatctcagaggtacttaaggaaagcaggtattattagctagtggcggagctgagggggctctgcattccagatgatatttatgatattttcttatgttttgttttccttcccaaaaatgtgtgtctctgagttacagcaccatgatttgtcaaatataaattatgtttcaagtaattatccataaatgttaattactaatgcaacctgtacatttttaaaaaaattttatatttttataaaggatttctcaaattttttgttaattataatgtacttgtaatcttgtraaaaatttagcaatagttcgaatgatgacattattttctttatagtaaatatac

SEQ ID NO: 905690 - DNA, 606 bp, Homo sapiens
acctgcttcccgttctattcaaagtcatccttctgcttactgagataaatgcatatctgattgtctcctttggaaaggctaatcagaaactcaaaakaatgcaactgtttttctctgacctacttgtgacctggaagccccctcccctctttgagttggcctgcatttgcttcaagttgtctcacctgtctagaccaaaccaatgttcattttacatatgttgattgacatctcatgtctttctaaaatgtataaaaccaagctatgcgttctgaccaccttgggcacatgttgtccagacctcctgggactctgtcatgggtgtgtcctcaaccttggcaaaataaactttctaaattaacagacctgtctcaaattttgggggttcacaatacatagaaacaattggaaggatatgttcctgctccctgatgtggaattctgggagattatttatttatttagaagacacaggtgtcatactctgtctcccaggctggtcttgtactcctggcctccagagatcctcctgccttggcctcccaaagtgctgggattacatgcatgggccactgcaaccagcccaggagattgttcattttcttc

SEQ ID NO: 905691 - DNA, 609 bp, Homo sapiens
aacaaaacgaagtgggaaaatgtagggatagacgctaatgctctatctgtctgagctgggaattgtagagcagccattctctccttaactctactgtcgtcttagraggacacaaacccagaaagaatcctgtaaggctcatttagtccagtccccctctaactgaccacccagtaggaaataaatggtttatcgtccataataagggcaccaaatagtatcttctacagattacataaagcctgagaatgaagcagatcctgggtacaatagcgaaaaagctttttagtttcattcatctgtcctgacaattgccacttttcaccaggccagggacatgagagcattgaggctctttgactcagagcattcaagaagctgtcatcagagctggtaatgggaaaacaatgggccacttttaagaacatatttatttctgctgcaaagaacttctccccttttattttccattaccatcacccctgttttctccctcactagcagcacccgagcacacattattccccacttcgtgcactgccccctgccatcccagggagtgagaaattggaaatgaaacacaacactatatgcagattggttttaatc

SEQ ID NO: 905692 - DNA, 646 bp, Homo sapiens
tttttcaggtctccaagtccattctttgtgtttggactggtgagtgtttctcacactctataatcgcaaagtagggaggtatctcttcaagaagacaagtgtcattcaaatatttctgcataacaaaccagtacaaaacttagtggcttaatgtaataaacgtttgtcattgctgatgattctgcaagtcagcaatttaggctgagctctgcagggcaattatggttacactcacgcaactatggccagcttccagtttagcttgggactggctattagctggggcaacaggggagtctgagtcatacatctcaccatccagtaggctaccttaaggtcatttacatggtggctggcagagttccaaaagagagcaaaatctggaaggcttctgtgcttagaactggcacagcatcacttccacattcatttagccaaagcaggagtagaaattcaaaagagtggaaatagattccacatctagacaagaggagctaccaaggcacgatgtacagtcatgaatacctagaaagagaatattgcatccatttgtgcaatctaccaggagagataaaatatataaaccataaaggaaaagattaatacatttgaatacagtaaaattraaacttatatatgaaaaaag

SEQ ID NO: 905693 - DNA, 559 bp, Homo sapiens
agaccatgcataatttgaatcattctatcctctgcctcctgaaataatttcttaaactcaaaattatttgatggatgaatgaatgaatgaatgtttatgttaagttatatgaagatccttttatcttactgtttactttttattatccaaggtgtattattgtcaattcatatctcttttgctgaattagtctttcaggagaaaaggtttatgccttggcagaaaagagttctttgttgcacgagtcttgtaaaaaacatgttttactgcactaagctcaagtgatacattttcagcagagataccagaggacttcaggctggcagcagttcattgagcatgactggctcccttgtttctttaagggagatgtactcagatgggtaatggcattcagcctggattggaggaggtcctaccaagtctccaaagcctccaagtagggtcttttcaaattttcttttaccaatagcacattatcttgaaacgtcttacattactgcaaaaaawacttcctgtttctctgatcatctagctccaagtataatttgtttgtgac

SEQ ID NO: 905694 - DNA, 513 bp, Homo sapiens
gtggtgagctgtgacttgcacttgagcccatgagctagcacttgcttggccatagctgttgagcacctgatgtcctcatagcttgagttggtacagctgttgatcagacccactttgatgtccaaaggccatccctccttctccaccacagtacctacttcttccacagtgtgggctaggtcggggtaaagggcttatttacatggggcttcagcttgttgaggttaatttttacctgtcatttataatggcaatcagggtcaggtaccaagtgatccttgattttatcttggattggcattgtctccttagcctgtcttacccagttattgctttattccgtggttctaagagaacactgagggccccaatttctacaccygtgttcagattatcatcaggccaatgtatgagatgggctgtatgctaggctgctggtactccacagtacgcgtgtgccaccttcaggatcacatctgtggatcagatctagcttgagattgtgcctgtcag

SEQ ID NO: 905695 - DNA, 567 bp, Homo sapiens
agtagatgccaaaaaggaaacccagccaagaaaatgtttactagcctctcttttcataaccataaaaagacagtttattcaaatattaagtataattatacaaaactaactggccataggtgcacctgtacaacattttcgggttgtttttgccctcctcggagaaataccagcagatcaggtcatcaatcagttatacccatcaagttacagggtaattctggctgcctcacaaacaactggacagttcagttaagaaaggtgcataaaaggagaatttttactgaactgactgaatgaatcagttgttttgattggatgcaaacaaacaaaagctaactcttttctgaaataactccccatttaggagcttgcctcttctataatataaaatcctattgcctttttaacatcagaattgaagcaacaaagttctatttkcatagtaagtggtctaggaattgatgacagaatatgatgatgaaaagaaggaggaggaggaaataatgacaataataatatgagaggaaaaataatttttcctctttcaattgggatggatccctg

SEQ ID NO: 905696 - DNA, 590 bp, Homo sapiens
ctctcttctggcttgtagaatttctgccaagagatcagctgttagtctaatgggcttccctttgtgggtaaccgacctttgtctctggctgcccttaacattttttccttcatttcractttggtgaatctgacaattatgtatcttggagttgctcttctcaaggagtatctttgtggctttctctgtatttcctgaatttcaatgttggcctgccttgctaagttggggaagttctcctagataatacccttgaagagtgttttgcaacttggtttcattctccccgtcactttcagttacgccaatcagacgtagatttggtcttttcacatagttccatatttcttggaggctttgttcgtttctttttactcttttttctccaaatttctcttctcgcttcatttcattcatttgatcttcaatcactaataccctttcttccacttgattgaattggctactgaagcttgtgcatgtgtcacgtagttcttgtgccatggttttcagctccatcaggtcatttaaggtcttctctatgccgtttattctagttagccattcatctaatcttttttcaaggtttt

SEQ ID NO: 905697 - DNA, 674 bp, Homo sapiens
agaaagtcgtgggcagagtaaagagcatgggacaagggattgcgtctaagggtgaggggagractattatcacctctagacctcaaggagaaaggggaaggagcaattacaaaaacctgagagatctttccacagaggagcacagccattgcaacccattcccaggaggaggagtcggagaataaacacctgttctccagcttcccttacttctggatctcctatcggtgcttttattccctggacccagcaatcaacaaagggtcacagaacaggacggaaagggaagaaagtctggagggactgatggtgcatatctagtgggcttttctttttcattttactgtttgacatatagtctaagctaaaggataaagaaaactttcttagataccttccaaaggatatttatttagtaagcatagaagaggtttaatacagttctagagacaactaagaaactttgtagtctagaacacctaaaattggtattcccaatgatccatcaattcactatttatatagagcatgtttcatgccaggtactgtgctggcggtgaaaagatacacaagacagacatgccctgcccatataaaattcacatgttggaggggatgtagacaatactaactagaaagagaagcaggatgactgttggttataagcatcgcaa

SEQ ID NO: 905698 - DNA, 659 bp, Homo sapiens
ttggtgtttgaaggtctttgcatttttgagatgaaatataatataacataatgtgaccattaagtatacagactcttgaggacagattttccacgttcaaatcttggctttgccatttaccagctgtgtggccttggaaaattaattaacctctctgagacccagtttcttcctctttaaaactgggctaataataacatacggcaatttttaagcctagttaataaatgcaaaacattcgtaatactatatgacttgtaattacaatataaatattaactattgttatttgtaaggcaacatttttttttcttttttgagatggagtctcacactgtcacccaggctggagtgcagtggcgtaatctcggctcactgcaacctccacttcctgggttcaggcgattctcctgcctcagcctcctgagtagctgggattacaggcaggtgccaccatacccagctaatttttgtatctttaggagagacagggtttcaccatgttggccaggctggtcttgaactcctgacctcaggtgatcccgcccgccttggcctcccaaagtgctgggattacaggygtgagccaccatgcctggctgacaacatattttgatgggaacacttctacactgctggtgggaatgtaaactagtacg

SEQ ID NO: 905699 - DNA, 564 bp, Homo sapiens
tgtgaagtgcattatttttgaacttctgtttttaaactgtttgctctattaaatatattttacaaatgacatctccaaattcaaaggaaatatgttacataaatgaggaagaacatatttgttcattcataatgtaacaataaataacagataggagagtaaaatcactccttttctttggctaagggagctgctagttttactcatcgtccccaaagacagtactagttggaattgcagttggttgaattgaatcagtaagaatttaagaactgtgagataagctattgaggagagttacggatttgctttcatttctataacagctctggtttaggagaaatctttcttagacatgagggatggtgaggtccctgcgtgagcagtcagaaaatctaggtgctgatcttggctatgaaacaaaatatccctgtcatttaaccatttggagattcatttccttaagctctaagatgaagtgtttggattaataacatctcaattcttccccrctgtaatattttataattatgtgattgtgtaaacgaggtgaaacttttcata

SEQ ID NO: 905700 - DNA, 634 bp, Homo sapiens
gatttctctcctttaattatataaagacagcattctgctgtctcggattctgctgcactgagctccagtagcattttgctgttttctttgcattatcatattttcatagatttcactatacccatcctcaaagtatgattttgataattattaaaaccattggtggaagataattaaaatgcttaaaaactacaatttaatttttttaaaaaaacaaattatttttagctttggtagctaaggtgttaaaaggaaaaaaagtaaaaaaaaagttcctattgttttttagtatatttgataaacaaataagtctatattatgctgtttaagctaataaaattcatgtttttagtaaggaactggttacatattatggtactaatgactgatgttgacatctgccactcaaatttttctgggttatgctcttactcaggatgttgggtacttaaggtgatgtggactgtcttaatggtgaatctaccttattagaagatccttaggcttaatttctctccaaagtaaatattttcatgagtctacatttatctgttttytttttcactgactcttagataatataaagaatagaaacaacatatgaaaaatacgtagtctgtgtcccacattggat

SEQ ID NO: 905701 - DNA, 641 bp, Homo sapiens
ttgtcaaatttatctgatggaattctgaattcattttctgtgttatcttgaatttctttgartttcctcaacacagctcttttgaattctctgtcttaaaggtcacatatctctgtttctccaggattggtccctgatctgttaccatagtttatttggtgtagtcatgttttcctgaatggtgttgatgctagtagatgttcttcagtgtctgggcattgaagaattaggtatttattgtagtcttgactgtagaacttattttgcagccatctttcttgggaagagtttctagatatgtgaaaaggcttgggtgctatgatctaagctatatctcctttatggtgcatgccaagggcagtaatgtagttcttgcggacttacagagatactgctttgatggtcttggacaagttctgggaaaattatctgtatttccaggcagagattcttgttctcttcccttactttctactaaatgaacggagtttctctctctgttctgacccacctaaagctgggggtggagtggcatacacatccttgtggccaccaccactttgggtgcactgggtcagacctgaagccagcacagcacttgatctcacccaaggcctgttataaccactacctggctactg

SEQ ID NO: 905702 - DNA, 699 bp, Homo sapiens
taggaaatgtaataatagaagactggtcaaataaactatttcatttgcacaaggcataatgctatacagccattgaaaatattacagctgaatatttaaagacatggaaagttctataagataaattggtacataaaaatcagtttttacgggacatttcaaccccaccattccaccattttgaccccatcatttttgtttctgaggaaattttgaccctgaggatgtttataatatactttaatcagaattaggccagctctttttttctttaatttattgtaatactataatttcattcatcaataaggttttgtctattcaacttttattattttctatccttgcgagttttcttttgtggttattatttccaccacattcaatactactgggtaagatttttcaggtacaagtgttgtcaagatctcatccttcaattaatttttaatctataacaaattttatgatgtgcaatttaagacattgtcagttttattccatggaggttatttgtgccaataatgcttgaagcaaatattatatttatttcttagttaatgcatgtgaaaatcataaacaatttaatagagagaaggaacagggaaaaggtcaaaggagggaaagaatgaatagaaaagaggaaaaggcaagagagaatgaggaaaagagaagagacratgaaacgcacaaagaaag

SEQ ID NO: 905703 - DNA, 585 bp, Homo sapiens
gtcatcagtggccaagggagtggctctggtgtttgcagtgtgggcatgcatggaacaccacagaactgggttttggaatgtgggcacacatgaagcaaccatggagcagcatctggagtgtaggcatatatgacatggccacagatccagggtctgggaggtacacagggttgagaaatgtagcagtcgtcgtccagtggtaacacaacagaagctcttacttgggagtgggggtggagcacagcagcatctccctctctggacatgagcagaagaaatggctattgacaaagggtgtctcagtggcaaagggtgcttatgtcatctgcagagcagatcactggggactgctgtgacacccactgcttagctgatactgatagcccccatccttccatccttattttttgttcttagccatttccaaacatctcagctatgtcagacaacccagtgatactttctgcacaattatttgcgagtttttttcaccaatgtgttgctgcaccttcataagtggactcttgagccctccctaagtgtattagtccattctcgtayggttataaagataccacttgagac

SEQ ID NO: 905704 - DNA, 671 bp, Homo sapiens
cactgagcacaatcttaaccgaaaaatacaagtgcagtatttagaatgtaccatgtgagggtgggggagaaaagaaagagaaaaatttccagttggcacttgcatccattataaaactaacagaggtgactggtgaaagcaaagagtactaactccagccttttctctcttcagatattgtatttgctcccttcctttctatcacagatgcatacagaaagagggtaaagagagaagcatatgccttttgggcactcttatatgtagaaataccacaaaacaacagtttttatttcgatgtattgctatctttaggcttgatgactgttgagtgcaagaatttcatctacagattttttttttagtccagaggacttgcagcctgacatcatagggaggagaaagcccccaaccctctaccttgctaccgagtaccatttgccgtcattctacaactgctccagcatgacacttggattaaggtgttagactcaaacttgatcaaaactgcccaatagcctagggaatgtgttttatggagatacacaaagttggaagtatttgattgaggctctagagtggtgagtagaacccaggtgttacagccaggagaccagagtttcaatcacactattatcacttatataggytgctgcaaaagtaatattact

SEQ ID NO: 905705 - DNA, 465 bp, Homo sapiens
tgtaaggcccctctgggggaacaaagaatagggcactatcctggagaggactggcagttagacttcacccatatgcctaagtcaarggagttcaatactttttggtctgtgttgatacctttataaattggatagaagcccttcccctgcaatacagagaaggctcaggaagtggttaaagtcctaattcatgaaataattcctagatttggtcttccccaaagcttacaaagtgacagtgatccagtttttagagccatgtaactcagggaatttccggggcaccagggatacaatatcaccttcactgcacctggaggccacaattctcagggaaggtcgagaaggcaaattgaacactcaagaggcacttaaggaaactaacacaggaaactcatctcccatggcctactctcttgcccatggccttgttgagaatccataattctcctcacaaaatggggc

SEQ ID NO: 905706 - DNA, 616 bp, Homo sapiens
tagtagaacttcagggatccatggaaaacagccattgatatatagcctgtctgtagtttttatatattccaaaaattttttgtgcctttctccaaaygagaccaacacatcatttatattgaatggattggacatacatgtagatagattagggtgggtaatttcaaaaacatcaagcctgctcccatccctcatttcacaatccatcttattattaatagttaatgaattagttttttccattacaaaaaaaaataccaagaaagaaaatgtttagcattacaatttcactgaaaggagaatgcattgcattaaattttttgtaaggtgtgaatgaccaatatagactatttctgaatagttgggtaagactaggtttttaaaaaatgagttgaaaataattacataataaaaatgttgaagcttaatgaatccttaattggataatttattttacgaactggtaaacaagaaacactaaagagctatttatttgaatcaatgaagtaattaatgaatgaatctataactcagtgtattgtttttgacattatcttgtaggatgctttagggttcctcaaaggtgcttcaggagcaaccacagggctgcttgggg

SEQ ID NO: 905707 - DNA, 613 bp, Homo sapiens
ccaaacatcctccagagtgatgtttctaaaacacaaacgtgatcttgttattgccttactggaaaaccttcagtgacttcttattgctgctctgtaggatcaatcccaaagtgcttaggctacaatacagccccctaaatctggcccctgtcaagctctccagccttatctctgaccaccagaccccaatccaccctcctcaaaacctatcatccagccatatggaattacttaaagttctctgaataggccaacctgtttcttgcccttgagcctttgttaagattgtttcctctcccttgtacacccttctttctaacccttccttcatcctgcccacaatgccccatggtccacctggaaaaaagaaaaaaagctttttttttttttgaaagctcagctcacctctataaaaacttttccatttctaaaaaccttgatcaccaccttccttatatgtctccaatacttgttctcctgtaatcccagtgccaggtacacgtttttagcattaaaaccatgacacttttttgcattaactatttcctaacatatctatgatctaattaagggcaggracaatgccatatttatccttctagccctgacacct

SEQ ID NO: 905708 - DNA, 628 bp, Homo sapiens
atccaatgttacctaagtctagctgtggacttcatgcatgaaacaccattccagcacagaagcactcctagcttgaatatcctcggtattgaggaacttactatcacacsgggcagccactctatctttgaataaagatagaatgagtaaagttgataagaaaagaaattcttaccttcacatcaatcaaagatctgtattcttacaatatccctgaaattattctgtaagcaggcctgaaagaattacgtggcaacatatgttgctaggctggttcgttgggttttggcaaagtcctcagtgtttgtcagcatttctatgtgagagaactggctacatagtctatcttggagctaatatcatacttgggtcactaaacatatgtatgaaattttgagaattgtttcttaatttttcagttttaaaatctaatgcaaacctgtatttcagaaaaaaagtattgcttgacctttttaaaaattatcacttaattaacatggggcccagccgagttagaataacttctcacttgttccaacataagagaaacaagcaaggtactcctaccacggtgtcacttagacctgcacattctttttagtgattgcaatgttacttcttagccacc

SEQ ID NO: 905709 - DNA, 628 bp, Homo sapiens
atccaatgttacctaagtctagctgtggacttcatgcatgaaacaccattccagcacagaagcactcctagcttgaatatcctcggtattgaggaacttactatcacaccgggcagccactctatctttgaataaagatagaatgagtaaagttgataagaaaagaaattcttaccttcacatcaatcaaagatctgtattcttacaatatccctgaaattattctgtaagcaggcctgaaagaattacgtggcaacatatgttgctaggctggttcgttgggttttggcaaagtcctcagtgtttgtcagcatttctatgtgagagaactggctacatagtctatcttggagctaatatcatacttgggtcactaaacatatgtatgaaattttgagaattgtttcttaatttttcagttttaaaatctaatgcaaacctgtatttcagaaaaaaagtattgcttgacctttttaaaaattatcacttaattaacatggggcccagccgagttagaataacttctcacttgttccaacataagagaaacaagcaaggtactcctaccasggtgtcacttagacctgcacattctttttagtgattgcaatgttacttcttagccacc

SEQ ID NO: 905710 - DNA, 472 bp, Homo sapiens
atattctctggagtttggtccacctgatcctgcccaaggtaagcgtgtttacttgctaatgcttatgtcattttgtgaaaagcatttttctttttaaagacttcttaatttttttttcctattttcttccccttttcatagttaaaggacaaaggacaatgttgtggtacattttagccttattatggttcgttttctttttctcaatttcttcattttaatgttggcttcaagaaattgtggcattattagtcagcttaaacttttttcattgctaaaaatataatactaaccagaaacctgttagcagtgtttttttgtttggttgttttcccctmcttgactgctgaattgattacaatctatgttcagaccttttaacttcttggcgccagtggttaaaggaaacgtgtgttaggaagtcccaggagaatggctaggcttgatgtacaatgccagatatatgcgttct

SEQ ID NO: 905711 - DNA, 632 bp, Homo sapiens
atggactgtggaggtaggaaaaatgtgagctggggaatgaaagtagaagggaggaggagggggtagtctgatggggaaagaagagagagggctggtgaacaaagagtagatagatagtaaatagcagatatgttctcagagtagcaacttttcttttgccctttccttaaaaaaaaaaaaaaaaaatcattgtcctggccggacctagtggctcacccctgtaatcccagcactttgggaggcagaggcaggcagatcattaggttaggagttcaagaccagcctggccaacatggtgaaacactgtctctactaaaaatacaaaaaaatgtagctgggtgtggtggcaggcgcctactcaggaggctgaggcaggagaatcacttgaacccggaaggcggaggttgcagtgagctgagatcatgccgttgcaccatagcctgggcaacgagagtgaaactccatctcaaaaaaaaaaaaaaaaatcatcgtcctttggaggaactttgtctaaatttcaccattatcctcagcaatcattagacttgtggaaagtcacarttttgaagaaaagttttggatttgtttcctgagaaaatatgaatgccttaatgaatttattgcttagttcc

SEQ ID NO: 905712 - DNA, 625 bp, Homo sapiens
gtttgaactctacgttggcccctttcagccatggctagtgcagctgggacacagggcaccaagtccctaggctgcacacagcttggggactctgggcatggcccatgaaaccactttttcctcctaggcctccaggcctgtgatgagagggttgccatgaagacctctgacatgcactggagacattgtccccattatcttggggattaacaatgggctcctccttacttatgcaaatttctgcagtcagcttgaatttctcctcagaaaatgggtttttcttttctatcacattgtcaggctgcaaattttccaaacttttttgctctgcttcccttataaaactgaatgccgttaccagcacccaagtcaccttttgaatgttttgctacctagaaatttcttctgccagataccctaaatcatctcaagttcaaagttccacaaatctctagggaaggggaaaaatgctgccagtctctttgctaaaagataacaagagtcacctttgctcccrttcccaacaagtttcacatctccatctgagaccaccttagcatggacctcagcatggtccatatcactatcagcatttttgtcaaagccatccaacaagtctctaagg

SEQ ID NO: 905713 - DNA, 574 bp, Homo sapiens
aggaagctctgacacgtgctaccacatgggtgaaccttgaagactattcagtgaaataagccagtcacaaaaggatgaatactgtctgattccacctttttgaggtacttaaagtggtcaaattcatagagacagaaagtaggatgccaggctgagggtaggggaaaatggggagttcatgttgcatgtgtgtagagtttcagtttagggaaatgaaaagaattctggagacgggtggtggtgatgattgcacaacaatgtaaatgtgcttcacaactgaactggacacctgaaaatggtttagatggtaaaagataaaatcgccatgtatcatgcattgttttctttatttcacaggtgaaaacactgggctgagagtctaagagtccaaagatatgcatagccaatagcaggctggtgttgaatctatggcctctcactatgtggaacatgaggacacaggcatcacactaagagcagcaggaggcagccatatgcctaggcagataggggtgggtcccyggtgaaaccccaccttcaagccaaagacagtttaaaccctgaaagccaagct

SEQ ID NO: 905714 - DNA, 537 bp, Homo sapiens
gtgatcaaaccccacccagcctctttatgtrttaatacccaacttacaaaaccgtatgttaagctgtacaattcctccactggaaatttaagcgcacattattatgagttccttatttcctgataagtcccaatggttacaaaattactcagtttctttgaagaatcaggaagccaccacccatgggcactcaatactgattgtcatttttaacaaattgtgggaaataagctttaaaactgggtcactacccctaaaagtatgcagtttagttataatatatcaatactgatttgttagttgtgacaaatataccataatcatgtaagatgttagcaacaagggaaactgggtgcctgtgtggtacacagaaactctctataccacctttgcaactgttttctaaatataaaactatgctaatatttttttaaatttaaaaattaaaagtaggtcaccagaaatttcctacccacataatatagtctcattttgaatgtaggcaaaggaggattctcaattctaggactgtctctc

SEQ ID NO: 905715 - DNA, 570 bp, Homo sapiens
tctagaatttgtggtatggtatgaatatgtatgtcctaattttcctrtaagacagggagctcctggaaggcagagagcagatctaattcatactgcaatttctcgcagtgcctaacaaggcattggacacagaggagcatttcctgtgctaacctttaggaagacttaccatatgccaggggagtgatggaagtggaagcatggaacccacccatgtgtactgctgctgagatttaaagagctagaagcacacctgagaaatgaggccatctaacaccttaacgatctaagaaaatataaatctttaagaccaccgttatattgtgggtcctgagcagcatacatttgggtagttcaacatatttagccacacatccagtttagtgggccaatcagtgcacacatgtaatgggattgtttgatcactcaaaaattgcattggtcatttttataattattccttatttttttaattctgcctctatttattgccattatatcactgaaacaggagcttggcatcagttctaacactgcttgacaaaaaagtaatgttttaacataaatcta

SEQ ID NO: 905716 - DNA, 605 bp, Homo sapiens
agagcaaagattagcaggctagcttaaaacatttccrtctatatgctgtgcattagttttctactgctgcataacaagttaccataaacttaacagcattaaacaagacacatttgatagctcactcttctgtaggtcaagtctatgtgggctccactgggttctctacttaggttctcataaatctgaaatcaattattggccagacttggctctttcctggaggagccaggaaaaacctgattcccagctcattcagcttgttggcagaattcagttccttttgcttgtagggctgaggtccctgtttcctttctggaaatggccctggccaccttaggtcttttcaaattgtctattccatgtcagcaaaggagagcatccctgcattgaatccctctctagcttccaatatcgctgacttctactgctttttaaaggactcatatgagtaaattagtaccacccaataatctttcttttgctgctcatcatagtcacaggttccacccagaactaaaggaaagaggattacacaagagcaagagccataggaggtcattctcggaattccatctcacatatactgttctcagagtcatgtt

SEQ ID NO: 905717 - DNA, 607 bp, Homo sapiens
attgttccatttagtaatggaaacatccagaaaaacagctacaatttgagtcatcaccagactaagtttattgtgaaggatatggtgatgcactgctcagattcacyttcagaaaaacagggcttattccacagctgctgagagtgctgccagaagactgctttcagctgtcagcctccttaggggtttgcctcagctaaagacagccacatcccccactgatatgtccaccttctggagaaaagaggggcgtgaagtgaaaggcagaggaaagtagaaaggctcagagctctctccccaacttggtctatgaattctttactcagaaagttgctgaggctttcattgaagatgcacaatgtcttgactcccaatcttgcttccttccttctcttccacaaatctggattccaagaacactttataacaaacctgctgcatgtaaatctccatcttagaatctgctcctaggcagcacaacctgtgccacttacaggaattaaacatcattctctagagcccatcaattatttgtagcattcaagtctgagaatttaatggggaaggatacagaaagcagcctacctatgtctttcaagtctttgat

SEQ ID NO: 905718 - DNA, 663 bp, Homo sapiens
tgaaagagcagttgttccttccttggctctcagcccttaacccactgcaaggacggagcacatgggatgaagtgctggtgttcaaggagaattgcatgctcttcaagactatacacacatatacacatatatacatacatctgtttgccaccagctgagggactaggaaacacacagcttagtgcaactggagaattacagtgaataatagtgacagattgtaaagacaggcacctttattttactgactcagcaattgtggcctggaggagctgagtgtctggcccacagctacacaataagtaatagagccaggtgccagactcccattccagtgctcttgccatccctcccctccacctaagtctatacagggatggctgaagagaaagtgactctgcagatatgtttaatatgggaacagtagcattcagcagagtggcatgggggcagccctgagaaacctgtctgcaaagatagtatttctctagaggccatgtctcaatatagcagccacacagaagcaaattcatgagcgggcaaatatttgtcccctcttatgactgaacttaygccactgttttcacaggactattaatacatggcagcgtgatcagctcctgccacccctgtccgtgaccacctgccattctgctgtcagca

SEQ ID NO: 905719 - DNA, 609 bp, Homo sapiens
tgctactctctaaatatggagcatgtaaaccaggtagcytaagtcttttattcacctagagcctttgacccagtaaacctcctgggatgtcagatctctgtctccctttccctttacctctctgtttccttttcttccatctttcctaccatctttcctcttgtatgtgcacatgctcacacatatttttagccccagcatctcttgatgtaacaagttaaaagttcatttctttgtctttaacagagggggagaaatcctgtatcatgtgaatagtactcttgaatttgtaataaaatgtaatgggaagtggatttttgtgggaacatgtttatcaaacagctcttattttttaagggaaatactttagtagaagaaaaatgacatttgcttttctcttaatgtaaagcgtaattttcaatagttaataggagcagtatttttaaagttttggtgggagagatgcttttttggaggttacttacgtttgtagctattggtgaataggaatttgaaatggtatgtatgaatatattttatagtatattgataattagaacataagatgcaaaaagctaattgcaaatttaaaatattaatagaaactga

SEQ ID NO: 905720 - DNA, 646 bp, Homo sapiens
aaggttttaggtcttatgtttaagtctttaatccatcttacatttaagtctttaatacactcaggatagattatgcatctattgtataaggtgtaaggaagggtccagtttcagttttctgcatatggctagccagttttcctaacaccatttattaatagagaatcctttcctcattgcttatttttgtcaggtttgtcaaaaattagatggttttagatgtgtggcattattcctgaggcctctgttctgttccattggtctatatatctgttttggtaccagtaccaggatgttttggctactgtaaccttgtagtatagtttgaagtcagacagtgtgatgtctccagctttgctctttttgcttaggctacacaggctcttttttggttctatatgaaatttaaggtagttttttcaaattctgtgaagaaagtcaatggtagcttgatgcagatagcattgaatctataaattactttgggtagtatggccattttcatgatattgagtcttcccatctatgagcatagaatattttttccatttatttgtgccctctcttatttctttgagcagtggtttgtagttctccttaaasaggtccttcacatcccttgtaagttgtattcctaggtatttta

SEQ ID NO: 905721 - DNA, 730 bp, Homo sapiens
gttaataactctagattgtgtgcattagaaagaacctttaaaattataggatctacccctacattttgatggacaataaaatggacatcctgaaagctgcatagcaatacagtaccacatacatgaatktaggacatggatctcctgcgctgtcagtaagttcttgttctgactttcctgtattactcctcaaatgctaggacacaaatcttcagggaaaagtgcaaaaggaattcctttttaaatctaattctgttcctaagcaattcacaaaaattacacatgtcagtgtttctactacattctcctttaggccttaaaagcagggactttaatatatatatatttgtttttctttttcaatatctaaaagagatttctgcattttaatattggttcaaagtgttgtgttagatcccactctgaactgaacccaaaattacttcccacattttccggcttggtaaattaatcactgtggtatccacaatcaaagattcaatcaagaaacttccagaaaacctttggaaacaaactttgtattacaaaagagttataaaacaggagctgttttctctctttcacaagtgttttgaacaaatcagcactccatcaaaaagaacataacagtttaatgttctgtcaaagaatggaatgcttgtttacctgaagtaatggactgataaaagtaacttgcatctgtcttgattgatacaaaacttactcaaag

SEQ ID NO: 905722 - DNA, 619 bp, Homo sapiens
ttctagattgtgtgcatggagctgtttttaatattatctgatggttatttgtatttcagtgggatcagyggtaacatcccctttatcatttctgattgtgtttatttggatctcttttcttttcttctttattagtctagtttgtggcctaattatttttctcaaaaaaccaactcctggattcattgatcctttgaatgggttttcatgtcttaatctccttcagttcagctctgaatttggttacttcttgtcttctgcttcctttgcagtggttttcgcttgcttctctagttcttttaattgtaatgttaggttgttaatttgagatctttctaactttttgatgcgggcatttagtgctatacattttcccacttaacactgcgttagctgtgtcccagagattctagtatgttgttatttttgctcacattagtttcaaagaacttcttgatttctgcctaatttcattatttacccaaaaggcattcaggagcaagttgtttaatttgcatgtatttgtatggttttgagtgattttttaagtcttgatttctatttttattgtgctgtggtctgatactgtatttggtataattttgattcttttgtattt

SEQ ID NO: 905723 - DNA, 570 bp, Homo sapiens
gtatgaagtaataagtatttctcttctaataatatattcagggactggacaaatgacacattatcagacaaataactcactatcagccaaaccttagccaggactccatttattacatggctttcatatgccccctctacaataggtgctttgggtcccaggtatcaatgtcaattcagaccttgtgtctaacaaatatctgagtagtccccttttcccagtgcacagttacccaagtaaatggagattggtaccttttggaaaggactaggaaataattaccatgtgcagttaaaatgtgttgcagggtctttctcctggggtcatggcctgttctctagtcagtggtttcaacgttgaaaaattaacttaaatctggaaacagaacaagagatcattactttttactggagcaattgcccttagcctcctgaggctgactcatggtacatattgaatgatgaccttattggctatccatccrttttgctcctaaagatgctaagttctaataaccaactccataaccttcagaggattcaggcctcctctggctgccccttcgacatt

SEQ ID NO: 905724 - DNA, 701 bp, Homo sapiens
gctgtctgcaaaaggcccaggtgaagcaggaggcctcggggggggggacacaggagacagaggaagggaccstaacatgagtcaagagaaacatgagcagcagacataatattaaaaaaaaatcaagcttagggaaaactattaacacaaggacaaaatacacctcatttgccgggggtccagggtgactggccccaatctggcccaccagcctggttagtgtgcccagaaccccctcctgacatgaggccagcacatggcaggtgctcaggatgggctctgggggaggtgctgaccctgcacagtgtctatagtggactgggaagctgtcgactgaacctcctgaggaggacaggcccaggttaccctgagagatgtttgttagaggttctcttctccctcccagccccttcccaagacctgggggctccctattggtgggaggggtgggtggccctggctttggagctggcccctgggcttagaccccacctccctctgtccttactgtagcatctgaggcagacacttcaccacctctggggactcagtctcccccctgtgaaatgctggggagacccctcaggaggatgccagacattatgtggctggtaatgaatcactccaaggagcccataggtcatggtgttagaggccgctgtggcagaggcaggatagttgtgagtggatgtgccagcagg

SEQ ID NO: 905725 - DNA, 588 bp, Homo sapiens
ggaggggattggggataggagtatggcatagtcacatctgtgctttagaaagataataatgctaaataaataaaggatgtatttaygtgagaagcagcaaaagtagtgctgtggaattgggaatgtgcatagactttggatggaagtatggaatttggaactagatttttaaattccaatctcactggttctacagttcctattacttacaaactctctgttatgtctaattctacaggtaacttccatttataagctacatggtcctagaaaacttgtctgtctaaatttctttatctgtaaaaacaggattaaaagcagtatagcttcaatcaacatattattgtatgaaagtcattaaacttataagtacatttgactaaatatattaattataaacacttttttatttgtataaaaaagaaatataaaaaactaactagaaggttatagtttatgttatctgtaaaattaaaaagtgttacatccgtcaaattaaaagtttactgttttccactgagatatcagtgataatagtgatagaaagtaggagatggatttacaggtatttgtgagataaaactggca

SEQ ID NO: 905726 - DNA, 641 bp, Homo sapiens
taatatcaatgattcccaaacttgtgcacattgaaatcaccaacaggtctttcaaaaaatactgatgtgggttgaagacattgtgatttaattgttattgggtatgacttgagcatyagtattttaaaaatcttgtagatgatttaattttagccataaatgtatcccatagtttgtttatcccataatttctgattcttcccacatcaagaatcaggtgacatcactgaagattgtacaagtattaagttgataattagacaatataaaaaagcattatttcaatatatttaacattgtaatgaaatggaaatttttgaaatataaaaattactaaagcttactcatgaagaaataaataacctgaatagccctatatctaataaattagttgttcaatttccttcttgacagcccacctacagaaaccctgggagtggagaacaaaggatactttggtgatgagcagcagataaggactgagccaatcctgccagaaattcatttcctaaatgtaagaaacttccatttgcaacagttaatttattgattttttttttttaagtagctgaatgtgtttaaagtagaacccgtcctaagctaagtgacatgggaagtgcagaggagcaatttaacatggt

SEQ ID NO: 905727 - DNA, 528 bp, Homo sapiens
aagtggtggaagtatttctcattactacattaataaactattctcaaattttgctcacttttccttcagcttcaagttttgttactttagtatccaaaggaggaatgctcccacttaaggatcaaagaaccttttcattgacctggatgtttaaatagccatttgacaattttacacctttaagcaattgaaagaagtaaataaggaaactgactatgagtgtcaagggaaccaagtcacaggcacaaaacatctgtctgaaactcaagagattctctggactaactcatggtatttttacatgtgttagtaaatattgatggaagattagagaaacttaatataagcaaaatcactaaactctcaggacaaatttcaggagagaaacttgggcatgctmtactgcagaaaacatcagtaacaacaagaaaactgcaatggttgaggtattgtctaacacataatggttagtggaggaaggacgttttacgatccagatgaaagttataaattatggagaacacttgg

SEQ ID NO: 905728 - DNA, 614 bp, Homo sapiens
catttttctagccatttgtccatttctccaaagttttcaaaaacgtcggtttttggtgttgatggcattgttttattatctttttataaatttatttattattattatactttargttttggggtacatgtgcacaatgtgcaggttagttgcatatgtgtgcatgtgccatgctggtgcgctgcacccactgactcgtcatctagcattgggtatatctcccaatgctatccctcccctctccccccaccccacaacagtccccagagtgtgatgttccccttcctgtgtccatgtgttctcattgttcaattcccacctatgagtgagaatatgcggtgtttggttttttgttcttgcgatagtttactgagaatgatgatttccaatttcatccatgtccctacaaaggacatgaactcatcatttttgatggctgcatagtattccatggtgtatatgtgccacattttcttaatccagtctatcaatgttggacatttgggttggttccaagtctttgctattgtgaataatgccacaataaacatacgtgtgcatgtgaaaaaaaaataataataaaaaataaaataaaatggtgtgtttcttaagaa

SEQ ID NO: 905729 - DNA, 630 bp, Homo sapiens
ctatcctagtcaaagaaaggggtgacagacggcgcctggaaaatcgggtcactcccaccctaatactgtgcttttccaacgatcttagcaaayggcacaccaggagattatatccagcgcctggcttggagggtcctacaccacggagcctcactcactgctagcacagcagtctgagatcaaactgcaaggcagcaacaaggctgggggagggggacccgccattgcttaggcttgagtaggtaaacaaagcggccaggaagatcgaactgggtggagcccactgcagctcaaggaggcctgcctgcttctgcagatgccacctctgggggcaggacattgccaaacaaaaggcagcagaatcctctgcagacttaaatgtccctctctgatagctttgaagagagtagtggttctcctagcacacagctggacatctgagaatggacaaactgcctcctcaagtgggtccctgacccccgagtagcctaactgggaggcaccccccagtagggacagactgacacctcaaatggctaggtactcctctgagacaaaacttccagaggaacgatcaggtagcaacatttgctgttcaccaatatccgctgttgtgcagcctccactgct

SEQ ID NO: 905730 - DNA, 584 bp, Homo sapiens
acaagagagcttgtgcaagggaattcccatttgtaaaatcatcagatctcatgagacttactaccatgagatagggggagaccgccccagtgattcaattatctccacctggccgtgcccttgacttgtggagattattacaattcacggagagatttgggtcgggacacagccaaaccatatcattctgcccttggccccttccaaatctcatgttctcacatttcaaaaccaatcatgacttcccaacagtcctgcaaagtctaaactcatttcagcattaactcaaaagtccacagtgcaaagtcgtatctgatacaaggcaagtcccttctgcctatgtgtgagcctataatatcaaaagttaattagttgcttccttgatacaatagaggtacaggcattgggtaaatacagccattccaaatgggagaacttggccaaaacgaagggcytagaggccccatgcaagtctgaaatccagtggggcagtaaaatcttaaagctccaaaatgacctcctttgactttatgtctcatatccaggtcacacttttgcaagagatgggttcccatggtcttgag

SEQ ID NO: 905731 - DNA, 637 bp, Homo sapiens
tgcaagtggacatttggagcactttgaggcctatgttgaaaaaggaaatatcctcccataaaaactagacagaagcattctcagaaacttctttgtgacgtttgcattcaactcacagagttgaacattccttttcatagagcagttttgaaacactctttttgtagaatctgcaatggacatttgaagcgctttgaggcctatggtgaaaaaggaaatatcttcacataaaaactagacagaagcattctcagaaacttctttctgatgtgtgtcctcaactcacagagttgaacacttcttttgatctagaagttttgaaacactctctttgtagcatctacaagtggacatttggtgtgcgttaagacgtatggtgaaatgggaaatatcttaacatacaaactagacagaagcattctcaaagacttctttgtgatgtttgcatttatctcacagatttgcacattccttttcatagagcagttttgaaacactctttttgtagcatctgcaagtggacattyggagcgcttggaggcctatggtgacaaaggaaatatcttcacataaaaactagacagaagcattctcagaaatttcttcttgatgtgtgtactcaactcacagagatgaa

SEQ ID NO: 905732 - DNA, 458 bp, Homo sapiens
agtttagtggttgccagaggctgggagaaggggagaatgaagagtgattactaatcttacaaggttttttttgaaatggtaaaatgttttaaaattakatagttgtgatagctgtgcaatgttgtgaatatactgaaaagcaccaaattgtacatcttaaaaaggtaaattttatggtatgtgaattacatgtcaataaaggtgttatataaagtctataataaatatttggcttttagtatgtttaaattatcaagttgatgaattatatacatatattctcaggatgttgaatgcactgtctagtatatttttatttttaatatatttttgaataccgaattataaatatatttagaatcctatgaatatgtaaaacaagtctctaaggtaagataaattcagggtaatactgagaaataaaaatatatatcataatttagaaaaaagaaaatatg

SEQ ID NO: 905733 - DNA, 593 bp, Homo sapiens
ggttaggaatactcagagacactggccaaagattttccttaactaatggaagacattaacctatagatctacagattcaagaagctcagakaactccaacagaaaaaaataaataaataataaacaaacaaaacaaacaaacatcccagcatacatcagtcatactgaggaaaatgagaaatgagaatttttcttttttcttttttctttttttttttaaacagagtcttgctctgtcgcccaggctggagtgcagtgatgcaatctcggctcacagcaatttccgcctcccgggttcaagcaattctcatgcctcagcctcctgagtagctgggattacagggatgtgccactacaaccgaataatttttatatttttagtagagatggggtttcaccatgttggccaggctggactcgaactcccaacctcgggtgatccacccacctcggcctcccaaagtgttgggattacaggcatgagccactgcatgcacccagtcaggttcttaaagcagttctaatgccaaagagaacatatatattgactttaaagtgcacttcctaagaagaaaatggaataaaatattata

SEQ ID NO: 905734 - DNA, 654 bp, Homo sapiens
attgtccattcactggagaagtcagatggaaaagcccaatttattgtcagagcataatatgagggcttggatagaaggaaaggtgttattgggaaacatgagtagaatggggtactgcaggaaatatatattatgtacattttaaaaaacgtaattgtaggccaaaattgctggtttgcaagatgcactttccatgatgttcaggtatagaaaaacaagaggtactgtcatgggaacactcatatgaagttatttgtggaatctacatattaataggaaaataatacagcccagtatatttctataacatttattttagtgaacttataatgtttctttgtattaaattattagattatatctttagataatattgttactaaattagtaggtaatacatatttttattcaaaaataaattgtgcatctaatgtctaccaattaatgtacttgtctatgtatctcctctcaaattgagcctctgctgcacccacgcggcgtgaaggactcttctcccacggggaagtttttctttttcaggagggaggagggctttcccaggtaatgtgtctagagtgttgggcagaagaatctgggacctcaccacaccarttctctccttaatccacgtcatttgccttctatcccagctat

SEQ ID NO: 905735 - DNA, 608 bp, Homo sapiens
tgatatggatgaatgttaaattttgagaacctctcctatagggtaactgagaattttaaaattagaacattctaacaagataacacaatgtacagtccatccatcactcaagcaatcactgagcccgtgctctgtctcaggtatacggcagtgaccacctcaccggacccagagagtgggaaccagtaactggtcattgctgccactctggtgtggcactccctcttttataagggaaaaaggagattttagaaaacagaatggacagactttagcttctgtcctttagttttgtcctttgtcatctctgttgaagatttaaaccacagagtcaccttcaaagtgaaatacaaaaaatattttgcattgtgatactaagaaacttgaagtcaaaaccttaggtctctgttggatgcaaagttaacttctgtgaattgcctgctcctttccaaagtctgcactggggggtcataatccccttcaagcctttgtaagatatgctgagtggaaaaggtattgactatgtaaytttccagagggatgaaatatggctgcccggcctgtgtacagtatgtgaatcaacctagaatctatacatggggagatac

SEQ ID NO: 905736 - DNA, 657 bp, Homo sapiens
aatcttattcggagagaccttgatctctgttcacttytgcaaggtaacacactggtcgattaaattgatgacattttgatgattgaatctagtgagcaagaaatagcatacacactagacttactggtgagatatttcatgccagaggatgggaaataattccaactaaaattcatggaacttctacctcagtaaaatttctaggggcccagtggtatggggcctgtcaaggtattccttctaaggtaaaggataaattgttgcatttggcccctccttctaaggtaaaggatacattgctgcatttggcccttcctataaccaagaaagagacaaaacacctagtgggcctatctggattttggaggcaacacattctccatttgggtgtgttactccagcccatttatccagtgacctgaaaggctgtcagttttgagtggtgttcagaacagaaggttctacaacagctccagactgctgggcagtctgctatgccacttgggccataagacccagcagatccaatggtgcttgaggtaccagtggcagataaagatgctgtttggtgtttttggcaggcccccataggttaatcacagcagaggactctaggattttggaacaagaccctgccatcttctgcagataactact

SEQ ID NO: 905737 - DNA, 611 bp, Homo sapiens
ttctgccatggttctccttagcacaaatctagcaaccactgtgtgttacatatagcagggrtgctcgtaaagtaagtgctaattgaggtggtaatttttttaagagaaggaaatatgaaagattcaatttactgtagtggagaaaaggagtctaccacggattccagctagtcttaagtctaagaaatggaatcaatatagcccttaaacaatcaatggattgtgctaacatcctgtcctgaaagaaaacataactgaaacaatacttgggctccgttctatgcttaatcatatgattccttcattcctgatatttaatcactctaccaagtattttgacaggcagaagccggagcatctaacaagaatggtgtgcaaaacagacataatccttgtcccttataaatttaaaagatcagaaaatatataactatgatatctcttgttaacaaaaatcaaatcatctactgttattaaagagacctaatttatagatttcatattaaaatgtgcatttagagtaaaagatgtactttttactgaatccctacaactaccctgactaagcttagatgcttaaatttgatactttgatgctaaattttttgcat

SEQ ID NO: 905738 - DNA, 668 bp, Homo sapiens
aagaggttcaataacatgctgccctggtcactcagctagcaaatagtagtgatgtggttaaaataaaggcatcacgacttcaaagccagccttcttaatcgctattctttatatacagcctcctagaaggcactgaatgccttctccttcctctttctttctgatttccatgtccatttcctcccttttccccataacattggacatttccaagttgatctgtatctatcttcaagaaaaaaaaaatgaagttttattcttaccccaaatcgctggggtaaagatataaaaagacctcaactgcaagagattccaacatctgagaatgactttggaagaatcccttgcctctctggactcccagcacgccctgaaaccccagcctgagcacaccctttgcaaagtcataaaagcagggctgagaacagctatctgagaccttggctcatggactgcatctcatttgctttggctgttgatttgggccattgcctgtgtgggactttgtttctcatcagcagcttctgcttggtgtgaactccacgactggggcttggttttctttctgctggactgtgcttccccatggagaccttgatgcgctaacccattaccygtccctttataactcagaatgctcagattcagaacttggctttgctttctac

SEQ ID NO: 905739 - DNA, 649 bp, Homo sapiens
attatttgaaaaaatagtgtctgaaaaacctccaaatttgatccaaaacattagcctgtagatccaggaagctcagctaacccaaatcaggatacactttaaaaaaaaattcataggcatattatggccacacttctaaaaagtaaagacaaagagagactcttgaaagtagccaatataaaaagatattatatactgggggaaagatgttatatacacaggaacaaggatgggaaaaggtataaatgatgactaatttttaattagagattcaacaattaaaaattaattataattagaacataaaaagctttcacacaattctattgatataaaaacatgcataactaacaatattttaaatttattccattacatcttcttataattttatttcagtggctttgagaaatcccagagtagaaaactttcagagtggttttattgttaactaaaactaaaagcacttccttttattctgtgtagaaaggggagaaaagatggtaatggcaattacattaatgtggtggaattatattccttttctycatatttcatctcaaattttcaaacctaattttggtgccttgttctcccttaatacttcaatgtttatttctgaaacataatgccgctctcacatataaca

SEQ ID NO: 905740 - DNA, 670 bp, Homo sapiens
gataatgacaatgttggcctgagctttaggttcagaaggatcatgatcattttgctgagctaagacgcagaagagaatctaaggtaaagtgagttctaaggcaagaaaaccactgaccacagtaaccgaatggcatatacaatggctatggaaagagaaaactgcttcaaaccaagtgccaaattcaatgcccacttctgcattgagggacaatctttcaacatgtatgttacacttcttctaatcctttttacagacacttagaaaaatgtttaaatgatttttaaaattcgatccatttacatttgttccttagaaataaactataaatattgagatttagtgatgtagttatgtttgctatagagcttattttaagtatattcattgattttgaagttaatgtgtgttgttgtcctttatattccaaacattaagggcatcaaatcagactaatattttcttcctaatgtaagataaaaatagtaaagcaataatttaaaaaatggggctcttaattcagaacccatcactatttatactaactagacagagatattcttgtaatttacttttgttttacatactcacatataaatatatgatataacatgtatagaacgagttgataacrcaagacataaatataatttcatgggagcgtgttagc

SEQ ID NO: 905741 - DNA, 658 bp, Homo sapiens
catagcttttcatggcagctaattctagacaaagagaggggccaatgggtattttagtccaacctaatttgatgtcacagtggtgggtctggttttatttatttatttatttatttatttactaatttaaagaggctgctactatatagaggaaggttgtgtgcttagaaatggataatgttagcaaagcaaggaaaagttctttttttttttttctcctgaaaacaataacctacatttaatggtaagaaatcaccagcaaattccattatgtttgtgggcttgacatgcggtgcttattaaatgtaggaacaaagccactttatacatcatagtgttcacattacaaattcactgctcataatggtgctgcaagtatatgtgcaatttttctgaacttatgaaatatatttctgacacctcaggtattgatgtatgcacgcatgatattgtaccagtgcagtagggagacttaactgatgtctgcaagatttgatttattacaagtaaatatgattgccttcataatctgattttattatgttcggggctctcgcaggtaaacttttagtagaaggaagaaggccaattttattaaaccagtgtgttcctgcaaaccatakagtttcttgtcaagggggaagggggactgctggtc

SEQ ID NO: 905742 - DNA, 644 bp, Homo sapiens
taaaaaagactaatgaagaaagagcaaagagtgagaatctgagatactctccagactaaaggtgggggactcagttacayaattttgcaagaatttatttgattctgcagctcaaacattggagtctgggaagcaacagaagactcagaagccaatctgatataaaatttacttgtgtttttttctttcctgaactgtgaaggtatgctcctagatgtaccattacatggttttataactaggacaatgagaggtataatgagataactctatgggggtgcaattccaggattccccaagggtatgtgtattcaaatcaaatttcacagtttaaatgtgatgtggtatgttctcactcataagtgggagttgaacaatgagaacacatggacacagggaggggaacatcacacaccagggcctgttgggggatcgggggcaaggggagggatagcattaggagaaatctctaataaagataacgggttgatgggtgcggcaaaccaccatggcacatgtatacctatgtaacaaacctgcacatgctgcatatgtatcccagaacttaaagtagaataataaatacataaataaataagtaaataaataaataaatgtgatgcagtggcaacacagtacacagt

SEQ ID NO: 905743 - DNA, 685 bp, Homo sapiens
tacgttctagactcccagccctagtagcacacaattgagtataaaaaggaaggtttggagataaggaataaaaaaatcttaaaaattaacacagtatataaaagtgaagtgaaagtgaacattttaaagatgcggtttaattgtcttctgaattccaatattttcattaagagatcaactgtcagttttgttgtactcctctgaaaataatgtatccttttactctggctgtgttttagattttattcagttttcagcagtttatgtgtgaggtatttaggtttgatggtttgattttcttagggcttattcttgttggggtttgcagaacttcctgaatctgagcattgattaacaacaacaacaaaaaatagtactgtaaaatacttggccattacttatttaccatcagagaagattttccttttcctttgctaggcagttagggtggggatctgctcaccttaatcagactatgaactggcctgggttaaggctaaactgcaggtgggtaagattcagtcaaccacggttcatctgattttctagagtataggtgtcaagaaatttccagcttacttctttaatgtcttgccatgcacagctttacaatttggcaagtgacttgaggggtaaaccagcttggcatttaaagycactacagtgtacaattctgtcattccag

SEQ ID NO: 905744 - DNA, 635 bp, Homo sapiens
ggaaggaaaagaaggagagaaaatgaaacataaaagaagtagaataaataaggcacataagtagcagtaatcacaataaatgtaaatgtactaaggctctaacttaaagactgagatcatcacatagatagttctaaatctagctaaatgctattttcacttcaaaataaaaggatacacaaaatattatgattctacttatatgaggtacttagagtggtcaaaatcataaagacagaaagtagaatgccaggggctaggagatggataaacacacagttaattgtttaatggatacagagtttcagtttgacaatattaaaagagttctggagatgggcagtggtgatagttgcataacatgaatgtatttattaccaatgaactgtacacttaaaaatggttaagatgataaattttgttatgtgtattttgcaacaataaaaaatgaagtagccaggcgccatggtttgcacctgtaattctcagctactcgagaggctgargcaagaggatcacttgagcccaagaattcgaggctgcagtgagctatgatcacactactgtactcctgagtgacagagcaggatctcatctccataaagaaaaacatatttttcctaatggggaaataa

SEQ ID NO: 905745 - DNA, 590 bp, Homo sapiens
aggttgtaggctgtttatgagaatctaactaatgcctaataatctgaggtagaagatttcatcccccaccccctgcccgtggaaaaactgttttccacgaaaccagtccctggtgccaagaagattgggaaccgctgctctaagccataaatatatacttgccacaaccctatagagaaactgaggcttaaagaggttatagaacattcccaaggtcatacagctagtaagccatgacgtcaggattcaaactcaggccaacctttcccatggacacaactctggggttcccataccttacagtctgagataaaagaggtaactaataatatttttcaaaacatcctatttacagggcagaaataataaaaataggttcttggtaggaaagaataataggaggaaaataggaggaaaccactgatctctaatatttcctctaagaacaagataaattcagaattgggatttgcccacccaactcccagtccagtgatcctttgctgtgctaygtgtggtcagaagggtgaggaagtatcacaatggaaaggccaacaagatggcgatgaatgcatatactccttcagtca

SEQ ID NO: 905746 - DNA, 590 bp, Homo sapiens
gaaaataaccagtgtcttaaataggggttcgtattcttttagtgcccctctccaagatgggtgcatatccccaagctgaaatttggactatgagattttaattcatactgaatrgaaaagctgaagaaaaaaatggacttttataagccacaagcaattttttttttttttgaaatagagtctcactctgtcacccgggctggagtgcagtagcgtgatctcggctcactgtaacctctgcctcccgggttcaagcaattctcctgcctcagcctcccaagtaactgagattacagatgtctgccactatgcccagctaattatttttatttttagtacagatggggtttcaccatgttggctaagctggtctcaaactcctgacctcgtgatttgcctgccttggcctcccgaagtgctgggattgcaggggtgagccaccacgcctggcccacaagcaatatttttgtgtcaagaaggagaaacttcagtatttcaaaacctcttgggaaaactctcatatgaatgagccttgtatttgtgcaaataaaacagagatccactttgaaatgaaaagaagtttaaggtaa

SEQ ID NO: 905747 - DNA, 606 bp, Homo sapiens
cttctaaaatttaaaatactggcttctaatttttcatgagaattattccaaagyttgtgagactgcatatcctaaggactcagttgtcaaaatttcaataaagaagtcatttaaggaaggagtatcaggggtgctttgaaattgtgtgcagactaatatgcatacaatctgggagccctgttagaagaaaaatcacacaaatttacaaatacaaatttagagccatggaagatactcattcaagtgagagtccatacagcttaaagtttattagcttcatggtaagtccaattttactaaagaatatatatttcaaaaaacttcccaggtgattcaaaggtgtgaattctataaaccatgcttttgaatttttttcttctaacttcgcatgatcaagttcagatagttgctataagtttttacacatgtatatgtatacacatggtttggacatgggagaaattattcaaaaatagttatttctggatacaaaacttgacttctcactttatgttaaatactacatctccaaatttaaataaagagctccattaaatgttatttcatgggaatgccatatgtttggtaggtaatacacattaatca

SEQ ID NO: 905748 - DNA, 543 bp, Homo sapiens
agatggcatgaggtagaaaagaggcgcttttatgtataacgactaataaaatcagattcaaaaatatcatagcatgttagatgtacaggctaagtctaattwtaaaattttaataagggtagacatggtccttttcaagtaaacattggaggtctatagcttagaaacatgatatgaagaaagcctagaaactttagttgatggaaaggatatgagtgcttttatacaggagttagcaaattaaatcccaccatctgttgataaatgaaatggtattgaaacataactgtacttactcatttacagcatgcctaagtctgctgtcatgctacaacagaactgcatattgcaagaggaatttgaggaccaaaaagcaaaaaatatttaccatctggccgtttatgaaaagttgtgttggccttgatctaatgcaaatagttttcgttaatacatatagatggtccatgtatatggagataataacccctgacatttttgacactactgcttagttttatcctttttaatagtttcagttctgga

SEQ ID NO: 905749 - DNA, 543 bp, Homo sapiens
agatggcatgaggtagaaaagaggcgcttttatgtataacgactaataaaatcagattcaaaaatatcatagcatgttagatgtacaggctaagtctaattatwaaattttaataagggtagacatggtccttttcaagtaaacattggaggtctatagcttagaaacatgatatgaagaaagcctagaaactttagttgatggaaaggatatgagtgcttttatacaggagttagcaaattaaatcccaccatctgttgataaatgaaatggtattgaaacataactgtacttactcatttacagcatgcctaagtctgctgtcatgctacaacagaactgcatattgcaagaggaatttgaggaccaaaaagcaaaaaatatttaccatctggccgtttatgaaaagttgtgttggccttgatctaatgcaaatagttttcgttaatacatatagatggtccatgtatatggagataataacccctgacatttttgacactactgcttagttttatcctttttaatagtttcagttctgga

SEQ ID NO: 905750 - DNA, 618 bp, Homo sapiens
aaatgtccttcctctggggaaagcagccctcgggttctggagcggaggtcttggctggggtctgtggcacccgctgcccctgctcgcccctyccaccggcttggacggttgcagtgacgctgaatgaatgaatacaattgcctgggagtccggggagcgtgaagagacccgggacctcagggaacccgcgcctgcaccctcggggtcggtcccgtcccgcccgggttgggtggggctgccgcgagtcggaagaggtgggatgctgctgcctggcggtgctgcagtggcggatcttcaggaggaggtcctgggcttcggctggggcacgggggcggtcaacggggagcagaggcggggcgcagttgggaagcacggagacaaaagggggaaagaaggagggagcgggaagccaaaagcctacggtaccgctattaccaggcggaatcccatccaagtactaaccagtcccgaccctgcttagcttcaacagatcagaggcgagccgggcgcgttcagggtggtgtggcctagacgccagcagcggcgcctggctgccccaagagccggcccagccaagcccgcatgactccaggcgtcatcgccaccccgggccgcggg

SEQ ID NO: 905751 - DNA, 527 bp, Homo sapiens
atatgaaactatctgacactccaaggcatcttgtactatatattcaactatstatccctagtacctagcacagtcctggcatatagtttgctactaaacttttacagaatgaaggaattatcttgtatccaggttccaagttttaaggtgattcttcagtaaaaaaaagtattacagttcacaaataatctacttccctttttacaaatgggatcaattttaatcttatctcctaataacattactttcatttactctgatctaaatatactgtcctaagagagcaataagaaagagagttgaagctggagtttgaagaattgtacatggtcctgtgataccctaccttgttttaacctgagtgactctctcctagcggagagagagccggacagactccattttagtttcttcacgtgcagccccctttaccttccacccttaattgcataactagtgtaaactgactcaaagcaggtccaggaatgcacttagtgataagatattgaggcaagctgcaccagctg

SEQ ID NO: 905752 - DNA, 585 bp, Homo sapiens
catgctaggctcagtgcctgttatactcttgggagccagcrctttccctctccatcacatggcatacttgccattatttgttgtgtaaaatattgtccttagttttcacctttcctaggagacacaggcagagcctgtgacactacagcttctggcacacagtaggtaggtgcatcacaaacatctgctgagttcacacactcttgccttctcaaaacttcttgtcaagtcttcagtgaaaaggaattgctgattgagcaagaattaaacttctagagactcctggatccactgaagtttgagacaaggtgagatttgtttactgtcatattcctagctcataacatattgtagtcacttaaaaaagtttgttgaataagtgagtaaattgattcatacgtcatacttagctatatattttctgagtagaattgataaagttaatagtttaagtctagtataattttgctttactcattcaatgaacctgacaattcaaataggtgccaggcacactgctgctgaagaaaaagaggtataagatataatttctgtctacaagaaagccacagtctaaaaagtaga

SEQ ID NO: 905753 - DNA, 620 bp, Homo sapiens
atcacaattaaaagaactagagaaacaggagcaaacaaattcaaaaacaagcaaaaggcaagaaagatcagagcagaactaaaggagatagagacacaamaaacccttaaaaaatcaatgaatttaggagctgattttttgaaagatcaacaaaattgatagaccactagcaagactaataaagaagaaaaaagacaagaatcaaatagacacaataaaaaaagataaatggtatatcatcactgatcccacagaaatacaaactaccatcagagaatactataaactcctctacacaaataaactagaaaatctagaagaaatggataaattcctggacacatacaccctcccaagattaaaccaggaagaagttgaatctctgaatagaccaataacaggatctgaaaattgaggcaataattaatagcataccaacaaaaaaatatccaggaccagatggattcacagctgaatcctaccagaggtacaaaaaggagctggtaccattccttctgaaactattccaatcaatagaaaaagaggaaatcctccctaattcattttatgggaccagtatcatcctgataccaaaccctggcagagacaaaacaaaaaaa

SEQ ID NO: 905754 - DNA, 588 bp, Homo sapiens
tgtaatgaaacttttagtcatttccctcaagatcacaatatgttctcttaagttattagtactttggccacttcccaaagaatgcaagatccttacaagtttacttccatgtatttgtgtatctctcacccttgtgccattgttgtaatacacttttttattgcattttatatttctacaagatattattattattgtagttttaaaaagctttcattactatttactcatgtttgccctttctctgcacttcatttattcttgcattcccccctgctgcttttgttttctagtttttgattgccaataagagctacagaaaatcatgaaatatttcttttgtttctatatttaatgtttaattgtttttgtgcttattgttagtaactttttgaaacacctttcattcctttaagtagagaggctcttcagccaaatttttattcattaatatttcytttttcttccagacattttgttgttgatgagagcagaaaagattttcctttttggaaaacattatcaagcaaaatattttatgggccaatgcttccataacctgaaacaattgaaagaattctggattga

SEQ ID NO: 905755 - DNA, 558 bp, Homo sapiens
gaatagtagaagataaagattaaagataccaatttaaagtaaattggtagaaattctttaggaaaatctatggcagtacattagaggagatttagatatccttacacttgactgtgtcagatttgcttggagaaacttaccgaaagaacataacgaaaatattttaaaatgaagagttacttataaagttcaatatatggaagacaaaaaatccactaataatgtctcatcatataaatgacagtacatatttcagaaaagattaaatatgcataaccatttattgtgaacaccttttaacaacacgggcaccacacacacattcacatgcgcatatgctccccccgaccccccctggacacacacacaaacattaccatgagattacagagacattatgagcattattactgtgattatttctatctaaaatattcatgtgtcacccgtagaacaataagaaagaataaaaatagtcatatgaacaagtgttatycaagctgtgttttttttcaataatctatacaattattaagatctttaacattaacttcttat

SEQ ID NO: 905756 - DNA, 618 bp, Homo sapiens
ttagggtggggaaaaaaatcccgccctggtgaatttgaggtcagaccgtttctctgctcttgaaccctgttttctgttgtttaagatgtttatcaagatagtacgtgcacagccaaacatagaccctcatcagtaattctaattttgccctttttccttgtgatcttgctttgccctttgccttgtggtctttactggcctcagaagcatatgaactttgttctcctttcttgccctttgaagcatgtgatccttgtgacctactccctgttcgtacaccccctccgcttttgaaatccctaataaaaacttgctggttttacagctcaggggacatcacagtcctaccgatatgtgatgtcaccccaggcggcccagctgtaaaattcctctctttgtactctttctctttatgtctcagaccagtcgacacttagggaaaatagaaagaacctacattgaaatattgggggctggttcccccagtacacacacacacacacacacagataatggctyatctctgtaatgtgccctaaggcactttaacacatggctgtaagagttgttctttgtctctctttgctaactctggaagtccttccttgaggaaaaaaa

SEQ ID NO: 905757 - DNA, 602 bp, Homo sapiens
gcaagctattcaacccccctacacctgcatttttaaaatctgtgaaataggaataataattgtggctgtctcatataagcgtttgggagaattaagtgagatgacacttataaaatcctggcacataacaaatgataacaattggttaaataaaattatttatgttttaaaaaaagcatccttgggaaagactgtagcattgaatgaaccagatatgataagaaaagcagaaaaaaaacacacaattttgcagtgtcacataaagatttgagaaggccccttcagtttctaagtcatctgggaattgattcaaactcatatttctccccctctcccatcccccagcacacacactctgctttagaaagcgaaaggttttttaaggcagcttggtctcctttatgtccttgacctgaggtcagagtcaggaaataaaccatggaaaaaaatcctgtttcacatacatctccagagataaagtagaaatgcttctccatccaaaatgaaattaaaatcctgttctggtgataaccaccccactactgccaaccctgctgctgtggaaacgttcagtgaagkctatcctgcctggctttatggga

SEQ ID NO: 905758 - DNA, 614 bp, Homo sapiens
ttttagactaaaggaagcaaaaaggattaagatacattgctattctcarggaggttatagttatgactaaaccatttttctaaatagcttatatcagaagtttaaagcaaccttcatactgcctattataattctagggaaacatcctctaaaccatgggtccccaacccttgggccatggactgatagcagtccatggtctcttaggaaccaggctgcacagcaggaggtgagtggcaggcaaacaagcaaagcttcatctgtatttacagccactcccctttgctcacattaccgcctgagctctgcctcctatcagatcagtggtggcatttgattctcataggaggcgaaccctatcatgaactacacatgagggatctaggttgggtcctcctaatgaaaatctaatgccttatgacctgtcactgtcattacccccaggtgggaccatctagttgcaggaaaatatgctcagggatcccactgattctacattatggtgtataattatttccttatatattacaatgtaataatgatagaaataaagtgcacaataaatgtaatgtgcttgaatcatcccgaaaccattctccactgacccggtccat

SEQ ID NO: 905759 - DNA, 624 bp, Homo sapiens
ggtgtgctgtattcaagagacccaactcatgtgtgtgtctttacacacataggctcaaaataaagggatggaggaatacttaccaagcaaatggaaagcaaaaaaaaaaaaagcaggggttgcaatcctagtctctgataaaagagaccttaaaccaacaaagatcaaaagagacaaagaaggccattacataatggtagagggatcaatgcagcaagaagaggtaactatcctaaatatatatgcacccaatataggagcacccagattcataaagcaagttcttagagacctacaaagagacttagactcccgcacaatagtagtgggagactttaacatccctctgtcaatattagacagattaatgagacagaaaatcaacaaggttattcaggacttgaaatcagctccagaccaagcagacctaatagacatctacagaactctccaccacaaatcaacagagtgtacgttcttctcagcactacattgcacttattctaaagttgaccacataattggaagtaaaacrctcctcagcaaatgcaaaaagaacagaaatcataacaaacagtctctcagacccctgtgcaatcaaattagaactcaggactaagaaac

SEQ ID NO: 905760 - DNA, 706 bp, Homo sapiens
aaactatttgacagtttcttagaaaggtcaacatacatttaccatgtgactcaggaattcctctcccaagtatcctttaaaagaaaacatatgtacattctcacttattaaaaaatagaatgaataagacctactctttgatagcacaatagggtgactatagtcaataataacgtaattgcatattttaaaataacttaaagaatgtaactgggttgtttgaaactcaaaggaaaaatgcttgaggggatggatactccattctctgtgatatgcttatttcacactgcaggactgtatcaaaacatctcacataccccataaatatatacacctactatgtacccacaaaaattccaaaaaataatttttaaaaatttatgaaaacactgaaaacaaaacttatttttaaagtacacatgggtttatagcagtattattaataataataataacgaaatgctgaaaacagcccaaattcagttacaaaaaaaacaaaaaaacaaaaaaaacaactactgttccatgccacaacatagaggaatctctaaaacattacactgaggggtgagcggcgrcgggtggtggggggacctaacacaaaagagtgcctacttcataatcccattcatatgaaactgtaggaaagacaaatatggtctataatgatagaaagcagatcagtggttgcctaggactgggattg

SEQ ID NO: 905761 - DNA, 706 bp, Homo sapiens
aaactatttgacagtttcttagaaaggtcaacatacatttaccatgtgactcaggaattcctctcccaagtatcctttaaaagaaaacatatgtacattctcacttattaaaaaatagaatgaataagacctactctttgatagcacaatagggtgactatagtcaataataacgtaattgcatattttaaaataacttaaagaatgtaactgggttgtttgaaactcaaaggaaaaatgcttgaggggatggatactccattctctgtgatatgcttatttcacactgcaggactgtatcaaaacatctcacataccccataaatatatacacctactatgtacccacaaaaattccaaaaaataatttttaaaaatttatgaaaacactgaaaacaaaacttatttttaaagtacacatgggtttatagcagtattattaataataataataacgaaatgctgaaaacagcccaaattcagttacaaaaaaaacaaaaaaacaaaaaaaacaactactgttccatgccacaacatagaggaatctctaaaacattacactgaggggtgagcggcggcgggtggtggggggacctaacacaaaagagtgcctacttcataatcccattcataygaaactgtaggaaagacaaatatggtctataatgatagaaagcagatcagtggttgcctaggactgggattg

SEQ ID NO: 905762 - DNA, 603 bp, Homo sapiens
  misc_feature 583: n = A,T,C or G
atttttttgtttgtgttttggcttgctctccttgtgaaattataatatcacagtgaaaggccattctatatactttttcagaagatttttatagtgttgagcatataactgaattttttttcttagatcatgaatcagatactcatgaaacagtactttttaaatgtcactgtgccaagagttgaggagtgtggtggccactattccactcctcgtggagagcatcatgtggtggaggattccgtcctacatccaggcgttaagtaaagagttgcaaggttctcttaatggaacctcctttctgaagcccagtgccacataagccaaaccttaagtaatcatgccacgtgtctcagaagaggtgactcttaagctaaaaatctcagaaagaataagaatcatgcaggtgaaatgtgcaccaaccacattcttcagctttccaaggtgattaaaaaagacttagggttcacctgaggcccagagctgcaccatgccttttcaagagcctcaaygacaatcatgtactcctaaatcttggtaaggtagcttttccattaagtcacatagctttgcttaaccaatnctaataggtgacctaaagga

SEQ ID NO: 905763 - DNA, 608 bp, Homo sapiens
ctttccatgcatcatgatttcccaatgccgggagaatgtttaattgggtaattacccaggttcagttctctgaacttgcttaattccctggataacaaaaaaaaggaaagaggggtaacttaccagtcagatatctactcccttttttaatgttatatagacctggatgcttagcttgtttgtgcaaccctagtcaatttgcacagcttcgtttgtaccattttttttggaagaggcaaaataagttctgttctcaaaatagagtcaccacaggtgaaaacataacacttgtaagtagttcctctggtttctatctattcagttacttttgtgctaaagagtagacgtttgagttaactataacttattgtatatttcaaaatcaagattggaattgaaatgttcctaacacaaatattaaatgcttgaggtgatgaatataccaattaccctgatttgatcattatgcattgtaagttatcaaaactttacatgtgccccataaatatgtacaactattrtgtatctataaaaattaaataaaaatatactgagccaaaaaataaagaataagcatttgtactgtgcaattccccaccctgtgcaaa

SEQ ID NO: 905764 - DNA, 636 bp, Homo sapiens
atttaaaccagaccttacctagtgggttgccgaygctcttcctctcaggcagcccttcagagcaacttcctgttctcatgaggaagaaacccgagtgaatttctttaggcagaaaagacaaaagaaagacagtgtcatttcctatgctgagattatgactgagtatcatccacttaggtcaaacctttaacagaaaggaggagtttctgataagcagctaattagggggaagaatgaagtgtttaacgttagaaacagtgagtttcagtatgtagtgagggccatatccagtttaggagtgagtgcagttggtttggttctgagcacactgagtttgaggtccaggggtactttaacagggaggtgttctgtgaaattggtaggactgacacacaggagagatgtcagggccagagaggcaattggggaattacctgtatgtttgaagatttgagaggtgatggagaaacatgtggagtgacaagagcaaaaaaggttgaggatagagccttggattatacctgattggtgaatggaaagaggatgtaaaaccaatgaaaaagaaagattaacacatgccatagaaaaattgtgacaatataggctcttgcatgccaaggcagattaaattttgga

SEQ ID NO: 905765 - DNA, 620 bp, Homo sapiens
ttagtgcccttataaaagaaatcccagagagctgcatagccctttccaccatatgaagacacagaaggtggccctctgtgaaccaggaaayaggctctcaccagacgcagagtctgctagaaccttgatcttgaacttcccagcctccaaaattgtgagaaataaatttctgctgtttataaacaacccagtttacggcgttttgttaaagcagttgagcatgctaagacactggccatgtttgtgcttgggtaaatgtctcatgtacaaagtggccatgggaataggaacagaggcaatgaaataaataaacatggacttcctcacatcacagctgatctgccactgtcactgctgagtgcccagatttctaaaacggaaggcaacactgaacccttatttggcactatttcttggaagtatcagccacccaggttgataatatcagaccactacattatggaaggggcaggaatttgtcttcatgggaataattacatatactggagagtaacttccctttcctgtgcatgttgcttccgccagcactaccatatgtggttgataggctgccttattcatccccatggtgtcacacacagcattgtcactgatcaagg

SEQ ID NO: 905766 - DNA, 596 bp, Homo sapiens
cagagagctgcatagccctttccaccatatgaagacacagaaggtggccctctgtgaaccaggaaataggctctcaccagacgcagagtctgctagaaccttgatcttgaacttcccagcctccaaaattgtgagaaataaatttctgctgtttataaacaacccagtttacggcgttttgttaaagcagttgagcatgctaagacactggccatgtttgtgcttgggtaaatgtctcatgtacaaagtggccatgggaataggaacagaggcaatgaaataaataaacatggacttcctcacatcacagctgatctgccactgtcactgctgagtgcccagatttctaaaacggaaggcaacactgaacccttatttggcactatttcttggaagtatcagccacccaggttgataatatcagaccactacattatggaaggggcaggaatttgtcttcatgggaataattacatatactggagagtaacttccctttcctgtgcatgttgcttccgccagcactaccatatgtggttgataggctgccttattcatccccatggtgtcacacmcagcattgtcactgatcaagg

SEQ ID NO: 905767 - DNA, 673 bp, Homo sapiens
aacaaaacatatcagtggacttgtttcagtcagtgggycaccaattagtgagcaaggttacaaggttatagaataaaagctgttttctcaataaaataaatacaacgaaaatggctctgtataagatcactaaatggagggctgggcatggtggctcacacctgtaattccaacactttgggaggccgaggtgggcagatcacgaggtcaagagatcaagaccatcctggtgatcatggtgaaaccccatctctactaaaaaatacaaaaattagctgggcatggtggcgcgcacctgtagtcccagctactcaggaggctgaggcagagaatagcttgaacccaggaggtggaggttgcagtgagccgagatcacaccactgcactccagcctggacgacagagcaagactctgtctcaaaaaaaaaaaaaaaaaatcactaaatgaagtaaactacagtagtttttataattgagaagaaaccctagggtggccaagtttaaaatatattcttatattatgttagacactgttgagatttggaattttctttttagatagaagaaccaatctttaaaagaatctagtttccttctactaaaatcacaattctattgtaatacacagtgaagacttttaagattttaaaaaatcctctaattgttttacaca

SEQ ID NO: 905768 - DNA, 528 bp, Homo sapiens
cagggtcagttcattgttactcttccttctctcatatccttaacttagtasagcagatttgactagttgtcctctgagtatccattctctactttttttttagtaatagaacttaaagtaatttgagtcaacaatgttcacagctaacagactgtctttcctagcatccctttcagccaggtacatatgactaacttttggccagtagtattaagtttttggtaacaattttcagtgaagcatcgtggaaaaaaaattcgtgtgcagctaggaaagtctgatttccctctctattccttcttcttcctatgttggaatatagatgtgatgccagggtctgagttccccgttttgaactggaaggtgaccatgaggatagaagccacacacaaaagatgataaaagagaagatagaggaagactctatggggataatttaggagccctgggctttatctctggatttattttgcgtaaggaagaattgcatttcttccttgatagacaattttcttttccagtctttgt

SEQ ID NO: 905769 - DNA, 619 bp, Homo sapiens
ttctatgccaaaccagggagggcaagacatttctaaatctcctttaaggcaacaaatcaaagggcttccttggaaagggtcttagattatcacccaagaaccamacacaaaaaaaactagctgtgcattttccccttctgcattaagtctaagttgttcttctgctcaattctagaagaaattaggggactaaaatatgatggtataggaaaaaagggtgtcaagatgacagggataagagatactagttttctcattgtattagaattctattttttaaaaaagtacatgtttcatgtattatgtaacaaacctgcatgttctgcacatgtatcccagaacttaaagaatattaaaaaaaaaaaagaagaaaaagaaatctactctttaaggaccattaagcatcccttattttccatggcattttcattaattaaaagaattaaaaggaaaaaaaagtacatgtttatttatttaatcttctcaccatgttgccaaccaatgtttcagtcccagtcaaaatccctaccttctagtagggtgagaaagccagtaaacagagaaagagctaagataaccttagacttcaataactgttacagacaaaataaactcagtg

SEQ ID NO: 905770 - DNA, 519 bp, Homo sapiens
ctagccatatgcagaaggttgaaactggaccccttccacacactatatataaaaatcaactcaagatggattaaagacctaaatgtaaaaccaaaactataaaagccctggaagaaaacctaggcaatgccatcctagacatagaaacaagcaaagattttatgacaaagttgctcaatgcaattgcaagcaaaatcaaaaattgacaaatggaaagtgcttctgcacagtaaaagaaaccatcaaccgagtaaacagacaacctagagaatgggagaaaatttttgcaaagtatgcatctgacaaaggtctaatatctagcatctataaggagcttaaacaaatttacaagaaaaaacaaaaaccccatcttaagaagtgggcaaaggacatgaacagacccttttcaaaagaagacatacatgcaaccaacaagcatatgacaaaaagctcmacatcagtgatcattagagaaatgcaaatcaaaaccacagtgagataccaaatctcacaccaatc

SEQ ID NO: 905771 - DNA, 630 bp, Homo sapiens
acactagaaaaattagaaaacttagagccctttctggaactggrgctcatcagaagtcaacgtgaagcacaataacttcagttaacaaatgtcacttcttataatatcagactcttagtttattgtatttttttttaaataaaaaaactaaaatgtgccttttcggacaatgtatgatcagtccactctagattacacatttacaaatagatgatgtaaatgtccaactctcactattctgagaattggaatctacttcttctattgctttgtaaatgttttatttgcagattgaaagtactgtgaataagaatattaataacctaactgtaataagaattttaataattacattaaaaattatatatataataattaatacacatataatatttatcccttgccaggtactattctaaataataatgtaattcattactaatttaattctgacaacaattccataatataaataattatagaattgctattttacagatgagaaaactgaggcacagaaagtcaaaataattcgctccaagacaaacaactcataagaagcaaaaccaggatttaacctaggcaatctaatgctgttctgatgtaacatgtatttgttcagcttctttc

SEQ ID NO: 905772 - DNA, 686 bp, Homo sapiens
actggtatgggatgatatctcattttggttttgatttgcatttctctaatgaccagcgatgataagcattttttcatatgtctgttgcctgcataaatgtcttcttttgagaagtgtctgttcatattatttgcccactttttgatggggttgtttgtttttttcttgtaaatttatttaagttcttcgtagattccggatattagccctttctcagatggatagattgcaaaaattttctcccattctgtaggttgcctgttcactctgatgatagtttcttttgatgtgcagaagctctttggtttaattagatcccatttatcaattttgggttttgttgccattgcttttggtgttttagacatgaagtctttgcccatgcctatgtcctgaatggtatgtcccaggttttcttctaggatttttatgatcctaggtcttatgtttaagtctttgatccatcttgagttgatttttgtataaggtggaggaaggggtccagtttcagttttctgcatatggctagccagatttcccaacaacatttactaaataaggaatcttttccccatwactcgtttgtgtcaggtctgtgaaagatcagatggttgtaggtgtgttatgttatttctgaggcctctgttctattccattggtctatatatctgttttggtaccagtac

SEQ ID NO: 905773 - DNA, 631 bp, Homo sapiens
ataaacatagatgcatccctcttctccctaaaatttagaaaactgaatggagtttgaagaatgtaaagatggtttaacatttaaaaatcaatgtaattcaccatattgacagaaaaagatgtatatgtatacatacacaccacacatatatatattcacaaacacgtataaatatatatacacacacatatgatcttcttaatacatgccaaaataaaagtaatattgaatacaaatttatcattttaaaaatgctctgttaagctagaagtgccagggaattttcctcaatgtgacaaagggcacctatgaaaagttgctttcaaaatcatacttaactataaaaaaactaaatttttcctctctaagatcaggaacaaagcaaaaatatccacagacaacttttattcagtattccattggaggttgttaccactgtaataaggtaggaaaaataaaacatacacattgaatattaagaagtaaaactgtccttattaatggattaaatgattgttattacaggaayttctaatgaattcacacaaaacaacattataactaataattagctttttcaaccttatacagggagaattttaaaaatcagttgtatttttatatgctagca

SEQ ID NO: 905774 - DNA, 666 bp, Homo sapiens
aggggagacatgatcaagggtattcacaagagataaaggtgaggtagttaaggttgttagatctgtagactctaagaaaggtccattcagctttaagtttctatgtgccatgattccattccattacaacaaagactttagtaaaaatctcatttaaaattgcaaagagatcttggcctttgctgtagaaaattgaggggagagtgccagatggatttattaagtagttttgactcatagtaataacctttctttcaccatctacctaagcatatatttatgttccttcttttgactgctcttcaggccacaagtacttttcagctacctagaactcttcattggccagagttaactcagccaaaccagccttaccaactgcaggctcttccttctcagacctttcaccctgatatagttcggatatttgtcccctccaagtttcatgtaaaaatttaatccaaaatgttaaaggtggggcttaggggggaagtgtttgggttatcggggcagatccctcatgaattacttggcgccatcctcacagtaacaagtgagttcatagtttgtgcaagaattgattgttaaaaagatcctggcacctcctctcccttgctccstcttgccatgtgacacgcctgctcctctttccctctgccataattg

SEQ ID NO: 905775 - DNA, 449 bp, Homo sapiens
gcccttgaattatacctttgaccatggttggacatagaatatttctgaaattgagccagaatagcagaaggaggaagaggaaggagaggaaagtctaagcaaggatgttctgaaaatgggggataaagagaaggatgagcagacaaaggaaaagaaatttcaggagtctgtgttcaattcagaaattattttagacaattttttgtttctcttacaaaggaatgactttatcagaacctcttttagaggtttctaagtaccactgaaaatagctctaccacttgtgttttgttttgttattttagagcgaactttttytaattgagcatgcagataaactagtttatgtatttcaaaggtacaccattctggccactgtaatttggagtcattgcaagttatgtgtgaccaattttctaaacatttgcatgaagaggtgccgtaattat

SEQ ID NO: 905776 - DNA, 519 bp, Homo sapiens
tacagcattatggtctccatgttttaagatctagcccttgaatttgtttttactatttaattgaaattttgtaacctttgacmaacatctccccaatctgctcccccaccactaccttatctcctgatgatcaccattttactttctacttcttaagatcaacttttttagattacatatatgaatgagatcataaagtatttgtttttacatcctggcttatttcacataacataatgtcttccaggttcacccatgttgttgcaaatgacaagatcttccttttttatggctgaataatgttccattgtgtagatataccatattttccttatccatttctctgttgatggactgttaggttgattctatatcttggctgttgtgaataatactgcaataaacataggggtgcagatatctctttgacatgctcagttcatttcctttgactatatacctccaaatgggatggctggatcatgtggtagttctatttttttttttttggcaggaacc

SEQ ID NO: 905777 - DNA, 576 bp, Homo sapiens
tatcaaggatttcctaagaagtggtgggtatgagacctggtctcagtgagaagaaagaatgaaagagatatgtcaatatttgaaagcttgccatcttccttactgatgggccttgttcagctatgttgctgtcttgcaataatgccacgtcacttctggtactctcgagcagaaagaactttctcatattccaaccaagatcaggccaatggaggaaatgctggcaaaaaactcaaaccagatcaaaatgtggctcaaagaaaatgatgcagttttatacaatgagtcaagtaagtcatgttgcacaatgaatatcctgtaacccaaatgcaattttttttcttgaatatatctgtcacatagggggaaaagcaaaaatatgttcaaaaagactcaaatatacaatttagcttgcagattgaagacttctgcttttactatgcaatgttaacctttttcaaatggaatctaaatgaatgaaggaaaagaatctcaccaattgatttggctaaagattttgaggtggatgttgattctttgcayttgtccaaaacgttgtctctatttttggtggcc

SEQ ID NO: 905778 - DNA, 634 bp, Homo sapiens
gtcagaatgcatggctcagctctgccactgacaactstaccatgggcaagtgacctattccctcatgcctcagattcctcttctcaaaaaagaggaccagtaataatacctgtgccctagggctcttgggagaattaaagtcagtattatacagcatgtaaaagaattgtctggcacgtggtgagcattatatgaatatttctcaagaaataaaaatactttttaaaaaggaaagcttctttctgaaccatccaagagagaaaaggtctatagttttatttttgtacatgctatatgcataaaaacaatcactactgattagtattttcaactctgatcatttctactccacacttttaaaatatgaataaaatgcttcagcaaaaatatacaaagacatttgtggcggtattattcataaaagcaaactgtgtgaaatgacctaagtatctgacaattgaagaaaatgtgagtagatcataaaagccataacagggagcttgtgcaaatattaaaaaatcacatgatgggccaggcacagtggctcacacctgtaatcccagcactctgggaggttgaggtgggtggataacttgaggtcaggagtttgagaccagcctggccaatatggtga

SEQ ID NO: 905779 - DNA, 549 bp, Homo sapiens
agatcatttgaggacaagagttcaagaccagcctgggcaacatgacgaaacyctgtctctactgaaaatacaaaaattagctgggtgtggtggtgcatgcctgtaatcccagctgcttgggaggctgaggcacaagaatcacttgaacctgggagacggaggttgcagtgagctgagatcttaccactgcactacagcctgggcgacagagcaagactctgtctcaaaaaataaaaaagttaaaaaaaaaagaagagtgaatagtacctaccacggaaatatttcatgaagataagaaaacagaggtacttggtacatgtctactgcatagagtgagcttagtaattcttacctattcataataataacttctagaagtaattataaaatctaaattatgtttaaattatcttcaactatctttagaaatcaatggctgttgaactgtaacccaatactttatacgtcattcttccaaggttcaggacaaccccaaaatatgatggtaggagaccagaatatgccagtccaaaatgtaatcacctgaca

SEQ ID NO: 905780 - DNA, 581 bp, Homo sapiens
acttaacattcagaatcaatgaacaaacaggagaaacgttttacyagagacagggctttagtgatgtggggtttagctttgattcctagcaatagttttagtctattctttccacttcctgtgaccagctgcatttctccaactcattatcgcataagatgtctcagaggtacctgagcctgggtgttctctcctggaaatgttacagtccaggatctttctggatgtcattattatttccttttaattttggcctctggccttgcttgataatgtgggaaccctaattttccttttccttttctcaggtctcttgctggacttgccacatgacacaaaaaccttgtctaaagagatctcagggctagcaggccttttccctgcctcattatctgtggattcatttagttgatgagacaggattttgattaatgtgtttttctactccagaactcactgctgcctgcaaaatcccttcccttttacctcatgggagtgttcatcagggatgtgggtgtttggagactttctcaccccactgccttccatcctgtggtccttctactgaggcactggtagac

SEQ ID NO: 905781 - DNA, 581 bp, Homo sapiens
acttaacattcagaatcaatgaacaaacaggagaaacgttttactagagacagggctttagtgatgtggggtttagctttgattcctagcaatagttttagtctattctttccacttcctgtgaccarctgcatttctccaactcattatcgcataagatgtctcagaggtacctgagcctgggtgttctctcctggaaatgttacagtccaggatctttctggatgtcattattatttccttttaattttggcctctggccttgcttgataatgtgggaaccctaattttccttttccttttctcaggtctcttgctggacttgccacatgacacaaaaaccttgtctaaagagatctcagggctagcaggccttttccctgcctcattatctgtggattcatttagttgatgagacaggattttgattaatgtgtttttctactccagaactcactgctgcctgcaaaatcccttcccttttacctcatgggagtgttcatcagggatgtgggtgtttggagactttctcaccccactgccttccatcctgtggtccttctactgaggcactggtagac

SEQ ID NO: 905782 - DNA, 654 bp, Homo sapiens
aaaaaatcttgaaacacaggtcattaagaacatggaaatcaaatgatatttccaaaagctcaagaaatatttaatggcaagtttgaatgtcatgtccaggaaagagcaattagaacaggacaggccatcatcatgttaaggttaaattgtctagaaacaaactccccatgatctgcaggaatatattctattcctggttgctaaaaccaggaatttaaaccatctaaaacttggtatttttttcaaccctcctttttagcaccaagagcaaaggtgaaaagtgagaataaaaccacaaataatactaatacactcctcaccttcaaagaacagacagtataaacaggcatacaatttaacaagcaatttcaggaaagcacgttaattatgaaaggacacggcaggataataaagtgagccaggatgtgagaatgggtggcatgtcagaaaagctatcctggaggaattgctgtccagtggataatagaggagtgaataaaccataccattatgttggtgcaaaagtaattgcattttttgcattaaaagtaatggcaaaaaccacaaccacattcgcatcaacytaatactatgaacaatcttattactacctttaggtgacagacataaatactgacgctgggtttttataaa

SEQ ID NO: 905783 - DNA, 654 bp, Homo sapiens
gtaagcactagagagttaagtaattttcctactgccacataactagatcttctattctttactgtagcatattttattcttgtaaagaatgttatcccacaaaagcatacgtatagtctgtataaattcaaccccctttacagagacataattttgtaagtgtttgatataaaatttatggataagagactagctgtctggatgcaacaagagttgatgtataaatcaacctcattaggaactgaaaagatgcaaattaaaatcaaagttcaatactattacagacatgaaaaattaaaatttgaaaattttgattattccatgagttggttaagatgtagactctctgcagctcttttacactacctgtatgcttataagagtataaattggattacccaattggcagactccactaaggctgaccatactaatctccatgtttataatagctttatttgtaaatgccccaagctggaaacaactcaaaaggagaataaataaataagttatgctgtatttaaacaatgrcataatatagagaaatggcaatagactagcactaccttcaaaagcaaggatgactcacactaaagaaagaaccagacaccacaagagtagataaaatgggattcattcacaaaaaaaatttaa

SEQ ID NO: 905784 - DNA, 654 bp, Homo sapiens
gtaagcactagagagttaagtaattttcctactgccacataactagatcttctattctttactgtagcatattttattcttgtaaagaatgttatcccacaaaagcatacgtatagtctgtataaattcaaccccctttacagagacataattttgtaagtgtttgatataaaatttatggataagagactagctgtctggatgcaacaagagttgatgtataaatcaacctcattaggaactgaaaagatgcaaattaaaatcaaagttcaatactattacagacatgaaaaattaaaatttgaaaattttgattattccatgagttggttaagatgtagactctctgcagctcttttacactacctgtatgcttataagagtataaattggattacccaattggcagactccactaaggctgaccatactaatctccatgtttataatagctttatttgtaaatgccccaagctggaaacaactcaaaaggagaataaataaataagttatgctgtatttaaacaatgacataatatagagaaatggcaatagactagyactaccttcaaaagcaaggatgactcacactaaagaaagaaccagacaccacaagagtagataaaatgggattcattcacaaaaaaaatttaa

SEQ ID NO: 905785 - DNA, 462 bp, Homo sapiens
ctatactcttctgcctgtggagttgcaagtgtaatctttcttgacagcaagagtgctcataggctgggcacagaggctcacgcctgtaatcctaacactttgggaggctgaggcaggtggactgcttgagctcaggagtttgagaccagcctgggcaacatagtgagatcctgtctctacaaaaagtaagaagacaaaaaaatcagtcaggcatggtggcacacgcctgcagtcccagctacttacgaggctgaggtgagaggactgcttgagctcaggaggtcaaggctgcagtgagttatgattgcaccactgcactccagcctgggagacagagtgagatcctgtctccaaaaagaaaaaaaaaacccaaaaaccaacaacaaaaagaaaccaaaacaaacaaaaaagaaagtgctcaccamaaattagctgcagaaagtttgcaacacgtggtcaggg

SEQ ID NO: 905786 - DNA, 601 bp, Homo sapiens
tttacttatttattttcctgtctagacaatgtcatcctgagagaagaatgttcttgtctttgaattctccttctcggaatggtagctggcacctaatgggcattcatgggaatgcacatacacctcgcttttccccaggcattctgggtcatgttgtcatcaagatctattctaggtttctctaaataatatttcatattttggagtctcactgattctcttcctatcaccctaagctactttcttggggtagacagactgaggtggtcccatgctcccttcttctggatattcaggtctttgtgtgatcctctccccttgagtgaacagaacctgtgaattgctcctaaccaatagaacataaaaatattatgaaatattgctcccttgactaagttatatcatataaaactctctcatgacagactcacttgcaattctgccaacaacctgagtaggcttgaagcagattcttccctattcaagtctgtgaataacaatgaagcctggctaatagcttgattgtagtcttgtagrtccctgagcagaggtcacagttaagctcttcctgtagtcctcctgatccataactatgagataa

SEQ ID NO: 905787 - DNA, 572 bp, Homo sapiens
gaaagagttcaaccgaatagcataaggcasagtgagagactgagcgaattttagagcaggagtgaaagtttattaaaaattatagagaaggaacaaagtacacttggaagagggccaagcaggtgccttgagagagtccagtgcacggtttaatttttgacttggagttttatacgttggcatatttctgggcattgcaccccctctcccctgattcttcccttggggtgggctgtcctcatgcacagtggcccaccagtgcttgggaggggcctcatgcacaatatgtttactggagttgtatgcgtgctcgctagaggcactcttcccttaccagtcaagtgttcctagaggaaggtcaagaaccagctaaactgccattttgccttttagtgcacacacttgagtgcccatctcctgagatcttatctggaagctgctgatcaccagtttcaggtgtttctatctattgggagactgccattccctggcgccagctgtgaccaattattattttagcgacacagtttaacaaccccctgaccatcacctgatggttgtctgacatttgt

SEQ ID NO: 905788 - DNA, 597 bp, Homo sapiens
cttctcaactgcagaggttcttcccttttgtcctaacacactgggagggaactctgcactgatgacaagtaaccatgaacgtgattcctttccctcctgcrgtggtcatcttcagcaactctagccgtgaagccagcctgcctgtctctttctttgcttgtgttgggtcatattactgaagaaagaataatagcaacactgttacccgcctgtgtaccagtctttgttcacgggaggttttaggatctctatgacacacgcaggcagagcatgccaccgtcacttaggaggggaagccagaggtcttggaagtcacacactagcagggaagagacctaggttttcccatggctcactgcagcctccctgaactctttttccacagatgctaggctgacactcccttgtccccctctagagctctgtgaacaggaagaggttgtcttctagctgtgtagaggctgggggaacagcccacagtgcaagccacgactacctgctctgaagtggaggggctgtggagcagacagcagacttctcccagctgagcagagctgggcaaaacagatcgatctaaaccgcccttagcggatgttc

SEQ ID NO: 905789 - DNA, 609 bp, Homo sapiens
ttttctctagcttactttattgtaagaatacagtatataatacatgtgatatacaaaatatgtgttaacttactgtttagtcatygataaggcttcgggtcaacaggaggctattagttaagttttggggaagttaaatattaggcatgggttcttttattgcaatgggggaattggcactcctaaaccccttgttgtttgagggtcaactgtacattgtttaagcatttgcctctggcataattcaaactaagaccattatcttcttaacagctattcccttcttccttatttacatgacttcaattttgtgaagttcctatcctcctctgcagtgccatagactttaagaaaggttggcccagtcccatctctggaaagcatcctgagtgatctaaattgataatgatttcttatttttctaggcatgagcaggcagctcagttatgaccaatgagagacatgcaggaaagtcagctataggactctggagacatagaaaacaccagtttattttcagcctctggattttgtcatgtctagatgagatgctaaaactgttgcagccatcttgcaacgatgaaaagaggtattgggaggacagagcca

SEQ ID NO: 905790 - DNA, 617 bp, Homo sapiens
acgttgccagtgatcccaactgagctgaagtttaaagggctaggtccaaattaaasgtgcagtggggcagagaatgcagtcagcagaaaccaagagcatcccctggaatgaagtggacaaaggcatgcataggcaaggcaagacaacgtaaggtaggtggccatacagctgggaaggtacaggccatgcgtctggcatacccatggaaaccataggcaaaagagcagccacaagtctgaggccaccaacaccagccctgcctgagagctccaaggatgtgggggtgatgtcagtagtttccattttggctccccaggaaagttggccacaaggccttcctatggaatctctagggagaattatttctaatttttaatatttatggaaatgcaaccttctaaagaaatgtctctcacataacatcaagtatagtgtattcagtgaataagtttacttatttgtaaattcagtaaatatttctggagccccttctatgggagagatatgatgttaagtacataggaactcaatatcagttgcttgattagcattgccctctaagaatctttgcagccaattgcacgaaaacaacattaagggctatatttgttgtttat

SEQ ID NO: 905791 - DNA, 611 bp, Homo sapiens
ctcagttggaaaccattatggaaaaataaggcccacttacactcgggatcagctgtggaacttcatagactgtgcttcagcattgttccactgaaggacaaggaggctggggcattaatctgctgacttccatccactgttacttactaactctcctgcacttccaggctgtggcctgcttgggtgtccccaagggacaccacagcacccactgaaggtggggcacttgcagcatgcatgccgctgttcacattagtgccactaatgtcaggtgggcccaagggatggggcacagggcatcttaggcaggtgcttctgggtagaactaaccctttcattttccatccacaccctgcagtgagcataatggagcgtgtgtcccagagttgggtggggactgggagaatgtttttaaagcacctgaagcagatactggcatgtagtacgtgcccagtaatgttagttctctttccttccactycccctttgtcaccttaacacaccaccttaacatcttaacaattaaatttatcctattaacataaaacatcctcattaagttcttcagcctttctacagatttaataacttaagctttcatactaggggaa

SEQ ID NO: 905792 - DNA, 675 bp, Homo sapiens
actaaagaggagctagccaggacaaaaataaatagaaatcaggtttgagatgaacggtaggctgatgagaggattaaacgtaggtggaattatccaaatagaggaaataagaatggacaaaggttgttcggagcacagatgcttttggcagacatttgtttctcattggcagatgctccataaggccaaatatagaagaatgtgctaggaaatgaaataactggatcagaaagcaaaaggaaaagaatgtagtttacctgcaccaacttagacatgtgaaatatttgaaactcaggtgcacctgcccgaaaagaggagaaggacaatatcaggaaatgaaatcctagaagcatacccatggctgaagagaacattctggcagaaagaattgttctgctgttttgaagtaacacaaatccctcaagatgaagaactagatttggaggtggaccagcagaaggtatctgtcttctcttgcttcagtagactagaagaggacgtacatttttagcctacacactctttgtgaaataaactgcatccccaattttgaaattgacagattgtttggcttcaatgacatgacrcaacttcaggtgtgactcatttcctcccttgataagtgaaattatgatgtcacgtacacatgccattgttaggtacacataggcttgt

SEQ ID NO: 905793 - DNA, 659 bp, Homo sapiens
gagcctgaggaggcccatgtggcatcatcactccctggggaaacgggatttgtttcatccttattattcttcaaggagcttggattcttcccctgctaactcctgttcagcagctctgcctggggctgtttaggggatttgtgtccccactaagtccaccagaggcactgtgcattgttgagttgtggcttttaaatttctccatcaagaactagaactctcttgcactgaaacctcacaatttaccaggccaaaaagagcagagttgagttggtgggccctaagctctgccctccttgacctccctttttgccttcccctagaggtgacccttaagggatggccccaggctcctccggctctttggggcactgcgggaaactcactgaatttggaaaaattcggacttgggatttgctcaatccttgctatcatatcaggggagccacgtaaagatatgttgccttaaattctctcattccacagtattcctatgaaatcaagatgcctttgatggacatgccttaaattctctcattccacatattcctatgaaatcaggatgcctttgatggacatgccttaaattctctcattccacagtattcctatgaaatcaggatgyctttgatggacatgccttaaattctctcattcca

SEQ ID NO: 905794 - DNA, 659 bp, Homo sapiens
gagcctgaggaggcccatgtggcatcatcactccctggggaaacgggatttgtttcatccttattattcttcaaggagcttggattcttcccctgctaactcctgttcagcagctctgcctggggctgtttaggggatttgtgtccccactaagtccaccagaggcactgtgcattgttgagttgtggcttttaaatttctccatcaagaactagaactctcttgcactgaaacctcacaatttaccaggccaaaaagagcagagttgagttggtgggccctaagctctgccctccttgacctccctttttgccttcccctagaggtgacccttaagggatggccccaggctcctccggctctttggggcactgcgggaaactcactgaatttggaaaaattcggacttgggatttgctcaatccttgctatcatatcaggggagccacgtaaagatatgttgccttaaattctctcattccacagtattcctatgaaatcaagatgcctttgatggacatgccttaaattctctcattccacatattcctatgaaatcaggatgcctttgatggacatgccttaaattctctcattccacagtattcctatgaaatcaggatgccwttgatggacatgccttaaattctctcattcca

SEQ ID NO: 905795 - DNA, 644 bp, Homo sapiens
gggtttgggtttcagattcaaacagatgtgctattttggggcwatttaccgggacttctctgggcctcagtttccacatctctaaaatgggtatcttcatgggtcctttaggagcatgctttgagctttgagtatagcttcatcctcaattttcttttctccatcctccctgctgactctctttcatcttttgtctgttctttatcttcctgattatttttctcagttatccaattaatatttactcacacactttgttccaggcttagcctaatttctgatgatgcaaggataaaccagctattttcccattccccttgaggatgaggaaaggccttgatgagccaggacaggccaggggtcttggagtcagccactcctcattgtcagcacaccacaagttctccctgtcacaccaggaagatgcagtccgactggaaggtagaatgagctgtaggggctggcccacaagatctgcacccctcatcctccttccacgaagggagctgggaatgccaaggatggatgcataattctggggtaagagggactcaggaaagggcagacatctgatccaggtctggaaagctaagcaggggtttaatcaacagggaaaatgcagggaagagggaacagcactgtta

SEQ ID NO: 905796 - DNA, 585 bp, Homo sapiens
ttgaaagtctgattgatgagaagctaaaatctaagcctggagaggttaggtaatctcaccaaggtttcccaaacccaggagaagcccacttcttctataaggtatatttctctgtaagacacatgaatctacaaaatgtctataataaatcaaggtcacctaccccaacgggctgatgaaaggcccggaaagactcaggcccaggcactgggttactctgcaccaggttaatatctttctactgaaccttgaagtcaagatttgacctgctaggcattcttggtagggataagtggagttaagtttgtgtgatgtagagtggttaggccagaacagtatttaccacagtacgtgatttgagatgctttgagtaggatacagagagagcatccaaaaacattgactgcatagtaaaaaaattgtctttttcttttgattctctttcagtgctgcctgtcacattaaggagcaactgtctgcwtggtgttagtagacatttaacagccctctcactctggcaaagttcaattgtcaacaaagcgctggcatcaggataagaaccttcagcaagcaacagtgactagc

SEQ ID NO: 905797 - DNA, 605 bp, Homo sapiens
ttcctttaacttctgccacatctctgggggctactaaattgtaaccactataatttatttatttttctaattttatgtacttagtaggtaatataaatgcaaacttcaagcttgcagmagagtagtactatgggttttaattcagataatttttttttcatgttgcagattacacagactttttccttgtcagcttatttaaggcaataaatagatttgtttctcaatcctccattgcactgtgactctggtctttcaagagccccagggacctcagtgctttattctccttgcataggtgcagtgctttttttttgtttagtttttgtttttattttgactctgagtgaactttagaggccaaggttctagatttctgagatttgtaatgacccatggggcagatgcaggttcagttcaaaatgaccactctggtttcctgactcttctttgattttgccccctgggcattttttctcttattttcctatgaactcaactgtgtatctgaaagattgttatatttctaaatagtttataaaggaaaaatattttttagaagagtaacctgccataatactggtggaaaaacacctctcttttaa

SEQ ID NO: 905798 - DNA, 737 bp, Homo sapiens
aatgcaaaacaatagatgcagcagtgaataaggtaaataagttaggttcatgacctcttgatagatgtggctctatccattgcaccatgctctaaataccagtctaagtccagacagagaactggaaacggcagtgcagaatatgatatagataaatggctaaacaggtggtagaggactgaaaaagaagtagtgttgaaggtagctggatacagaaaccgatttctgggacaacttatgattgatagacgctgctcatggaacaagaagcaaacagaaaggagcaagtcccatttccttccttcagccttgcagtctccctctagtgcctcctgattacagaatctgagataaaatcagatggcaaaggagaaatgtggtttgtagagtccctgccccgaggatcacagagccagagcatagaaaggtgagtttggagcagagagactaggtagctgtcagacacaccctgtcaccctattcagagagactattgtcagaagtttatgacgacttgaacctagaaaaggtagttgaaaccacctggtccaacctgcttatctttcagagaaaactgatactcaaagaaatcaagtgccttgtaaaagattacagcacttgtaagtatcagagctgggacaggaatgtagattttcttatcacacatttcactgaaagttctgctattccatgttgtctctaaggacaatgaamaaattaatggccaatgttctcaa

SEQ ID NO: 905799 - DNA, 613 bp, Homo sapiens
ttgtaactacttagaacaatgaatggcacttaataaacatttagtaagttttagttactgctggttgtactttgtaattaatcataatacttattgtttcagtattatcagtgggatggtggtggtaccgctaactagaataggtaaatgaagaggaaaagaaagttggaaagctaaggtagtagtacttcaattttagatttactgagtctgagggccactcgtgtatctaagtagcagtatacagcaagctataactggagctctagtgcgacactggctagaagaaagtgagaatgcaagattgccttctaaaaggctggggtactaagtagaaaccagtgcattcaggaatacatgaagtgagactatggggataggatgtttagcctattctatcaagaaattgtagaatgagatggcaaataggtatgacaatagccagataaaaggagattacttaaaaataatttttaaaaatttaaataaaatgggatagatttaatatctacagactgaatttatacaaakccagaagaggggtaggagaggcataaacaaaaatcacaatgaaaactaataaatactaatgatttactaatagaaaaacatg

SEQ ID NO: 905800 - DNA, 578 bp, Homo sapiens
ttctataagaatgctatttaataaggggtgggagacaggggcataaacaagatggtagaatagaaggctatactgtttatattccctgctggaatatcaaattttaacaagtatctgcacacagaaaagcaccatcactagaatacaaaatcacatgagcaataacagtacctgattttaactgcatatcactgaaagagtcattgaggagggcaggagagagagtcttgaatccttgaagtgacccttcccccatctctcccacagtagtcatgcagggcagagagataatcagtgtacttttgggatggagagcacagcaaatgggggtctttacattgaactcagtgctgccctatcatactagagaataaagctgttctgggctcaggcagtgcccttacaaggagggagcattgggatcagccctagccagacaggaatcatccatcccagtggttggaacttgagtttccagcaagcctcaccgccacaggctgaattgctctggtctcttargtaaactggaaaggcagtctaggacacaaggactacaatttctaggcaattccttgtgc

SEQ ID NO: 905801 - DNA, 618 bp, Homo sapiens
tgggtgggaggtggtaccatgtgaattttatggcctccttcctattttatgattttaaaatagttttttggataaatcgactttagtaatactgacctctgctgtgtcaagtgcctttcccagttcactattcaaatcaacccacagaagacgctctcctgatccagtttaatttagccagctatcggattacttcctgtggagaccaagaatattaacagttgcttgctatttgaaatgactgaagtgtgctgaaataatgcagtcagcaaaatgtcacttatggcttacatatggatctgttgcagcctgtaaaacattgtctccatgagggacagccaaaatgaagagttatgtgggagtaataaaatatgataactaggcctcaacctcaagtacaaacccagctgcgcatgtacatacacatccacgagaaagcctgctgataataaaaagcaaaaaaaaactcaatcatgtccagtgtgtgtgcacttcgccgcagaactggtcggggaactgtcctttcagcaccacagcaagaaacctgaatacaagcctaaacacaggcaacccaaagctggaccaggagaaaaawttcttaagggtcctacaaggaaa

SEQ ID NO: 905802 - DNA, 574 bp, Homo sapiens
gcaatttcatacttttatctgagtagattagactgctcacttcacatcaagtcatgcaactaataaccctaggatgtgtcatcccaaactcactatcttctttagaaagtccctcttatgaacaacattcctcttgtggagagtggctgaataaaatcctaaatgtaaagatcccaaactggtaacttttcatctggaagttagcaagaatgccacctcagcagctgtaaggaggaaatacccttacagagatgaggatgcactgcccttgtcatctcagactattagagggctgatgctgaactactggactcatacaatgaggatcaattccttctcctcttgattttccttctagtaagagctacagaatatgccttaatgttcatactcttagaagctacttgtttatttcaaaactccccatattttccacttctagacatggataaraagttttcttgcagttcatgaaatcataaaccatgaccatttagaaatctggctcagttcttttgctttacagataagaaaactggacaggatgtggtggctcaatcctgtaatcccagta

SEQ ID NO: 905803 - DNA, 610 bp, Homo sapiens
gaggcaggagaatggcgtgaacccaggaggcagagcttgcagtgagccaagatcttgctactgcactccagccctggtgacacagcaagactccttttcaaaaaaaaaaaaaaaaaaaaaraaagaaaatttcaggccaatattcctgataaacatcgatgcaaaaatcctcaatgaaaaactggcaaaccgaatccagcagcacatcatagagcttatccaccacaatcaagttggttttgtccctgggatgcaaggtggtttcaacattcacaaatcaataaatgtaatccattacataaacagaatcaatgacaaaaccacatgattatcttgatagatgcagaaaaggcaataaaattctatacccctactagctaaaaacacttggtaaacaaggtattgatggaacgtatctcaaaataaaaagagctatttatgacaaacccacagccaatatcatactgaatgggcaaaaactggaagcattccctttgaaagccagcacaagacaaggatgccctctctgaccactcttattcaacatagtattggaagttctggccaggacaatcaggcaagaaaagaaataaagggtattcaaatagga

SEQ ID NO: 905804 - DNA, 662 bp, Homo sapiens
aaactgctgagtgcaggtgtctttttggtaaaattatttcttttcctttgggtgtatacccagtagtgagattgctgagttgaatcgtagttctattttcagttctttcagaaatcttcatactgttttccayaggagttgaactatacattagtctgttctcacactgataataaagacatacctgaagctgggtaatttataaagaaaagaggtttaattgactcacagttccacatgactggggaggcctcacaatcatggcagaaggtgaaggaggagcaaagccatatcttacatgatggcaggcaagagagcgtgtacaggggaactcccctttatagaaccatcaaatctcatgagacttattcactatcacaagaacagcatggaaaagacccacccccatgattcaattacctcccactggatccctcccatgacatgtagaaataatgggagctacgattcaagatgacatttgtgtggggacacagccaaaccataccattccacccctggcccctcccaaatctcatgtcctcatatttcaaaaccagtcatgtcttcctaacagttgtccaaagtcttaactcattctagcattaactcaaaagtccaagtccagtgtctcatctgagacaaagcaagtcccttctgcc

SEQ ID NO: 905805 - DNA, 607 bp, Homo sapiens
tacatggaagacacctagggaatgcatagttctcaaagaggtagyttcgaattccagctcagataacatcttcaacaaggaatagtaaacatttagagcgacaaggcaatggaaaaggtctttgaatctctaagggtggtaccttggggggaaggcaaatcactggcagataaaggctagttcctaaagcttgttaatgtagacacgccagtgccatatccaggcccctggtgccacctccaggcccataaacatttaacgttgtcttaagtgtttaaccgttattctccacggtaagaagtgggggggtggtataccttttgtcgttgtaaatttatgtcctgcttttagataaacagatataaaacagaagaatttctttcatccatttcttcttaattgccttcagatcaacagttcttatgccaaagaggcacattttagagtggcatatttggtctcctacaacctcatgaacactgctttcaacaccatcaacttgataattcttcctatgctctgatatgctattcacctttagttcttctgtggtttcgatattcatctttgtgttatgatgatctctatgccagtatttgctccttaa

SEQ ID NO: 905806 - DNA, 600 bp, Homo sapiens
ttgagctgggacatacatcttcttctgcccgacatacatgctttggttcatgggctttaggacccatattgggacttacaccattggccttccaattctcaggtcttttacctcagactgcattataccaccatctttcctggttctccatattgcagatggcaggtgctggcactttttggccgcataactttattagcatatatatatatgtgctaaatatatatataattaaatatagaattactatatgacctagcaattccacttctggatatttattcaaaagaatcaaaatcaggatctcaaagagatactagcattcccatattcatttcagtactatttacattagccaagaagtagaaacaacctaaacgctcatggaaagatgaatgaataaaactgagatatatgcatacaatggttattatttagccttagaagaaaattctgcaaaatgcaacarcattgaatgaactttcaatgaaccttgaagacattatgctgaataaaataagctagtcacagaaggacaaatgctgcatgagttcacttaaaggaaatacctaaagcagtcaaacttagaatcacagagta

SEQ ID NO: 905807 - DNA, 573 bp, Homo sapiens
gtccacacattgatctatatatagatttaatgcattcccagtaagaatgtaacattctttttggaaaacatgaacaactttattaaattattttcatgaaaacctaaaggctctagaatagctgaataatcttaaaaatgatgaataaactttattccaataattactacaatgttaaaataaccagaagagtgtggcatttgtgtaagaaaatcgaatagatcaatgaaacagaagagagaaaccagaggtattctatgtttattttctacaaaggttccaaggaagttcagttttggttagatggtagagaaaataaataaaccttgaatcctatcaaatgctggactcttaacacatttaaaaatgaatcatgtacctcaccctaaatgctgaaatatgaaaattcataaactcatcaaataatatcttcatggtaaagaaggatttttaatgagatcacytaaatcgttaactatcaagaaaatttgctaaattgacttaattaatattaaaattcctgacatccaaagacaccattagcaaaataaagaatcagccatgaagtcagag

SEQ ID NO: 905808 - DNA, 685 bp, Homo sapiens
atatatgtattctgtacaatatatgtagaatagaatataygtattctgtagaatatatgtagaatagaatatatatattctgtagaatatatattctattagttctgtccctctagagaaccctgactaatataggtttataccaagtaatgggattgctgggtcaaatggtaattctacttttattaatagttctttgagaaatctccaaattgctttccacagtggctgaactaatttacattcccactaacaatgtataagcattcccttttcttcacagccccaccagcatgtcttatatttttactttttaataatagccattctgactggcatgagatggtatctcactgtggttttgatttgtgtttctctgatgattagcgataatgagcatttttccatatatttgttggatgttggtatgacttcttttgagaagtgtctgttaatgtcctttgcccacttttaaatgtttttcttttttttgttcattgatttgttcaagttccttatagagtctggatattagacctttcttggattcataatttgcaaaaattttctcctattctgtaggttgtccatttactcttctgacattttcttttgctgtgcagaaactctttagtttaattaggtgccacttgtcaatatttgttttttgttgcaactgcttttg

SEQ ID NO: 905809 - DNA, 488 bp, Homo sapiens
tattccactgtgatctgagagtatacttggtatgattttgttttttctaacatattgagacttgcattatggccaaacatgtgatcagtcttggagcatgttccatgtgcagatgagaaagacatatattctgttgttgttgtgtgaagtgtctattaggtctaactggttgagtgttgaatttaagtccagaatgtctttgttacttttctgcctcaatgatctaatgctgccagtggggtgttgaagtctccaattattcttatgtagctaagtctttttgtgggtcaggaagtacttgttttatgaatctgagtgcaccaatgttaggtgcatacatacttgggagagttaagtcttcttgttgaattgaacattttatcattgtgtaatgctcttgtttgtccctttttaaagttgttggtttaamatttctctgatacaaaaatagtgacccaggggtaactatttttttgctttctgtttgt

SEQ ID NO: 905810 - DNA, 609 bp, Homo sapiens
gtggcaaggaagaaagtgaaaaacaagattgtaaagtataaacccactgcctggggcatgaggtgggagtagggtacagaagttgaaagaacataggttgccatgttggtgaccatagcttagactgaaatgcccatgctggtcaggaaacagaattgtagacattttttcaagggtaaggaatcagaactgagaccttcatataacccgggactctcatagggctacattatcagtgaaagagtcaactttaaaatatctgctggcaggtaaagggaaatgatgagggcatttatttatcttagcatgagttctgggaacacttatttgcattaggcggggttctggtggagggtagtaagtccccctgaaaattcataactatagatcttatgagaattcagggtttaagtaaatactcataatcttcttccttggggaaaattagcaaaaaagtggccccaggctgatatccttggcaaaaacaaaagcataaatatcacaggatcttcctttgacatttgcataaatatagacctaatcctgtcttccacaaatttccacaaataaagccacaataraatcactaccaaagatgagtttacaatc

SEQ ID NO: 905811 - DNA, 609 bp, Homo sapiens
gtggcaaggaagaaagtgaaaaacaagattgtaaagtataaacccactgcctggggcatgaggtgggagtagggtacagaagttgaaagaacataggttgccatgttggtgaccatagcttagactgaaatgcccatgctggtcaggaaacagaattgtagacattttttcaagggtaaggaatcagaactgagaccttcatataacccgggactctcatagggctacattatcagtgaaagagtcaactttaaaatatctgctggcaggtaaagggaaatgatgagggcatttatttatcttagcatgagttctgggaacacttatttgcattaggcggggttctggtggagggtagtaagtccccctgaaaattcataactatagatcttatgagaattcagggtttaagtaaatactcataatcttcttccttggggaaaattagcaaaaaagtggccccaggctgatatccttggcaaaaacaaaagcataaatatcacaggatcttcctttgacatttgcataaatatagacctaatcctgtcttccacaaatttccacaaataaagccacaataawatcactaccaaagatgagtttacaatc

SEQ ID NO: 905812 - DNA, 547 bp, Homo sapiens
gttccaaagcccccgggtgctggccagccacttggaggcatgcccttgygtctgttcgtcctgtccttgtggttactggccaaaagagacccagacctatgttccaaacatggccagcctatttgagaagcagccccatggcctgacatgctcgctttccctgtgtcatcgctgatgttatgagaaagagaacattgtctttggacagcctcagcaatggctgtccaacttgacttgagtagagaagccaggttcttcccaggatctgggtgatgagactctttggaaatgcctgtggtcgaactacatttttgtagagattaacagttaaaacataattactcacaatagccctgtaatttccatgtgagatgagaaaaccgatgctcagcggtaatcaataaattgtccctgatcattcagcttgaaagtagtaaagtagggattaagacccagatcttatgattcctaatcttgtatttttcatattaccccaagagatgtttttaagatttttttcttaatgtgatagttgctgggattagac

SEQ ID NO: 905813 - DNA, 547 bp, Homo sapiens
gttccaaagcccccgggtgctggccagccacttggaggcatgcccttgtgtctgttcgtcctgtccttgtggttactggccaaaagagrcccagacctatgttccaaacatggccagcctatttgagaagcagccccatggcctgacatgctcgctttccctgtgtcatcgctgatgttatgagaaagagaacattgtctttggacagcctcagcaatggctgtccaacttgacttgagtagagaagccaggttcttcccaggatctgggtgatgagactctttggaaatgcctgtggtcgaactacatttttgtagagattaacagttaaaacataattactcacaatagccctgtaatttccatgtgagatgagaaaaccgatgctcagcggtaatcaataaattgtccctgatcattcagcttgaaagtagtaaagtagggattaagacccagatcttatgattcctaatcttgtatttttcatattaccccaagagatgtttttaagatttttttcttaatgtgatagttgctgggattagac

SEQ ID NO: 905814 - DNA, 547 bp, Homo sapiens
gttccaaagcccccgggtgctggccagccacttggaggcatgcccttgtgtctgttcgtcctgtccttgtggttactggccaaaagagacccagacctatgttccaaacatggccagcctattwgagaagcagccccatggcctgacatgctcgctttccctgtgtcatcgctgatgttatgagaaagagaacattgtctttggacagcctcagcaatggctgtccaacttgacttgagtagagaagccaggttcttcccaggatctgggtgatgagactctttggaaatgcctgtggtcgaactacatttttgtagagattaacagttaaaacataattactcacaatagccctgtaatttccatgtgagatgagaaaaccgatgctcagcggtaatcaataaattgtccctgatcattcagcttgaaagtagtaaagtagggattaagacccagatcttatgattcctaatcttgtatttttcatattaccccaagagatgtttttaagatttttttcttaatgtgatagttgctgggattagac

SEQ ID NO: 905815 - DNA, 581 bp, Homo sapiens
actctgttaccaggctggagtccagtggcccaaycttggctcactgcaacctccgcctcccgggttcaagtgattctcctgcctcagcctctcgaatagctgggactacaggcatgcgccaccacgcccagctaatttttttgtatttttagtagagacggggtttcaccatgttggccaggatggtctcgatctcttgaccttgtgatccgcccaccttggcctcccaaagtgctgtggttacaggtgtgggccaccgtgtcaggcccccaatacaaaaatttcaaaggtccttcacatttttgcttgtgtcatctcccatcactctgtgccacataccctccagctattctgaacttctattcttcccccaaaatagcatcctctttcaagtaactgtggcatcacctattatacgcttctttctgaagtgcctgtactccattcttcatcaggaaagcttctacttttcttttttgatccagatcaaatgacacctcctcttggaagccttcttaggctgatccatgcttatcccatatcagggttagttatgctgtcccagtggccccatggtcccc

SEQ ID NO: 905816 - DNA, 581 bp, Homo sapiens
actctgttaccaggctggagtccagtggcccaaccttggctcactgcaacctccgcctcccgggttcaagtgattctcctgcctcagcctctcgaatagctgggactacaggcatgcgycaccacgcccagctaatttttttgtatttttagtagagacggggtttcaccatgttggccaggatggtctcgatctcttgaccttgtgatccgcccaccttggcctcccaaagtgctgtggttacaggtgtgggccaccgtgtcaggcccccaatacaaaaatttcaaaggtccttcacatttttgcttgtgtcatctcccatcactctgtgccacataccctccagctattctgaacttctattcttcccccaaaatagcatcctctttcaagtaactgtggcatcacctattatacgcttctttctgaagtgcctgtactccattcttcatcaggaaagcttctacttttcttttttgatccagatcaaatgacacctcctcttggaagccttcttaggctgatccatgcttatcccatatcagggttagttatgctgtcccagtggccccatggtcccc

SEQ ID NO: 905817 - DNA, 581 bp, Homo sapiens
actctgttaccaggctggagtccagtggcccaaccttggctcactgcaacctccgcctcccgggttcaagtgattctcctgcctcagcctctcgaatagctgggactacaggcatgcgccaccacgcccagctaatttttttgtatttttagtagagacggggtttcaccatgttggccaggatggtctcgatctcttgaccttgtgatccgcccaccttggcctcccaaagtgctgtggttacaggtgtgggccaccgtgtcaggcccccaatacaaaaatttcaaaggtccttcacatttttgcttgtgtcatctcccatcactctgtgccacataccctccagctattctgaacttctattcttcccccaaaatagcatcctctttcaagtaactgtggcatcacctattatacgcttctttctgaagtgcctgtactccattcttcatcaggaaagcttctrcttttcttttttgatccagatcaaatgacacctcctcttggaagccttcttaggctgatccatgcttatcccatatcagggttagttatgctgtcccagtggccccatggtcccc

SEQ ID NO: 905818 - DNA, 573 bp, Homo sapiens
atcactgggctagtatcctaggtaatgttactcttctgttgccttggccctgcatacattatgtattgtgacacatcactggggccagcamctacgtgaagtgaccctcccgcatgggcttagcccacaagggtatgatgacatatcttttcatttttcactcaggtgatgtgactctccatttatgcctgggccttgacaaaatagggattgtgacatatctctggacccagcacctaggtaatgtgacttacctctattgccagggcatggcatattgtgagtattgtgatatatctctgggcccaacacctaggggatgagaggcttctgcctgtgccttgcccacaggaggcttgatggcatgtctctgtcttcattacctagaaaggtgtgactctcctcttttatctgcattcttcccacagagaagattgtgacatatcactgggcccagcaattagaaggtgtttctctcccacctgagcctttctctcaggaaaattctgacatatccttggactcagcacccaggtgatgggtctttgccacctatggcctgcctacatagac

SEQ ID NO: 905819 - DNA, 625 bp, Homo sapiens
tgatccatcatctaggtgatatgagtctctctctctctctctctttttttttttttgcctggtccccacatgttttgggtattgtgacatatcgctgggcccaatacctaraaatggaacgctcctggctggggcctgtccacagtggacctggtgacatatttctgcatttatcacctaagcaatgtggctctcttcttctgcctgcaccctgcctacagggaagattgtgacatgttgctggcctcagcaaacagatgataagtctctcctaattgagtcttgcccacagaaagcattttgacacatcgctgggcccattaccaaggtgatgtggttctgcagtctacatcctgcatccagctttcaggaggggattgtgattgtaacatattcctggctaagtacccaggtgatattattcctctgcctggtcccttctgtcagggaagattgtgacatattcctggaccagaacataggcgatgtgactctcctgtttgctccctacccacaggtagggacatatatcttggtccagctaacagttgcaatgatgactctaataccacacaccagccaacagaaaatatactatctgttttagctgaggttagagacacgg

SEQ ID NO: 905820 - DNA, 705 bp, Homo sapiens
tgccccttccctcagctatggagcagaggcaaagcagcccaggcagacatcacggaccagttccttcacagtctgggacggtttgaacaccagaagaaagtctggcattgtccctccagaaccctagggtgctaactacattttaaaatcattaatttctcaagtccaccctgcattaccatatcagatcatcttaatcagtcagggcactgcctgctacgctcgatgcacagtaaatatttgtcgttggaattaattaactgtgcaaaggaggccccaggccagggatcattacaccacaagcctttcagtttcccacagggaaaaagtctattctcaaaacacggtcttgaccccgcccccaaccaagtatctgaaaaagtcatctatgagttgctacaagatgggccatctagaaagcagatggctcagggcaaatgcgtgggtttgaaatagcatcttctgaaggtgagcacatttccagtagcccgttgtacagatgtggccactgacaaactgaggtgttcaaagatttccctagagtaaaaaagagcaatcagatgagccacaaaatctctgtcagtggtgtaggagtccatttgcactactataaaygtatatttgaggttgggtaagaaaagaggtttaattggctcaccgttctgcaggctgtataggaagcatggtgccagtatctgcctctgg

SEQ ID NO: 905821 - DNA, 695 bp, Homo sapiens
gagagacaggaagcagcgtggggaggatgggctcatgtgacactttaaactgcttgctttgttcacaagtaaarttggttttcacagagcagagaatggttcctggactaatgctaaaatccttggatgctcacatcccttaaataaaatggtgtagtattttcacataacctatggatatccttccatattctttaaatgatctctagattagattatttataatatctaatccaatgtatatgctatgtaaatagtggttatattgtattgtattttatttctattattttttattgctaattatttattgctttttaaaaaatattttaagtctgcagttggctgaatccaccaaagtggaacctgtggatacaaagaaccaactgtgtaagatccccaagatgttataatcgttttgaaaaagtgtcaactgtgagcatcacagtagccttcactggagcaaacgataaatttttttctctgtgcttgccaactgacttgtcaatcagaacaaataggatgtgtttgggcctccccatctgccttacatggatagtttggggattcttgtcacaggacaaaacatgccgttaaataaagaccacccttcctggaagctgctaaggcctggcaggattagctccagcttttctctccatggcacatgctcactgtgctgtgtgccccacccc

SEQ ID NO: 905822 - DNA, 651 bp, Homo sapiens
tgaagtgtaaattcttgggctctgctctagatctatggaatcagaaactctgggagtggggtcagcactgtgggttgtaactaaccctccagkggcatctgcggtgcttaaagttgatatccatcacgttctactataataccatgtgttagggcagggcttctcaaactttaatatgcatgcaaatcacccgaaggacttgttgaaatacagctctgattcagtatgtctggggcagggcctgaaaatctgcatttctaaccagctctcagttctgctggtagtgctggtttgtggactacacctggagaagtaaggccctagactgactgtaagcacctggaagccaggttggcttttttccctgctgtactcctgtttagaagactagctgacccatattttatgttggatgaatacaccacgagtcaggatgtctgcatatctgatgtatggactgcagaattggtgtgaatatattaatattgctaacttgaaatgcatctgcccaatctgactgtcaaaattactaatcacaatatgatcaatcattgatactcatgaactaccattgcccattgatgtgacagacttttcatcgttctaatcttttgagtgaatatggcactttggatttgccaaagagaagtg

SEQ ID NO: 905823 - DNA, 582 bp, Homo sapiens
cagaaggagtgttaaatccatgcatttcaatcacgtggatatttctggaagcttttttactactaccaatcataacagaaaatgactacaggtgcttacaccacccgctttgaacagtcatcttccattagaattagactggcacaaagagctgccagtcagtttcacagcatccctaattatcatactccctctaaagctggggtgcacatgctcagtgcagttactttggtagaacaaactgtggtgttctgaagcaggtagaaaaatgccagaagttggcaatggctgacgaaatgttgatgactcattccctctgcaggatgagtttgaaaaggatggctagtgttaccggtaaaaagtaggtttcataattatgtttttttagtcaaatgacagtatattagtggatcttctttggcattgccagattagcctaaatataaattttcttcttgtatatctgtatcctccccactagggatggggtttggggaacagtgcagtgcacgaaaattgtgatggaggaayttgcttttcaactgtcttaaagacaggatggaatttgggctgccacgaatg

SEQ ID NO: 905824 - DNA, 554 bp, Homo sapiens
agagagacagtcctagaattgagaatcctcctttgcctacattcaaaatgagactatattatgtgggtaggaaatttctggtgacctacttttaatttttaaatttaaaaaaatattagcatagttttatatttagaaaacagttgcaaaggtggtatagagagtttctgtgtaccacacaggcacccagtttcccttgttgctaacatcttacatgattatggtatatttgtcataactaacaaatcagtattgatatattataactaaactgcatacttttaggggtagtgacccagttttaaagcttatttcccacaatttgttaaaaatgacaatcagtattgagtgcccatgggtggtggcttcctgattcttcaaagaaactgagtaattttgtaaccattgggacttatcaggaaataaggaactcataataatgtgcgcttaaatttccagtggaggaattgtacagcttaacatacggttttgtaagttgggtattaayacataaagaggctgggtggggtttgatcactattaaaactgatttg

SEQ ID NO: 905825 - DNA, 543 bp, Homo sapiens
agaaaataaaatacaatcaataatattacaagataagcatccctaattcaaaaacccaaagtccaaattgctccaaacccaaaacatcctcagtgtcracatgccgctgcaagtagaaaattctacccctgacctgatgggaagggttgaagtcaaattgcagtcaaagctttgaaaatggcaaacaggagggccaggcatggtggctcatgcctgtaattccagcattttgggaggccgaggcgggcagatcatgagttcaagagattgagaccatcctggccaacacggtgaaaccccatctctactaaaaatagaaaaattagctgggcatggtggtgcgtgcctgtagtcacagctactcgggaggctgaggcaggagaatcgcttgaacccaggaggttcaagttgcagtgagccaagatcgtgccactgcactccagcctggcgacagagcaagactctgtctcaaaagaaaaaaaaaaaaaaagaaaatggcaaacagtaaacgaaaaggtgctcaacatcactgatgagagaaat

SEQ ID NO: 905826 - DNA, 649 bp, Homo sapiens
atatttggacctctttgaggccttcgttggaaaggggaaattctttacaaataaactagacagaagaattctcagaaattactttgtgatgtgttcattcaactcacagatttgagccttccttttgatagagcagttttgaaaccctctttttatagaatttccaagtgaatatttggagcgcctggaggcctgcggcataaaaagaaatatcatcatagaaaaactagaaagaatcattctcagaaactactttgtgatgtgtgagtttaactcacagagtttaacatttgttttgatagaccagttttgaaacgctctttttgtagaatttgctggtgtgtttttagaggactttgaggcctaaggtagaaaaggaaatttcttcacagaaaaactagacggaatcattctcagaaactactttgtaatgtgtgctttcagctcacagagtttaacttttcttttgataaaacagctttgaaacactgtgtttgtattctctgcaagtggatatttggagmgctttgaggccttctttggaaacgggaatatcttcacataaaaattagacagaagtattctcagaaacttctttgggatgtctgcattcaactcacagagttgaaccttcctttttatagagctg

SEQ ID NO: 905827 - DNA, 627 bp, Homo sapiens
gtgatttgtgcattaacctcacagagttgaacgtttctttcaatagagcagttttgaaacactctttttgtacaatatccaagtggatatttagagcgctttgaggycaatggtggaaaaggaaatatcttcatagaaaaactagacagaagcattctcagaagataatttgtgatgtgtgcattcaactgacaaagttcaacctttattttgatagagcaattttgaaacactctttttgtagaacttccagtggatatttagagtgatttgaggtctatggtagcaaaggaaatatcttcacataaaaactacacagaagaattctgagaaactactttgtgatgtttgcattcaactcacagagttgaacattccttttgatagagcagttttgtaacactctttttgtagaatctgcaagtggatatttggacctcttcgagaccttcgttggaaacaggaatttcttcatgtaaaaactagacagaagaattctcaaaaacttctttgtgatgtgtgcatttaactcacggagttgaacttcccttttgatagagcagttttgaaacacacttttggtagaatttccaagtgaatatttagagcgctatgaggcctatggta

SEQ ID NO: 905828 - DNA, 606 bp, Homo sapiens
tttcaattctgtgagttgaatgcacatatcacaaagaattttctgagaaagtttctgtatactttttatgtgaagrtatttccttttccaccatagtgctcatagcgctcaaaatattcacttgcagattatacaaaaagattgtttcaaaactgctccatcaaaagaaaggttcaacactgagatttgaattcacacatcacaaagaagttactgagaatgcttttgtctggtttttatgtgaagatatttccttttccaccacaggcctcaaaacgttccaaatatccacttgcattctttacaaaaagagagtttcaaaactcctctatcaaaagtatggttcaactctgtgagttgaatgcacacatcacaaagaagtttctgacaatgattctgtctagattttatgtgaagatatttccttttccacagtaggcctcaaatcgctgtaaatatccatttgcagattctaaaaaaaaagagtgtttctaaactgctctatcaaaagaaagattcaaaactgtgagtgggatgcacacatcccaaagaagtttctgagaatgcttttatctagtttttatgtgaagatatttccttttccac

SEQ ID NO: 905829 - DNA, 606 bp, Homo sapiens
tttcaattctgtgagttgaatgcacatatcacaaagaattttctgagaaagtttctgtatactttttatgtgaaggtatttccttttccaccrtagtgctcatagcgctcaaaatattcacttgcagattatacaaaaagattgtttcaaaactgctccatcaaaagaaaggttcaacactgagatttgaattcacacatcacaaagaagttactgagaatgcttttgtctggtttttatgtgaagatatttccttttccaccacaggcctcaaaacgttccaaatatccacttgcattctttacaaaaagagagtttcaaaactcctctatcaaaagtatggttcaactctgtgagttgaatgcacacatcacaaagaagtttctgacaatgattctgtctagattttatgtgaagatatttccttttccacagtaggcctcaaatcgctgtaaatatccatttgcagattctaaaaaaaaagagtgtttctaaactgctctatcaaaagaaagattcaaaactgtgagtgggatgcacacatcccaaagaagtttctgagaatgcttttatctagtttttatgtgaagatatttccttttccac

SEQ ID NO: 905830 - DNA, 606 bp, Homo sapiens
tttcaattctgtgagttgaatgcacatatcacaaagaattttctgagaaagtttctgtatactttttatgtgaaggtatttccttttccaccatagtgctcatagcrctcaaaatattcacttgcagattatacaaaaagattgtttcaaaactgctccatcaaaagaaaggttcaacactgagatttgaattcacacatcacaaagaagttactgagaatgcttttgtctggtttttatgtgaagatatttccttttccaccacaggcctcaaaacgttccaaatatccacttgcattctttacaaaaagagagtttcaaaactcctctatcaaaagtatggttcaactctgtgagttgaatgcacacatcacaaagaagtttctgacaatgattctgtctagattttatgtgaagatatttccttttccacagtaggcctcaaatcgctgtaaatatccatttgcagattctaaaaaaaaagagtgtttctaaactgctctatcaaaagaaagattcaaaactgtgagtgggatgcacacatcccaaagaagtttctgagaatgcttttatctagtttttatgtgaagatatttccttttccac

SEQ ID NO: 905831 - DNA, 679 bp, Homo sapiens
aggactcaaagcacaccaaatattcatttgcaaattctacaaaaagagtgtttcgaaactgctcaatcaaaagaaagtttcaacactgtgagatgaatgcacacatcacaaagtagtttctcagaatgcttctgtctaatttttatgtgaagatatttccttttcagctataggaaacaaagcgctccaaatatccaactggaaattctacaaaaagagtgtttccaaactgctcaatcaaaagaaacgttcaactctgtgagttgaaggcacaaaacacaaaaaagtttctgaaatgcttctgtctagtttttatgtgaaggtatttccttttccaacataggcctcaaagcgccccaaatatccttttgcagattctacaaaaagagtgtttcaaaactgctcaatcaaaagaaaggttcaactctgtgagatgaatgcatacatcacaaagaagtttctcagaatgcttctatctactttttatgtgaagatattaccatttcaggtataggcctcaaagtgctccaaatatccatctgcagatattacaaaaagagtgtttccaaactgctcaatcaaaagaaaygttcgactctgtgagttgaatgcacacacctcaaagaagttgctgagaatgaagcatgtctagtttttatgtgaggatgtttccttttac

SEQ ID NO: 905832 - DNA, 560 bp, Homo sapiens
accctacagtggcctcttaagtgttcaagtgaaaggaaaaattgcatgtctttcactttaagtcaaaagctagaaatgattaagcttactgaggaatgcaygtcaaaagctaagataggctgaaggctaggcctcttgcctcaaacaattagccaagttgtgaatgcaaagaaaaaattcttgaaattaaaagtgctattccagtgaacacacaaatgataagaagtaaaacattcttattgtggatatgaagaaagtttgaaaggtttcgataaaacataaaagcagccacaatatttccttaaaccaaacctaatccagagcaggaccctaactctcttcagttctgtgaaggccgagagaagtgaggaagctgccaaagaaaagtttgaagcttgcagagattggttcgtgaggtttaagaaaagaagccatctctgtaacatataagtgcaagatgaagcagcagatgttgatggagaagctgcagcaagttattcagaagatgtagctaagatcattgaggaaggtggttgtaccgaacattttcaatgtagatg

SEQ ID NO: 905833 - DNA, 648 bp, Homo sapiens
acagctgctagtccagcttcatcatcttacagatgagaacactggaactcagagaggccgcaagagtggactacatgccctcctgagaagattccacagccaacactgatatgaccccaaaaccgtccgttttaaaatactatgaagaaaatcttccttacattttaacccaaattctttaaactatagtttgcactggtttcttcttgttctgttcccagtaatgataaagtacagctgcccaatgaccctttgaacatctcttattacataatttattaccttaatgtatttatactcagcctcatttcacagacaatttgacataacttacataatacaacaaaaaattaagaccagcaagaatagaacacaaatagggaaaagaacacaaatatgctggccagaaattattgctatgattgagcttcaaatttaattccaaacttcttgaaaggtatttttattattactattagtactattgctgttgttgatggtaatgtgatacaattcttgcctattacgaggggtatttcaatctttggatcctgagtgtcataagccagttttaattttagtcacataacagtgaagaygtttcccaaggagaacatcagtggttctattgaatagaattcattcaga

SEQ ID NO: 905834 - DNA, 606 bp, Homo sapiens
tcaaaactattagaaatgtgtatttcaaatgggtatcttttattgtctataaaytattcttcaacaaagttggtttcttaaaaagtcaggctacagtaatgagagggcagcagaggagagaaagtctgcaaaggcatttttagcctttaacctggaaggttctccggttcagatcacaaggttgaataccttgtttggtgatcagagttccagggaaaataggagctgccatgtacatctattcccaagttacacaacaatatgaaaattactccacaacactgtagttatactgctacacacatgttctgtcaccctaaatcgtgttccttggtatagggaatgttgttgcctaacaagttttgtgtgcctcagctcttcccctaaaatgtaagctcctagaggagggttttgggttttatttgttgtttgttttttacttgttttacttgctctttggtgcctactgttactagtgcccattgaattcattcgttatcaactcagttatcttttgattgaacatggtgtacgctacagtctgatgccctggactcagaattgggtgctgatgacatcaagaatgaggggcctcaagaaggccac

SEQ ID NO: 905835 - DNA, 643 bp, Homo sapiens
tagcctaaaatgtgtttgttttcagatatatatatataaatatagttgcatgtgtgtgtgtgtgttccatgccatacattaattctggaagagacataaataacatacaactctgaatgtctctggggaggtgggggacagactcagaagaataatttactgtaagaccttttttttttatttttatgctatacaagtttgcataaattagtttaaaattagtttaaacttttaaagttaagaatgaattttctcccccatgttttcctcatggaagggtctcctggtcataagaaaaaaaaaatagtcatttggttcttgattccccagtctttctgtcatccattttcctaaacacttaacatgtgatggcttgtctgggacagtctcagctggccttccttgtgcctagctgatctgtgcccattttccttcaagtgtcctggggtgaatgatacattgcacaacactcttgagagaatacaggttactctttgtgcattttaaggggatatggacttgattgggtgagtacaactagaagtagaagaaggtacaggagtctcctgacatcttcattttgrtgaagctgaaagaagctggattggcttcctggcccacatctgtcttttaacaaaccagt

SEQ ID NO: 905836 - DNA, 660 bp, Homo sapiens
gcaaataatccttgaaactttttgcacaaaaattgtagtctcctggtttcagctttgacatttaaagagactgaaaggtgacaccacatcctcataacatcaatcaataagtgaacaaacaaacaaacaaatgtgaataagaagataatcaacaacgcttcttgggcccgttggggaaatgatgttgtagagcaaatcatccttccacaatctggggagagggatgaatgaagagaatcatagctgagattgctgacctggagctgctagagttgaatgataatgaaggattactggagccgaacatggaatagtgtggtggagaacaaaactggagtccaaagtctgagggaggtcctcacactgtgggttcaaccaccaggcattccatcagattttcacagtaaagctctaagaaagacatctactggctcttgccaggggaatagtaatcactgtgaaatgtgcccagagttttttctataacaaaggactactcttcaggggaaaggactttacaagaagtcctttatctcatctgcaggaactccagccctactccttcccaattagccttaaggtctggcctagaggtaaatggaatacaccactgcaggaccttttatgaaggttcratcactcaaaggcttggatggcatc

SEQ ID NO: 905837 - DNA, 582 bp, Homo sapiens
tggcttgtagaatttctgccaagagatcagctgttagtctaatgggcttccctttgtgggtaaccgacctttgtctctggctgcccttaacattttttccttcatttcractttggtgaatctgacaattatgtatcttggagttgctcttctcaaggagtatctttgtggctttctctgtatttcctgaatttcaatgttggcctgccttgctaagttggggaagttctcctagataatacccttgaagagtgttttgcaacttggtttcattctccccgtcactttcagttacgccaatcagacgtagatttggtcttttcacatagttccatatttcttggaggctttgttcgtttctttttactcttttttctccaaatttctcttctcgcttcatttcattcatttgatcttcaatcactaataccctttcttccacttgattgaattggctactgaagcttgtgcatgtgtcacgtagttcttgtgccatggttttcagctccatcaggtcatttaaggtcttctctatgccgtttattctagttagccattcatctaatcttttttcaaggtttt

SEQ ID NO: 905838 - DNA, 629 bp, Homo sapiens
attgtaaatgaaatttcataaagtgaaaaaagaaggacacataaatgatgtctgaagaattaattgccaaaagctctccaaacytgacaaaagacatcaagacacaaatttgagaagtccaatgtacccaaatgatgttaaattaaaaaaaagaatcgcaactaaccagaatattgcaaaattgctgaaaaccaaagacagtaactctgtacctggaagtggggcaaaggcagacagattactgtcaaaagatcaacaataaagcagacagctgacccttcacaagaaacaactaaattacatctttaaagtgctgacagagaataactgtgatgtagactacatatccaacaaaaacttttttccatagagaatgtaaaataaagacattttgatgcaaagaaaaagaaaaaaaattgtcaacaacagacccacactaatggaaatacagaatgatattattcacaaagaaggaaaattattccagatggaaactttgagataacaaatagaataaaaggtaataaaaattataaatatatgggtaaatataaataatgctgactgaataaaagagcagcaacaacaataataccatattgtcgactgtaaaaatataaaaattatgc

SEQ ID NO: 905839 - DNA, 634 bp, Homo sapiens
tgtttgcaatcctatgtaatttggtaatgtctgtaaatctgaataaagtaaattaactttatcttaggtcattatagacttaaataaaccatytcattatagaccctggtggagcaggacttttccatttgatgtggggagaacctccctgactttcctttgtctttcccagctggaaggggtgatgccatgagcacagatgacctgcctagtgtcatcatgctcatggatggttgaatggagaatagaagatatctccctcagacccattgcctgttgccagaggaaccatgctttcagataatagtatctcccctgggacatcacaccttgactgagccttcagagaccccaccagaggaggttaccaaggaaaagactgacttgactgcatagtcactggcagcaggccttggggttcctgcataatcccattcctagcattcttatcacagtgatatcattcctcatttgacttttaaactcccctgtgggatataaaacacttttttcccagattctgtgtgactccctggcttacctttttcaggccctgctcagatatcaccttatcagaggccttccctcaccaccctatttaaagagtgaccccacccccaacatacacacatat

SEQ ID NO: 905840 - DNA, 619 bp, Homo sapiens
tcaaagaacagagtgccaaggctatgacacagcatgaaagcaggggttcagggaggaggatgggctatgaaagcatagtgattggctgtaatcttcatgagacaagaatgtactacagcaaaagggytatgaataatgcaaagactactcctgggagaaggagccttctgaaggtgatttacagttctgatggttgagacagttcatttcagatattgcaagagacatctggctctatttacagagctatctgttctcttccattaatcgaaatcccatccaaactggagcctttaaagactactgggaaatgtggtcatatgagcagaaaaatggagagtggtcacatgaaagatgcagtttctatcaaaggttcaaatgaaataaaataaaaagtcctttaggaatcataggcctgctcattaagaaacaaacaaacaaaaaaaactgtaaaaagatccgattttattccaatgaataatatcattctacaacattcaaataaatgtatgtctttctagtgagactagaagccacacgaagacaaataaaatcaacacatacattaactatgcatgaccgagcaaggccgatttggtgtagggaatgctacagaaaa

SEQ ID NO: 905841 - DNA, 619 bp, Homo sapiens
tcaaagaacagagtgccaaggctatgacacagcatgaaagcaggggttcagggaggaggatgggctatgaaagcatagtgattggctgtaatcttcatgagacaagaatgtactacagcaaaagggctatgaataatgcaaagactactcctgggagaaggagccttctgaaggtgatttacagttctgatggttgagacagttcatttcagatattgcaagagacatctggctctatttacagagctatctgttctcttccattaatcgaaatcccatccaaactggagcctttaaagactactgggaaatgtggtcatatgagcagaaaaatggagagtggtcacatgaaagatgcagtttctatcaaaggttcaaatgaaataaaataaaaagtcctttaggaatcataggcctgctcattaagaaacaaacaaacaaaaaaaactgtaaaaagatccgattttattccaatgaataatatcattctacaacattcaaataaatgtatgtctttctagtgagactagaagccacaygaagacaaataaaatcaacacatacattaactatgcatgaccgagcaaggccgatttggtgtagggaatgctacagaaaa

SEQ ID NO: 905842 - DNA, 674 bp, Homo sapiens
tgtacccccattgtatctaggaaataactagcttgcttttgatattcaggctcataggcagaagggacttgccttgtctcagatgaaactttggactgtggacttttgggttaatgttgaaatgagttaaacctttgggggactgttgagaaggcatgattgattttcaaatgtaaggacatgagatttggaggggttgggatggaatgatatggtttggctgtgtccccacccaagtctcaacttgaattttttctctcagaattcccacgtgttgcaagagggacccagggggaggtaattgaatcatgggggccagtttttcccatgctattctcatgacagtaaataagtctcaggagatcgtatcagttaatcaggtgtttccacgttttcttcttcctcacttttctcttgccgcggccatgtaagaattgccttttgcctcctgccatgattctgaggcctccccagccatgtggaactataagtccaattaaacctctttttgttctcagttttggttatgtcttttttagcagcatgaaaaaaaactaatacaacctgtttctagattaaagtatattttgatggtaacttaacatttagcccagagttgatactgaygtcaatataaaatctgaagtagacatagaattatggtatactttggg

SEQ ID NO: 905843 - DNA, 377 bp, Homo sapiens
gtagccaggatggcagcctcagcaatctggctccagagtccccaggcacttaacagttcaaggcataattggtaaggatcttagttaaggagccaactgagtagttgatgcgagtagaggaagggagggagacaggcagaaatcattttgcagggagggaataaggaaagcttgtgggaatgacaaagccttcacagaaaggtgcatttaaactaggcttggagattgaaaacatttttgatatatggagastagaatgtgaatgatggggcaaaaccccacccaaaatggttaaggcaaaatggaaatattttggcttatgtgcctgaacaatctagtgggagtagctctggctttgagctgagcttgatcagggc

SEQ ID NO: 905844 - DNA, 618 bp, Homo sapiens
ttttattacctcttctatttctctagccacaaagaatcagaaaaaggaggattctggagtggttctcaytctcgtagacaggaattaaaaataaagtctggcaaataacatttatcaagcaatgtcttctcatacatccccatctcaaagtttaatatgctctgatgtgtgtactcaaggtcttaatagaatcagagatggttaaataaaaatccagagaagaccaatatgtgtgtgtgtttgcacttgctttgattccttttgtggttggttcttccgtgtgtgtgtgtgtgtgtgtgtgtgtgtgtgtgtgtgtgtgctttgattccctttgagcttgagtcttctgaggatctgcaatgcaggctagagtgaaactgctggcaggcatttgatttttctcaactagtgacaagaaaaagacaagaggaggacacagccaaagggggcctgatggctaaatgtgtggtgagtggctccaagttttatgagtcaaatactgtatttctgaatgaaatcaatttctaggttgcacaaatgttcatggcctatttacaaagaaaatagaaacctcaactgtgattctaaagctatcacttaacttggtgcccacatcca

SEQ ID NO: 905845 - DNA, 639 bp, Homo sapiens
atactgatgattctttaattttaactacaactgctatgcaacccaagcttatgcaggtggttarcaaaggggttgagagaaatggcaatacgaaggcagcttgtgtccttttggaatcactgagaagtttaccttacagaatatcttacagaatgccaacagcattcagttgcagtggagtcaaaatggcagcatgatgtatttaggcagagggagggtctgggtcagaagccccaaattttcagcagctcctgtttgacattgaagagatgcagaggtttactagcatccgctacgagggtgagaggaaagaatgttacttggggtagaaaagaagtatcaagtgactttttttgcacgtaagagatgcagcgtgtaaattgttaactccaatctacagagaatatttggtaataataattttgaaaatagtaacaaaatagacaaacttctaggtagtctgatcaaaatcaaaatggaaaaaacagcaatataaggaattgtaaatacaatagttttataaaaataatttaaaattatagttaattttatgccaataaatttgaaaatttcagtgaaatggtcagttttctagaaaaaaaagttaccaaataactcttcaaaagtatcagaaatatt

SEQ ID NO: 905846 - DNA, 613 bp, Homo sapiens
ggcaaaccaaatccagcagcacataaaaaagcttatccaccacgatcaagtcagcttcatccctgggatgcaaggctgattcaacatatgcaaatcaataaatgtaatccatcacataaacagaaccaatgacraaaaccacatgattatctcaatagctgcagaaaagccctttgataaaattcaacaccccttcatgctaaaaactctcaataaactaagtattaatggaaagtatctcaaaataataagagctatttttgacaaacccacagccaatatcatactgaatgggcaaaagctggaagcattccatttgaaaacaggcacaagacaaggatgccctctctcatcactcctattcaacacagtattggaaattctggctggggcaatcagtcaagagaaagcaataaagggtattcaaataggaagaaaggaagtcaaattgtctctgtttgcagatgacatgattgtatatttagaaaactccatcatctcagcccaaaatctccttaaactgataagcaactttagcaaagtctcaggatacaaaatcaatgtgcaaaaattacaaacattcagatacaccaataatagacaaacagagagc

SEQ ID NO: 905847 - DNA, 593 bp, Homo sapiens
catgacttcccaacagtcccccagagtcttaactcatttcagcattaactcaaaagtccacagtccaaagtctcatctgagacaaggcaagtctcttccacctatgagcctgtaaaatcaaaagcaagttagttacttcctagatataatgggatacagacattgggtaaatacagccattccatatgggagaaattggccaaaacaaaggggctacagaccccatgcaagtcctaaatccagggtggggggcagtcaaatcttaaagctccaaaatgatctcctttggctccatgtctcacatccaggtcacgctgatgcaagaggtggactcccacggtcttgggcagctccacccctgtggctttgcagggtaaagccccactcctggctgctttcataggctagcattgagtgtggcttttccaggctcacagtgcaagctatcagtggatctaccattctggggtctgcaggatggtgaccattttctcatagctccactaggcagtgtmccagtggggactctgtgtggtggcttcaaccccacatttccctctgtactgccctagcagaggttctccataagggct

SEQ ID NO: 905848 - DNA, 639 bp, Homo sapiens
ctcccctttataaaactatcagatttcatgagacttattcactatgaccagaacagcctggaaaagacgaggtccatgattcaattacctcccaccagctccctcccacaacatgtggaaattakgggagctacaattcaagatgagatttgtgtggggacacacagccaaaccatattattccactcctggcccctcccacaactcatgtcatcacatttcaaaaccaatcatgtcttcccagcagtcctccaaaggcttaactcatttcagcattaactcaaaagttcacagtccaaagtcttatctgagacaaagcaagtcccttctgcttatgagcctggaaaatcaaaagcaaattagttacttcctagacacaatgggggtctaggaattaagtaaatatagccattccaaatgggaaaaattggccgaaacaaaggggctacaggtcccatgcaagtctgaaatccagcagggcagtcaaatcttaaagttccaaaatgatctcccttgactccatgtctcacgtccaggtcatgctgatacaagcccatgggcttgggctggtccacccctgtggctttgcagggtacaagacccctcccagttgctttcagggctggcattgagtgtctg

SEQ ID NO: 905849 - DNA, 626 bp, Homo sapiens
taatcacaaaaagataatctcctaggcacatagtcatcaggttatctaatgtcaagatgaaggaaaggatcttaagaaatgtgtggaaaaacaaacaaacaaaaacaccaggtaatctataaaggaaaacgtatcagattaacagatttctcaggagaaatcctacaagctagaagaaattgaggtcctatcattaacctgcttgaacaaaacacttctcagtcaagaattttttatccagcaaaactaagtttcataaatgaagggaaaatacagtctttttcagacaaacaaatgctgagagaatttaccactaccaagccagcactacaagaactgctaaaaggagatctaaatattgaaacaaattctcaaaatacaacaaaatagaatctccttaaagcataaatttcaaatgacctataaaacaacaacacaatgaaataaaccaaggtattcaggcaaaagatagtataatgaatataatagtaccttacatctcaatactaacattgaatgtaaatggccgaaatgctgcacttaaaagatacagaatggcagagtgmataaaaactcaccaaccaagtatctgctgtcttcaagagactcacctgacacaggactaa

SEQ ID NO: 905850 - DNA, 489 bp, Homo sapiens
gtttgtcagtccatctgataatcaacccattggttaactgtgccaaatgccatatcagttctggggtcatgagccatgcctcttaaaagtttatgtcttgggaaaagttacttctctcascactgattttatctataaggtaaaaattttaatacttgcctcatagaattattatgaagatcaattgcatagtgtaagttaaaagttcaatcatatatgccaagtacttaacaaatggtggctatttttattactgttgcttattttacttctttattaactagcatatcactagaccatcattatggagatgttgactttatttcccctgaaagcaattggccctgtggttggggaataagtgctgggattgccttggtaggtgacatatgaccttaaaaagcctgcgactttttgtcaggctatagtgtggtaatgaattttcccagaagtctatggtatctgcttgtcattttgcaagtgtgtgtg

SEQ ID NO: 905851 - DNA, 592 bp, Homo sapiens
gtgtgcaaagaaacacatctttagcaatggtcataaagcaacwcttttcaagtgttaaaatctaaatccgaatttgctttttaattattctgctgcatttacttacattacacagcccagggcccaaatgtctgattcacagccatgtccttgtttgttgaggacttcaggagagagataatttggggtaccacatatcgttctggaaagacaaaatattgagatcgtgttaggaactattccactacttaaacttggttctcttgacatgacttgatgggagacaaaatcttaaacaaaatcttaaaatctatactgaatttctatttggaaacatttgacttttggcatctgaaaattcaattgagatctgaccaaatgagttttggtaatttttaaaaatgcacacacgttgttttagcccacatgcaaagtgttgttaaccaactaaagccagggacgtcgtggcattttatacattttaagccaagaaaagacttcattgactgctttcataatcaatttagaggcacagggtgctctgtctagtccatagtgggcatttaataagtatttctttaaattaacattg

SEQ ID NO: 905852 - DNA, 611 bp, Homo sapiens
aaccaaaccatctgatttcacccctggcccctcccaaatctcatgtcctcacatttcaaaaccaatcgtgccttcctaacagtcccccaaagtcttaattcatttcaccatyaactcaaaagtccacagtccaaagtctcatctgagacaaggcaagtcccttctgcctatgagcctatgagcaagttagttacttcctagatacaatgtgggtacaggcattggttaaacacagccatttcaaaaggaagaaattttccaaaacaaaaggactacaggccccatgcaagtccaaaatccaatatggctgtcattaaaccttaaagttccaaaatgatctcctttgactccatgtctcacatccaggtcacactgatgcaagaggtttactcccacagccttgggcagctccacccatggctttgcaggaaacagctcccccgccggctgctttcacatctggcattgagtgtcagtagcttttccaggcacatggtgcaaactgtcagtggatctgcattctggggtctggagaatggtggtcatcttctcacagctccagtaggcagtgccccagtagggactctgtgtgggaacttgcaccccacatt

SEQ ID NO: 905853 - DNA, 696 bp, Homo sapiens
tttggatggtgagcaatgtaaaggagtagggggattatttgatgctggtaatgttctatttctgggtcttggtgtggttacacagatatattcagtttatgaaaatgtatcaaattgtaaacttgtgatttatgcattctctgcatgttgatatacttccataaaaagtttttaaaatactattacctaataagcagggtaccaaaaaaatctgtcatgtaaaataaggggtcaagttattccaaaattaatgcaattaccacggtgagcctgctgcagagagtgggagtcaataattaaacatgctttatccaaactcaagttagcatgggaagtattatcgagtagtcacttgctttgaacacttcttgcaatacaataaatattcatgctgtgtctcctttaactccctggggaaaagttaggatttaagacgaagcttatttgaacattggaaggtgcacttttaggtgagtctttcccaagcactttatttcaatagaaaaaaaataaatcagcaatttaaaaaatatttaaaaaaatgtattggggtttggtttatctgaaaagggttgaaattattartagcattatatgaataggtactattaataaaaatactgttaactaacgagcaagttgaaaggctcccaaaaggtactttcttatctaaaggaatgtaaggcaggcaaagtt

SEQ ID NO: 905854 - DNA, 259 bp, Homo sapiens
aaagttcctgtcccaagtggtcaacagtcttctctttctaacctcacatttcccagaacagatatttgggaggaatgggaagtttctggcagagtcccagtctctctcttcatagccactgtaggctcccccaagcttttctccsttaggcctgcagcctcctgttcaccacactctgattgtttctttcagctcagggggcacatgtgtatcctgacaactcattctgttaggggtagaaggtattcaggttaccagt

SEQ ID NO: 905855 - DNA, 706 bp, Homo sapiens
taacttcttaactcaaagttaaatgttattaaaatgtcatatgtcatacagatgtaaatgtcatatataaaatggcatatacatataattccagttgttcatacatgtgtaaatatagagatatcttttccattacttttattttatagaagtaataggttctgattaaataacaattaaattacagaaacaaataagtctaaaagctaatgttcttttccatacatcttttttctgaccccaactctgattctaaagtccttctcatgatatttcagccaacagttgcgtatatatactgctagtattttcaaatattttaaattatattttatttatatatgtataaactacatagttttcttgtgtgatcttatgcaattgaaatgatatctcatatttttaaggaacttttttaaaatgtaaggtttcttggatgtcttttagtttagtctgtatgattttacttatttttgattagttatttaaaagtgttaacactaataactgcacatgatatagaaaataaataatctgtttaaaacctacataatatgtaacaaccttcttgaacaccattattaacattgttttgtgtatttccaatrtaagatgatatggcattttaacttgatttttgttttattcaacttgattttgttttcttagagtgaaattcttttcatcctttgtatggctacctaat

SEQ ID NO: 905856 - DNA, 573 bp, Homo sapiens
catcttgctgaacctcagaacaacccatgccctccctcactaccaggcccattcaggcacccgctggaaaaagccaggcgtcctgctgctgccaagacgtgctctaaccactggccaacatggcccccttagtagagtgcaaggctgcccgtagggtataaagtggtgtaatcttttctgggcagcagtttggcagcttgtatcaaggacttcaaaaatgttaataccctaggtcccataattctattttaagcaatttatcccaagagaattatcatatacacataaccatcatatataaggattatttctagaattaagcattacttatatttatatatcaagttttatttatgagctcagaagaagaggtactttaagtgtcctcaacaataggagattcttacataattgctgtattatttatatagagtgccatgcagataccaaaagtagtgattttaaagtgatttaaccctggatggaaaaatgtccgtgacatgatactgataaagcarcatcaaagaaaacagatgagatgttcagaacatcccagttttgcttttgttgcct

SEQ ID NO: 905857 - DNA, 253 bp, Homo sapiens
ctgggttcaagcaattctcctgtcacagcttcccaagcagctgggattacaggtgtgtgccactacgcctggctagtttttgtatttttagcagagayggggtttcaccatgttgactaggttggtctcgaactcctctacttgtatcttttaattttagcagcttgtttttttttttagagacaggttcttcctctgccacccaggctagagtgcagtggcacaatcatagcccactgcagcctcaaactcc

SEQ ID NO: 905858 - DNA, 683 bp, Homo sapiens
ccattcaatatgatatcggctatgggtttgtcatgaatagctsttattattttgagatacattccatcaatacctaattaattgagtgttcttagcatgaaggggtgttgaattttattgaaggccttttctgcatctattgagataatcatgtgttttttgtcattggttctgtttatgtgatggattatgtttattgatttgtctatgttgaaccagccttgcatcccagggatgaagccgacttgatcatggtggataagctttttaatgtgctgctggatttggtttgccagtagtttattgagggtttttgcatcgatgttcatcagggatattggcctgaaatattctttttttgtcgtgtctctgccaggtttttgtatcaggatgatgctggcctcataaaatgagttggggaggagtccctctttttctattgtttggaatgatttcagaaggaatggtagcagctcctctttgtacctctggtagaatttggccatgaatccacctggtcctgtgctttttttggttggtaggctattaattactgcctcaatttcagaacttgttattagtctattcagggattcaacttcttcctggtttagtcttgggaaggtgtatgtgtccaggaatttatccatttcttctagatttccagtttatttgtgtagaga

SEQ ID NO: 905859 - DNA, 655 bp, Homo sapiens
gcatttgattaaaatgaatgattactttcaccatcatctgcaacygagactaaaacaaataaacaaatagaaatttaaagcatgttaagaaaaaaaacaagcagagaatgtaaaattgaagtatgcagagacattttgactcaataaacttgcagtatctgcttcagtaaaaaatatcttattcacacaattgaaaacaataacaacaatgtatgttatgatgataaagacattctaggtattgttttattcctcttcaaatacagtttctcatcattatgtgaatatgattactgaatgttttttcatttttattattttaataattattattatttaaaatgaactttgggtttttttctaattcaagtttactttatattgatatatttataaagcaaatttaaggacagtctccagaaataactaaaactaggaaagttagcatcattaaaattttcatctcatctcattagaataatttgacttcaataggttttcaatgaagagttcaattatataaaggcctgtgacttttttgtttttaatcttttttaaaatctatctatcagcaaatataacattgtaattaattccaagaacattttaatttacagactcagattctatatcttgcatcccaatttaaaaatct

SEQ ID NO: 905860 - DNA, 604 bp, Homo sapiens
cctatattgtcagaggtgttcaaacaagagtgactccatcttgataggggctgagtaaaataaggctgagacctactgggctgcattcccaggatattaaggcattcttagtcacaggatgagataggaggtcggcaaaagatacaggtcataaagaccttgctgataaaacagcatgcagtaaagaaccagccaaatcccatcaaaactgagttggcgacaaaagtgacctctggtcatactcactgctcattatacactaattataatgcattagcatgctaaaagacagtcccaccagctccacgacagtttacaaatgccatggtagcatcaggaagttacactattttgtggaaaaacgggtggaacccgcagttctgggaactgcctaccccttttcctagaaaatttacgaataatctaccatttgtttagcatataatcaataaacaaccataaatacagtgaatcatcagccctcagggctgctctgcctatagagtagccattcttttatttccttactttcttaagaaacttgattgcactttatggattagccttgaattcwttcttgtgcgagatccaagaatcctctctt

SEQ ID NO: 905861 - DNA, 602 bp, Homo sapiens
cacgtagcataatgtccttgagttcatccatgttgtcatgaatggcattattcttattcctttttgaggctgaatattattccattgtgtgtgtgtgtgtttgtgtgtgtgtacgtgggtgtatgtgccacattttctttttccatttatttgttgacagacacttaggttgtttccatatcttggctattgtgaatagcgctgcagtgaacttgggaaggcagttatctctttgagatactgatttcatttcctttggatgtatatccagatgtgggatttctggattgtatggaagttctacttttaattttttgaggaacctcatactgttttccataatggctgtaccaatttacattcctcacaacagtgcacaaaggtccaggaagggagattattaagacaatgagctgagagcctaaaagtccaagttggaacggttgaagttacaatggtgagaccaaatgattcccaaacttgtctgaacattggcatcccctgggaactttcagaaatactgatgcctgtaatcaacccccagagattgtggcaaaattkgcctggaatgcagcccaagttttggaagcattaaaagatcc

SEQ ID NO: 905862 - DNA, 274 bp, Homo sapiens
ctaggaagggcctgcttcctggtttgcagatggtcaccttcttgttgtatccccawgtgatggagagtagagagcaagatcaaacccttgcatctcttcttataagggcactaatcccgttcatgaaggctccatgctcatgacctgattactccccaaagtaaagtgcattcacattcagggttaggatttcaacctacgaatattggtgggacacattcagggtattgtgctccccattggccaaaccctcaaaaaagccagagtgcaagga

SEQ ID NO: 905863 - DNA, 601 bp, Homo sapiens
caacttatttgtcaaatttaatgaccaaaaatacagtttccacactgaatcagctaagctgcctttgattgttagtaactgaatctctcaccagcagtggaytaatgataagcagatttcatttttcacaaaaggctatagtaagtggcttacttcttcctgactttctgccatcctcaggagattggcattcccatcctcaggctctttgtctcatggtcacaaggtggttgcctcagcttcacatcgtaaactcacatagcagaatccaaagaaagagggaaggaaagaaggctcttcttggacatttttctatttctcttttcaagaagcacccctcacctcaacccagcagtcttgaccttatatttcattggccagaattgcctaacatggacagacctggctgcaagaaaatgtggcaaattattgggtatttccagactttatcatgggaagaggaaaaagaggaaaagaaatggctattgagtaggcaacaaccacatctgccacacctgcttatagattatattctttccctggtttttcttctgcaaaactcttaattattatttaagaaaaattgtgtctgttactttct

SEQ ID NO: 905864 - DNA, 580 bp, Homo sapiens
cccccaaagtatgaaattaccccatttctaatattatgtctcatccttaacagacattcatwtcagtcatggaaagacaatggcctagaagggtatatgtgctatgattaaaagaggcttcttcaacaccactattttaatttttcttctgaagttttttaatactacaggagaaagcatcataaaaaatttcaaatggtggccgggtgcggtggctcactcctgtaatcccagcaccttgggaggccaaggtgagagggtcacttgaggtcaggagttcgagaccagcctggccagcatggtgaagccctgtctctactaaaaatacaaaaattagccaggcatggtggtacatgcctgtagtctcagctacttgggaggctgaggcaggagaatcgcttgaaacagggaggcggaggttgcaatgagccgagatcatgccaccacactccagcctgggcgacagagcaagactccttctcaaaaaaaaaaaaaaagaaaaaaaaaaagaaagaaaattttgaatggataagaggtatccctttcatttgataagtaggagaatggtaactatgaaaaa

SEQ ID NO: 905865 - DNA, 505 bp, Homo sapiens
aggaaatttgaactagctttttgataacacaggttagccatatttaatatgagagagaactgcacaaggcatggatagcggaagygaaaatcactgggggccattttggaggctggctgccacagagattagcaactggaatactgttttcaaagaaacagctttggctttttatattttctctattatgtctttggtttttttttttttcattgatttcagcttttatccttattatttccatcattttaatttcattcagcttaatttgctgggatttttgagatggatgcatagatcattggagttttttctttttcttttttttgagacagggtcttactgtgtcactcaggctatagtgcagtgatgaatcatagctcatagcagccttaaattactgagctcaagtgatccaatcctccctcctcagccttccaagtagctgggaccacaggtgtgtgtcaccatgcccaattaatttttttttttttttttttttttt

SEQ ID NO: 905866 - DNA, 721 bp, Homo sapiens
ctgatctggtaaattgttaaagctttcaacygtgttttgaaatgccttcagtaaatttttcatttctataagttctattttgttctgtaaaatatatctactacatctttcgtctcccaagttgctgtcttgattttttaatgttagtttctaactttctctgggatctcattgagctttcttacaattcatatcttgaattctttatttctcattggaaagttttcattttgttaggatctattgctagagagctagtgtgtccctttgtgtgtgtgttgggggggtgcggtgtatcacaacattctatttctttatgctgctggagttattgtgctggttccttcttatctgtagaagctgtcacttattattttttcattactttaatttgagtggaatttttttttcctttccttcctgaaagtgtccctgtcatgcaagttaggtgtcatcctttggctttgtacctattggttttagggatcaaaggtattatatgaatttcttggcatgaagagccttattgtaatggttgtctcaaatgctagttgtttgtcctttgtagtaaaggcatgctggacacatggtcaggctcactgacttctacggagatggggaggtggacatcttggaaggcttattccccagtgctgtgcattgctgtcagcaggaattatactggattttttagttcaccttaaaggccagtagatggttg

SEQ ID NO: 905867 - DNA, 654 bp, Homo sapiens
tggggaaacagtcaaaccatgtcaatagatatttgttaaatgtgtggaaaaagtggtatrtgaggtagacagctgttaacaagctggaagcagaattttaagatcagtaatgccaaggaacagagtaaagaattttgagtgctcactgtttcttaaaaggtgtactgaatatatgaacattcatataatttgatttctaatacccattaactattcagaaaagctttcacctgtcctggaaggttttcaaatggcttatttctttagaaaaataacagtaaattaacattagtttactataacatagcaacatgatttacattatcctcatgtccatcttgaacaatgtttcaatatttccaaaggctttgtaagagccatgccaacaaattgaaagaacaaatcatacaagcacctgaaaagacactgtgggagatgaaacgagagaggttatttttgatagctgtctattcatgcagaactttcctaagtcaaaacataagttgatttatggcaatcctactctgtttctctgcctttataattatgatttttttcttagatatttaaaagccttttgaatcaagagaacgtaaaaatgagagaacaaaagagtcaaggtatttcttctttagtaactaaaatccttgggtt

SEQ ID NO: 905868 - DNA, 623 bp, Homo sapiens
aaaaacaaaagactgtattggagagaaatatcaatcttagaactatcatagaaacctattatatttacagataatgaagcataagatacttacaggttcctgagaatatgtggactctaggaaagccctatttcaacagaatatgaaagaataaacatataaataagaaaagaaataccaaagtctagactcacaaagagaatttcagatcagacaattctccatctacactacacattaaaaaattatactgagaaatctagaactagaaataccatttgacccagccatcccattactgggtatatacccaaaggattataaatcatgctgctataaagacacatgcacacgtatgtttattgtggcactattcacaacagcaaagacttggaactaacccaaatggccaacaacgatagactggattaagaaaatgtggcacatatacaccatggaatactatgcagccatagaaatgaacagttcatgccctttgtagggacatggatgaaactggaaaccatcattctcagcaaactatcgcagggacaaaaaagcaaacactgcaygttctcactgataggtgggaattgaacaataacacatggacacaggagggg

SEQ ID NO: 905869 - DNA, 657 bp, Homo sapiens
atcatattgcttctgtcttaggtttgtgttataaggattgagataatgtctgttgcaagactarcatgagctattcaagatgcctagcaagtaatagctgctcaccaatgacaagagaggctattattttgttgctactttcccttagaaggcatatccagattctaccttccaaacctttttactctgtcttttctgtttcacagctccccattctgaacaccagcatcatgcatcctttgctctgttctaggcacaacaatcaaaagtgcttattcccaaactggacctgacttcagccagagtaagaacaatactgatcctcacctacccactcccaccatagtcccactaatgaagcccttattttacttcagagatagttatttgaacaactattaaatcaatttggtacatttagacaaccatgctagaggatgcaacttaaacactagagtgtcttccttagtgtccatgtttgtatcttaatacatcggtattcttctaatttacttgaacagaatataaaaattgcagcaaatatgtatttattcatttttattcagcaatcacttcatgatcatttagcgggacgtagatattatcctaggtgtggacatatatgaatgtacaagttagacaaagtccctgctttgt

SEQ ID NO: 905870 - DNA, 649 bp, Homo sapiens
gtcagaaattcatgacttacgcaaatgacacacctagtcctgaccggtttttcgtgccttatgtaaatgaatcacccctctccaccagctcatttataaaaacccttgcatttcactgtaaaacagcaacccatttttccaggacccctctgtgcaccagagagctttggtccttttgcttattaaacttctgctctaacctcacccttggagtgtcctcatccttgatatcttgggctgtgagactaagaacttcgggtgatgacaccccagacaacgaggccagtttcacttccaaatcttggttattctgaacagtgctgcaacaaacatgggagtacagatacctcttcgatatactgatttcctttcttttgggtatatattctgcagtgaaattactggatcttatggtagctctatttttagttttttgaggaacctccaaactgttctctatggttgttgtactaatttacattcctgccaacagtgtagaagggttctcttttctcygtatcctcaccagcagttgttattgcctgtcttttggctataagccattttaactggggtgagatgatatctcattgtagttttgatttgcatttctctgatgatcaattatgttgatcaccttttcatatgg

SEQ ID NO: 905871 - DNA, 651 bp, Homo sapiens
tactgattatcttgctgcttaaaggcctgctcaccaatctttctttcacaccgtgtggtccgtgttactggtatacccagtatgttctcactgaagacatggamtttatatgttcaagtgcaggaattggaaagttggacttgttttctatgatccaaaacagccctataagaaggttggaaaaggaggaactatatagcagcctttgctattttctgctaccatttcttttcctctgaagcggccatgacattccctttggcaactaacgtagaaactcaacagaacattttcctttcctagagtcaccttttagatgataatggacaactatagacttgctcattgttcagactgattgcccctcacctgaatccactctctgtattcatgctcttggcaatttctttgactttcttttaagggcagaagcattttagttaattgtagataaagaatagttttcttcctcttctccttgggccagttaataattggtccatggctacactgcaacttccgtccagtgctgtgatgcccatgacacctgcaaaataagttctgcctgggcattttgtagatattaacaggtgaattcccgactcttttggtttgaatgacagttctcattccttctatggctgcaagtat

SEQ ID NO: 905872 - DNA, 649 bp, Homo sapiens
gataaaacagagtttaaatcaacagagatcaaaaaagacaaagaagggcattgcataatggtaaagggatcaatgcaacaagaagagctaactatcctaaatatatacscacccaatacaggagcacccagattcataaagcaagttcttagagacctgcaaagagacttagactcctacacaataatagtgggaccagacggattcacagatgaattctaccagaggtacaaacaggagctgttatctttccttctgaaactattacaaacaatagaaaaagagggactcctccctaactcattttaggaggccagcatcatcctgataccaaaacctggcagagacacaacaaaaaaaggaaatttcaggccaatatccctgctgtacatagatgcgaaaatcctcaataaaaaactggtgaactgaatccagcagcacatcaaaaagcttatccacgcatgatcaaattggctttatccctgggatgcaaggctggttcaacatacgcaaatcagtaaacataatccatcacataaacagaaccaatgacaaaaaccacatgattatctcatagatgcagaaaaggccttcaataaaatgcaacagtccttcatgataaaaactctcaatgaactagatatctatg

SEQ ID NO: 905873 - DNA, 671 bp, Homo sapiens
gtaatggttgtgaaacccctgcttccttcctgggctactcgtgaaaggcctgactaccagatgggaacactataatacatcatacaacctggaataatttggtaggtttttaagaagcatacgtatatgtggaaggaggtcttcttaatgggctgaatgaaaataatagcagcatgtcattctttcacgatgaactatttccccactccttttatatgaaggatgctcattagaaagtagcaaagataaagggtaggttttggtctataattgaagtgcacaaggggtcctaatgataccagaggaggcatagaacataaagttgctactgtgtcatgcccacccttcccaacttcttctactcctcccggctgaataatggctttgtgaacataagttattaggaatcaaaaaactttcaaacacatcatcactctctactttaaaaaattagtgtgttcccatgtaattgttagcaattcttacatagatccaagagacactgatttgcttccactaaaaatatctcctttataggtttgttagttcacctcaaatatttctaccattgggatcctatctttaaaataaaatattgaaaacctaygctaaaattttatgtactttatataaatgtaacttaccattagttgttaataccttgttaagaa

SEQ ID NO: 905874 - DNA, 623 bp, Homo sapiens
ccctcccaaatctcatgtctttctcacactgcaaaacrcaatcatacgttcttaatagtcccctaaagtcttaactcattccaacattaactgagatctcccaactcctaagttctatctgagactcaagccaagtttctttcacctataagcctgtaaaatcaaacacaggttattaacttccaagatacaatggtgttataggcattgggtaaacattcctgttccaaaagggagaaattggctaaaagaaaggggctacaggcctcacacaaaactgaaacacagcagtcactaaacattaaagctccaaaataatcttctttaactctatgtcccacgtccagggcaactgataagagaagtgggttccaaagacctttggcaactccacccctgtggctttgcagggttcagcacccaaggctactctcacagctgtagttgagtgtccgcagcttttccaggctcagggcacaggctgctggtggatctaccattctgggatctggagggcagtggcccaattcccacagctccactagaaagtgccctattggggactctgtgtggcagctccaaccccacatttcccctccacactgccctagtagaggttctct

SEQ ID NO: 905875 - DNA, 702 bp, Homo sapiens
tattatcagggcttttaaaaagttatttyagccattcaaatagatgtatatttgtttctcattctgtttttattttgtatttctcttacgactaatattgttgggcatcttttgatgtgcttattagttatttgagtatctttttgctgaagtgtctacttaaatgttttgtgcactcctttattaggttgttttctgtgtgttattgccaagtgggaatatttctggattctatattctagtccattattctgtgtctatcttttcacatcactttgaagtgagataaaaattatcagactgtcttgatgactgtagctttctagtaagtcttgaaatcaggtagtgtgagccttctaattttcttttgcaaaattgcactgatgactttaattcctttgctcttccttgtaaatttcacagtcaaactttttgataccaagaaaaaatctgctggggctttttctgacactgcattaaatttatagattaatttgagaagaattaacatcttaacaatatcaagtctttcaatatatgaacgcagtacatttatacatttattcaagtcttctcttctataaatcagtattttttagcttttatcatacagatactgtaccctgttttttaagatttattcctaagtatttgatttttggcaaattataaagagaattttatttaatttcaatgcttaac

SEQ ID NO: 905876 - DNA, 634 bp, Homo sapiens
gcagaaatggagatttcaagaagtggctttagacaggattatgggtagtttgccaattggatggctgagattctgagtacagatgacaatgagagggtaaatgtggtttatctgattgctccaattttctcaggcaaataggaactaaggtcatcagctgagagtgagaataggaatgagttcttgggagtttccagagaaatgacaagctatcaaatagtcatttaagagaataagagactgaatggattagagaacactaaaatgactgtctgagagtgttaaggacctgctatgaggtttatacttttgaatatgaagtggaaccagttcagcatggctatgtatttttctccacaagattcagccgtacctggactggtacagacggaacagagagttggttttaaccaggattatggttttgccaatgggtataaggcaaaacgaaagagcaccaagggagtcaaaagtatgtgcaagattgatcacaatgattggctatggaatccaagaacagcaagcacatatcagtgatattgaaatggtgacaataacaatgarttggctcatataaagggattgaaaaatttgatgaaataagttgaaaatttaggaggtggtgaagtgtggg

SEQ ID NO: 905877 - DNA, 601 bp, Homo sapiens
aagcactgttgtgtttactgaatagtytctgacacttctgttttaaaaaactaattcttgttttgtttgtggtggttgacttcttgcatgatgcaaaccaggattccagatgagggtttcagtcacggaaacccatttgctttcattaatcccttcatgccacagacaatttaaacctacatattagagtaatataccatttgttctttaactgtttcaaacattgtgtgaagttattttttctatttcttgaacctgctagaaaatcaattttaaagcatgcttattaactcaagaccatatacattaagtggttacttcttaggttcagtgtcttgtcagttccaattacaagctgccctacagaggcatttttaaaacagaaataaatgtaatcctctgttgcatctcttatgtggatgttaagtaaatgaggacaaaagcattcaattttatttgcttgtttacctttaggtgacagttaattcctgtgctctcagattacaatcatatcattatgtgcagctcagagacaatacaatgcaatgtcaagttgaacacaggcaggatttttcagaaaccacaaagctttccattatac

SEQ ID NO: 905878 - DNA, 587 bp, Homo sapiens
aggttttattttggaccaaaaaaacaaaaacaaaaacaaaaacagcaatggaattgttttgtagctggaggcatgggcaaaggggttttctaaatatacaatcatgtcatctgcaaacagagacaattcracttcttctcttcctatttgaataccttttatttctttttcttgcctgattgccccagccagaacttccaatactatgttgaatatgagtggtgagagagggtatccttgtcttgtgccagttttcaaagggaatgcttctaacttttgcccattccatatgatattggctatgggtttgtcataaatagctcttattattttgagatatgtcccacccatcaatacctagtttattgagagtttttagcatgaaggggtgttgaattttacagaaggccttttctgcatctattgagataatcatgttgtttttgtcactggttctgtttgtgtgctggattacacttattgatttgtgtatgttgagccagccattcttttgcatttgctgaggagtgttttacttccacttatgtggtcgattttagaataaatgctatgtggtgctaagaaga

SEQ ID NO: 905879 - DNA, 566 bp, Homo sapiens
tgcacagagaagatgtgatattggagcccccacacagtccccactgaggcacttcctagtgagggtgggagaggagggccaccatactccagaccccagaatggtaartacaccagcaggttgaaccctgcacttagaggagccatagacactaaatgcctgcccatgatagcagctgtggggactgaaccttatgaagtcacaggagcagaacaacccaagacttttggaggccaccccttgcatcaatgtgccctggatgacagacatggagtcaaaggaattgttctggagctgtgaggtttaatgattgaactgctggttttcagacttgcatagggcttgttgcacccttcttttggccatttttcccctttggaatgggagtatttacacaatggctatacacccattgtatcttgggagtaacaaactgtttttgattttataggttcataggtggcggggactagccttatctcagatgagattttggactgaggaattttgagttagtgttggaatgagttaagactttgggggactgttgagaagggatgatttta

SEQ ID NO: 905880 - DNA, 609 bp, Homo sapiens
gaaggtctcccaggtgattctaatctgcagcacagttgaggaaccactgacgtagactcttcatcttataacagcctgtcaggggcttgtggtttctgctttggagaaggcagggtgaagggaagagacaatatctttgccttctgagttttgagcagttctagcgcccggtaaacagcaccctagtaacctggcgaatagacagattggtgagtgaataggtggatgtgtcacaggcatttgaaccagagcgactccatcttgaacaggagctgggtaaaatgaggctgagactggctgggctgcattcctaggaggtgaggcattctaagtcacaggatgagataggaggttggcacaaggtacatgtcataaagaccttgctgataaaacagtttgcattaaagaagccagccaaatcccaccaaaaccaagatggcaatgatgtgacctctgtttgtcctcactgctcattataggctaattataatacactagcatgytaaaagacactcccaccagcaccatgacagtttacaaatgccatggcaacatcaggaagttcccctatatggtctaaaaaggggaggaaccttcagttctgggaat

SEQ ID NO: 905881 - DNA, 643 bp, Homo sapiens
ctattttctatatgttttacttttggagagacaacttctacttgatcctccaagtcttaacattgcattttttaaagctccagttagtatatatttaattttcaagaactttttattcctctctggatatccttttgtaatcactgtggccctattttatagatgaaatattctctcaaatctatttgagaatgttaattagaaatatttttggttctgttctgtcaattatctctatttcttttttttttcttttttttttttttttgagatggagtctcactttgtctcccaggctggagtgcagtggcgtgatctcggctcactgcaagctctgcctcctgggttcacaccattctcctgcctcagcctcccgagtagctgggactacaggcagccaccaccacacctggctaattttttttctactttttttcagtagagatgggttttcactgtgttagccaggatggtctcgatctcctgacctcgtgatccacccacctcagcctcccaaagygttgggattacaggtgtgagccaccgcgcccggccaattatctctatttctttcaggttcagtttttctgatactgtatcttggctattctcttaaatgttatagacttttcttgattatcca

SEQ ID NO: 905882 - DNA, 633 bp, Homo sapiens
tgtgctttattagcctctctaagtctttccataaaagctgcgggactctcatccagcttttggtctatcatggacagtttagagcaattaagatgtttggccctagttcttagtaggccctccaatatgcacatttaaaaatgtttctttttccattcatctgtagcatcattggggttccaattagggttttcaagagaaactgcttcccttcctattgggaatggtgtttccattatttctcggccttccctatttccccttttcctttcaggcctactataggagacatattacacatttttgaatctctctgctgcctgcagagctgcctgcttctcagctgcaattagagtttggcttaggagcagtataacatctctccatgagaggtcaaatacctgagttaaattttggaagtcttctatatatctctcagggtcgtcagaaaaccgacctaatctcttgacttgcctacggtcctgcagtaattagtagactagaggagttagggaactgaataagggggattcacagattgttcccctggaagttgcttctctaacttgggagaatcmttctctataggcctgcctgacatgactgctaaaagagctgggttgattgtgcaac

SEQ ID NO: 905883 - DNA, 637 bp, Homo sapiens
tgccctcttcttggggcagtatgcatccaaaattggttcatatagttacaaagattcaatcccttctcccctgctagggtcaataggggctatcctactgtagagttccccatgggatcagctgagacctttsctgagtctgattgaggccaactttttcctctgcccaatcctacatctttcccttcttctacagatgttgaacccaagagcactccttcacatatctgcttcaaagtcttcttctgagagatcccaacctaaatatcgtctgaaaccgatcaaccaaccttcatacaacttatttatctcacatgaacttttagagccaaaatacttgccagaaagaaatttgaaactttggtttaaatatgaataagatgagaccatttgtcctagaaaaaaagcaagtatacaggcaattgtctacaatttattcacataagaataacacgtgaatgtatcctcttttcattgtatcacttaacagtagagcctaaacagtaaaatttgcaagttgaaaattattggttgctatgttgatagacacactgaaattggatggatagaaagaaattagaagatgtcataactcttgttaatatcacctttacatttctgtacacattggtgttta

SEQ ID NO: 905884 - DNA, 616 bp, Homo sapiens
tagatagtgtgtgattgcttcctcataattccaatggattggttcttggcaatctcacattatgctgtattcacataggtacattttgatcttctattttcatccagcctgacacttccagacatactagtttgcacattagctgacaactctgatactagtagtatttgtggcagacgtcttgggctgtctttatttattaccactatacttcttctttctttcattctggtcccatccagttctgactcttgcctccatctcttatttatttaggtctttgtttacagaatgttcttgttagtaatcaagctgtagttcatatttcacactcacacacactcacacaaacatacaaggtcattttctgacgatcaaactgataaaaaatcaaaataaggaagatgaaaggatccctctgaaaaattatttatatcaatattgtttatgaatatttttttgaggaagcctaggaaagactgcaatagaatcacaatggcatcctcaggcctggaatgtaattgaagcaattgttactcagaaaaggccaactgcgtacaagagggagaagaagaatwttcagtgtttatcctacactacttagtgacaactactc

SEQ ID NO: 905885 - DNA, 552 bp, Homo sapiens
gatcagaagagttcacagaataatgtttggttcccagagtgtttgctgttccaacatcaggatgtsacctgtattagtctgttctctcattgctgataaagacatacccaagactgggtaatttataaagaaaaagaggtataatgatctcaccattccacgtggctggggaggcctcacaatcatggtggaaggtgaaaggcatgtcttacatggcagcaggcaagagagaatgagaactaagagaaaggggaaaccccgtataaagccatcagatctcgagagatttattcactaccatgagaacagtatgggggaaaccacccccatgattcaattatctcccactgggtccctcccacaactcatgggaattatgggagctacaattcaagttgagatttgtctggggacacagccaaaacatatcatgacccgtgatccaggatgtgatcacagatgtgacatcttacggtcaaattacccatttccaagtgcttctgagattggaatgtatagttggtctcatagagagagacataattgcaaagg

SEQ ID NO: 905886 - DNA, 589 bp, Homo sapiens
gagtgatatggtttggttatttgtccccatccaaatctcatgtctaattataatcctcacatgtcaggggagctggtgggargtgattggatcatgggggggatttcccgcttgctgtttttgtgatagtgagtgagttctcacgagatttgatggtttaaaagtgtgtgccacttcccctttcactctctctccctcttgtcaccatgtgaagaaggtccttgcttccccttcaccttctgccataattgcaagtttcctgaggcctcccagtcatgcctcccattaagcgtgcagacctgtgagtcagttaaacctcttttcttcacaaattgcccaatttcgggtagttttttatagcagtgtgaaaacggactaatacagtgagatattaagaatgaatactaggcctggcaaggtggctcatgcctgtaatcctagcatttggaaggctgaggcagcaggatcacttgagttcaggagttcaagaccatctggggcaatatagcaagacctcctccgctaaaaaaaaaaaaaaaaaaaaaaaaaaaagaaaatagttaaaagaaattagtctggggttgtgggt

SEQ ID NO: 905887 - DNA, 617 bp, Homo sapiens
atcactatttcattttttaaatgaaggagctgagggacaaagagattaagtaacttacataataaggtcacatagatttgattcatccattgaatcaatttttctatgctacataacaaatcactacacacttagcagctttaaataacaaaagtttattatttcatcatttctgtgagtcatgagtccaggtatcgtagattaataccttcttctactcagggtctcaccaggcagaaattaagctgtcagccagagctgctgtctcatttggagcactggatcctcttctaagctcattggttgtttgcagaatgtatttctctggtgttgtatgcttgagatccctgttttctgactagttatcaaccagggacttctctcagcttctgcaggctaccctccagtccttgccatgtaaccacctcctcacaatatgaaatctatagtcaagaggaaagaagctctctcatgcttcactctcttttaaggactctcatgattaggttagacccacactgggaaagctctgttttgatgaactcsaattaaaaagtaacatatcataagagttatatctcatcataatcacagcttcttcctctgcttaccaccac

SEQ ID NO: 905888 - DNA, 612 bp, Homo sapiens
gtggaatttcaggcatggagaacgtatacaaaaataaggataatgggaagtacagaatctgtttcagggaccagaagaaatggccatcagaggcaggggaccagacagataactcttttcgcagtctctcaaaagggaatattattgggaatgatagtaagaggagttaaaaaaaaaaaaaagacaaaataagccagagtctgagggagagattacgaagaagagacagattcaagaaaatattattttcgtaagaatcacattcccattattttttcttattttaatatgttaaaaatatgaaaggactgacatatgctatatgtattttatacacatcaatattatatacatcaacatacacaataaaatattagaaaagaaaaactagaaaaagtatgaatttcatcatgtaactaaatgtgctttaaactactttatgaataactttcaaatattcaagtatttggcattttgttgcaaaagtgaatgtttacattattcataaaatatgtggcataataaataactttttaaaggctaacactatgctcaactttcagacaaaatatctgacactaaaactttayaaaactaatatatatcgttttt

SEQ ID NO: 905889 - DNA, 592 bp, Homo sapiens
atcatgaatatgtataaaagtataaaactactggtagaggtaaatgtatagtcagatccagaatacttcaacatagtgacggtgatatataaatccagtatatctttagtatgaaggttaaaagtcaaaaataattaaagctacaaaaagttgtccaggaacacacaatataaaagatgtaaattgtgacattaaaaacctaaactgtggagggagatggtaaaagttcagagtttttgtatgcaacagaagttaagttgttatcagcttaaaacaattgattataagatgttttatttaagcctcatgacaaccacaaaacaaaaaaaaattcaacagatacacaagcaataattaggaaggaatcaaagctcagaattacagaaaattttcaaatcacaaaagtggataataagaaaggaagaaagaagcaaaggagttataaaacaaccagaaaacaaagaatgaaatggcaatagtaacctatcaataataaccttgactgtaaatggcttaaattatttaatcaaaagacatagagtggctgagtgtataagaaracaagatccaactagatgcagcctacaagaga

SEQ ID NO: 905890 - DNA, 601 bp, Homo sapiens
tgtgggggctggggtggctggaatcatagtaattactcataattactactcagagtcattaagggtgccgctgaccacctctagaattaattttgacatatctrtagtcaggtaagataacaaaagcagttcggaatgaaacttaagctcaacccatcactgtgactacattcaataaagtgaaggaccctggtgtcaaccaaatattaggtactgttactgcccctgtgacccacattacaagtacttctgccaagaagtcaaaacatgcttcaaataaacaaatctttactctctctttgtttttttgatatggagtttcgctcttgttgcccaagctggagtgcaatggcacagtcatggctcactgcagcctccgcctcccgggttcaagtgattctcctgcctcagcctcccgagtagctgggattacaggcgcctgccaccatgcctggctaattttttgtatttgtaatagagatggggtttcgcgatgttggccaggctggtctccaactcctgccctcaggtgatccgcccaccttggcctcccaaagtgctgggattacaggcgtgagccaccgcacctggccaaataaac

SEQ ID NO: 905891 - DNA, 698 bp, Homo sapiens
gcagggaacatggacaccacctcttgaaaggggagctgcaagactctaggaactagcagcatatatgtgatggaaagtatggttgtggccaattttgggaaagaaactgccacatgtacaatatttgtcagagtatgcttaccagccacccgccttggaatcatctagggcactgttttttgttttgttttgttttgttttaaaaaaagcattcctgcagctggagcccttcccccagggattctaattctctaggtcagtgctgagacctgggaatctgcatttaaacatcaggggtaattttgatggatactaacacttgaagacaaaaaattctgaacaaacgagaacaaaaaaaacaataagcaaaacaaaaagaggtgccaggtgctttttttttttatgtttttgagacagagtctctcactgtcacccaagctggagtgcagtgacatgatctcggctcactgcaacctctccctctgagattcaagcagttcttctgcctcagcctccagagtagctgagattacaggcgtgtgccactgccccctgctaatttttgtatttttagtagagatggagtttcaccatgttggctaagctggtcttcaattcctggcctcaagtgatcctcctgcctcggccttccaaaattctgggattacaggtgtgagycactccacctggcctccttt

SEQ ID NO: 905892 - DNA, 611 bp, Homo sapiens
tttcttactttttaaaaagattacattgaaacgaagcaaaacaaaacaaaaaacaagcaatatagaaaggtataaagaamaaggcaaaagtcaccctgatctctagcgcccctaccccatccatggttccttccttagagacctgtaagtttaatcatcatcacatagttttctagacctttctttgattttgcaaactttgaatgaatgggatcataaagtacttaaagtacataaagaacttactgttctgccacaatgaatgattttcaaatgcaaattaaagttttgtgtgttaaaaaatgctttgtgggccaggcaaggtggctcatgcttgtaatcccagcactttgggaggccaaagcaggcagatcacttgaggtcaggaatttgagaccagatggtgaaaccttgtctgtactaaaaatacaaaaattggctgggcgcagtggctcacgcctgtgatcccagcactttggggggccgaggtgggcggatcacaaggtcaagagctcgagaccatcctggccaacatgatgaaaccccgtctctactgaaaatacaaaaattagttgggcgtggtggcgcgcttctagtcccagctactcagg

SEQ ID NO: 905893 - DNA, 611 bp, Homo sapiens
tttcttactttttaaaaagattacattgaaacgaagcaaaacaaaacaaaaaacaagcaatatagaaaggtataaagaaaaaggcaaaagtcaccctgatctctagcgcccctaccccatccatggttccttccttagagacctgtaagtttaatcatcatcacatagttttctagacctttctttgattttgcaaactttgaatgaatgggatcataaagtacttaaagtacataaagaacttactgttctgccacaatgaatgattttcaaatgcaaattaaagttttgtgtgttaaaaaatgctttgtgggccaggcaaggtggctcatgcttgtaatcccagcactttgggaggccaaagcaggcagatcacttgaggtcaggaatttgagaccagatggtgaaaccttgtctgtactaaaaatacaaaaattggctgggcgcagtggctcacgcctgtgatcccagcactttggggggccgaggtgggcggatcacaaggtcaagagctcgagaccatcctggccaacatgrtgaaaccccgtctctactgaaaatacaaaaattagttgggcgtggtggcgcgcttctagtcccagctactcagg

SEQ ID NO: 905894 - DNA, 634 bp, Homo sapiens
gtgtcatctctgatttatttcagctgtgtgctgtaattctcattgtagggatctttcacckccctagttagctgtattcctaggtattttatatacttatttatttttttgagatggaatcttgctgggattacaggtgtgagcctccatgcacggcttggtattttattctttttgtggcaattgtgaatgggattgccttcctgatttgactctcggcttggctgttgtatgtgcataggaatgccggtaatttttgtacattgactttgtatcctgaaactttgctgaagttgtttatcagctgaaggaacttttgggctgagacaatggggtttcctagatagaaacatgtcatctgcaaacagggagagtctgacttcttttcttcctatttggatgccttttctttctttctcttgcctcattattctggccaggacttccaatactacgttgaataaaagtggtgagagagggcattattgacttgtgccagttttcaaagggaatccatcctgcttttcctcattcaatgtgttggttattttatgttttctttagaaaaatgtccattcaaattcattgcccattttttaattgggctatttggttaatttgtttttgagttgtg

SEQ ID NO: 905895 - DNA, 685 bp, Homo sapiens
tgataatgagggctaaagggcctctataaaccaggaccccaccccgggccccaccatagagcctaagctctgtgatctgctggatgcctcagatctgagaacagccacagaagaaagaaatgtgatccctttctgaggacccaggaccctgagttactgtatatattcagtttatcaattatcaagagcatttcctgtcatatccacacatttaacagtatcctccttctcaagagcccattggcacactcgattttaaaatgtccttgtaaaaaagaacaacagagattttctacaaggcccatctgccttttaattttatttctgtccctaggtccctagtggtttttgttttgtctggttctacatttacgtggaattgctcagggatgttttttatggttagaaagtgcctgatttctgtagctatctatgtgtgaacataaacctcaccagtttacaagaagcttggacgttccaaatggtagaggaatggtttgtgcaatgcttggtactagttcctgaggcttctgttctgtcactttccagaaagaattaggtagtaccagaattattagagaatcatttatktttatgtagggcatgtataaagcttgcaccaaaacaagcagtgataaaagtacagggttctgcctcttgcaaggaaatttctcaaatggccagg

SEQ ID NO: 905896 - DNA, 568 bp, Homo sapiens
gatttggcatgtttatttgtgttcatgttgaacttgttttgttttctaatcataagttgaagctgtatgtaaattttaggatttttcactgatatgcaataaattgttagaggaaggagagcctggaagctaagtttctgctactttttagttgaatgatattggaaaagctaattttgtcttcctgtgctttagatttctcatctgtaatatgaaaataatgctacctccctaataaacatgataaaggtgtaagaagttctactcgctaagagtagacacatagcgcacaaggaatgctagctattgtaaaccagtaagcgtctgagacaggtctcaatcaatttagaggtttcttttgccaagattgaggatacacctgggaaaaagagatgcaagttatagtaggatctgtggcctgtgatccaaagagggttttgaggacttcagtrtttaaaggggaaaaagcaggcacgaggagaaagagaaacagtcaattatgcatctatcactagctcagtaaatctgcattttacatatgataaagtaaacatagagcagaggaaaa

SEQ ID NO: 905897 - DNA, 644 bp, Homo sapiens
gtgaattttacttgatcttgttaaagactaaggaaactggaaaatagaaccaatgaacagggcattgtgcttctccagatctatctatctatctatctatctatctawctatctatctatctatccacctatatatctatctctctgtttatatatatctatacctacataaatgtacctgattattactattgatcatcatatatatcatgactataatccctaaaacaagacaaaagttccgaaaatggttaatacaatttagaaaagaaaaaagttaatcaatatctaaatttaaagcttttagtaaatttcttgcagattactcagttataaaaaatgcaaattatttacatttgtatagtatcttaaagtttaccaagattttttatatatatcaactcttcacaaaaagaaagtaggattattaatcttgtttttcatataataacacaaaaacaaaaaatttaagagacttcattttctcattaaatacattaaatgattacatacaaggatacagatactgaggctacaattttgaacaaagcagatggtgtctctttttcatagatatgtgctttttcatatatatataatttatttttatgtgacaaataatatttgtgcacatttagaatgct

SEQ ID NO: 905898 - DNA, 718 bp, Homo sapiens
aggtaaaatgtgagtttttcaaatctgacaacattaaaaatataattttaaaatttttatctgcaatgagttaattctgcttgtttagcaaataattttgctactaaaataatgattaaaatactttaaaaacttcacttttaaaaatgtaactgacactgaattattgttttaaaaacattttaaggatcacattttatatttgtattagtaaatattaaattatatatggtctaaaggagtcaattgttttgtctataaggcaaaggagaaaatgcagaaaaaaaagtcaatttgtcaaactattgatgctagatagaatcacatgtgtacaactgatcatggacagtagcaggcattttggtgtcttggtagcagtgaactgaatcccaatttgttaattccactccagaacattattttttccagattgttttctgtcatttgttgtatgatttttattttatctgaaagtggacattagagatctatctctgttaataatttgggtagatgtgagctctattaatgagcagaagaccccaaaaagactgtttgtgactttttgactgtagttgactaattgggtggcagctaactcatttaattgaattaggaaggattagaaaatatatttagcaacatggaacaccaaaaagaagaggtggttaaatatgaamgatgtttcgactatgtcatagtgtcatctgctccctta

SEQ ID NO: 905899 - DNA, 629 bp, Homo sapiens
ctcacaatatactttaagcatgcrtactatcagtatgacttgccactcttgatgttaacctttatcactgggcttgaggcatgtcaggtttctccactatatagttattcctttttctctttttatataatcctctttatagccaccatgtatatagttcacactaaaggagtggaaagttacactctgcgttcttaaggtggtgtatctgtaaggtattaaaaattcttcaccataggagacctgtcacttctcccccatttatttatttatttaatcatttatgtatatcagtatggacctaccttgtctatgtcatgcactgttcctagattcagccaattctccaaggagccttggtttcttttacacttttctaatggtattaaaaaccaagatctgagcactacgtgtgctctttgcaattaaagtgccattgtttccaggttctttcagcagacagatcaaggagaaatatgtatatatatgaatccatctacagagccgagatcgcaccactgcactccagcctgggcaacagagcgagactccgtctcaaaaaaaaaaattctatctatcaatctataaatatttctacaggtaaacatcagcagatatagcaaactaaa

SEQ ID NO: 905900 - DNA, 629 bp, Homo sapiens
ctcacaatatactttaagcatgcgtactatcagtatgacttgccactcttgatgttaacctttatcactgggcttgaggyatgtcaggtttctccactatatagttattcctttttctctttttatataatcctctttatagccaccatgtatatagttcacactaaaggagtggaaagttacactctgcgttcttaaggtggtgtatctgtaaggtattaaaaattcttcaccataggagacctgtcacttctcccccatttatttatttatttaatcatttatgtatatcagtatggacctaccttgtctatgtcatgcactgttcctagattcagccaattctccaaggagccttggtttcttttacacttttctaatggtattaaaaaccaagatctgagcactacgtgtgctctttgcaattaaagtgccattgtttccaggttctttcagcagacagatcaaggagaaatatgtatatatatgaatccatctacagagccgagatcgcaccactgcactccagcctgggcaacagagcgagactccgtctcaaaaaaaaaaattctatctatcaatctataaatatttctacaggtaaacatcagcagatatagcaaactaaa

SEQ ID NO: 905901 - DNA, 527 bp, Homo sapiens
ggcgaggtggagatttaagcacaatgccaaagtagtataaggtaggaaaatgtctcakcttgcttatgcctcacccccaaagcagaatctgagactaaagcttttatgaaactggattattcagaaaaagatctcaaaaagtagagaagttaaaaaaagaaaaaaaaaaacggaaagaaagaaaagtcaagctaaagctgtcttggtgagctggttccctgtgggtcattcaggctcaatcctactggggacttgctggctactgtgtaaaatgcgcctcagatttgtccgtctaaggaacatttcagaggagtatttatccactagctcccatcctaccagtattcccctgggtgttaactcttctgctctttcggatttgtgtatgtgtcagtatgactgagtagtctcaatagtctgcagaagtcctatttggtagaggcagagaaggctagagtaaaaagcaacaggtatgtactgcatttgatgtgaagtgctgtcaagttgcatctgtgaacagctggtgg

SEQ ID NO: 905902 - DNA, 651 bp, Homo sapiens
aagtgtgtaaatagtattgtctaagtctcctatagacttaatgaatttccatttgttctatgaactatggagaatgggatatgacaatttctaactattattgttgtcatttttcttttggtttttcagattttgcttcatatatattgagattctattgttaggtgtgtaaacatttattataaattgtatgctttcaccattttatccataatatttcttaaaaatttattttgtctgataataatatagccactcagctgtcttatatatactgtttgtaatagtggttcatcttttcttatccttttgttatcaacctatgtatgtctttgaatgtgtggtatctgtcttatagatagtaaatacaggttgagcatcccaaatgtgaaaatctgaaatccataatgctctaaaatctgaaactatttgagtgcaaacatgatgcttaaaggaaatgctcattggagtattttttatttctaatttttcatttgggacgctcaactggtaaatagtgcaaatatccccaaatcggaaaaaatcagaaatccgaaacacttctggccccagcatttcagatagggcatgctcaacttatagttgcttcttgsttttttaatcagtcaggcaatttttgccttttaatta

SEQ ID NO: 905903 - DNA, 597 bp, Homo sapiens
ccaaccatttcaaaattttataggtgaatatttattgacatggaatgttgttcrcaaagttgtaagtttcaaaaggtaaaatgggttataaaatattatattacgattccattttggtaagaacatgtacatgtgaacataaaattctgtctggaaaaatatatactgaggtgccaacagagggtgtatctggtattgtgagcatttttgtttaactctctttttgcttgcctcttattttttctttagtgagaatgtggggttttttttatatacataaaaaagatttatcactatgtaacccccttccaccttcaaccacttttctctaggtctgaagcctcagctgcagtggagattgtcatttgcccacttattgccaggaaccagagtttatgtactgtttgttgctttcatgctgaaagttaccctccaaagctgttttcttaacatttctagattctatataaatcaaagaattatgctttgaagcttgtgggctggtatgtgggtggccttgagatgtcgatgatggggtggtcgcccctaggaagtcagaggatgtaagcatttgaccatattcatgttttattcttt

SEQ ID NO: 905904 - DNA, 603 bp, Homo sapiens
ttgcttgacagtctattaggcatcttagaattagcatgtccaaagaaaaactctcaatactcgttccaaacgtgctcttttcacagtctccccaactcaatacatgccaactccattataccagttattcaggctccaaagctggtgtggtccttgaaacatctttctttcactttctacattgaatcaatcaccaaatttcaaaatatacctaagattcaattacatcttaccacctttacttctagcagcttggagaatttcagtagtatcttaagtgatctccattctccaccattgcacttctaaagactcttctccaaacagcactgagaatgatccttagaaacatacatcaaatgttaacattctatcattcaacacgttccaacagtttactatagcattcagaggaaaagctaaagtcttcataaaattatacataatctgaaagtttttcttctattactgtcacctacttcacttcattctagccacattgacttctttgctttacttgaataagccaagcatattttcccmaaaatccccacagttcaaaccttttcttcctataggttcctactcatgtcacctaatcag

SEQ ID NO: 905905 - DNA, 641 bp, Homo sapiens
aaatctatttgaaggaaccttcatattgcacttattataatgacatagtaacaatcatttgcagcacttttgcatttactcagatrtcatctcttcctggaagcctttcttgaatatctgatttcctctgaattgccttattctctatttcccaaagtaccctgtgaataccattatcttagcattttccatattatatcgacattatctataatatttattgtgtctgtctcatccattctagaaataggatctttgtttactcattttttgtatctccagcacccagccctgtccctagtgctcaattaatgcttgttaaaactgaatgactgtatcttgccagctccatctccttcagtggaaggaggagaaaattttataactgtatttaggtacaagaaatcacagaagaactaaaaaaaaaaacctagattttttattctccttgtcttcaataaacaccagtttcctcactgacataggtatccaaaataaaaacaattaaaaatgaaacacagaaccccacaacttctaacagtgatcagttaaaattgtaaggttttactgaaatgtttagagatgaaataacttgatttctggggaagtggaagtggaggggtaaaactggtcatgagttg

SEQ ID NO: 905906 - DNA, 641 bp, Homo sapiens
attcctgatttgggtcttagcttgactcttgttggtatataggaatgctagcgatttttgcacattgattttgtatcctgggactttgctgaagttgtttatcggcttaaggttttggrctgagactatgcagttttctagataaaggatcttgtcatctgcagacaggaatagtttgactttgtctcttcctatttggatgccctttatttctttcccttgcctgatttccctggcaagaatttccaatactaaattgaataagagtggtgtgttttgtgctggttttcaagaggaatgtttccagcttgtgcccattcagtataacattgcctatgggtttgtcatatatggctgttattattttgaggtatgttttttcaatacctagtttactgagagtttttaacatgaatagatgttgaattttatcaaaagctttttctgtatctcttgaggtaagcatgtggtttttgtttttagttctctttatgtgatgaatcacattgattaatttgtgtatgttgactcaaccttgcatctgagggataaagtctacttgattgtggtgaataagcattttaatgtgatgctggatttggtttgccagtatttcattgaggatttttgcatcaaggttc

SEQ ID NO: 905907 - DNA, 658 bp, Homo sapiens
tgtttcaccaaatatgccaaatccaattattcttataacaccttacatatgaacagtaaaacacaaggagaktgttatcttcttacttgatttttatttgaatttaaaagaataaaaatgatctaaattcatattgcattttttatccttcaacattttgtactcttataaatataatctcatctgtcttttcaatacccagtgggaaagataaaaaatattaaccctgctttagataaaacctatacatttttttaaaacaagtcactagtgtacacacatggattaacacttagtaagctgagatttttaccactagacagaaaaatgaaacttagtactttctcttatgtaataaatatctgacatttattcaatgctcaccatatacatgaatgcattaccttttttctttttccatatcattcgtttcctaaactaactgtatgtgcaaagccctattattatatgagaaaactgatatttgtaatggctaggagacttgttcacagaacataatttctatataaagagttcagatttagtttttttaatttcatttattcaccagtaaatattgattccattcctattaagtgccaagtaccaatatggatttctgacatgtattagtgaaaaaaacaaaacaatatatctg

SEQ ID NO: 905908 - DNA, 666 bp, Homo sapiens
ttcattaaaaaaactcacggagatcaccaatatatgtgaagtgaaaaatataaggtrtaaagcactagttattataggatctatatgtgtaaaacactaatatacatacagatacatatatgcattaaaaatatctggcaggacacttaaaaaaatataattactggccagccacggtggctcacacctgtaatcccaacactttgggaggccaaggcaggcagatcacctgaggtcaggagtttgagaccagccgggccaacatggtgaaaccccatctctactaaaaatacaaaaaattagccaggcgtgatggtgggcgcctgtaatcccagctatcgggaggctgaggcaagagaatcacttgaatctgggaggcagaggttccagtgagctgagatggcaccactgcattccagcttgggtgacaagagcgagtactccatgtcaaaaaaaaaaaaaagaaaaagaaaatataattcttttttaaaagtagggctggtactgcaatagtcttgtccaagaaaagaaaaaaaaaaaagagacagtagggttggaagtcagggttaagatcaaatgttgtgttttagtttatttctttcaattctgttcaagttatatatttacgcatttttaaattatactttaagttctagggtacatgtg

SEQ ID NO: 905909 - DNA, 655 bp, Homo sapiens
aatttattgaatactgtgctaaaagtgataaacagaayggctgtatggctagtcaaagtacagtttctactgaatgcacatggctttcgcaccattgtaaagttgaaaaatcttgagttgaactaaggtacatcagggactgttggtccatttcattaactttttttgtttttttacttttaaagtaacgttattgaaggataatttacattcaacaaaatgcaccccactttaagatgagctttgacaaatgtatatacctttacagtgatcactgtattaatcatggctttttgttaaattttatgatgatttgacatcttagaggacttgctagagaggggaagatactgccccttccagggctagctaattcctatatattgcaaatgactcccctgtgagcgtgtctttcatacgcaaaccaaccaatccaaagcccatatcctcaatcacatcctttatctaactaacacaccaagccaatatttctccagcctaaatcactggagtgagatggactaccttataggccagggaccactgaaattattcaagctagccaatgttaaacagcttttcatatcctaccttgtctttcctggggaaactacaacaaaggctctgggccatgctttcccctggctccttctgc

SEQ ID NO: 905910 - DNA, 667 bp, Homo sapiens
tatatttatagtacaaagttaacaagaaaagccatcattgtgtgcatttttttcttccatatgctgtaacgtataatgtattttatggggagactggaggagatagaggggggagagagaatgagaagagggttgtgagttgggtggctactgaaacacctctttgcttttttcctaaattctctgaagtggcctgtcttagtcccaaccaagccagaagtattggcctccttcagccattatgctgtctgtaaaagcactgatttacagtaagcaacaaaacactggctacacaggaaaaagagttttagggagactatcctttgctcccctctgcccttaagcctcagcaggtttgaatcactggtgtaggttcattctgctttcattggcataccaccaatgcctgctgcaaatctgctaaggacttctcaagagtttatgacattatttctatcttcagggctgagaatcaggctgaattatctccaatttagggcttaccatagtttaggaatttaatagattcaagtatcacagaatttataacccagggaatgatttgacatagaaagtgctttgcagaattataaatatattttacagataagattagactgtattatagagaattataaatacrtaaaatatgtattttaagaatgat

SEQ ID NO: 905911 - DNA, 576 bp, Homo sapiens
caggggaaaggtcaaggacagaaagagagcaggaaagaaataatctcacagtttccaaggctgaagccccagtaattgtccaggccagccctcgagaatatttttgccagtttgcaacgagtgtagattttggactcggcgcctgtgaccaggcagccaatgagggtcagaatgcccgcagccttcatcctcaaagcctgccggagacagaacctgccaaagagccggagaacaggtcagacgatcttgattcaggaacttcgaaatccagcatcggtgactgtgcacagccctgcctagatgctgcctgtcactttggtcattcagtgccaccctcaggcaaaaccggccactctacggtccagggaaggaatgtgactgcagcctgtctccttaatgcttttccatacagtaactttcaagtcaatgctgtgttctcagggttaagtaagtgaaaaaattaaccttccttaatacacatccaggtgaaaaccacaaggggcatttttaggatttcyattttaattctatgaatgaaaaatagaatacaggggtgaaacattccctatactgctg

SEQ ID NO: 905912 - DNA, 600 bp, Homo sapiens
gactctaaggtggaaggtctgtgatcctagattatcactgtaatctggaagtctctgtttgctttgcattgagaaagtgtgtttgtattccctactaaaatactttttaaacttttcacttaaatgtcttttctcaaaacactgatgctcacacacctcattcctagagattctgatatagtagatttagatgaggttgtagaactctaagttggaaacagctcaccaggtaattttgattttcagccaagtttgggaagcacaaaacaatagtgtccttttgctggaccatgccatacagcatgctgtgtaaacaaaccctagctcttacttgctttcttactattttcctatagtgctgagcagcagacaattccagttatttgaagggtctggttagctgaatttctgtgcattaacatggtactgtaatttccactggattttcttgcactgggagtgagagaatttagcatggagcgtggtctttgcagacttcagcctccactgtctccaacttcagtacatcaagcctstagcctagtgagatgacatccctgcctcaatcttttcctcactcttcaaaaaatcttaccggca

SEQ ID NO: 905913 - DNA, 635 bp, Homo sapiens
tcaatgtatcccagatgatagtggcattaaataaaaataatatcaattaactagtgaaaatagtctttctgatgtttctgctttttagaatataaaatgacaaatctactacatttgcttctgtaaaacaaactttgtctttaaatataacatgtggtcaggaaagtatacaaataaaatgtatggctcaatgaatttttacgaggtacattttgataatcactagaatgcatcttcctgacctctaataacaaggagcctaattgaccactgtgctctacaatttattattatacctgagctgaggccactctggccttgggctgctttccatcaatgactgtgttactgaggcaggcccattacggggagacacaggtcttccttgatggccaacttagactggaggactccccaacacccttgctgaatcttccccagacttcatggtgctctaggatactttcacccaacatatcttcccttcctcttttactcagggtcasacttgcatgtgaccactctctcagtctttccaactccttccctatgttctcacacaagcattttcctaataaaatccttgaagatttaattctgtgttggtgtctccttcttagagaactcaaactaac

SEQ ID NO: 905914 - DNA, 566 bp, Homo sapiens
aagctaaaagctataatagataacactaaaaaagtaaggaataaaacacattactagagtgaatcacataaccacaaaggaagcctttaagagaggaaaaaaggaaaaaatatctaracaactaaaaaagaagttacacaatcgtgatagtcatcccttacctatcaataactaccttgaatgtaaatggttgaaattattcagttaaaagagaggctgaacggatagaaaaatatgaccaaactatgctgcctacaggagacttactttacgtataaaatgacatgcatagattgaaagtaagtggatgggaaaagctatttcatggaaatggaaccccaaaaagaacagaagtagctgtaattatatgaacaaaatagactttaagttaaaaactgtaaaaagagacaaggccattatataataatagcaggggtcaatgcagcaagcagatacaattataaacatatatgtgcccactagcagaggacctatgtatataaagcaaatattaatagatttaaagggagagatagactgtaacacaataatagtaggggacttca

SEQ ID NO: 905915 - DNA, 568 bp, Homo sapiens
cagggatccatcccaattgaaagaggaaaaattatttttcctctcatattattattgtcattatttcctcctcctccttcttttcatcatcatattctgtcatcaattcctagaccacttactatgmaaatagaactttgttgcttcaattctgatgttaaaaaggcaataggattttatattatagaagaggcaagctcctaaatggggagttatttcagaaaagagttagcttttgtttgtttgcatccaatcaaaacaactgattcattcagtcagttcagtaaaaattctccttttatgcacctttcttaactgaactgtccagttgtttgtgaggcagccagaattaccctgtaacttgatgggtataactgattgatgacctgatctgctggtatttctccgaggagggcaaaaacaacccgaaaatgttgtacaggtgcacctatggccagttagttttgtataattatacttaatatttgaataaactgtctttttatggttatgaaaagagaggctagtaaacattttcttggctgggtttcctttttggcatctacta

SEQ ID NO: 905916 - DNA, 591 bp, Homo sapiens
taaaaaagttatatgaggatgatcttgcctggttgtattttatattaagactaacatactagaataatgcctcccatgtcatcaaactttatgaaattcttgatgtaggattataggtgagaaaagcaagggataaaattatatttttatctgaggccctggactcaaatctcaatatggaactccatagctcggtagatagtgtagaagactcacattattctgcaagtatgttttaaatgctaaaaccagagcaagtggaaaagcctatcaaccttaaataatgatatttcaacaatatgattaagtatagagtttactcaagcagaaattgtgaagatggccacctgggaaagtactgtctccaatcaaatgaggtcagcatttgcaaagtggagaaattaaggttttacttatgtagacaaagatgaaaagttccagcagggttatgtttttacactggacaggtcatatgcyatagcaatttggctggtttcagattgctgcatttcaaagattactttattactctgggaggagagcagtaattcgaaaaagtcttacctctgatgccctttggttttaattatt

SEQ ID NO: 905917 - DNA, 648 bp, Homo sapiens
ctctaggtcagaagtccaacacaggtttcacgggactaaaatcaaggtgtcagcrggactgaattcgttcctaaaggcgctagaggaattattgtttcttttcctttctagctgctagaggctgcctacatcctttggcctgtagccaccttcctgcatgtcaaagccagcaatgtaacctttcccaattctaatttcaccatcctgtttctgaccacagctgggaaatgttctttgttttgaaagactcatttgattagattgggcccccatggataatctaggatatcatccctatctcaaggtgataaccttaatcatctgcaaaatcccttttacattgctaggtaacatatttataggttctggggattggggcttgcaaattttagggggctattctgcctgccacagcacttttgatgtgctgctagaaaataaagataatttatttgcatggaaatcatgtacaggattatgattcaagctggaaatatttatcccagaatcaactgtatatagattctaattctagaaatgagagtgaatgttattaataagaaagagggtataaaattaaaagaaaactgataaatatgcaaggtaatgcatatgttaaatagtttgatttagtcatttcacaataca

SEQ ID NO: 905918 - DNA, 657 bp, Homo sapiens
cctccaatggtgtgccccgatctacagccccaggtggaatacccaacccagagaagaagacgaactgtgagacccagtgcccaaatccccagagcctcagctcaggccctctgacccagaaacagaatggccttcagaccacagaggtagggttgcagccacagaatcaactggggactggagaatgggggtagggcttgcttcagggcagagccacccagccgctatgtccagggagggaccagggatggctcatcttggaaaaaaaaagtctctgccccacccatgtaaaaattgctgcaaaccccaccccaaaaccctgccttgagggttgctgctttttgtttccatgtgtatgtttgcttaagtacagctttattcaaggatcttgttttctgtggccactgtcaccatgttgatggtgaggactgtgctggttagaggaaccagtcttaggccaggcagctggccagtctcaggggttggcagggtggggagtgggcagaggaaggaaagagaagaccagagtggttggaaacaagcctcgcattttactcaggccctccaaccaggtggrcattggaagggcccccaagggtggctctcatagcagaatgtggtgacagcatcatccccagactgttggaagaggcaggt

SEQ ID NO: 905919 - DNA, 661 bp, Homo sapiens
atacaaaaactaagtcaaaaggatcaaagatctaaatgtaagggctaaaatcataaaacactgaaaggaaaatatagrtgtaagtcttcatgaccttggattatccaattgtttcttagaaatgaccccaaaagcacaagcaacaacaatgaaaaatagatataatgagcattatcaaaactgaaaacttttgtgattcaaaggacaccatgaagaaagtgaaaaggcaatccacagaataggagaaaaagtttacaaattatatatttggtaaggaactaactttcaaagaactcctacaactcaataataaaaaagataaataatccagataaaacatcagcaaaggacctgagtagacatttctttatagaagatatgcaaatggccaataaacacatgaaaagatactcagcatcattagctatcaaagaaatgcatatcaaaaaccacaaggatataccacttcacacccactaggatggggctataataaaaaaaagatacagaataagtgttctcagaaatgtagagaatttggaaatctcatacactgctggtgggaagactaaatggtacagctgctttcagtctgcaattctgtaaaaggttgaacatagtggtaccataacccagaaattcctgtagggtatacacccaa

SEQ ID NO: 905920 - DNA, 624 bp, Homo sapiens
gcttctctgcctggagacaggcagagtaataggaataagcaatcatcctctccaataaggataatcctacttacttggcagagtttgctgcaaggcttaaatgaggtaaaatcacattcgtggttcatcacatgggcttaagcttccgacagctctgaatttggaaccatgctctgtaactattagctggccttggcagaatactaaactctttagcctcagtttcctaataaataaaatgaacataataattgtttatttcagaaggttgtcttaagaatcgacaaagagcatttagcacagagctgggcacataagaactccatacctactagatatttaatcatattaaggcatgtaacacagtatctagcacatgggcttactaaatagcagtggtggtggtaattattgttgttgttacttttattggcctagaattgttcctaggcctcctaaaatgctattattttctaggaaaggaggtcttttcagtactgttgttaagactmctttcattggttttgacttctaacttcaacacagccctacttgcaaggagtctatagaaactatcagctgagtcaggaccatttcctgagcctttcccaacacctctgctat

SEQ ID NO: 905921 - DNA, 616 bp, Homo sapiens
cttttgtcttcttaacatttctcatctcatgagcgttgaagaactttttcttcccaacccctctcaasctttttcccatccagtttattagttctttgcttctagcaaatatctgctgaatagcatgccactctttattctccacaagtaagacagataaaaaaaagacctgattttgaaactctcagagtctgtataaatccccatcattattacgtgagtgcatgtgggtatgtgtgtgtgtgtttgtgtgtgtgtgtgtgtgtgtgtgtgtgtgtgtgtgtgtgtgttcagtgagggaaaatgtattctaacaactatgcttctatgttatgtaccagtactaattctcctttgagctcatattttatactgaagtttattcttaaggcagtctagcaacaaagcagatgtgtatctgtgggtatcttcaattaatcattttatttactatacacaatctttcttttccatctgaccatttaaagacaagtttaggcttaaaatcacttaagggaggattttaaatatacaattgactcttgaacaatgtggaagttggggcacagccgcccctatgcagtcaaaaatttctgtataagctttgactacccaa

SEQ ID NO: 905922 - DNA, 564 bp, Homo sapiens
ataacttggaatatgatgttcaggggtaggaagcatccagcatgggagaaagatgtaggctgggaggctaagccaatgtcgccttttcatgtttttctgcctgctttatattatttgctggcaacgaattagatggtgcccaaccagattaaaggtggatgtgccttccccagcctactgactcaaaggttaatctcctttggcagcaccctcatagacacacccaggatcaatactttgcatccttcaatccaatcaagttgacactcactattaaccatcacacatgctatagcaaagtctggaacaaatttccaaggaagcagagaagaaacaggttaagtgatagtcaaaaaacagaattagagatacattgttgccatttatcattatttgttgcatttgttgcacttgtttctaggtagacatactctacacttttaacgtgtgtrtgtgtgtgtgtgtgtgtgtgtgtgtgtgtgtgtgtgtgtgtgtgtttgtgtatgtagacatatcttgccatcttacccaggctggtttgaaactcctggactcaagaaactc

SEQ ID NO: 905923 - DNA, 560 bp, Homo sapiens
aataataagaatccaaataagaagaaaggaactcaaactattcttgtttgcagatgatatgattctatacctagaaaaccccatagtctctgaccagaagctgccttgagctgataaacaacttcaacaaagtttcagtatacaaaatcaatgtgcaaaaatcagtagcattcctaacaacacccatacactgatagcacctaagctgacagccaaatcaggaatgcaatcccattcacaattgccacaaaaagaataaaatacctagagatacagctaaccggggaggtgaaagatctttacaatgagaactacaaaacactactgaaagaaatcagagatgacacaaacaaatggaacaacattccatgctcttggataaaaataatcgatatcattaaaatggccatactgcccaaaacaatttacagattcaatgctatttctataaaaccaccaatgacattcttcacagaactggagaaaactattctaacattcatatggaaccaaaaaagagcccaaacagcsaagggaatcctaagcaaaaagaagctgga

SEQ ID NO: 905924 - DNA, 519 bp, Homo sapiens
gatcataaacaggacagatgccatctgtctagtatgacttcattcattcacttgttcattcagaaacattactaggcatgtccattgtgagggccctgtgctaagtactcataatacaaagacgctaagacacaaagatgggagacatgcatgtgaacaaaaaattaaagtcacgtgagatgggtgcaataaaaactcataatcaaaacacagtgatagcctggagaaagggctgtggaagttgcatcaaggaaagagtcagggaacagttcacaaagagctggccttttgtttaaggatgagtaggtctccatgcatatcaatgaggaagggcatacgagtcagagagaacagcaagtgttctcttatacccttatgtgtatagggagctgcaactaatgttctgtaatactggaacaccagatagcaatgagaaagtggtaagaaattaggttggagggtaatcyagagtcatatcataagaggcgtggaatgccatactaaggactttggacttca

SEQ ID NO: 905925 - DNA, 641 bp, Homo sapiens
gacaagtacttgggagttcccagttccttaaatagtgtasagcagtgcatcttaaactttaatatgcatgtgaatcacctggagatcatattgagatgcagaattggattaccagatctgggaggtggagattctgcttttttaacaagctcccgggtgatatctttgctatgattccagaactacactttgaatagaaaagacatagaatattttattcagatgatttgtaaggtctgttgctctgatgtgttatatttcttctctctactactttggctaatgaatggataaaaggattctgctttgtttgcttctgaaggttttccactcctatgtgtatagctaggaatgtgcaaaccataaggctctaccattaaaatggcatgtaactgctatgtaatataggaatatatcagggtaaaatttaggagttgcactgatcagggaaagtctcaagttttcttggaataaaataacaactctccgcaaaaggcagagggtgtgatcgaaaaagactgagagacagattgtgcagactatggaaaatgtagcctgaattctactaaaggataagattttttaagtagatgataggctttggtctattagatctttaatcatcccatatcttcttgtag

SEQ ID NO: 905926 - DNA, 576 bp, Homo sapiens
tgtctagggatgggtgtctgcagctcytgaagtccaagtgggtgtgtgctacactgtgctctttcagctttgtcatccacagatggcttatgtgttaatcacctcagtgctctcttggtacccaggtctttgtccaacgtccaggaagaatccggtcatgcacggacttgaattatgaatgtgggggttttattgagtggtggaggtggctttcagctggatggatgaggagctggaaggggaatggggtgcgaagatgatcttcccctggagttgggctgtccagtagccaatcttcactctaatggtccccagccaaactcctctcagcattcaaacgttccttctcttctctctgcagtgctgttctgctgttcttctgctctctcttcatctcctcctctccttctggatcctgggtctggggtttatatgggtacaggataggggggtgtggttggccaaaaggcaactttttgggcacagaaacaggaatgcctgttctcatttagggccctgggtttccaggcttgaaggtggggctttgccctggggaaccaccctcttctttctacc

SEQ ID NO: 905927 - DNA, 668 bp, Homo sapiens
ctaaataatttcttgaaaccatccagatgatgagtgaacagcagagaagaattgcaggcagccaggatattaacagaagaatatgtatcacttgaaacttttcccataatattgctcagagggatgatgacaactgtgaagcaatatgggaatgggtgaattccaaaaaaccacactgtattggtttagtaacaggctttatacgggaaatttacaaaccagctgccagtaagaggaactttttttcacaagtcatttgtgttaatagaaattaacacttatttcagtttcaaagttgttatacttgaagttactaatacaaaatgaatttaaaatcatcacataacattctgctttgactgtggcaatgaaatgtggcttaagaaaagaaaaagtatccatcacctactcatagttcttttggaatttgttcttcaagtttctgaaactctcctgtctgcaaagtacaggagttactgagctacatgagaaagtatctgtgggacaagtaatgaacaggtaagcaatcataataaagggaatcagtatacattcagcatggaaatttggactatacaacagtcctttccttctgcttcagctcaggagatacatgcttytaagcactcttatccttccatggagaaccatggagacacaggtgaagt

SEQ ID NO: 905928 - DNA, 649 bp, Homo sapiens
agctaaataatgggtacatggacatacagagtgcaataayagacattggagactccaaaaaatgggagggtaggagggtggtgagggatgacatacttattgggtatacaatgtacactattcagatgatgggtacactaaaatcccagactttgtcactatgcaatatgtaacacaattgcacttatacacctaaatcctcaaaaataaaagtaaataaaaatagaactaccacataagccagtaatctcactactgggtattgatccaaaggaaatgaaatcagtatgtcaaagagatatttgcttggatgtgatgaatttcagaatatatgacttccattttcaggtttttatgcttaatgggaacttgaactctcatatttattgcagcattatttacaatagccaagatatggaatcaacctaagtgtctaacaatgtattaataaagaaaatgtgatatatggaatactatttatccataaaaataatgaaatcctgtcatttacaacaacatggatgaaactggaggacatcatgttaagtgaaacagagtagaacagtggttatcagagactggggaagggagggggtacagaaggatgaggagaggttgtgtcagtgggtacaaagtttaaatgagaaga

SEQ ID NO: 905929 - DNA, 600 bp, Homo sapiens
tgctactctctaaatatggagcatgtaaaccaggtagcytaagtcttttattcacctagagcctttgacccagtaaacctcctgggatgtcagatctctgtctccctttccctttacctctctgtttccttttcttccatctttcctaccatctttcctcttgtatgtgcacatgctcacacatatttttagccccagcatctcttgatgtaacaagttaaaagttcatttctttgtctttaacagagggggagaaatcctgtatcatgtgaatagtactcttgaatttgtaataaaatgtaatgggaagtggatttttgtgggaacatgtttatcaaacagctcttattttttaagggaaatactttagtagaagaaaaatgacatttgcttttctcttaatgtaaagcgtaattttcaatagttaataggagcagtatttttaaagttttggtgggagagatgcttttttggaggttacttacgtttgtagctattggtgaataggaatttgaaatggtatgtatgaatatattttatagtatattgataattagaacataagatgcaaaaagctaattgcaaatttaaaatattaat

SEQ ID NO: 905930 - DNA, 665 bp, Homo sapiens
gtgttggtaatatacttcaaaatgagcaatttcttttttcctgtgagctctctgaactatattttatctaaagatactgtctgaaatttcatattaagctatgggaaaagtcacatatgtcactgttacaggtgacgaattactatgttaaaacttctagtgaaaaggtttccaacattaaattcacattaatgatttatagtcttgtattcacactttacaagtgctttgccatggttaagtaagtctcacccattcttgtaaaagtgaaaacatatctgcttaaaagcctggcaaaatgaagcttagaaaaatcctccttttagaaaatcacataatgtagttcatgaacatgttcgagaagggagcttgaacatgttcattgtctgtttctgtgcttaaataccatagctttgtgaaatatatgtgaatgctcactagtttgtgtgtgtgtgcacgtgcacatgtgtatttatgtgtatataaattagaacaagccattatttttaattatttacattaaaattttcagagggttcaggtataaataaatctgtataagtagtataatatatagtaacartaatgtataacatataagctgtaaattacataacataaatatacattataggtaaaagtatatatacacacagtagttaaat

SEQ ID NO: 905931 - DNA, 568 bp, Homo sapiens
agaaagacaagacaaacagcatctctgtgggccattctccaccctcagcctcaggttttccaaatgccactcctgaattttctggagttttgtgtcgtttccaaacttgtttcgaagaagagctttgaactaatgtagcagaatgcaaagtggaattcttcccagaaacgaattctgtttaactctttgggtttagtggaggtgtcaagtagcttgggacacagtcagaagcacacactgtttatcgtgtggacttgggaaaagtgagcatttgggatcttctgctggtcttgcctgagtccaggcatccatgtaatgcaagctgcctctctgcgaggccagcagggctgcagagccggggctcatggtttgttcacctttgggatctgggaatacagcttcagccaatctcagtgccccacgaagtaacccaccgcctttctggcactccggggtgcctaggatttctctgtccctataggcggctcctctgtatcccagctggyggtcttactgcctcagccccattttcctgggaactgttcctcctcttccaggaatggatttc

SEQ ID NO: 905932 - DNA, 587 bp, Homo sapiens
gatggcatgaaaagtgagacaaattttaaaattaggcagattcagtttttaagtgattttcttgtatacccatacatcatctgcacattaagcacttttctctaattaagccagggaaaatacagagtaaygataatatctgtgaggtcagctgtgatcagaagtgcccacaggctgcatctcttaaaaacagtccatggcacctcaagggacactgcaaagacagtggccgggaatgtaattgagctttaggaaatgattaaagggaagtaaaatcatctccaactcaacattaatgcgtttgatttcccgggtgagaacaggatttgcgtaactgagtggttctttctttctacagtcctggatgtttggaaagccagctcttacagttagctttctttgctttgctaacattatccatcagaaaatcgaaatgcaaacagctcctatttcccaatgaagaactttctctgatttaccttaccatcatcaggcttcaccatctcaccttggaagcgttcaatcttttggtcaatatttctagaccaaaataaagtgctctcaagcctgttctttggaaagtattt

SEQ ID NO: 905933 - DNA, 662 bp, Homo sapiens
acacctaacatggataatagaattctataatcctacaatgaaggaggtattttgtggaatttattccatatgggagagtaaaaagcagagttaacaggggttgtcatccatactcatgattgcattttgtatttttcaagggctcactagagccacaaccttcaaaatagatcaataacattactcagcaactgatatgtaggaggcacttgcaataagaatttctgagtctttatactaactctgtgaggtacatcatattatttagaccatccctacgaggaaactgagactcataattgttcaacggaatgttcaaaatcagaaagctactatattgcaaagtctgaccaggttttctgatctcaagactgatgtaatttctacttgagcaagatgcagcagaaagtgaatgggtttttggagtttggggtcagatgcacctgcttgaaaggctgtctcacttatcacctgtggatctaaggattattctcttaatccctctgaccccatcttcctcttacgtaatttaaattgagtaggtaaaaagttaattttttataaaagcttaaaaattacaccacctgtactatgtaaaaaccctattgaattcccttcctagtatattgaacatmtattatagtacagtaattaaacccata

SEQ ID NO: 905934 - DNA, 515 bp, Homo sapiens
taagcaatgctttagcaagtaggtcttttacagtctgttttagcttacagtccaataattctatgtaggcagatggtagcctaccggcaaatgacagctctgcccattattcctgcaactctcaaattaaaacaataacaaaacactacctactactatctgaacttcagggccttttaaagccatgggggctgtttccttggagctgaaaaatgcaaaacaaacacatcttctgctcaagccgaaaaatcttcttaactcaaaaatctcaaaaaatgtttgccctataaaaatgcattcaaatggtttgtctattccatttatataacaattgtatcactcatatccctcttccaaagcatacatcatactttatggaatttttgaatggatctgaatggctttccaaaactaactggtattatttctacacaaacatagaagttaccatcaagcattactatcttgcctaattacaagttgaaggcagatcytctggcatattcacaaaacat

SEQ ID NO: 905935 - DNA, 616 bp, Homo sapiens
  misc_feature 546, 549: n = A,T,C or G
tagccaggatggtctcatctattgacctcgtgatccgcccgccttggcctcccaaagtgctgagattacaggcatgagccaccrcgcccggcctgtagtggcgtcttttataacccagtcatggagtaaccgccatcagttctgtcatgttctgttgttcactcagatccactttgctacaatgtgagaagtgactatagaatatgaatcccaggagacagggatcactggggttcatctcagagactgcctaccccagaactcaaaaagaatatctttgctttgtatgaaaggagtgtgaaaggggagaaagctgagagagacgctggccagtggccccagttttctcagtgaagtggaaagtaaagtgatgccctgaaagtgagaaggcgggagaggcagactggggagggagagtgaggtttggagtcaccattcaggagcatgggaaaggtggcccttttatgtgtagaatggtcaggtagaatggagagctcagctgaggtgggaaatcaaaaatgtgcagaagcacccagtgtgcctcgntgngtgatttttctctctcaggtgtaatgaagcagaaatgaggacactggatgattggtgtgatccagga

SEQ ID NO: 905936 - DNA, 601 bp, Homo sapiens
caggcaacctagagaatgggagataatttttgcaatctatccatctgacaaagggctaatakccagaatctacaaacaacttaaacaaatttgtaagaaaaaaaccaaacaaccccatcagaaagtgggcaaaggatatgaacaggcacttctcaaaagaagtcatttatgtagcaaacaaacatatgaaaaaatgctcatcactggtccttagagaaatgcaaatcaaaaccacaatgacataccatctcatgccagttagaatggtgatcattaaaaagtcaggaaacaacagatgctagagaggatgtggagaaataggaacgcttttacgctgttggtgggagtgtaaattggttcaaccattgtggaagatggtgtagtgattcctcaaggatctagaactagaaataccatttgacccagcaatcccattattggatatatacccagaggattataaatcatgctactataaagacacttgcacacatatgtttattgcagcactgttcacaatagcaaagacttggaaccaacccaaaagcccatcaatgatagactggataaacaaaatgtggcacatatacaccatggaata

SEQ ID NO: 905937 - DNA, 588 bp, Homo sapiens
tgcttctcatgtatctgagggagtttgggcatttatcttaagctgggatctcctggtacctcccccagtactaaacctacctccttcaaagtagctcccccaactcagatcagtacccccagcaaaacyggatttgtttgtttttgataaaaaaggaaagtgaccttgcaattcttcagaaaggaaagattgctatttatagctagagataagaaaattgttagtgaaaagctggatggtttttgttaaggtccaagatgatcctttccctaaactaccacgggtgatgtctaaacagtgggactcagagattgaaagaatatgtctcaactcaagcattctctgtttaaaacaaggactctgtagtcttggctgtgcatcttttaaaaattgttcctttatttttttattagtagactttgttttttagaactgtatgtctttttaataagcatttctctagaaattgtggctgtgttttctgtttgttatgcaagttgtctatcaaaaaccaaacagagtagttcttttattttggatgtgcaactgtaaatgcattagtattcctttgagagatttagaaaggat

SEQ ID NO: 905938 - DNA, 660 bp, Homo sapiens
tagaaaacctattccatataaattggattataacaggtttgtggcaaaccaaaacraaaataagtcaagaggaatgttttcaagataaagagtttatcctttaggcttttgttgtatgtgacttcccagcataaccttttgtgcctcattgaagttttaatttgcctaaagtaatatcaaaaagtgtattacttttattactaccttcctttttatggtgatgaagatgtttttgatgattccttgatttagtaattggaagcataatttcatgtgaaatgtaaattgctactctcacataaatatacatatatcagatttatccaggattcatatcacttcagagaagaaagagacagcacagggtaaatgaatgaggagaaatggtaatttaccaatcaattaacttgggcacatttttttcatacttatgtgagctcattttattccataaatagtttatcagtaatgcattttcttaattcatttttgcaatggaatataatataattccattgtggaaaatttggaaatcaaaaataagcacaaggaaaaaaataaaaataatctaccatgttaacatttagatatatccactataaaaattggtttattgccaactcacatatgtatgtgtattttgaaagtaattccatcagt

SEQ ID NO: 905939 - DNA, 655 bp, Homo sapiens
tgttccattgtgtggatgtctcagtttgtttatccatgtgcctattgaaggacatcttggttgcttctaagctttggcagcaattagtaaagctgctataaacacccatggagggctttttgtgcacataaatttcagccaatttgggtaaataacaaggagcatgaatgctggagagtatggtaagagtgtatttagttttgtgagaaactgcaaaactgtcttccatagtggctgttccattttgaactcccaccagcaatgagtgagagttcaggtttttccacatcctctatagcattttgctgttgttacgtttttgaattttagccattctgacaggtgtatagtggtatcttttggtgtgtgtgggtgcgtgtgtgtgtttaagagatggagtcttgataggttgcccaggttagccgcaaactcctgggctcaagcagtcctcctgctttaacctcctgggactacaggtatggactcctgtgcctggcttttactgttgttttaatttgcaaatctttaatgcagatatatagataaatagatacatatacagagagcgaaagagcgcatcwgtccaaatgcctacttgcccctctatatatctctagtaaggtgtctgttcagatcttttgctcttttgtttttt

SEQ ID NO: 905940 - DNA, 574 bp, Homo sapiens
ataattttcaagtatttccttatatttctttagcatatctaaattgattatttatgctttgtattttgtagtcagagtttcaggtttcttcccctcaccccrtattctttgccctctctacacctttggatttcttcattatttactaattttcgatattgtatttagccatattattttctttttttttttttttttttttgagatggagtctcgctctgttgcccaggctggagtgcagtggcgccatctcagctcactgcaagctctgcctcccgggttcacgccattctcctgcctcagcctcccgagtagctgggactccaggcgcctgccaccatgcccagctaattttttgtatttttagtagagacagggtttcaccgtgttacccaggatggtctcgatctcctgacctcgtgatccacctgccttggcctcccaaagtgctgggattacaggcataagccacagcacccagtccatattttcttttaaagtaaaatttcaatagtgatcttagtgaaaattcaatcatctaccagattacctaaacctgatttaagttttaacc

SEQ ID NO: 905941 - DNA, 567 bp, Homo sapiens
cttcccagaaaggcaaagccagagcagagcccctcccttttggttattgttccagctcactgagtattggccctgagacgtaaacggtttctttcctcttttccaacttcatggtttacattcattttattaggctacctctggccctctcagttctctgaagctagtgatcctaaatatctatggcgtctgggcatgggggtgcttttcatccccgcttcctactgcaacaacccctgcaatcccctctgcagccccaagcaaggagatccgtgtcgtcaggagtgcggtgcagccacacatccaaggctgacagggcaggcactctgccaagtcctgcgcgctgctcgccttccacaacaccttcctcagcttcgtctgtatttgaagagcttagtaaattaatttcccaggggcagagaagggaggaagagggagtgtctgagggctgaaaaatgcagtcgactcgccctctgctggttaaagatccgaatttgtcgccgccaaaacarcggggaatgagaaagcaatccatatggtacggaaaaattacaacaaaaactcggc

SEQ ID NO: 905942 - DNA, 659 bp, Homo sapiens
cttaggaaataatgaaaaaaccctaagaagcttttgaggaggatrgagtctgtttaatactggtgtgttaaggcttagtggtggctgcagcctgggaaggagggtaagccatcatgtttgtggtatgatatatttaaaataaatctcctattcccacctttggacagtgatttcctgccttctcactggaagtaagtggcaacagttcagattgcgggtatagttttcatcacaggtaacagtcaaggcaatttaaaaaatctgcttgggtcaaaaatttatattaattaactgtatactgactagccttggacattcaccctccccttcccctcacctcaaatcccattgttggtgaattataatttacagtaactctttcatgtaatgctttttttctggaaaaaggtgaatggaaggtaaaatccaaacctgaagaattgtttgattagggggctatgagacagtagtgattaactggaattccctggcatttaggaaattccaccatagactgcaccctctccattcttctctatctcatcttggttgacaaggactagatctagtccatgtctcttcttcatacacattatcagaaagaatagttgataatattggctcaaaataagtaggtatatttgaaagtaaacctactt

SEQ ID NO: 905943 - DNA, 591 bp, Homo sapiens
tcatttgatgccctctgaattccattttgcaagatttgatttccttcaagtgtggttgatgctgtggctgtcactgctytctccatggaaatgagaaagcctgtacttagtccatcatggagtagattgcttctctcttctctataacttattcaaagcagtgagagtttgtgttccaaacccgggttgtgcctcagccccatccaaagatgtctccaattactcaattgatttcttattgtgcatctactctatgcttcaaactgggtcagatctaagagtaatgatatttccgggactatagaatatattagaagtaatttgagaacaacatgggatagcgtatggtgaaggatcacacaaaagaatacaaacaacagttcaaagaaagcaagggtaaattagctagcatcactgcaataggcttgaggatacaaacaggattaaatttcagctagccccaaagaacacagctattatggctataaaaaattctccaaagtgcctccctcttccctcaccctcaaaaataaagctaaataataaaaagatataaatgatgatttatttaattttttacataaacatatg

SEQ ID NO: 905944 - DNA, 632 bp, Homo sapiens
acataatggtaaagggaccaattcaacaagagctaactatcctaaatatacatgcayccaatacaggagcacccagattcataaagcaagtccttagagacctacaaagagacttagacttagagacctacaaagagacttagactcccacacaataataatgggagactttaacaccccactgtcaatattagacagatcaaggagacagaaggttaacaaggatatccaggacttgaattcagctctgcaccaagcaaacctattagacatctacagaactcttcaccccaaatcaacagaagatacattcttctcagcaccacatcacacttattctaaaattgaacacataattggaagtaaagcactcctcagcaaatgtaaaagaacggaaatcacaacaaactgtctctcagaccacagtgcaatcaaattagaatttaggattaagaaactcactcaaaaccacacaactatatggaaactgaacaacttgctcctgaatgactactgggtacataacgaaatgaaggcagaaataaaggcgttctttgaaaccagtgagaagaaagacacaatgtaccagaatctctgggacacatttaaagcagcatgtagagggaaattta

SEQ ID NO: 905945 - DNA, 556 bp, Homo sapiens
ctttgtggtttttataattctaaattttgtcttgaggtaaaagatgtagaagartcatggttattttagttgatttctgctcatgtctggatacaaatagaaaaaaaaatgtactagggaagaggttagaaccattactattggtggatcaattagatgtaccttacaatacaacctagataggtggggatctgagagcagactgtgagttgctcaaaattagaattgaaaaagcaaattcactcataccaccatgtaaaaaattggtgacaatttatttattttttatattgagctgacatgcaataattgtacataattgtgggttacagagtgatattttgaaacaaatatacaatatgtaatgatcaaatcagggtaattagcatatctgtcaacccaagtacttatcatttcttcatgttgttaacattcaaattcctctcttctagcttttggaaaatatacactaaatgattgttaacaatgtttaccttacactgctacaaaacactggaagttttttcttccatctagctgtaactttgtgttcatt

SEQ ID NO: 905946 - DNA, 556 bp, Homo sapiens
ctttgtggtttttataattctaaattttgtcttgaggtaaaagatgtagaagaatcatggttattttagytgatttctgctcatgtctggatacaaatagaaaaaaaaatgtactagggaagaggttagaaccattactattggtggatcaattagatgtaccttacaatacaacctagataggtggggatctgagagcagactgtgagttgctcaaaattagaattgaaaaagcaaattcactcataccaccatgtaaaaaattggtgacaatttatttattttttatattgagctgacatgcaataattgtacataattgtgggttacagagtgatattttgaaacaaatatacaatatgtaatgatcaaatcagggtaattagcatatctgtcaacccaagtacttatcatttcttcatgttgttaacattcaaattcctctcttctagcttttggaaaatatacactaaatgattgttaacaatgtttaccttacactgctacaaaacactggaagttttttcttccatctagctgtaactttgtgttcatt

SEQ ID NO: 905947 - DNA, 562 bp, Homo sapiens
ccccactgtatacaaggccaaaccaaggtctcaagatcttaattgatttacttaaattagcaataaaaataggttgaaaactcaagacaacagattctttatttcacaggagacgctagaaaagttaatgtgattctcataaaataaacctgattacagctacaagataccaatgtggaatttccttgacagatttggaaacaaagtcatatttacctattcatcactctgaacctacccttctgtgtgcttttgccttaatttagaaagcataaaaaataatactaatgggcaaatatatctaatctactatcattagaaacttatttaggaagtttaggacttaaaagtcatagtacataaaatggaccacataaaatatcgacatataaaatttcaaaagatagtatatataaggtgtaaacacaaatataatcaagaataraaataatttttttaacaaaataaagagaatctagaagatccctatagtaggcatcatacttagcggtaagtatgaaaatgaaaagaaattctttttaaaaccaggggaaaaaaccca

SEQ ID NO: 905948 - DNA, 567 bp, Homo sapiens
agaatttcaagtctggccaaactaaamttcataagcaaaggagaaataaaatcctttcagacaagtaaatgctgagggaatttgttactaaccaacctgctttaaaatatctcctgaaggaagcattaaatatggaaaggaaagactgttaccagccactataaaaacacattgaagtacacagaccagtgacactacaaagccaacacataggaaaatctgcaaaataaccagccaacatcatgaagacaagatcaaatccaaacatgtcaatactaactttaaatgtaaatgagctaaatccccaattaaaaaacacagggtcacaagctggataaagaaacaagacccgttagtatgctgtcttcaagagacccatctcatgtgcagtgacacacataggctcaaaataaagggatggaggaaaatctaccaagaaaatggaaaacagaaaaaagcaggggttgcaattctagtttctgacaaacagactttaaaccaacaaaaataaaaaaatgacaaagaaggacactacataatggtaaagggttaaattcaacaagaaga

SEQ ID NO: 905949 - DNA, 585 bp, Homo sapiens
gttgagccctcaacaacagaggatagaaaagaatgtcatcaatatgtttgggtatgaatggatatttttgtrtaatatgcaggtatcacacagagatctggtaagtaatcttgtactgtcacttcggtgttttcacatgccttccaaaatcaacttgaactcttccaaaataggacactcaattaatgtataattaattgtctgttttgatatcattttgatatcattttgtttcttccttcaacgcctctacaaaaccaacacaccttctggcttttttaaaagtagcatactcctatgaagatgcataaatccttcatattagtgtttgcctagctgatttttgttgctcattagtgaagcaggaacccaagtaagtgggttgtgctcactgtttttaaatttgcattttaataaagaatagactggaaaagaacatagcagaataaaacaatacaatagaacacagtgccatagagataaaatatcataggaaattactcaggtgctttgcaagaattacacatattgcagcaagtgctgtgggaaatttgtaagtgtgaagtaagccagccagtaaatgag

SEQ ID NO: 905950 - DNA, 565 bp, Homo sapiens
tgggttttttcccctggttttaaaaagaatttcttttcattttcatacttaccgctaagtatgatgcctactatagggatcttctagattctctttattttgttaaaaaaattatttytattcttgattatatttgtgtttacaccttatatatactatcttttgaaattttatatgtcgatattttatgtggtccattttatgtactatgacttttaagtcctaaacttcctaaataagtttctaatgatagtagattagatatatttgcccattagtattattttttatgctttctaaattaaggcaaaagcacacagaagggtaggttcagagtgatgaataggtaaatatgactttgtttccaaatctgtcaaggaaattccacattggtatcttgtagctgtaatcaggtttattttatgagaatcacattaacttttctagcgtctcctgtgaaataaagaatctgttgtcttgagttttcaacctatttttattgctaatttaagtaaatcaattaagatcttgagaccttggtttggccttgtatacagtgggggac

SEQ ID NO: 905951 - DNA, 665 bp, Homo sapiens
cactctcttctggcttgtagagtttctgccgagagatcagctgttagtctgatgggcttccctttgtgggtaacccgacctttctctctggctgcccttaacgttttttccttcatttcaactttggtgaatctgacaattatgtgtcttggagttgctcttctcgaggagtagctttgtgttgttctctgtatttcctgaatctgaatgttggcctcccttgctagattggggaagttctcctggacaatatcctgcagagtgttttttaacttggttccattctccccgtcactttcaggtacaccaatcagatgtagatttggtcttttcacatagtcccatatttcttgaagactttgttcatttatttttattctttttaaacttcccttctcacttcctttcattcatttgatcttccatcactgatatcctttcttccagttggtcaaatcggctactgaggcttgtgcattcattacgtacttctcgtgccttggttttcagctccatcaggtcctttaaggacttctctgcattggttattctagttagcctttcatctaattttttttcaaggtttttaacttttttgccatgggttcaawcttcctcctttagcttggagtagtttgatcatctgaagcattcttctctcaact

SEQ ID NO: 905952 - DNA, 585 bp, Homo sapiens
agtctctttgtaggtctcttagaactttctttatgagtctgggtgctcctgtattgggtgcatatatatttaggatagttagctcttcctgttgaattgatccctttaccattatgtaatggccttctttgtctcttttgatctttgttggtttaaagtctgttttatcagagaccatgattgcaacccttgattttttttaactttccatttgcttggtaggtcttcctccatccctttattttgaggatatgtgtgtctttgcatgtgagatgggtctcctgaatacagcacactgatgggtcttgactctttatccaattcgccagtctgtgtctttcaactggggcatttagcccatttacatttaaggttaatattgttatgtgtgaatttgatcctgtaattatgttgctagctggttatttcacccattaattgatgcagttacttcatagcatcaattgtctttatgatttggcatgtttttacagtggctggtaccrgttggtcctatttatgtttagtgcttccttcaggagctcttgtaaggcaggcctggtggtgacaaagtctctcagcatt

SEQ ID NO: 905953 - DNA, 596 bp, Homo sapiens
aagatatcctgatattaatattaataacatggaaggacctgctacggttctctagatttttwtttgattttcttctcttgattccaatattcagcctgattttcactctgagatggcatttggataacttcagatgttgtttcccaacagggaatacaaagacttcacagggacggtccttgttggctgccgctcttactaggagccagccaggtaccctgtgccctttcttttagctcatcgttgggcagagattgggctcagggcttggtcttgggttctaaatcccgacactaccgtggtggctctatatagccttggtcagtttcctcttcaagcttcagtttattccttctaaaatggggatgataatcctaggtacctcatagggttgtcatgaagactaaagaaatgatatgtgtaagggatttagcgtagagactggcacatactacatgatccgtaatcactatttttattgttatccccttcacctttcaggatcagaacacaacatgatgcttatctgtgttggatgatatatggttcccatcagtaacggctgaactgtgaatattgatgcttccgattttaca

SEQ ID NO: 905954 - DNA, 572 bp, Homo sapiens
cattaggtgaaaatatgagccccataatgcaaactacgcattataaatcttgaattactgtggtaatttaagagtttattatatataaaatctacaatttctagataacaagttggtaaaatgccagaaacttaaacctagagttgtgggatattcttctctttatcaacattgactgacttatggatgagtttaatgaagaaacagcctgtttcacaactttatattttagaatcaaagaatgacatctacataggtaatacgattaacatgctattcatgtatcattagcctggctcatcaaccaagttatttagagaactttatataaatatagggtccctggccctgggctcagagcagtgggtctagaatgagcactaaaaatctgaatgcacagccaactagaggaattacagctccacagaattcaaaatcccagcacattacrggctccatggacaggaaaggtctccagacacttgcttcatccatcttcctctgaggatgagacatcactgaagcagccttctcagattaatttcatacctctgtaaatgattttcattctc

SEQ ID NO: 905955 - DNA, 577 bp, Homo sapiens
aagcagagatttttgaaaatgaaagtataactccacagggtgagagcagggctgagcataggggctcaagagcccagttccagaattttctggggttaaataccctctagaggtttcccatcagccacttggtgtacacccaatgcaaatgaaatagtggccaaaaatctgattgtaacctttgtcactccacttcagcctctgattggttgtggaaagcaaccaatcagaggctgaagttacaaaggttacatcctatgcaaatgtctgattggttgtagaaagcaaccaatcagaggctaaagtgaatttccaaagttacacctctgtgcaaacaaagacttggcccacaatcagtctgattggttgtggaaagcaaccaatcagaggtattttcaattttccatctggcacacagaaaagggagtgggaatttgcaaagggagtaggctctggtccttttgttacttaggtgtgaaaagttgaggtttttcttttgatttagtcctaggaagtcagtgtgaattggccttaggttccccgcygccagaccctattctcctgcctcagttcctaa

SEQ ID NO: 905956 - DNA, 603 bp, Homo sapiens
tgcccagtccatgactgctgcccagtggtccatatttatctcactgctgccaacatgagggcccaatgactggctcatctggtgtcatagttctcagcataactttaccaaagcctccactaataatcacactctaaactactgaggaaatcacagacaccacgggacatgtttacaagcaaagaaatcacgtggcgactaaacttctgtttggaggcagcatcgaaaccaaagtgacctatgcaatcaacattgtagatacaactttggggaaaattcctgccctatgaaggcaaatccaacaaactgcaagaagtgaatgttacaccagatggttagatatcaatgtagagatgcagaaaaatgcaaaagcaagagaaatataataaatctaaagggatatattccaatgaaaataaatttataaaatcccaggaaaataatttttagaattcttaaaacagatattaaagaagctaattgagaaaaagtgtgttgtataatacacttaaaaagacaaataaatcagaaaaaaaaccaggatatgaataamctatgaaagagacaggtataaaattaacagatcttaaattctgcaactga

SEQ ID NO: 905957 - DNA, 631 bp, Homo sapiens
acaatcctaaatatatatgcaaccaatacaggagcactcagattcataaaacaagttcttagagacctayaaagaaacttacaccctcacaaaataatagtgggagactttaacaccccactgtcaatataagacaggttattgagaccaatattcctaatgaacatcaatgcaaaaatcctcaatacaatattggccaacaatatccagcagcacatcagaaagcttatccaccaccatcaagttggcttcattcctgggatgcaaggctggttcaacatacacaatcactaaatgtaattcagcacataaacataactaaggcaaaaatcatatgtttatctcaatagatgcagaaatggtcttcaacaaaattcaatatcccttcatgttaaaaactctcaataaactagatattgatggaatatatctaaaaatagtaagagccagtcatgacaaacccacagccaatatcatagtgaatgggcaaaagctgggaacattcccctcgaaaattggcacaaggcaagtctattcaacatagtattggaagctctgttgagggcgatcaggcaagaaaaagaaataaagcatatttaaatggaaagagaggaagtcaaactgtttctgt

SEQ ID NO: 905958 - DNA, 579 bp, Homo sapiens
gaacccagtgctcagaggcaacaggcagccaactcatcttagctctcctccttttgaaaaatttctatagcagaggttctgagttgtgaaactgcgctgtgcattcaaatcacctgagcagcatatgcaaatyacagtggcaggggtccaccccagagaaatcaagccagaagatctaggtggagccaggagccagggctctacaggcagggaaccctggagataacaccggcagttcttgctgtcagacccaaacagatccaccctgcttactccgaatccatagtgttgtcatttcattgtgagcagcttatctccttaacaattactgcatgtaatgggcactaactacatgtttattgtacatgtgatcacacaaaataaaaatgcaaacaaaaaatgaaactttaatacagggcttattttatcaaggctaggactagggtgtggcaagagaggagccagaagaatccatataaagatgcccttgatctcaggatggtgcaaggcctaacattatacttgcacaacactgaaactcatcacttcctttaaaagcatgccctaggtgcctccctt

SEQ ID NO: 905959 - DNA, 552 bp, Homo sapiens
gcctcccaagactaaaccaggaagaagttaaatacctgaatagaccaataacagcttctgaaattgaagcaataattaayagcttaccaaccaaaaaaagtcctggaccagatgcattcacagcccaattctaccagaggtacaaagagaagctggtaccattccttctgaaactattccaatcaatagaaaaagagggaatcctccctaattcattttatgaggccagcatcatcctgataccaaagcctggcagagacacaacaaaaaaagataatttagaccaatatccctgatgaacataaatgcaaaaatcctcaatgaaatactggcaaactgaatccagcagcacatcaaaaagcttatccaccacgatcaagttggcttcatccctgggatgcaaggctggttcaacatatgcaaatcaataaacggaatccatcatataaacagaagcaaagacaaaaaccacatgattatctcaatagatgcagaaaaggccttttacaaaattcaacagccattcatgctaaaaactctcaataaactagg

SEQ ID NO: 905960 - DNA, 665 bp, Homo sapiens
aggtgcaaaagagatagaaaactgccaacacaaaacttaaactgattgccacatctcrtatctcatggtttagctttcctattccatttaaattgaaaacggtcttttcattaaaaaaaaaattggcaactttttgaaagtgctcagttctttgcacagtgaatagaattcccctaacctcttaattcatgccatgaaaatagacatgggttttattgtcactaagattcaggaatgaattctttaaaaaaaaaaaaaaccctgttaaggagttatatgatccagaaaaatttaaattgcctcaagtacagaaatgtaattcagttgttgtctaaattactcaaatatcagttaataagaaaagtatatgaaagctagaaagttacttaagagtagtcataaaatttttagtctaagttctccactccttagcatatcacaccaacagataagtttgtcagattggccgatttaggtagaaagcaaatgtaaaatacctcactcataaaggatgcttgatacatttttgttcttatacctagaccaaaagaaaacttgggtttattcctatctctgtcccatcctaaatgtgtacctatgggcaagttgattacgttctttggttcacaatcaatatggtaatcttaaactaccttttagttaca

SEQ ID NO: 905961 - DNA, 613 bp, Homo sapiens
ccacattttgatattttcagacaaatgggatatgtctgaatcccattttagccagtttggttggcatgtaactttatcccattatagctttaatttgcattttcttaataactaatgaaattgagtgccttatacatttattggccatcctaggtatcctgggttctgaagtatctaagtttttagttcatttttcactgttctcccaagcatagtctttcaattcctgttttacactttcacctgttgtggggttttgttttgtttgttttttgtttgtttttttggggtttttttttctttgtttgctgtgtcacccaggctagagtgcagtggcatgatcttggctcactgcaaccacatcccaggctcaagcaatcctcccacctcagcctcccaagtagccaggatcacaggcgtgtaccaccatggccagctaattttttgtatttttagtagaggtggggtttccccatgttgtccaggctggtcttgaactcctgagttcacaggwtctgcctgcctcagcatcccaaagtgctgggattgcaggcatgagccactgcacctggccacacttttgcctttttcttttcccctatgtaaacaaaag

SEQ ID NO: 905962 - DNA, 595 bp, Homo sapiens
ggtggaagtggggtgagggctgagaaattacttaataggtataatgtaaattatatgwgtgatggttacactgaaaagcctagacttcaccactttgcaatatacccaggcaacaaaactgcacttatacccttaaatttatacaaataaaaagatgtttaaaaaccctcaaaacccaaatgcattaacatgtgatgacatttccttatagaagcaaaatgaaagtcactctcataatgaaatctgactgcttatttgagttggtggggggaggtggaaaagtggtgagcaagaaaagcagaagcagctgatggagtagtttgcacaatttcccactaaattgaaacaacaaataataaaatggttattgcactcaattgggaggcatcaaatagattattgtaaggtaaatattataatagtgaggctctcaggcagaatcaattccccaacaaccgggagaggttttgtcttaggtcacaaatgcatgtcctccacaaaacaaggccctcatatgctaagtgagggagaaagcattaggtggagaagcactttcaaagagagggcaattgaattttgaacagcaatgaaacaa

SEQ ID NO: 905963 - DNA, 593 bp, Homo sapiens
gtcttcttctgagccctccaaactgttccagcctttacctgttacccagctccaaagtcacttccacatttttgggaatcttttcagcagyacctcacttctggtatcaatttactgtattagtccattctcatgctgctaataaagacatacttgagactgagtttaattgactcacagttccacatggctcaggaggcctcacaataatggcggaaggtgaatgaggagcaaagtcatatcttacttgatggcaggcaaagagagtttatgcaggctaactcccctttatgaaaccatcagatctcacgaaacttattcactgtcacgagagcagtatgggggaagccagccccatgattcaattatctccatctggccctgcctttgacatttgggtataattaaaattcaagggccaggtgcaggtggctcatgcttataatcccagcactctgggagactgaggcaagtggatcacaaggtcaggagtttgagaccagcctggccagcatggtgaaaccccgtctctactaaagatacaaaaaattagccaggcatggtggtgcacacgtgtaatctctgctattcag

SEQ ID NO: 905964 - DNA, 598 bp, Homo sapiens
aattgatgtgacagataacagtttttcaaaataatcacaacagtgtattcaaatatatattaaatatataaacatttatttacgcttacatataagtaaagtgagtgacagcgatgacacaaggaacacaagggaaatattagggacattttataattatacggtacttgcacaatctgtgaagtagtatagtgttatttgaaagtgcacatgaattcgttctaaatgtatgtttcaaactctagggaaatcactttaaaaagtgagaagagtagcacaattgatatgctaaaaaggagaaaaaatgaattataaaatgctcagttgaaaccataaatagcagttaaagtgtgggagactaaaaaaaaaaaagaacagggcaacaaatataaaacagtaacagatatggtagatattaatccaactatatcaataatcaagttaaacatcaatgctttaaatgcatcagttacaagatagatattgccagagtggttaaaaaataaaaacccaacctatatttgtctgaaagaatctactttaaatacaaaagacatacaggttaaaagttaaagatgraagaaaggtacgccatgct

SEQ ID NO: 905965 - DNA, 593 bp, Homo sapiens
tgcaagcctcagtttcctcattgayataacagagattaaaatgtgacctaattgggatgatttgagaatgataattaccagctcactctacatagctatggtacaaatgttgacagtttcctggccttcacaaaaagcacaatttagtgagcagctagaaatttgtgtgggattttggtgcctaaatcccctcctccattgtggatttgtggacttaaggggctacgggcacaatgaagccataattatggggaaacatagtatcaattatattcttagttcaggcatgactccataacttcctttatagcactaaagagactgtggtggagctgtggctgtcttcctcatctctcctctttaaatctccagcagttgggcctgaatggtcctcttcccagatcagctgcatggatgaggcaggctggtctgaagagtgcactgataactagaagctcattactttttagcacagtgtgtgccatccattagggaatcgtggcccattgaatgttcagcagctccactgtttgctcctgaaaaggagttaatcatgtggtaggtggggaggggcagaagcacagagcacagag

SEQ ID NO: 905966 - DNA, 586 bp, Homo sapiens
ctctctgattcttgcagcatcaattgcaggtgtgacacctttcattcatttacattgggacagactaatgctgtagacataacactgcacttggagaccagctagttgcattcttactgtaatcatggagaatatacctaaactctttaaacttttttttcacaagtaaaacatttaataacaatctaaaagttaattttttttttttttttttttttttgagatggagtttcactcttgtcgcccaggctgtagtgcaatggtacgttcttggctcactgcaacctctgcctcttgggttcaagcaattctcctgcctcagctatccagtagctgggattacaggtgcctgccaccatgcccagctaattttttttttttttttgtatttttagtagagacagggtttcaccatgttggccaggctgagttaattttatttttgtgactcactcatctactatttatagggcaaccaccaaatgcctagtgatatctctgtgctgggatatgtatgaagtggaatacaacactgtccctctattttaraactttgaattctactgctggttccgctctgaccaga

SEQ ID NO: 905967 - DNA, 650 bp, Homo sapiens
tttcttttgacttatttttatccatgtgtgggttatattcggtgagttttgcattattctcttttgttgaaaactatattttaaggagtacartgtggcagctctgacagccagctaaccaccaggatttgttgtgctttgtattactggtgctgttgctgtttgtttctttagtgactttcctagactaattctatgacgatgatattatttgttatatgtggctactaaaatctctgcttagttatcttagtagttaggtaattattaaaaacagattttattcgatattttgaaacaataattctcccagccattaccaaggggctctgtgtatgcattggggcatgtcttcagcggtccagagggaagtttacaagtcttccttatctttcacttcctgcttacacagagcctcaaaatcagttagtggtaggtgaatagagttttcttattcttccttggatatgtgcatagtcctgcacatgtatatggccttctatattttcaggaatatgttggaacttttcaaagccctctatgggcatcttattccttagtttttcatatatctatatctatatctaatctatatataatttctgttgttgcctccaactgatatcactgtcttgggaacctgcaatgac

SEQ ID NO: 905968 - DNA, 642 bp, Homo sapiens
aataagccaggcacagaaagacaaataccacatgatcttacataccacatgtggaatctaaaaatagctgaactcatagaagcagagattaaaacagtggttaccaggagctgtgggagacacrggtggtgatattggaaagatgttggtcaagtgatacaaaatatcagttggacagaaggaataagttcaagagatctattgtatatcatggtgactatagttaataacaatgcattgtgtacttaaaaatttccaagatagtagattttaaagtgttttcaccactaataaatgataaatatgcgaggtaatgcacaggataacttgacttagccatttcacaacgtatgcatatgtcataacatgttgtacaccacaaatatatacaattttaaaaataatgaaaaaagaattgacttttaaaacattttcctagactttacattttgtgtgcataggaactgggcctttctaaaatataagtgctcagaaaatttctgcttcattactatttctattaatattggactttttctctgaaaacaaggcaaagtgactgttttggaagacacattaggatcataaatgatttgcaacaaaaaagaatcaaactggactagtgcataatcactaaaagag

SEQ ID NO: 905969 - DNA, 620 bp, Homo sapiens
atttttgctcaggattgcattggctatttgggctcttttttggttccatatgaattttatgactgatgtttctatttctataaaaaatgtcattggtattttaatagggattgcactgaatatgtagattgctttaggtagtatgttcattttaacagtactaattcttcctggctattattaaaaagtcaaaaaaatcacagatgctggtgaggttgaggagaaaaaggaacacttatatactgttggtggaattagttcaatcattgtggaaagcagtgtggtgattcctcagagagctaaaaatagagctgccatttggcccagcaatcccattactggggtatatccagataaacataaattgttctatcataaagacacatgcacacatatgttcaatgcaacactatttgcaatagcaaaggcatggaatcaacctaaatgcccatcagtgctagattgaataaagaaaatgtggtacatacataccacggaatacwatgcagccttaaaaaagagtgagatcatgtcatttgcaggagcataaatggagctggaggccattatcgttaacaaagtaacacaggaacaaaaaaccaaaaactgcatgttcccac

SEQ ID NO: 905970 - DNA, 611 bp, Homo sapiens
ctttttctatacaacatcacaagcatctgttattttttgagtttttaataatggccattctgactggtgtgagatggtatctctttgtggatttraccagtgatgtaaacctttttttcatatagtggtttgccacatatagttttcttttgaaaagtgtaacaactttttaaatacttgaacttttcattgattatcttatttgtctaagctactattttgaaaaatcatgatttccttatatacctaattatgaaattaaggaaatgaaatatgagtattctatttacatcagtctgagtagttcttgttacttaacatcccttgttcttctcattgttaatctctttagatttctaacattctatgacttttgagttccactcatggaataagatattttcttcactgtaacaggttctgtggagatttgatgggaataaaccagatactttaggactcaatactcggctgtacaagtggataccccagaatgatcttcttggtaagtctctgaagaacaaatactgaatatattagtaacagattattaaagtgttaatagttatcatgaaacaagcttactgaacatttgttatggaaaaacttaa

SEQ ID NO: 905971 - DNA, 660 bp, Homo sapiens
aatgtgagtgccctgaagacagttggctccaaaaagagaatagaaagacaggctgaacagaacaggcttaactcctcccaaactctccatcagatcactcatttcatctgaaggctaagtcagtggcttaaaagaccaggtacgttactcaccctgagatcttttcacagggaaacatgaagccaagggaaaagagattccctttgccccagtgcaagttcctttccccacctagtgctaaacattttttaagtaaaaatgttcttagtggaaacccaacagtctgaaataattaatttgccttggtaagtttttaagttaatactaagaagtgatttgaatattagagaaatttcactcattaatttcttatattaagccatatttccaccagcatggatcctttgaaattagccttatctgtatggtaatccaaaagctaaaaagcaatacacacacacactgttaggttgctcagtccattttatatgtattaacattattaaaaaaaaaaaactttctcaagcatcccacccccgtacagtatcataaaacttgctttgtgtatacagagcttttcttrttcctagaatgtcccctacaccaccatgcatgacctccttaggtcacgaggtcctttgtaggctacgccaatattct

SEQ ID NO: 905972 - DNA, 672 bp, Homo sapiens
tatgcataaagagatacttgtgttatagtctccaaaatattaacagatgatgagattgctactttcttttctgtgacttttttttccgaaaacaaaacaaatctataaaaataaatctaaactacttgtttttcaaaagttaaatataactgggaaaagaataaaacttacataatatatgcacactcaaacatacacatacacacaaaccctgtaagttaaataactcttaagaataggaagacactagctgttactgacatttaccatatgcctgccaatttccaacaggaccatattttataaaattagccatattatgtttaccttatacatgtaataggatttattgcctcccaacatcgagattgttaagcaatatcagtatatatttataatatataggataattatgatcctaaaataggtcttataatttttaaaaataattcaaaaatcaattgcaaaagttaaatgtgtgtatgtgtgtgttcagcatgtgtgtttttacaagagcacaaatccatttttatttatttttattatttttaatccttaaggggtacrgtatcatacagattctgtgtccaatggccttagccaaaagattgctttggaatttggcacaaaccatgccattgtttccatgcactggagttacctttctcaaga

SEQ ID NO: 905973 - DNA, 586 bp, Homo sapiens
aaactctcaataaaccaggtattratgtaacatgtctcaaaataataagaactatttatgacaaacctacagtcaatatcatattgaatggacaaagctggaagcattccctctgaaaactggtacaaaacaaggatgccctctctcacaactcatattcaacatagtactggaagttctggcttgggcaatcaggcaatagaaagaaaaggtattcaaataggaagagaggaagtcaagttgtctctgtttgcagatgacaaatagaaaatctaaatgattttatattagaaaaccccatcatctcagcctcaaaacttttgaactgataatcaacttcagcaaagtctcaggatacaaaatcagtgcaaaaatcacaagcattcctttacaccaacaatagacaagcagagagccaaatcatgaataaactcccattcatgatcactacaatgagaataaaatacctaggaatacagctaacaaggaatgtgagggaccttttcaaagagagctaaaaaccacggctcagggaaataagagaggaaacaaataaatggaaaaacattccatcctcacagatagg

SEQ ID NO: 905974 - DNA, 584 bp, Homo sapiens
agttgtgattaattaaattttcacttagttatgtcataattttttgacccataaatagtagtgtgttaatttgtgtcatgcaaaattaagcactttggagctttataattatttcaaatgtaaaagttccatgatgtcttcaaggctccatcgtgtgatctgacctcatctatgagaccacccaaagaaagaactgttttcagcattttgagttcccaaggatctttatgtaaatgatcatcttttgccaaaaattcagataatttacatgccaaactcttagggcacttgtaaaataagatttatgggtcatctgagccaaatcttaggacctacataacagttacttattagcacagaaagctagggatgtaaaagcatttattcaataaaaattcaacaccaacagtgtgctaagcatagtgtaaggtattgctatccagcaggatattctgtcgtatttgaaagaataaccccattaaatataatgtgtatgtcgcttatattggccctaatattatataattttgaatattctrgaaagtttcgtatttttccttttttccaaattagaattatgaagt

SEQ ID NO: 905975 - DNA, 609 bp, Homo sapiens
cttgcctccggctagagaataaacaaatgacatgattctagaattatggcaccttggtctcttagcctttcaatttcctagcttctactagagcttactcagtatggtaggctattgttgaatctatataaatccccatatggtggcacgtatctccaaaatcctattaatttatttactcattcaacaattgtgagtaccttctacacagcatgctcaattctgggtgtctggggtgtaaagatgaaagatatatcctctgttcttaaacagagtccaaggagaaaaacagataaggaaacatactaggtatgatagtgttgtcatattccaacctccagagactgagaaagacttcccagaggaagtgacacagagaacatagaacagaataaaacagagaaaagagagaagaatagaatcactaacactgatggcttgctgcaagtgatagaatttttctaagtaattgatgtgaattaactcatgtaatactcacaacaatcctatgagttatgaccgttattatttctatttgaaaaatgagggaaccgaagcatrgtgaggtcacacatctttcaagtgagtcatgattggacagccggcatt

SEQ ID NO: 905976 - DNA, 646 bp, Homo sapiens
aggtgaaaagaaagggcaagtcagatgatgtccataaaacatcaaactttcgtagactgccttatgctcctgtttttagaatctgcatttcccatttatgtaagtctccagtacagaaatgcaraaatttggccaggtgttctaacttattctttctttcatatatacaattaattaaattgatgattttttttctaattcttactgcttaaggagctatttctttttcttggttattaggcatatctttaattcttcttcactactttatttttactgctgcaaagatgctactagtatggaattgcagtaaatgggctttgaagtcagatttgtttcagtctcagctttactgtttactaactatcttacccaagtccagggacttatattcttaaaatcttgttatcacatctctaaagtgtgatataaaaatgcatatattgtagtgatgttgtgaaatggtaaagcatgtggttcctgagacctagtaagtgttccccactactgtttatccctttttttgactttctgttttataataatcaaaacagagatatataatggaagatccatgaaaaatgtttaataaattcatttattgttaatatagctgtatggattggggaaaagcaaaataattttt

SEQ ID NO: 905977 - DNA, 629 bp, Homo sapiens
tttacttttagtagactgatatggtttggctgtattcccactcaaatctcatcttgaattgtagttcccataatccccacataatcctcccataatcctccygtaatgtcatgggggggacctggtgggaggttaattgattcatgggggcagttacccccatgctactctcatgatagtgagtgggttctcatgaaatctgatggttttacaaggggcttttccctctttgcttagcacttctctttcctgccgtcttgtgaagaaggacctgtttgcttcctcttctgccatgattgtaaacttcctgaggccttcccagacatatggaactgtgagtcaattaagcctctttcctttataaattacccagtcttgggtatttcttcataccagtgtgagaaggaactaatacagtacattcgtactgagatagtagggtgctgctataaggatgcctgaaaatgtggaagtgactttggaactgggtaacaggcagaagttggaaccgttttgaaggatagaaggaagacaggaaaatgtgggaaagtttgaaacttcctagagatttggagggctcagaagacaggaaggtgtaggaaagtttgaaacatcccagagacttgttg

SEQ ID NO: 905978 - DNA, 566 bp, Homo sapiens
gttttcagaaataattgttttgtttctcttttttcaaaatgtaacttagaataaccatgttcctatgctatttagctcttgctgaatgataaatagtacaaatgtctactgtcttttggaaacatactttcaaagaattctttttgtattttttaaatatcagaaatacagcatctgacctgcattctgactttgctgtgaatcattaaagttggaatgtttttgaattttagtacattttgtggcattaactttcctacccacaaacgaagagccttcaaactacctagatgagatcaaacgtcgatgacatttatatttttctaggagtcaggaagaaaaatataatcccacaacgttaaatgcctttcaaggaaaaaaagtgagcacgtggctggatgtttgacgtgaaagacagaaaaatcttctgtctctgtttagtgttcccaaacgtcaggcattcttctttttttttttttttttttttttttacttttttctctttcccctggctctctgaattataattagggacctgrtgaacagatctgaccctcacttgggct

SEQ ID NO: 905979 - DNA, 670 bp, Homo sapiens
aacttagtaaaaaaatttgctgattagtttcagcttataccatggaactaggtaacagatcaatttataaatcaatgtgtaatactgaattgaaccagtgttgtggtgttatctttacactggcttgcctgccttttgttactcaggagaatatatgcatgcatctgtggtgcacaagcacagaaaagcttcacaaaggctgtttcactcaacacgtgccaccagcagatggaacagactgcggtcctggaatggtaggttttcttgaagggtgagtcttgtatgaagatattatccaaggatgtgattgctctgcattttagcactctgtttgttatttgctgtcaacttttcttcagctagtcgaattaatgttattgccatgtttgtttgatatagtacattgtcaatgaattaaatctttaattttaccctatttctaagctatggcagatgaatattaaagttttgtatagttagcatataaataattacatggatatatagttatctatgtatattataacattattattaaaattgaggacagatataacagtcctaatattttggcaaattctccaaattcagggatgttttcatttcatacgttttctcccttaaaattccgttaatacaattkaaagttttaagtggcttctttagacct

SEQ ID NO: 905980 - DNA, 707 bp, Homo sapiens
tagggaatcgccacactgctttccacagtggttgaaccaatttacactcccaccaacggtgtataaccgttctcttttctgcaayctttccagcatcttttattttttgactttttaataatagtcattctgactggtgtgagatgctatcttattttggttttgatttgcatttctctaatgatcagtgatattgcgctttttttgtaggcttgttggctgcatgtatgtcttctcttaaaaggtgtttgttcatgttctttgctcactttttaatgggattgtttttttttcttgtaaatttatttaagttccttatagatgctggataatagacctttgtcagatgtatagtttgcagatattttcccccattctgtagattgtctatttactctgttgataatttcttttgctgttcagaagctcttaaatttagctagatctcattttccagtttttgctgttgcaattgctttcggtgtcttcatcatgaaatctttgccagttcttgtgtccagaatggtatggcctaggttgtcttccagggtttttatagtttggggttttacattgaagtctttaatccatcatgagttgatttttttataagatgtaaggaagggttccggtttcagtcttctgcatatggttagccatttatcccagcaccatttattgaatagggagtcctttttccattgctt

SEQ ID NO: 905981 - DNA, 591 bp, Homo sapiens
ctcaactaggaagctagtggtctaaccattcttttaaaatacttttcaattaattctttattatttcaggcctacccctcacacattcgccctgtcagaggaacctggtgttttccattcctgggcctctcttgggttctatgtcatgaatgatttgttgcttatttactttcccactttgcaggcttaggttccaattccttggctctgttaaatagttatttccatctacttttcatattcaaaatttcatttccttgctgttttttttcttttcctttttttcttcttttacgtttatgcgttttcagaatttctcatagtcatttcaaaagatattgagaaaggagcagagataacgtatataatcatgtttagttaactggaagcacaaagttgaactttgataaaacagaaatttgttcatgtcactgactgcttaaactctttactgtctcctcattgcagaaagcataaagttcaaatgactytggtcagttatgaccacttctcttagtttgcttttgctgtagttatcctgcatgcaaaccaccaattttaatggcttggaacaataaaggtttatttatt

SEQ ID NO: 905982 - DNA, 676 bp, Homo sapiens
atggcactgccaaataatcctactgcacttccctagtccattctctctcctacttttctaaatgtctaacttataccttctcctgtagcttcaaatttcaaaatttttaatacctccactctactaactcactgctggtgatcttgctcgctatttcactgagaaaataagaatcagaagggaattgctcaagttcccactgccacatctaccagcctacctgaatctttacctatctccttgctttctcctgtttactctggatgaactcttcatgctcccatccaaggcaaatcctgctccttgtcctctaggctcagtgccttgtacctactcaagaacgttatttcagcatatttcctaatctctctcacatcctcaattctgctgctgaatcatttaaattcttcatagagaaacattttatttctttcgtcataatcacaagcaaatcatcttgacctctacctttccagccagccactgaccagtttctttgtgttcatttatagtaaaatttcttaaatgagttataatctgcactctccaattctctttccccatgctatactctaatcaatctcttattcatrtcacttccaggaaacagtccttatcaaagtcatcaataacctgtttccttaaattcaatgataaagtcttgttttccatctta

SEQ ID NO: 905983 - DNA, 589 bp, Homo sapiens
cagtaagttgttggcatttctgataagaatggccaattcatttacaaagctatgtaacataagaggagacaggttaaattccaaattctaattaagaattcagcaatacatttcctctatmagcattatctatgagtggaatataaactcacacatgtagtacactgccaaagttaataattatttttcaagaaactgaatagtcttctactctataactttaggtcatctttgcttctctctcttctttgttactttaatctattaaactaatataacttattactagtctaatccagactgttattgtcattgaacataatttaaacataaatctatttttatcaatctttatattttataatttataagtatatttttatgcttttttttttgctcaagtgctaacaatggctctcttattgtcttaatagcaaaccaaacttatactccttgctttcttgatccaccaaattttagtcaacatgcctttccaacttcatattttgctgcttttcaccatgcaaacctttgctctctttaagtataattgctttctccttaatgtgacacattcgctcaaaaacag

SEQ ID NO: 905984 - DNA, 586 bp, Homo sapiens
ggctggggaggactaaggagtcttccaatcatggcggaaggcaaaggggaagcaaggcacatcttaaatgacagcaggagagtggggtggaagygccccacactttttaaaccatcagatctcatgagaactcactcactatcacgagaagagcaagggggaacatctgccgccaagatccaatcacctcccaccaggctcctcctccaatttgacatgatatttgggtgggaacacaaatccaaaccatatcattctgcccctgtcccctcccaaatctcatgtccttttcacattgcaaaatacaattatctgttctcaacagtcccccattctttactcatttcagcattaactcaaaagtccacggtccaaagtcttacctgagacaaggtaagtcccttccatctatgagcctgtaaaattaaacagttacttccaagacacattggggtacagggattgggtaaatgctcccattccaaatgggagaaattagccaaaacaaatgggctacaggccccatgcaagtccgaaacccagcagggaagtcattagatcttacagctccagaataatctccttt

SEQ ID NO: 905985 - DNA, 615 bp, Homo sapiens
tttgactccccaagtccctgaatgaaaactctaacgggctattaaaaaaaaatgtgcaccacctgtgggtgtcaccgcacctgaggcttttcactattctgattcgtcttcaattaaaggattttcagatctgcataattctaatcagtaacataaaagtaaaactttgttagtcctcaggtgtaattgtgaaatcttcaaatatacaagcagctcttctgaaaaactgaccgtgagggctcctgatgactgctaataatctattgcctgccctttgtcctcagcagtaaacctagcgcaattagtaacaccttacaaccatacagcaccttcacataccttatctgatatcatctcgtaacaaggcaaagacaagttgaattacctactcaagggttactgagcacttgaaatgtggttaatgtgacaaagaaactgaattttatattttatttcattttaatataaatttaaatagccacatgggctggtgactattgagtagcrcagacagagagagctcactgtactagttgcccacatagcattctaaaagataaaaccctatattttaaaaagggtgggatgacagcttcaatatagggtggaaaaaaa

SEQ ID NO: 905986 - DNA, 669 bp, Homo sapiens
atacttatttatatatgtacatatgtaagaagaaattcctaaagagggaatccagaatagttagggtatctccagttttatgtcttattctactgtgtatttctgttttttaaaactatctttatatgttgccttaattaaaaagtaaaacataatttaagcattcaaatttctttgacaaattctgatcttgatgctatatagtttactcatttttttttttttgagatggagtctcactgtcgcctgtgctagaatgcaatggtgcaatctcagctcactgcaacctctgcctcccaggttcaagggattctccttgtctcagtctcccaagtagctgggattacaggtgcccgccaccaggcccggctaattttttttttgtatttttagtagagacggggtttcactatgtgggccaggctggtctcgaactcctgacctcatgatccacccgccccagcctcccaaagtgctgagattacaggcgtgacccactgtgtccggcctactctgcattgtttaatggtctaacccatttagattacataggaagtacctagtccttaagatttggtttgtttgtttttgagacggagtctcsctctgtcacccaggctggagtgcagtgggcgtgatctcagctcactgcaagctctgcctcccggg

SEQ ID NO: 905987 - DNA, 608 bp, Homo sapiens
aaaagctcagaaagaaatttttaatataataacacaagaaagcacagaaataagtctatttcataatgccttttcagtataaaagcattcctactwcgccacatcctctcctgcatctgttgtttcctgactttttaatgattgccattctaactggcatgagatggtatctcattgtggttttgatttgcatgtctctgatgaccagttatgatgagcattttttcatatgtctgttggctgcataaatgtcttctgtagagaagtgtctgctcatatcctttgcccactttttgatggggttgtttgtttttttcttgtaaatttgtttaagttctttgtagattctggatattagccctttgtcagatggatagattgcaaaaattttcttccattctgtaggttgcctgttcactctgatgatagtttccttggcagtgcagaagctctttagtttaattagatcccatttgtcaattttggcttttgttgccatagcttttggtgttttagtcataaagtctttgcccatgcctatatcgtgaatggtattgcctaggttttcttctagggtgtttacggctttaggccttacatttaagtct

SEQ ID NO: 905988 - DNA, 671 bp, Homo sapiens
acatagaaaaaagttttgaagcttatggttttgtttaaatttatgcatttgctttcaattacataatacttttattttattttattttattttatttttattttattttattttattttatgacattgtctctctgtcatccaggctggagtgcagtgatgcaatcacagctcactgcagcctcgatgtctcaggctcaagcaatcctcctgcctcagcctccccagtagctgggactacaggcatgtaccaccatgcccagctaatatttgttttgtttttgtttggtagagatggggttttgctagttgcccagactggtcttgaactcttgggctgaagtgacctgcccacatcaccctcccaaagtgatgggattacaggtatgagcactgcactcagcctattttaatatgtaaatgtttaaattatttctcactcaagaaaatcaatgttctaagagacttgcatgcttcatttgtgaaaaagtaccttttgacatatcctgtgtttgggaagctcagctgaagatgttggtagggcaaaaagcaaggcaacaatataatcatatttgtttctttgatacttttggagggacagagagaacaggaaaatcctctagaccagactaaagctgatgagggccrcaccaaggcagtggcagtggtgat

SEQ ID NO: 905989 - DNA, 550 bp, Homo sapiens
ggaggatggggggcgtggcatttactgggatgaagaaattggcagaagcaggtggcaaaggtgggacagaaatccagtcatctggcacttcctcagcccatgttctattttacrgtcttgtctccctggaatgacaactgctttcctcttggctccttgatagttcagtcacagaagtagcattatttctcagtagtgaggtgggagcatttgttctttctttaattgttgaaactgaaagtaaggaaagaggagagagcatgggtcccacctcagtgtggcaacgagtttgaatgtgtaggcagactcactgtaccgtgtcaatgtccatacactggagccaccttctcagagttcccttccctggagagatctaggttaggatcagccaccagaggaatttgtaggcaatctggaaggccacagtgagataacagccatctttacactctgaagtttgctgcaggcagatgtgtgacagctcacacacattctttctgaactgctgctcccttgtggcaatggccatgccctgacctgcacgtccagt

SEQ ID NO: 905990 - DNA, 635 bp, Homo sapiens
tttgacttttagtgtagaaattcagattacaaaaatatttatcttctgatttaaatgctgtggttttttggtagttaacgataaaataaccatggaagacagctactagtactatcactgcagtgttctggctgaattgttctaatcttgtcataataactttgggttttaaatgattatatgtaattcacttagaggaacagtacatttatttcaaataaaatgatgaaaataaaaattatttatttctttaacaaatatttattgaataattacaatgtatagaggatagagcaatggggaagatagacatagatctcagaagtttacattcagactgtgtgtatatgacagtatgttttgtacatgactctgtgtgtgtgtgtgtgtgtgtgtgaactgggagagaaataatgattagaagttgattagaaatagataatgtgtgttgggggagagaaagaaggaataggaaaatagacaacctattatcagagtttgtaagaaaaataaagttatgtaatagacaaatgacttgaataagaagtctactttaaatatagccttccattttacacagaaatataaaataaattttacatagctttcakgcccgtcaaattaaagtactggat

SEQ ID NO: 905991 - DNA, 656 bp, Homo sapiens
actagtaaacttttggggacccrgcaagctccaattggtaagtgagggtggtgggtaaaactagttttagagtagcagcaggttgttttagtagttattagataaaactgacttccaagtatagcaggcagttttagcagccaggcttgcagagaattgcattcaaggaggtcttatgtaccctgagtgctttgtcccttggcctcttgactctgttttagttgggtatgacaaaaaacccaatttgcatgattagctttcacagtacttattacaggtataacctcaccatactcttcccatgatttagttaatatttactaagatggtcaaccatagaattacccctgatttctgattgcgttcaatccagaagaaagcatcactttgaactctctctaaaaatcacctaacataaggtcaaaccttgtaagtacttttgaacacttctttctgagacatcacaaaattcccattagtgtgtgttctccctcaatgcaataaccagtatacccaacttttttttcaattgcagctctgcatctggtagtctttggctggagatcatttacacctgttttgacagtttctttttttttttaagaactaccaaatactaaatacgctcacatctgatatttcttctatgcctttct

SEQ ID NO: 905992 - DNA, 628 bp, Homo sapiens
gacacagccaaaccatatcattccaccctggcccctcccaaatctcatgtcctcacattttaaaacacaatctggtacttccaacattcccccaaagtcttaactcattttagcattaacttaaaagtccaagtccaaagtcccatataagacaaggcaagttccttccacctatgaggctgtaaaatcaaaagcaagctagttacttcctagatacatgggagtacaggcattgggtaaatacacctgttccaaatgggaaaacttggccaaaattaaggggctataggccccatgcaagtcaaaaatctaataggtcacccattaaatcttaaagttccaaaatgatctcctttgactccatgtctcacatccaggtcacgctgatggaagtaggctccatggccttgggcagctctgcctctgtggctctgcagggtataggccccctgctggttgctttcacgggctggtgttgtgtctgaggcttttccaygtgcacagtgcaagctgtcagtggatttaaaattctgggggctggaggatggtggttcttttctcacagctccactaggcagtgccccagtggggactctgtgtgggggctccaacccacatttcccttcca

SEQ ID NO: 905993 - DNA, 515 bp, Homo sapiens
caggggcaatatgccaatagtctctttgcatatgaagggtgatctttactctagtgcctaacaagttcctcatctccrtctgagaccacctcagcctggacttcatcgtccatatcactgttggcattttggtcaaagccattcaacaaatctctaggaggttccaaacattcccacatcttcctgtcttctgagccctccaagtctctaggaagtttcaaactttcccacattttcctatcttattttgagcccccaaaactgtcctaacctctgcctgttacccagttccaaagtcgcttccacattttctggtatctttacagctccactgctcctagtaccaatttactgtattagtttattctcatgctgctatggagaaatacccaacactgggtaatttataaaggaaagagattcacagttctgcagggcttgtgaggccccagaaaacttacaatcatggtagaaagggaaggaaacaagtccttcttcacatggtggcaggagag

SEQ ID NO: 905994 - DNA, 584 bp, Homo sapiens
gtatttaccttgcccattgcccctcagcatacggtgccctggcttgccctatcttgctgtgccttttatgttgacagcactgtattatgaaattataaagagaactgagagttcaagaggatatgagattcaagagaaagctattaataatgaatattttccttgccaggctctggaatctaaattttgtcccctcaaaccaacacgtctattagaagctcaacttagcttcttggcatttctcacacagcttttctttcaatatgggaacagataaatgcctctagttgaacagtcaccctaaaaggtaagctcaccttttgagacttttcttctttcctggaccttggtctgacaattcttcacagcctcagttgctcgctaaagccttcaaacaatcttcaagaaaatacattaaaatattttgtctggcttgtctagttgttcaatgagagaasactggttgaaaccacatactccactacagccagaagtagaaacctgccaaataatttttaaacatgaagcattaacattgtggtgaaatgcatttcacctccctttttctccaaataggttacata

SEQ ID NO: 905995 - DNA, 687 bp, Homo sapiens
gcagattagataaagagtcaagacccatcggtgtgctgcattcaggagacccatctcacatgcaaagacacacataggctcaacataaagggatagaggaatatttaccaagcaaatagaaagcaaaaaaaagcagggcttgcaatcctagtctctgataaaacagactttaaaccaacaaagatcaaaagacacaaagaagggcattctataatggtaaaggaatcaatgcaacaagaagaactaactatcctaaatatatatgcgcccaatacagcagcacccagattcataaagcaagttcttagagacctacaaagagacttagactcccacaaaataatactaagagttaaataccccactgtcaatattagacagatcaatgaaacagaaaattaacaatgttattcagaactttaactcagctttggaccaagcagacctaatagacatctacagaactctccaccctgaatcaatagaatatacattcttctcagcgccacatagtacttattctaaaattgaccacataaatggaagtaaaacactcctcaaaaaatgcaaaagaatggaaatcataatgaacagtctctcagaccacagtgcagtgacgttagaactcagaattaagaaactcaatcaaaacygcacaactacatggaaactgaacaacctgctcct

SEQ ID NO: 905996 - DNA, 635 bp, Homo sapiens
tctatttactaagggctacattaacaatagctttttggcatatttctaaagttgattcttgagttctgcaagcattaattattcacaacatttgttttctcaacaagggaatacaagtgactgttttaaattagcctatgtagatcgagattatcctctattgtttctattaatatgaacaattgactactctctccttgagactgtttttcttaagaattctgatttgtacaggaggtgttcatcacagtttggccactggttcctatgtatgccctttgggaagcagtatagcatggtggctttggcatcaaatagacccagcatcaagtactggctcctttactgttatgagaaaaacctgagattgtaatgtccccccaaactgggaaggagctgatagtgcaaagaatgactcagacaagtccagcttgaagagtggatgagctcactcacttacagagaattcctgggcagcagcaagacagctccagccatcttccccacctcccatctctaagttgctttgaagctaattttctggctctttgattactgcatatgtgcaatgagaatgttttcctaggaatgttccaagctrtgctccaggatgttgagtttctcagggacacctg

SEQ ID NO: 905997 - DNA, 625 bp, Homo sapiens
tattattattattattattattattattattattattattatactttaagttctggaatatatgtgcagaacgagcaggtttgttacataggtatacacgtgccatggtggtttgctgcacccatcaacccctcacctacattaggtatttctcctaatgctatgtccccgctagccccccactccccgacaggccccagtgtgtgatgttcccctccctgtgtccatgtgttctcattggtcaactcccacttatgaatgagaatatatggtgtttggttttctgttcctgtgttagtttgctgagaatgatggtttccagcttcatctatgtccctgcaaaggacattaactcatccttttttatagctgcatagtattccgtgctgtgtatgtgccacattttctttatccagtctatcattgatgggcatttgggttggttccaagtctttgctatttgtgaatagtgctgcaataaacatatgtgttcatgtgtctttacagtagaatgttttataatcctttgggcatatatccagcaatgggattgctkggtcaaatggtatttctggttctagatccttgaggaatcaccacactgtattccacaatggttgaacta

SEQ ID NO: 905998 - DNA, 636 bp, Homo sapiens
aagaacaaagctgggggcatcacactacctgacttcaaactatgctaaaaggctacagtaaccaaaagagcatggtactggtacyaaaacagatatataggccaatggaacagaatagaggcctcagagataataccacatatttacaaccatctgatatttgacaaacctgacaaaaacaagcagtggggaaaggattccctaatttaacaaatggtgttgggaaaactggctatccatatgcagaaaactgaaactggacgccttccttataccttacacaaaaattaactcaagatggattaaagacttaaatgtaagatctaaaaccataaaaatcctggaagaaaacctaggcaatatcattcaggatataggcatgggcaaagacttcatgaataaaacaccaagagcaatgacaataaaagccaaaactgacaaatgggatctaattaaactaaagagcttctgcacagcaaaagaaactatcaccagagtgaataggcaacctacagaatgggaaaaaaattttgcaatctatccatctgacaaagaattaatatccagaatctaaaaggaacttaacaaatttacaagaaaatatgaacaaccccatcaaaatatgggcaaaggata

SEQ ID NO: 905999 - DNA, 636 bp, Homo sapiens
aagaacaaagctgggggcatcacactacctgacttcaaactatgctaaaaggctacagtaaccaaaagagcatggtactggtactaaaacagatatataggccaatggaacagaatagaggcctcagagataataccacatatttacaaccatctgatatttgacaaacctgacaaaaacaagcagtggggaaaggattccctaatttaacaaatggtgttgggaaaactggctatccatatgcagaaaactgaaactggacgccttccttataccttacacaaaaattaactcaagatggattaaagacttaaatgtaagatctaaaaccataaaaatcctggaagaaaacctaggcaatatcattcaggatataggcatgggcaaagacttcatgaataaaacaccaagagcaatgacaataaaagccaaaactgacaaatgggatctaattaaactaaagagcttctgcacagcaaaagaaactatcaccagagtgaataggcaacctacagaatgggaaaaaaattttgcaatctatccatctgacaaagaaytaatatccagaatctaaaaggaacttaacaaatttacaagaaaatatgaacaaccccatcaaaatatgggcaaaggata

SEQ ID NO: 906000 - DNA, 626 bp, Homo sapiens
taaacaccaaatgctccacattccacacatcttatactctgttatctttaggcctgtggacaacagtggaaggggtggagattgcacagtcaggtattaccaaattcagcttcacgtttatcctaaagcaatgtccaggtcaagaagtcaagccacaagataccatctgattttgttgccacacttactccttacggcaattttcatttcagggatctcttttctccctaggaatccaggtttattccagaacatacccaaggattcagtttcctaaaagagatgtattaaaatctatcaggaaatgatagttatatacataaataattgtaataagagataacgactaattatgtcacaggtagttgtcaaagtgttgtaggaaaaaagacttatttgttatgagaacaaagaaaggagaaacaaaattttcctagaaaaattaggacttttttttaaagaaaatgccatctgacccccttttaattaaaaaaggaaagaaaagcaatacaggcagcaagaacagcaagaccaaagttatatacttagagatgtttggaagaatgttcraagagatggctctcaaattgtgctccccagtatagattatcagcatcatataggaa

SEQ ID NO: 906001 - DNA, 610 bp, Homo sapiens
taaagttcccaattttttccttgataaatgcagttgtatwttctatgtgtttgatgataaactgtaatttctctcatggaattgaggcactagataaacttacttggcaaacctttgttgctttccctcctcccattattttgtgttattttagtgattcactaaatctcgaagtcttgggaaacaacacaatacttcatctgatattcacaactatgattctgtccactttgcggatgaagaaacaatctttgagagacttttaaagatctatgtcaaaatggaggcatttagtccatagcagagctgggtctgaaaaccatgaatggcttaaatcaatattcctgctcataactactatgttacataactactatgtatctctttatgacagtaataaaaggccaggcataataagcatcaaaggccaagattgagtggaacagggattctcaatacaacttataaaaatctttaaacatgttcctactccagtttccttaaactcattttggagttataaagagactgcaattaaagagattaaaaatgtggactctacatcagtggtctagcattggtaaagcagctttcgtagcttctggggggg

SEQ ID NO: 906002 - DNA, 611 bp, Homo sapiens
tccagaagcaccacatcttttattcctcatgtaaaattctcactaatttgtgccaaatagcaaatacataatgaagattcctccccawcccccagtgtttggcatacaatttaagagaaaagtccaaaacaggccttcctttattttttgcatatacatccagactcataggcatctcaaagaacactacataaacaaataaaatttaaaacaataaacctgaaaagatataaaatatgcttttcatccttcaaaggaatctaaattcatttagaggaaacatgaatcaggctagagaatacttgggatgacaaatacttggtgacacatgggagcatttctcagttcgctaccatgattgaactaacaaatgagatacttagcagagtggaacaaaattaatgtaaactttataatataatggataaagaatatttttattgatatgataatatcaaaatgcatttgcttattattgtaaactaagaaaggcagatttatattagaaatttgtccaaggtatctagaaacctagccgtggtagggggacattctcttaatggaatatgaattcacttatacttttaaaaaatacatatatgtagtttgac

SEQ ID NO: 906003 - DNA, 598 bp, Homo sapiens; identical to SEQ ID NO: 902936

SEQ ID NO: 906004 - DNA, 597 bp, Homo sapiens
acacattaaggtaagactcatccaacaataagattcatcccttacataaaataaatctgtagatcaaattctactttagaraattatagccttcatttctattaaccccttctaatatcctcttctgagacaattgccttctctctctgacacccaaaatcactctaaacttccttcctgaatactcacatccacaggctaagtctgtgaaaatacattttttttagtttaactgaacactcatgaagtgctagatgctttacatgctttagttcatttaagctttactacctagtagcttaatgatgaagaaagtgagaaacagaaattttgggtaacctgaaacaggcacacatctaatgagcagtttatctacaattaaaatggaggtattctgccatatcctgatgccctcttcaaccttcctcggctatcctgtttcatggatggatactcaggatatgaaaagtcataaaccaagaaagaaataggtaggttttgaatataaagtaactatatttctgtgcaatttcttactgttcatagtaagagagttataagacattcagtttggaagaagtataccactggatttct

SEQ ID NO: 906005 - DNA, 642 bp, Homo sapiens
aagcaggaaaaagtacagcaaggggaaggtgcaggctggggttgtgggagtgaagaagagacttgggagggcamctgccatcctcggtgcctgggggggagggaggacagtctctaaggtgtttctccgtgttatctgtgaatatgtaaattataatatgtaacgaatagataaatataatagtccttttcttgtgaatctgcagtgaacatttgaatgaaatttcaagcgacttctggatgttgttttttggtttgtggctcatgtctggaggggctatgcactggcttgactttcaaggattaacttgtgtgcatgtgtgttctctacctgtgtgcacatgtctgcatgtgtgtgttcacgtgcacgtgggaggttgtgttcatgaaggcgtgtgtgtggagggagggagggaatactcacagcccagcccaagactgtgagcatggctcctccctcaggaggtgagtgggatggtctcaggggaacagaagctatgaatcaggaaaagcttccccaacctccacttttggggaatgggtgtttgtatgggcagaacaggatgtggggcgacactcccaggggcagaaaacgcaaaggggtgagggagagacacagagaacagagcgggaaggagccagg

SEQ ID NO: 906006 - DNA, 642 bp, Homo sapiens
aagcaggaaaaagtacagcaaggggaaggtgcaggctggggttgtgggagtgaagaagagacttgggagggcaactgccatcctcggtgcctgggggggagggaggacagtcyctaaggtgtttctccgtgttatctgtgaatatgtaaattataatatgtaacgaatagataaatataatagtccttttcttgtgaatctgcagtgaacatttgaatgaaatttcaagcgacttctggatgttgttttttggtttgtggctcatgtctggaggggctatgcactggcttgactttcaaggattaacttgtgtgcatgtgtgttctctacctgtgtgcacatgtctgcatgtgtgtgttcacgtgcacgtgggaggttgtgttcatgaaggcgtgtgtgtggagggagggagggaatactcacagcccagcccaagactgtgagcatggctcctccctcaggaggtgagtgggatggtctcaggggaacagaagctatgaatcaggaaaagcttccccaacctccacttttggggaatgggtgtttgtatgggcagaacaggatgtggggcgacactcccaggggcagaaaacgcaaaggggtgagggagagacacagagaacagagcgggaaggagccagg

SEQ ID NO: 906007 - DNA, 629 bp, Homo sapiens
tgatttgaggcaatgatgttaaatgtaaaactctctctccctttatgatcatgacctcgaattttctggtcagtgtttacttttargaaagaaaagtgcttacctggaaatggttaatgttataaagatacatggacaaagaggagaaaaataacctcttaccttatgctgctgctttgggtctggtgcagtagttagaagatggctgtttggttatttttaagacacttatttctgttttgagatgagatcagcattggaaccaggccaacctggagtttttctggtttaaaatgataatcttatgcattgaaggtgagagggccgattaaataaaaattttcccaacgttgaacgcaggtagaatttattgcttggtatgatttctgagtttactgatcttacttttatgtaaaaacaaagataacaattttgtgtaggaaaaattctaataggacttactttgtggtgaatctaatatggttcttcaaatgaatcatgtacagtttataaacttacagtaataatattcaaagaatgtttcactcaaatagaacaaatatttctttgttaggtaaaaccgtttaacctaagactttttgtcactcttaggactgtattacatcaaa

SEQ ID NO: 906008 - DNA, 518 bp, Homo sapiens
ggggcaaaatgctgccagtctttttccaaagcatagcaagaacacctttattccggttccaacaaattcctcatctccatctgagactacctcagcckggacttcattgtccatatcactatcagcattttgctcaaagccattcaacaagtctctagaaagttccaaactttcccacattttcctgtcttcttctgagcccttcaaactgttcttacttctgcctgttacccagcttcaaagtcgcttccacatttttgggtattcttacagcagcgctccactaccacagtaccaaatactgtattagtccattttcatgctgctacaaagaactgcccaagaccaggtattttataaaggaaagaggcttaattaactcacagttctgaatgcctggggaggcctcaggaaacttacaatcatggcagaaggcacctcttcacagggcaggaggagagagaatgagtgcaagcagaggaaatgccaggtgcttttgaaaccatcagatctcataa

SEQ ID NO: 906009 - DNA, 641 bp, Homo sapiens
ttgtctatgtcacagtgtctctaacttgaagtaacatgaacttggcattttggggacagatactgtgtaccagacatattgtcaggtaatttaaccacatcmtctcatttaatcctcacaaaaactctatgaggtgaggaaactacatcttttagataaggaacctgcagctatgagcttatgagatttgctctgggtaacacagtatgcaagagtgagagctgtgacagactgtggtctatctgataccaaaacatttttatctcccccttcacattcctgtgttttcatctgtgaaaccctatagtattatgcaaagcatcaccttacctattgtgttttatagactgcctacttctgagaaggaatgagaattagaggaccatatgaacttcagagttagatttggatttcagtcctggccctagtaaatgctagctatgggaccttgggcaagttacatgaccttggtaaacgccttcatctgaatataaggaaaataactgcacccctgtagagttgctatgagcagaaataaagggatacatccaaagttgtcgcaatagaggctggtttgtgttccctctttcccagcctttaggaaggttggaatagttctgtaaatgtggcctgatggatta

SEQ ID NO: 906010 - DNA, 616 bp, Homo sapiens
gcttggttttctgctaaacccgcagatatggaggaccgactgtatttattgaaaaaaagttcgtgtgtaagtggacccatgargttcaaacttgtgttgctcaagggttaactgtaattctgtttcacattgagaatttccttttttatattttatttttcaaaattgacatataataattatacatatttatggggtacccaatgatgtcttatgcatataatgtagagtgatcatatcatggtaattagcatatccatcatcttcaacatttatcatttctttgtgcagggaacattcactatcctccttctagctgtttgaaactgtataatatattattgttaactaatctctccccatcaccacttctccagaatttgttttaaatggaaatggatccaggtaaataactcagggctctactttataaaagagttagatcttgtcctaaactgtaacaagcagataagctagaccagcaatcaatcaaaatcagacacttctcagaaatactcctaagtccctgcccacctcagacctgtcgtgtttctccattgttgctttagagtgtcagagaatgacctgtagtgcagtcatgtcttttacttttgtc

SEQ ID NO: 906011 - DNA, 616 bp, Homo sapiens
gcttggttttctgctaaacccgcagatatggaggaccgactgtatttattgaaaaaaagttcgtgtgtaagtggacccatgaggttcaaacttgtgttgctcaarggttaactgtaattctgtttcacattgagaatttccttttttatattttatttttcaaaattgacatataataattatacatatttatggggtacccaatgatgtcttatgcatataatgtagagtgatcatatcatggtaattagcatatccatcatcttcaacatttatcatttctttgtgcagggaacattcactatcctccttctagctgtttgaaactgtataatatattattgttaactaatctctccccatcaccacttctccagaatttgttttaaatggaaatggatccaggtaaataactcagggctctactttataaaagagttagatcttgtcctaaactgtaacaagcagataagctagaccagcaatcaatcaaaatcagacacttctcagaaatactcctaagtccctgcccacctcagacctgtcgtgtttctccattgttgctttagagtgtcagagaatgacctgtagtgcagtcatgtcttttacttttgtc

SEQ ID NO: 906012 - DNA, 603 bp, Homo sapiens
tgaggatgccccaaccattgcactatgcttcytgacttccatcaccacatcttctaggggtcactaaacaggaacttgtggaacagtgcttctcaaactttgacctgcatcagaatcacctcgagggcttgcaaacagacagctaagctgcagccccagagtttctgattctgttggtctggactggggtctgaaaagttgcatttctaccaagttcatggatgatgatgtttctgttctgaggactaccctttgagaactattggtgtagatagaagctatgcatgcagactctgaatttgaattgcttgagtttatgtacagtgattagctttcaagacattgcacaaacaaaaatatgtgcatatcagatcagtgcccttgctttgcatgatttcaatatatgtgagtttcagtcaacatgatatcatgaggactgcctgtgatctttaacctctctgtgcttcagttttctcatctgaaaatgggaataatagtacctactttatacaattgttgtgaggattatataagacaatacttggaaagcatgtaaaacaaacagtgcaatctatgaataggtattataattattagagtaat

SEQ ID NO: 906013 - DNA, 603 bp, Homo sapiens
tgaggatgccccaaccattgcactatgcttcctgacttccatcaccacatcttctaggggtcactaaacaggaacttgtggaacagtgcttctcaaactttgacytgcatcagaatcacctcgagggcttgcaaacagacagctaagctgcagccccagagtttctgattctgttggtctggactggggtctgaaaagttgcatttctaccaagttcatggatgatgatgtttctgttctgaggactaccctttgagaactattggtgtagatagaagctatgcatgcagactctgaatttgaattgcttgagtttatgtacagtgattagctttcaagacattgcacaaacaaaaatatgtgcatatcagatcagtgcccttgctttgcatgatttcaatatatgtgagtttcagtcaacatgatatcatgaggactgcctgtgatctttaacctctctgtgcttcagttttctcatctgaaaatgggaataatagtacctactttatacaattgttgtgaggattatataagacaatacttggaaagcatgtaaaacaaacagtgcaatctatgaataggtattataattattagagtaat

SEQ ID NO: 906014 - DNA, 603 bp, Homo sapiens
tgaggatgccccaaccattgcactatgcttcctgacttccatcaccacatcttctaggggtcactaaacaggaacttgtggaacagtgcttctcaaactttgacctgcatcagaatcacctcgagggcttgcaaacagacagctaagctgcagccccagagtttctgattctgttggtctggactggggtctgaaaagttgcatttctaccaagttcatggatgatgatgtttctgttctgaggactaccctttgagaactattggtgtagatagaagctatgcatgcagactctgaatttgaattgcttgagtttatgtacagtgattagctttcaagacattgcacaaacaaaaatatgtgcatatcagatcagtgcccttgctttgcatgatttcaatatatgtgagtttcagtcaacatgatatcatgaggactgcctgtgatctttaacctctctgtgcttcagttttctcatctgaaaatgggaataatagtacytactttatacaattgttgtgaggattatataagacaatacttggaaagcatgtaaaacaaacagtgcaatctatgaataggtattataattattagagtaat

SEQ ID NO: 906015 - DNA, 615 bp, Homo sapiens
acagaaaaaattgtgtcctcamaccctgcccttgaaaactaggctaagtttaataatataatggaagaaattggcctagtttccatttccactaaaagagtttttttttcggagggggaggaattaataaataagattaaattatggttctattaattgctgatgaaataaaattaaaaggccgggcacaaaggctcacgactgtaatcccagcactttgggaggccgaggcgggaggatcacgaggtcaggagatcgagaccatcctggctaacacagtgaaaccccgtctctactaaaaatacaaaaaaattagccaggcgtggtggtgggcgcccgtagtcccagctactcaggaggctgaggcaggagaatggcatgaacccaggagacagagcttgcagtgagtcgagatcgcgccactgcactccagcctgggcgacaaagcgagactctgtctcaaaaaaaaaaaaaaaaaaagaaagaaagaaaattaaagtattaatgattgtcattaatactttacagatgacaaaatgaatgcatagaaaggtaagtaacttatttaagaggtcacagaaataataaaatacagaaccagatccaaccatgtat

SEQ ID NO: 906016 - DNA, 626 bp, Homo sapiens
ccagcccagctcctcagtatcattgyaagggttttgagaatccaacatcatcggtgatgagaaaaatgtttcacatttttcaagcatatatgaaagtgctttgatgaattgaataacaattcatagtgattttttgatgttctatattttttctaattaattgattctagatgttaaacctattagatgggaagaggactctagttcatttttgcattaaaagggttctttcttacttgaagctggtgggaactattggaagagggcgtaataattaataatgatgacaataactaacacatgccgagaactttctaggtgccaggcactgtgccttgcaaaaaaggactttgggcatctgttaattaatttatggataaggaaaccaaggctcagagtggtgaagtgacttgctcccagtcatcctatgagtaattggtggatccaggctagaaacccagtgtcctggctgtggggccagctttttttctgctgtgcccgattttgtggtttgtctctctggtgctctggagtagcatgtgtgggaaggctgaacggagagtcatgaattttcccgagttcctcctctgggaatcacagactatcagagtccggaggactttcaa

SEQ ID NO: 906017 - DNA, 605 bp, Homo sapiens
atcactcatcaaaatgttactagttatcattattctttacaatgctttttataattttatagatagttttggttgctttttaaatttttttttgttactagtacaagtagtaaagctttttaatagtccacaccgcatgcaacataaaatcaacaagtatacacttggtacaacattgacttagggaacaatccttcctcattaggtaaaaataaagagtgtttcacagtacagagtgtgaacagaggtgctaccatctgaataaagtattgctttttaatcaccaaaacgtataccatgcaaatagtctcttaaccccaggcatgacccctaaaactgttaaagtcatttgtgtaaaatgctttaaagaatgtaggacaagcatgtgatttacagctagaaaaggttttcttcacagtcttgatttcaagagtagccaaatgactttaacatgcttgttcccccttttgtcactgtcatcaaaactatttcaaaggacatttaaaaatatgcactaatagtttccaaaactccaccttgccttagaaccccaagttcctctcctttctgaartaaaccattgcatctataggcaatttggagtt

SEQ ID NO: 906018 - DNA, 598 bp, Homo sapiens
atgggtctcctcatctttttcctcctttaaaccaaatctcttggcattttcttattggtgtgcatttgtcatgtaggcttgacacctcattcatctttgacttgtcttcatctccttccattttaagcatggtactgttgacttctccctcatgtttttcttatatccaagtctttccattgtattatcactgctattttccttcattccttcattcttttcttccctaaacatttattcagcatcttttattctaggtcttgtgcaataaataaactacccaaacaactaaccaactgttgcagaagtttgctccttagttcagctaaaactgggttcttgtcacatgaggaggaaagattaggcaagtggatacattgaagggtgaggagagcagaatttatcgggtgtaaaggaaaaaagaaagaaaaacaatcagcaaagcgagagggagtcctgctatcaggcccccacctcacaaattgaatactaagccatcgcacaggaactgaaaatgccaggctcctccytcctgcacaaggtgtaagcttcccctggtttcaccccattctcccagtgcccaggtgggcccccagtc

SEQ ID NO: 906019 - DNA, 600 bp, Homo sapiens
cagaccctgtctctaaaaaataaaataaaatatgaataagaaccatttgtttagctcaccattctgtggttagtaatttaggctgggctcagctaggtgactgttgctccctcgtgcgtctgtagtcagttttatgtcagttttgctgatcttgtctggtctttctccctagcctgtttctatggtgaaaaattctgagagagtgtggaagcatggacagccacttgaaggataggctcaaagttggcaagttattacttctgctagccaaagcaagtggcaaggccaggccgggtttcagagccagggatagagtttacctctcatgggtgttgctgtacagtcactttgtaaggggcattggggatagggaagggaataattgcagccaattaaaaaataatattttatgatagctaacctttatgtagtatgtgtttcgttccagaaattcttctaagcattctacctgtatagttgatgtgatcttcaaaacaaccctayacatggttactatcactattcagattttatagatgaggaaacaagcacagagcataactgacttgctcaaagtcacagaaatattaaaggagtaaa

SEQ ID NO: 906020 - DNA, 607 bp, Homo sapiens
gtctgttcagatggggactttggagttgtgacaatatatccttttaaattagattgaaaaaatagatcacatagccaagaccaagttcaatggygtataaaggcatggaaaaaaacgcggagagaaaaaaaaattattgtgaaaacctaatgaaatttaccattatggtcttgacatttctctattggttaattttcttgcttatgtatttattaaaaacaatctttgtatattaaggaaaccattccattgtcatatttgtaacacttttttatgcaaatcttcacgtatgtttgacttctatagtcatttttatgctataaatttttagaacattacatatattatatataataaatgtataatataaaaattccatagataatatatattttatataaaacattaacgtttataaatcatatttatttataatattgttatatattatatataaattatatatatataatttaaaaaatataaactttatttaacacttactttcatggcttctggtcctatattatgttagaaagaaaatctctcctccatgactataagaaacagcaaaatgatgaattgttaagtaaaataaatctacatg

SEQ ID NO: 906021 - DNA, 643 bp, Homo sapiens
ataaaagccatattatttaagttagctcagaagtaagaactacrttaagaatgttactgattcctgaataatggcaacctctcttgtgaactgggggatatggttacttttgagacttacccttttccattaataaacatatcaaacagaatctgcttagtctgtgtatgcctagttccctattttttcttcagatgttatttttggtcttttatgtacttttagagaaaagaacagttatattctaaaatctggacccacctattctgttccattatggagactttattggactaatgagtgaaagatagataaatcattattgtttaaatataagacataactttaaatatgttatagttatctaatcatgaaataaggcatctaaaaataataataattactttcttgccaatggaactcttcaagaacaactgactgactatattcagtggtatcttaaaagtattttctgtattttcagaatattaaaatagatggataaacaatgttaattttcaaaataaatataataaattgataaatgaattaatcaatctaagaaacataatatggtaagctaatttaaaaatcttaagtatgcctttattaagtaaatgcctaaaaatataaaacagtgatg

SEQ ID NO: 906022 - DNA, 643 bp, Homo sapiens
ataaaagccatattatttaagttagctcagaagtaagaactacgttaagaatgttactgattcctgaataatggcaacctctcttgtgaactgggggatatggttacttttgagacttacccttttccattaataaacatatcaaacagaatctgcttagtctgtgtatgcctagttccctattttttcttcagatgttatttttggtcttttatgtacttttagagaaaagaacagttatattctaaaatctggacccacctattctgttccattatggagactttattggactaatgagtgaaagatagataaatcattattgtttaaatataagacataactttaaatatgttatagttatctaatcatgaaataaggcatctaaaaataataataattactttcttgccaatggaactcttcaagaacaactgactgactatattcagtggtatcttaaaagtattttctgtattttcagaatattaaaatagatggataaacaatgttaattttcaaaataaatataataaattgataaatgaattaatcaatctaagaaacataatatggtaagctaatttaaaaatcttaagtrtgcctttattaagtaaatgcctaaaaatataaaacagtgatg

SEQ ID NO: 906023 - DNA, 495 bp, Homo sapiens
gctgagtgcggtggtgcgcacctgtaatcccagctactcggcaccctgaggcaggagaatcactttaacccaggtggtggaggttgcagtgagccaagattgcaccattgcattccagcctgggcaacaaagcaagactcagtcttgaaaaaaaaaaaaaaatccctgagacaaaaactaaaaagaatgatagattggcatgaaaccccctctctactaaaaatactgaaaatacaaaaaaaaaaaagaaatcagccgggcgtgttggcgggcgcctgtggtcccagctactcgggaggctgaggcaggagaatggcgtgaacccgggaggcggagcttgcagtgagccgggattgtgccactgcactccagcctgggcaacagagcgagactctgtctcaaaaaaacaaacaaacaaacaaaaaaacttgtagacaaaattaaaagctgaccaaaarctgggccaatacatgtagagtataaaagtatataaaa

SEQ ID NO: 906024 - DNA, 560 bp, Homo sapiens
gctggtactggttgttcctttccatgtttagtgcttccttcaggagctcttgtaaggcrggcctggcagtgacaaaatctctcagcatttccttgtctataaaggattttgtttctccttcagttatgaagcttagtttggctggaatgaaattctgggttgaaaagtctttaagaatgttgaatattggcccccaccctcttctggcttgcagggtttctgctgagagatccattgttagtctaatgggcttccctttgtgggtaacgcaacctttctctctggctgccctttatattttttccttcatttcaaccttggtcagtctgatgattatgtgtcttggggttgctcttctcgaggaatatctttgtggtgttctctgtatttcctgaatttgattgttggcctgccttgctacattggggaagttttcctggataatcatctttgtggttttatctacctttggtctttgatgctggtgacctacagatggggttttggtgtggatgtccttttttttaatgttgatgctattcttttctgtttgttaattc

SEQ ID NO: 906025 - DNA, 605 bp, Homo sapiens
actcacagaattgaacatttcttttcattgagcagtttggaaacaccttttggtagtatctgcaaatggatattttgagcrctttgaggtcaatagttgaaaagaaaatacattcacataaaaattagacagaagtattccgagaaacttgtttgtgatgtgtgcattcatctcacagagttcaacctttcatttgattaagcagtttggaaaaactctttttgtagtatctgcaagtggatatttggagggctttgagtcctatggtggaaaatgaaatatcttcacagaaaaactaggcagaagcattctgagaaacttctttgtgatgtgtgcattgaactcaaagagttgaaactttcttttgattgaacagttcagaaacagtctttttgtaatatctgcaaatggatatttggagccctttgtggcctatacttgaaaaggaaatatcttcaactacaaactctacagaagcattctcagaaacttcgttgtgttgtgagcattcaactcacagagttgaacgtttcttttgattgaacagtttggaaacagtctcattgtagtatctgcaaatggatatttggagcgctttttggcct

SEQ ID NO: 906026 - DNA, 553 bp, Homo sapiens
acacagggaagataagtaatttgtccaaggtctttgagtagttaaataatggaactggaactaacaccagggagtctggagstagtgtccatgcccttcaccactgtgcatattgactttcacagttaaattattataccatttcttttgttgcaatgacctaggatatttccgatgcagttgtaatatatggtgaacttcatataatctcaatagttgatattgatagaaaaatccctgtactaccttgacaactttttaaaatctctttgcatttgtaatataagatagtaatattttacatatatatatatatatatatatatatatatataaaatggatttgtgttgaggacttaagagcagtttaatacagtgtcagagaaatgttagaagttcaataaatgtgaccttaaagtttattaatatgtggacttttatttttacttttattgttgttttattataatcactttatccttttattatgaatatattatcttaatattttttggcaactggatattagttgcaataagtaccaccacccacc

SEQ ID NO: 906027 - DNA, 583 bp, Homo sapiens
gaagtcacacctgcactaggaggaaataataaaaattattactcacatagtgaggctttstagcgatagcatggcaggctcatgagcagttccaaaaatggattgagagagcaaagagggctctctctggcttcagactttattgtgttaggtaatggggctagggtaagttttcccatgcaccatcaaagtattgcacgattgcatagtatattagtttttttggggtaccgtaaaaattaccataaaccaggtgacttaaaacaacagaaacattttatttcaagatctggagtctagaagtctgcaatcatagtgtcagtgccattggttcattatagaggctctgagagaaaatatgtcccatgcctttctcctagtttcttctggtggttgccagcaatcttggtcatttcttggctagtaccttcatcactccagtctctgcctccatcatcatatggctgtctttcctgggtgctgttgtgtgtcctctcctctacttagaaagacatcagtcatagtggattaaaagctcaccttaatcttatatgacctcactttaatttagccaattacatct

SEQ ID NO: 906028 - DNA, 612 bp, Homo sapiens
acatctgataccaaccagtttaaggacccccagagaggaaccaaatcatcctgagaatacaatttcttcatcttcctgtcccatgacttcaccctgcactcttccaccrgtcaacgattgccacacccacacttagactcattccaaaacccttaaaaactctagcccaaaactccttgaaaaggcagatttgaggtttcctcacatctcttctttggtagctttacaattaaacccctttctctactgaaacccagtgtctcagcatactgacttgacatgaacactgggcaacagaagtgttatggttacagaaccatgaaataaacctactgccaaaagagataagatgagatttctaactattagtgagccttagtatttaagcatcatgattcaaccttaaataaggctcttttagctttcatgtcaagcctagatggtaggcaagagccaagggcaggtgttctaaattctacataaaggtttgaagccacatttgcctactatgggacaccaaattccttacccttcctataatataaaggacacatataagggagagttaatatgtgtcctgatctaatgtttactataagataacattcttta

SEQ ID NO: 906029 - DNA, 623 bp, Homo sapiens
gctttctaaagcttccttctaataccaggggtagaatgaataataaaatacataccaaggagagctttcccttaggggtagtctgggtctgtattcatatatttctgaatgcctcaaccaaatgaccctgaaacagagcaggatttttgtcttttccctgacttaatttctttaaccttgtcataattaactggcttaacttttttttcctacaacacagtaagtatgtgacaatacttgcaagtcttgacaaattaaagcacatggtcaccttaacaaacatctctatgaacttttttggatcctctgaaaatcgcccatattttgactggagaaagccaaatcacacttagaaaattggacatatattccaagtgttactttatttccatcagctacctcctgcaatcgacacaggttcgattttagacactgatgtgggaccccactcctggtggtactgtttgagcttactttcttctcaggcagtaggagctataarctagggctagtggataaggggaaggggtacctgatggccctggggtggaatccttcattagagaactagtgagattccccctgaccagaattgagggactgaagaagatccacggagcgtt

SEQ ID NO: 906030 - DNA, 718 bp, Homo sapiens
aggcaaacatttgcagcctgtgtacgaagtcatgaagtgaggataagcagaggtttaattcaaattattatgtaagggtttgaaatttgggacctctagaagatatcacttcaacttcagaattatgaggcaagaataaattccagccagcttaaatgatcaataatggagtcctgttttgttctgctagttgaaattgttagtggaaataaagaatgagctgtaagcatgatgggaaatatcttactggaagaaacacttccagctttgtggtatattagaaagattaagggctaggtgtaagtctggattcaaatcctgatgtttccacttgttatataaattaaacaggcagcaactgctctgagcctttgttttcttccctgtaatgtggcagtgatagtagcattcatggcattactgtggtaattaaataagatcatgtactagtgcaggattattgctcaatgctatagttctcttccctaaataatataaatgctggagagaaacagctgtctcagaaattttttgaatgttctaatttaacttgagcatgtggacattacatagcccacgaagcaagtttcygaacttaaaaacaacaagaaaataagtatgtgctagcctccaaaatgcgtgtatttaaaaaaagagtcaagattatatgtattggaattgatctggccgtctgcaggaaatggtgatcaggccctgg

SEQ ID NO: 906031 - DNA, 603 bp, Homo sapiens
cagatctctccttcctttccccttcttcatgctggcaatgacgcattctctgataaaaccccttcccttcctggctattgattttwaaaaaaaatttataaagaaataacatttagggtttctaggtatacaatcatattatcagcaaatcgcagcagtttgagctcctcttgactgatttggatgccctttctttctcgtttgattgctctggcgaggacttccagtactatgttgaatagaagtgctgaaagtgggcatccttgtcttgttgcagttctcagaggaaatgctttctacttttccccattcagtataatgttggctggtggtttgttgtcaatggtttttattaccttaaggtatgtcccttctatgccgattttgctgagggttttaatcataaaggatgctggattttgtcaaaagctttttctgcatctattgagatgatcatgtgattttcgtttttaattctgtttatgtggtgtagcacatttattgacttatgtatgttaaaccatccctgcatccctgataagaaacccacctgatcatggtggattatctttttgatatgttgttggatttggttagctagta

SEQ ID NO: 906032 - DNA, 585 bp, Homo sapiens
actgcttttgcccagtataggagcaaactcctgccttcctgtctctcccatactgagagatatatgggaagaaagaggcacacttyaccatttctttgctttcctatttaccaagactttgtactcatgggaagtccttcttgaagtctaacttcaacccttgctgctgctggaaagccacataatctattgtttctccatagaacctggatctctggtgctttgatgtcttttccttgaaccaggcagcagatgaccatgccctgaggaccattgtttttgagttgctgactcggcataacctcatcagccgcttcaaggttgggcagcatcctacctctacctccaggcaggattctccactcctctcatgcctgttctaaaagcctcccaacaaacagattccatagatcccctcactcagtctcaacatcagggaagtctccccatgcccacgcccagcctagcctttctttcacttgctgcagtcttagttccagacttcattaattgatttctagggggagattctcggtctgcaaccatctagcctgggattctgctctctcccgctttgcttttttc

SEQ ID NO: 906033 - DNA, 608 bp, Homo sapiens
ggagtctctgtgaatctgctgtgattctggagctgcccaattcaccaattgttcattgctcaattaaattcctttaaatttmatttggccaaagtttttctttaatcagatggtgtcagaagcagcaactgaagtagagcttctggcgacccccaggagcactgagtgaacaagcaaggtacctgcaggacccatttgtgtccactgatgtctcagagtagctggggatcatgagtaagtgctctctcggatttcagagccacatatttgtgttttgagccattggagtttctttgagtaaatttctgatccaaactgggtttgaaagttgtgacagcaactgggctgggtccaggaatggatttgatctgggaattaactggcttggatccaattagagacctcttacatctgactgggtcagaaaggaactggcagttagcagtaatattgcaggagtcataaaatacggcttttgaaaattcacagggatttttgtgtcctacccctttgtttcatttttcttgcatgcctaagtaggaaaaattattggctaagttaatcgggagaacctaagagtaaagccaatattttaggtaaaatgggat

SEQ ID NO: 906034 - DNA, 616 bp, Homo sapiens
cagaaaatcaatataatatttcctgaagtcagagaggaaagaatatttgggtcgagtgccttcagaagagagaataaatgtgrgtattattatgtgggcataaaagaaagccctctttctttatttttttaaaaagagccataatttgtacagaaagttaaaaagcaacctgataaaaatgttgtatttttactcatgcaaatgagatggcacaaaatattctttaaagtctgcttgttaggatagctctgaaacacagcaggagttttgatttcccatgacttgaggaattcattatattgaatgaattgtaagactatgatctataccttgtacctctgctgtgtttactcttcgtcttctttttcatcctgtatttctgataatgcttctagccgaggacgaagaaactcgcacacaagacatcaggtatagtgctagagggacgtgagggtgctctttcactgttggtatcattttcaagtcgtgctcatgcttggctttaattagattgttaaggtttttaaaagaaaaatgtttgcatttggaaatcagacaagtttataaataggttttacttagaaactgtagcaatcaaacactagaggaaaaatgg

SEQ ID NO: 906035 - DNA, 673 bp, Homo sapiens
acatattctaacaattgtacagattctagagctaaaaatagtcactgcatttttaaaaggttgaaaaatagtaaaaaaaaawtttcaggaacatgaaagttatatgaaattcagatttcagtatgtattaagttttatcagcacacagtcatgccaattcatgtaactgactgtattagtcagggttctcttgacctatagattcatattgtccactgcccagaaactgccaatttaccaagacaggggaattgtaatagagaaatattttaacatgtagagccagctaaacagaagatcagagttttattattactcaagtcagcctccctgaaaatttggaggctagagtttttcaaagatagtttggtgggcaggggtactactgattggttggtaatgcagtcataggggtgtagaaaatggttgtcatgtgcctagccctcttctaggtgggggccacaagactagttgagctgagagttgtgggtccaggtggggctattcagtcgtcagaaatgcaaaagcctgaaaagacatcttaggttctacaatagtgttgttaattacaggagtaattggggaagttgtaaagcttgtgacctccagaataatggttggtaatcacttaactatgcctacattttagcagaattcaggcccctctcatcct

SEQ ID NO: 906036 - DNA, 661 bp, Homo sapiens
tcacagaagcaccaagtgattaaatgaactaatttaccagaacatcaaattgggctcttaaaagtgattttattttgtstaagcccccataatattcacagagagatgttcatttcccacaggatgaagcccattcttccttaagaggaatcctggacagataatacaaacaattaaacggaaataaaccattttaaccaccccctacccccgacacccccaacctctgcagttcaaatgctccagccatcaaagctggccagcccaaaccagctgcttaagatcatcctttgaggtacaatgaactagggctttgttagatctggagtgagaaaggatttcaaagacaagtgccctgcttgggaaatgatttcctgatgacctcttcaaattacatactttttctcagaatacagttaggtcctagtccttattccctccactatgaatctcccctaaaccccagagtgaagcatggctagaagaaaatgataagagaaatggtgagatctccccaacccatgacaaaatttcactgattaaccactgcctaaaaatataaaatgaactagagacaagatgtcctccatttctgactctgcacattctggataacttgattctgtgtctttatatcttggtttaatttcaaaaaacaaaa

SEQ ID NO: 906037 - DNA, 597 bp, Homo sapiens
tttgttgaaaagtgtgaaccaacatcatrgggaaaaattaccttaacattaacttctaaaaaatgatgaatcaagcaatttcctgaaaatgtgcaagaacagactttcagaatgatgttctatgaactgtagtctgcaggtcatttgaaatccagcaaatattttcatcctccttcttctgattctataacttattctatatctagaattactctaaagactaattctaacctggatacaagataaaaagtaaagatggaagattctaaagaacaattttaacaatgtcccatttagggggattttcattacatactttatgaacacaggttcggcatattagctatccgtggaaataagtcacttactacatctacatgagcatgttgagatgaaagtgtttgcaaatcatgctttttcaagggtggctaaacaaatctctattcatctattacaactcatagtcattgctaatgttcaaatatattagggttgaacataacacaaaaatggaaatgccggaaagattaacattatttaatctacagatgactcatgctactggtttaaccattttctttagatttttttcatata

SEQ ID NO: 906038 - DNA, 588 bp, Homo sapiens
cttttcttttctttttctgtcttgctgtcttgcccaggttggaatacagtggcacaatctcggctcactgcctttgcctcctaggttcaagcaattctcatgcctcagccacttaagtagctgggactacaggtgtgtgccaccacacccagttcgtttttgtatttttattaaagacgggattttgccatgttggccaggctcgcctcgaactcctgagctgaagtgatccatccgcctcagcctcccaaagtgctgggattacaggcgtgagccaccacacccaccctttactttttataataaaattttttttatacatttgttatatatgtgctatatataattaccatatatgatttgttataaacattagtatataaatgctggatttctaattggatcaaattatggacattgttttaatttacttattgtatgtgtatatatatacaacttatttatgtgaagatatttatatatatagtttttaagactaaataagggtggtattrtgtttgctaggcctggcatttgtatggtacataaggtttaaaagttcactttcttttttctgccccttgggtt

SEQ ID NO: 906039 - DNA, 661 bp, Homo sapiens
tactactttcggcctgtccagctgtgcattaagatctttgcacatggtatttcattttatttttttcaacaatcccaaatgatactaatatccttgttttgctgctaatgagtgaggggcagagagaggttactcatttgccaaagttccatctctaagaagtgcagagtcaaggtcgaagcatggtgctcttcatccctggactgtgctggccactcaggaacctacagaagccatcgtttcctggactttgggaaaggaaaatgtgtggataaagaggcaggataactgtaaccttaacacggtgctccctcccactcgggcagggtctttgtcttcctcccttgattattcttcatacctgactgagtgtggctcatctaaggcagagcataggcacatgggaggcacaaccgtatttgaccagtgactgacatacattatcctgtctgattctcataatgaccatgagcagtaacaaggaaaggtattattatctttatatggaattaaagggactttacctgaattaaagggactatctcacattcccaaagctgatttaartaaatttctgagttgttttaattgtcagggtgacagcttacctataaagggtgcagcttttggaagcagggatcattttctatacacttttgta

SEQ ID NO: 906040 - DNA, 622 bp, Homo sapiens
aagtttgttttttatttccaaaagttttgattattttttattgatgctatctgtttctctggarattttttgtccatctcctgtattatttttaaaatttccttaaattgtttttcacttttctgtggtgcctccatgagtagcttaataatccaccttctaaattctttatatttaattttttatgtccataggttgaccttctgaattatttttctggcaattcagagatttcttcttggtttggacccattgctggtgagctagtatcatctttttggagtgttaaagaaccttgctttatcattaccagaattggttccttctcatttgagtagactctgtcagaggaaagatctgggattctacagctgccgttcagattcttttgtcccatggggtgatccctttatgtggtgctcttcccctttccctaaggatggggcttcctaagagccagactacagtgattgttattgctcttctgggtctagcctcccagtgaagttactgggctccaggctggtactgaggagtgtctgtaaagagtcctgtgacaggattcatcttcaggtctctcagctgtggatactagcacctgctccagtggaggtagcaggac

SEQ ID NO: 906041 - DNA, 573 bp, Homo sapiens
ctcattgttcaattcccacctgtgagtgagaacatgtggtgtttggttttctgtctttgtgatagtttgctgagaatgatggtttccagcttcatctatgtccctgcaaaggacaggaactcatccttcttcatggctgcatagaattccaaagtgtatagtgccatagtttctttatccactctatcattgatgggcatttgggttagttccaagtctttgctgttgtgaacagtgccacagtaaacgtacatgtgcatgtgtctttatagtagaatgatttatatgacccagtaatgggattgctgggtcaaatggtatttctagttctagatccttgaggaatagccacactgtcttccataatggttgaaataatttacactcttaccaacagtgtaaaagatttcctatttctccacatcctctccagcatctgttgtttcctgactttttaatgatcaccattctaactggtgtgagatgatatctcattgtggcttkgatttgcatttccctagtgaccagtaataataagctttttttcatatgtttgttggctgcatagatgtc

SEQ ID NO: 906042 - DNA, 467 bp, Homo sapiens
gaaaactacagtattcttttgaatgatatcaaagcagaattaaataaatggaragatagttcatgctcatgaataggaatactcaatattgtcaagatgccaattcttccaaacttgatctatagagtcaatacaatatcaatcaaaatcccggaagaagaacagagttggaggactcacactacccaacgtcaagacttaatataaagctacagtaatcaaaacgatgtggcataggcaaaaagaaaaatagattgacaaagagataaatataacaaaatagagacattagaaatagatccaactaaatataatcatctgatctttgacaaaggagaaaaggcaatacaatggagcaaagatagtcttttcaacaaatggtgctggaacaactggacatccacatgcaacaaaatgaatctagacacagattttacacccttcaaaaaattaactcaaactggatc

SEQ ID NO: 906043 - DNA, 675 bp, Homo sapiens
attcttcctatccatgagcatggaatgtttttccatttgtttgtgtcctctcttatttgcttgagcagtggtttgtagttctccttgaagcagtccttcacatcttttacaattgtattcctagatattctctttgtagcaattgagaatgggagtttcctcatgatttggttgtttgtctatttttagtgtataggaatgattgtgatttttgcacattgattttgtgtcctgagactttcctgaagttgcttatcaggttaaggagatttgaagctgaggcaatggggttttctaagtatacaatcaatcatctgcaacagagacaatttgacttcctctcttcctatttgaatacgctttatttctttctcttgcttgactgtcctggacagaacttccaatactatgttccaataggagtggtgagagagggcatccttgtcttgtgccagttttcaaagggaatgcttccagcttttgcccattcagtatgatattgcctgtggggttgccataaatagatcttattattttgagacatgttctgtcaatacctagtttattgagagttgttagcatgaaggggtattgaattttgttgaaggccttytctgcatctattgagataatcatgtgatttttgtcattggtactgcttatgtgatggattat

SEQ ID NO: 906044 - DNA, 573 bp, Homo sapiens
ccttctgaggtaataatttgcaggaaagcccaaagatttaatgttttaagtattcttttttttatttgatcagtgtaattttcttgttcaatttaatgatgatgttaacattagactgtccaaaacctttgatttactgctaattgtcaacttctgagccatgctgagcagactctcacaccttcatccatggacataattatgtgaaccctctctttagtagtcaaggccatagatttaaaatataggcaaaatagtagctctgaggaatcctttttacaaaaaccagggtttatgtttatgatttttaaaaatctacctaaaaatgtatagatagcttctttgcccttttagaaccacccttaacggtttttcctctgtgtgacttctggcattttccaaatgttctacaaagtgcccacaaccattaaatgattttccctttgtcaattcggatccattttccaccctcttctgtaccacaatatgctccaggaggatcttctctatgrgcttccttccttacactctggttgcagatgagtttggtcagttggaggcacccagagcaaa

SEQ ID NO: 906045 - DNA, 593 bp, Homo sapiens
gcagacatgtaaatagataatattaatatttaaaacaatcattaatgaaagatgcaacacacctaaccatgtctctctacaagaagcaaaaaagatttcagagaagagtggtgtggatcttgaaggattaacaggggtttgacaaggatcttctgaactagagagaaacataaactttcttggggttgaaaccatttattttagacttcttaatattttctctgagagacattcagcaaatatattaatttgattagagttttagtttacaatccaatgtaaaaataaattgccagttcctaaaacgtatttccaactgatgatgttagaatgctttttatagccaagttgataactatagtgagtttgtatagttggtgaggtctatttatgaaatacttaccatgggatcaaatcaaataatgatcatgaatgagcatgcaagtaaattgaccttttttaattttttgttttaaatatataaaaatttaataataatgttatctatggaaacctcagattttctgagaaaatctatgctttygtttgaacttctctgcctacattattaaaatttgattgtatttatttaa

SEQ ID NO: 906046 - DNA, 599 bp, Homo sapiens
ccattttcatccactgcagtatccttggatcatgttcttgtttggmgttttattagcaggacaagtggtgggctggtttgaagaatacaattcagggtttctttaaatctcttttttttttttttttttttttgacatttctcgttgtattgcaccatgtcaagtaagcatgaaccactgtgcacagtatattgaattttcttcaggtagttcaaaacaaattaattctctacccacacatcatttaaagcactaattccctgtgcagcccagcaaacttcaagctgtacctgttcagcatataaagttaaggcagtgcaccatgaacacctgtgaaagtttatggccgtctgcttcctcaagaaatctaaattccaataatataaaattaacagatggggaagagctataacctcagctttgaagagggtaacggcaacctttaattaacatagtgtcattttgctggcaattgtttacaatggccacagggacatagttcaacaatgatggcacattagtgacatactttgcttttgttcagggatagtttgtatggagaatatctctcgatttctaaaactctaacttaaggtaag

SEQ ID NO: 906047 - DNA, 584 bp, Homo sapiens
caatacgggaagccaagtttgcaggccacagaagtgttctgaacagaagatggtgatgtataagagcrgaggcagtgatgattgaaggaagtatcagaaacgaaaggatatttaggaattaaaactgataaggctcaatgattaactgtgggaagtaaggaggatggaaaactagaggttactttagcttcctgacttaagtaattcagatgatgatgccatctatagaaccatctggaacactggggaagaggtaggtttgcagtgggcatgggaaagaagattcatgccctttggggcattttaaatagcagtgctttgaaagtcttcaggtagactgtgataacctgttaattagactggaggccccatgaagccagtgaccacacccatgttgttcagtgctatatccccagtgtctgtcacaccacttgctctctagtaggccatcaggaatatgtctcattattaattattaatgagacaaattaatatgtctcattaattccgaatgagctgctctaagttattttaggaaatatttggcgtcaaatacttatagtgcaaataatgatattaataac

SEQ ID NO: 906048 - DNA, 483 bp, Homo sapiens
tttcttccatgattgtaagtttcctgaggcctccccagctatgtggaactgtgagtcaattaaacttcttttctttatraattatccagtctcaggcagttctttatagtagagtgagaccagactaataaagtaaattggtaccaggtattggggcactgctgtaaagatacacaaaaatgtggacgtgactttggaactgggtaacagtaagagattggaatcatttggagggctcagaagaaggcaggaaaatgtgggaaagttgaaacttccttgacttggagggctcagaagacaggaagatatgggaaagtttggaacttcctggaaacctgttgaaaggctttgaccaaattgctgatactgatatgaacaataaagtctgggttgaggtcatctcagatggagatgagaaacttattgggaactggagtgaaggtcattcttgctatgcaaagagactggtggcattttgcccct

SEQ ID NO: 906049 - DNA, 610 bp, Homo sapiens
ttagtgtttccttccttctgctaactctgagtttagctttwtgtttttatagctccttgaatataaatttagattatttatttgagatttttttctgaatataggtacttatcactatgaagtcccttcttaaaagtgctttttctgaatctcgtaagttttggtatagcatgtttccattttaatgtatctcaatgtatttttttatttagcttttggtttcttccttgacctgttggttggttaggaacgtggtgtttgatttccacaaagttttgaattttccaactttcctcacattatttatttctagtctcatatcattgtgtcagaaactgtacttggtataattgcatctgcttaaattcctaagcaaaaagaacaaagctggaggcatcacattacctaacttcaaactactctacaaggctacagtaaccaaaactacatgctactggtacaaaaacagacacatagaccaatgcaacagaatagagagctcagaagaagggccacacactgtgactatcttatctttgacaaatatgattttttttaaaaaaagcaagcaatggggaaagtattcccctattcaataaatgatgctggg

SEQ ID NO: 906050 - DNA, 644 bp, Homo sapiens
ttcaacaagcctggagataggtccatgctgagcggagctgaaacagatttttaaaggctcagggaagtgaacatgctggtatattatggcgatcagaagacccatcagaggattattatgcccagggaggtctggagaacacagcattcaccaagccattgggaaattagctgaaggctttcctctgcagaccacaactggtggtgtgaaaggctgttgtggagttgaatccacagagagtagtgatgatggggtgaaacagatgggaatcttgtgaggatacttctcaatacatctaatcaaaagatagccaacacaggccaggcgcagtggctcccacctgtaatcccagcactttgggaggccgaggtgggtggatcacttgaggtcaggaattcaagactagcctggccaacatggtgaaaccctgtctctactaaaaatacaaaaatcagctggatgcgatggtgtgcacctgtggtcccagctacttggaggctgaggcaggagaatcacttgaacccagaaggtagaggttgcagtgagctgaagttgtgccacttcactccagcctgggaaacagagtgagaccttgtattwaaaaaaaaaaaaatccaacaaggatgcccaggaggctgagggtg

SEQ ID NO: 906051 - DNA, 611 bp, Homo sapiens
ttttgtggttccatatacattttttgattgtttcttctatttctttgaagaatgtcattggcattttgatatggattgtgttgaatatgtagattgctttgggtagtatgaacattttaacagtattaattgttccaacccatgaatatgaaatatcttttcatatttttgtgtcttcaatttcttttgccaaagttttatagttttcattgtagagatctttcagttctttggttaattcataggtatttaattttatttatagctattgtaggtggaattactttttaaatttctctttcagattgttcactgttggcatatagaaatgctgcagatatttgtgtgttgactttgtatcctgaaatgtttatattcagtttattcagttaataaactcaatttgtttattagttctaatagtttttttggtgaaatctttaggtttttccaaatataagttcatatcatcttcagacaaggataacttgacttcttcctttacaatttggatgccctttatttcyttctcttgactcattgctctagctaggacttctccatattgagcaacagtggtgaaagtgggcatccttgttatgtcccagatc

SEQ ID NO: 906052 - DNA, 679 bp, Homo sapiens
tcaacccgtcatctaggttttaagccccacatgcattagccatttgtcctaatgctctccctaccctttcccgctaacccccgactggccccagtttgtgttgtttccccccttgtgtccatgtgttctcattgttcaactcccacttacgagtgagatacatggtgtttgattttctattcctatgttagtttgctgaggatggtagcttccagcttcatccatgtccttgcaaagtacatgatctcattcctttttatggctccatagtattccagggtgtatatgtaccacttttcattatccagtctatcattaatgggtgtttaggttggttccatgtctttgctactgtaaatagtgctataataaacatatgtatgcatgtgtctttgtaacggaatgatttatattcctttgggtatatactcagtaatgggattgctgggtcaaatggtatttctggttctagatccctggagaattgccatactatctcccaaaatggttgaaataatttacattcctaataactgtgtaaaaacgttcctgtttctccacagcctcgccagtatctattacttmttgactttttaagaatcgtcattctgactggcatgggatggtatctcattgtggttttgatttgcatttttctaaaatgatcagtgatgttgag

SEQ ID NO: 906053 - DNA, 499 bp, Homo sapiens
ccctcagtctgaatttcattgcccatatcattattagcattttggtcaaagccattcaccaagtctctaggaggtagcaaactttccyatgtcttcctgttttcttctgaccacttcaaactgttccaacctctgcctgttgtccagttccaaagttgcttccacattttcaggtaacttcacagcagcaccccactcctggtgccaatttactgtattagtcccttctcatactgctatgaacaaatgcccaagactgtgtaatttataaataacagacatgtaattgactcacagttcctcatggagggggaggcctcaggaaacttacaatcatggtggtagctaactcttcacagggcggcaggagagagaatgagtgtcaagtgaaaggggaagcacctcataaaagtatcagatctcatgagaactcattcactatcatgagaacagtatggcggaaactgtccccataattcaattatctccacctgttccc

SEQ ID NO: 906054 - DNA, 598 bp, Homo sapiens
ttctttttcttcccctcccctcttccttctctttctcctcctgttctcgtttcatcatcatcatcatcatcatcatcatcatcatcatcatcagctatgaatgggtttgtattcagagcactttgcaggttgggttcatgaacaaacgataaaaactttacccttcaggaatttgtactttgagaatggagctacagcataacacatacataagaaaaaacagtaagatatgccatatagtaagtgacaaacatttaagaaataactgttacaacaattcgaaaaagttattagtcctttaattctgactctctgactcaaggaaaattgcttggtcacctttttaaatgggcacagtgtgttaagatgagaggaaaggaaacatggagaaggaatctgcatttactcaactcctagtatgttccaggaattgtaataggcgcttttacctagtctttattacatctaactcacattaaacagacctaaacccaaagataatggtagagaaaaytaattctcaaaatggagattttgaaaaaaatatggttgaataacacagattaagttacagagaaaatgaaggtggagaaaagga

SEQ ID NO: 906055 - DNA, 643 bp, Homo sapiens
gagaagagtgatttatggaagcacaaacaattagattcttacattactgtgggaaatgacagattaataaagratagagaaatacacaggcaactctacatttcttcattatctaagatcccatatcaaccctaccatctttaatttttatatccctacaactgtaagaccatgttagtggggaatacaaattcagaggtggccttgcatatttgccttaattaaagaattgtattttgactggggtaggtagtcaagaaaataagtcataaagatcagcattttgaaatgtgaactaatatattaaggtttcttaggtgtttccagttttctaagattactgagctatttctaattttagtgcttagttataaattcacacacaactataataagaaaataattggtaaaaacatgtatagcttccttttaagtatttatgcatattatagcttaactagctcccattgacagattagtacgcagtagaatatgattcagaatgtcaccgccatttcggaataaaacataaacatatgtgtgacaaaattgttacacacaatcgttacaaaatcaaaaacccatgtgtatgttttttattcccaagtgacagtaacattctgatttatattttactgtctaa

SEQ ID NO: 906056 - DNA, 531 bp, Homo sapiens
gcccactttccccaatcgcaagcttttctttgttctccatgagtcaccttatttgcctggttcgtcccagtgtgagaacrtggatatttcagtcgaaggtgttgaattcacttgccccttttcatacctcttggtgagtgctgcagactgtgctgctttttttttttctttcttttttttaaatcatactttaagttctagggtacgtgtgcacaacatgcaggtttgttacgtatgtatacacatgccatgttggtgtgctgcacccattaactcatcatttacattaggtatatctcctaatgctatccctcccccatccccccaccccatgacaggccctggtgtgtgatgttccccttcctgtgtccaagtgttctgattgttcaattcccacctatgagtgagaacatgaagtgtttggttttttgtctttgccatagtttcctgagaatgatggttttcagcttcatccatgtccctacaaaggacatgaactcatcattttttatggctgcatagtattccatg

SEQ ID NO: 906057 - DNA, 531 bp, Homo sapiens
gcccactttccccaatcgcaagcttttctttgttctccatgagtcaccttatttgcctggttcgtcccagtgtgagaacatggatatttcagtcgaaggtgttgaattcacttgccccttttcatacctctyggtgagtgctgcagactgtgctgctttttttttttctttcttttttttaaatcatactttaagttctagggtacgtgtgcacaacatgcaggtttgttacgtatgtatacacatgccatgttggtgtgctgcacccattaactcatcatttacattaggtatatctcctaatgctatccctcccccatccccccaccccatgacaggccctggtgtgtgatgttccccttcctgtgtccaagtgttctgattgttcaattcccacctatgagtgagaacatgaagtgtttggttttttgtctttgccatagtttcctgagaatgatggttttcagcttcatccatgtccctacaaaggacatgaactcatcattttttatggctgcatagtattccatg

SEQ ID NO: 906058 - DNA, 617 bp, Homo sapiens
ttcaattcctgggtatccatgttaactttgtgtctcattgatctgtctaatgttgacagtggggtgttaaagtctcccattattawtgtgtgggagtctaagtctctttgtaggtcactcaggacttgctttatgaaactgggtcctcctgtattgggtgcatatatatttaggatagttagctcttcttgttgaattgaataaatacttaaacgttagacctaaaaccataaaaactctagaagaaaacctaggcattaccattcaggacataggcatgggcaaggacttcatgtctaaaacaccaaaagcaatggcaacaaaagccaaaattgacaaatgggatctaattaaactaaagagctcctgcacagcaaaagaaactaccatcagagtgaacaggcaacctacaaaatgggagaaaatttcgcaacgtactcatctgacaaagggctaatatccagaatctacaatgaactcaaacaaatttacaagaaaaaaacaaacaaccccatcaaaaagtgggcataggacatgaacagacacttctcaaaagaagacatttatgcagccaaaaagcacatgaaaaaatgcccaccatcattggccatctgaaa

SEQ ID NO: 906059 - DNA, 587 bp, Homo sapiens
tatcaaggatttcctaagaagtggtgggtatgagacctggtctcagtgagaagaaagaatgaaagagatatgtcaatatttgaaagcttgccatcttccttactgatgggccttgttcagctatgttgctgtcttgcaataatgccacgtcacttctggtactctcgagcagaaagaactttctcatattccaaccaagatcaggccaatggaggaaatgctggcaaaaaactcaaaccagatcaaaatgtggctcaaagaaaatgatgcagttttatacaatgagtcaagtaagtcatgttgcacaatgaatatcctgtaacccaaatgcaattttttttcttgaatatatctgtcacatagggggaaaagcaaaaatatgttcaaaaagactcaaatatacaatttagcttgcagattgaagacttctgcttttactatgcaatgttaacctttttcaaatggaatctaaatgaatgaaggaaaagaatctcaccaattgatttggctaaagattttgaggtggatgttgattctttgcayttgtccaaaacgttgtctctatttttggtggccctctgaagagt

SEQ ID NO: 906060 - DNA, 634 bp, Homo sapiens
gttatgtgatgcctccagttttgttctttgtgcttaaaattgctttggctgtttgggctcttttttggttccttatgaattttaraatcgctttttctagttctgtgcagaatgtcattggtagtttgataggaataacattgaatctgtaaaatgctctaggcagtaatgccattttaacaatattgatttttcctatccatgagtatggaatgcttttttccatttgtttgtgtcatctctgatttcttcaagcagtgttttgtaattttttttttctttttttgagatagagtctcactctatcccccaggctggagtgcagtggtgtgatctcggctcgctgcaacctccacctcccagattcaagcaattctcatgcctcagtctcctgagtagctgggattacaggtgcctgtcaccacacctggctgatttttgtatttttagtagaggtggggtttcaccgtgttggccaggctggccccaaactcctgacctcaggtgatccacccgcctcatcctcccaaagtgctgggatcacaggtgtgagccactgtgcctggcctgtaattcttattgcagagatcttttacctttctccttagctgtattcctaggtatgtttttcttt

SEQ ID NO: 906061 - DNA, 581 bp, Homo sapiens
tggcaaaggtccccaaataccagtggaaatcttagtgagtgtgtctcctccaactaacgcaacccgttctctgactgggagatctaatcctgtgcttccaggtgttctgcaatccgcatktgcattctcaaaagctagagccaaagtcaaagctagcatttctgcagccacagaagaagacagtacaagccaattttcatcctccctttcctgttcaccaccctccaaaggtgctgtaggtggggcaaaaaattccctcaaaccctgaaatagtaacaaaaagatggtatgtaccaaactccaaacaaaaaagagaaaagaaataacaaaattattccccatgttaccctgattcaaaaacttccccttctttgtatctctagggcactgaccagtacctttttagagcactgaacttatgttgctgccagcagacttgtaacggggtttgtcattcatctggttgattttagttttttctgttccagcaaaccttcctcgttcaagtccctataggaccctatctgtccctgtctgtccctgcaagtttctgctggcttctgctagtctctactagtctt

SEQ ID NO: 906062 - DNA, 611 bp, Homo sapiens
cgagtttttgtaagaagaggaggagtcaccactttgggaaccatccattagacgttccaatattgctgcagacatggactttggcaagttctcttcttctctgacacccagmccttcccccactggcaacagcaacttgggttggctcttcagctatggcagtgcctacctctggggaactgtgactttctttataccctatctaataacacagtgtgtccttatacatagtaggtgttcaatatacatctgttgaagggatttcatcacagttaaatctgtggagagttcaacagataagtgagttgctcaagatggtcagaggctgtcttattccatttgggctgccgtaacaaaataccttagcctagggggcttataagcagcagaaattttgtctcataggtctggatgctggcaagtggaaggtcaaagtagtggcagattaggtgtctgttgaggacctgtatcttacagagggcacctcctagctgtgtcctcacatggtggaaggagagaacaagctcccttggctcccttttacaaggcctcttatcccattcatgggctctttgctttcatggtgaaatcacttcctaaagtctttgcct

SEQ ID NO: 906063 - DNA, 634 bp, Homo sapiens
aacagaatgggggaacggcccccatgattccaattatctcccactaggtccctcccaggacacaggagaattatgggaagacaattcaagatgagatttaggtggggacacacagccaaatcatatcatgcactgtctttgtcttttaactttattcatcgcctcttttgtcagatcaaagcttctacatttaatacaactgaatgaatttatcagtaatttattttacggtgtctgtgttttgtgtcatataaaatttttctctctgcttagtgtcataaaatatgtcctctgttttcttctaaaaattggaaatctacttttcatattttatttcctttgttattttatttgtagggatgtgaggtagaaatctctattaattaactctagctttgtaacaagtaatcccacacctcagaggcctatgaccataggccaccatttctcactcatgagcatgggttgcttgggaggtttcagttcgaaatgtggtggttgagctgcatctgctccaagtgtctctgatcctcctggggtcggggcctgccagggtrccttcttctcatggcaatggcaggagtgcaaagaacaaagggaaatgtgaagatctcttatcttaccacccaggctc

SEQ ID NO: 906064 - DNA, 562 bp, Homo sapiens
ttgatttccctgaaatatcttttctaagctctcaaaaatgagtctaacttaatttagtaagtatgtgaccagtttctagtaaacttgatttcttcttctaagctcttgctagttttttaatagaatcttgcttacaattaaactttgtaatatacatatgcataattttgctgaattgctcgagaacaagaggaagacagcaaagaattttttaatatactacaatataatgatcactctcaagaaatgtattattaatatattatgtaatacatagttcacattcagatttatccactgccacataatgtttttcagagcactatccaaatgaggttcatatgttgcttttagttgttgtgtctttttagtctctttaagtctaaagtagtttccctgccttttacagctttcatgacactgaagaattttggagagttcagtacaattattttgcaaaatatttctgtatatggatttatctgattgttccttcatgatcrgattctggtgaaacatttttgtcaagaatactacataattgatgtgtctttctaagtgt

SEQ ID NO: 906065 - DNA, 645 bp, Homo sapiens
cgagtgttttcattgagagtagctttttttacataagtaacaaarggtaaaataatcacacagatcatatgtcaatatgtcttccatatgttgtatatacaaactataaatgcatgtagattatatatgtagactacttagaaatacacatacacagtcttacttcagtacctttcaggtataataggtggcaggcagattgaaagcattttatttatggtgagacattgagaaaggttgagcataaataaaatggaaatcaaattgctattagagtcaaatagttaagcatgagcctaaccattgcaaggaaattagaggaaagaaaaattgagaattaaaaatatattttattaaccaacttttagtactctctttaatgggaatgtaccacaagttctactaaaataaatgcggtaacaaaaatgcttcaaaatgcgtatgcatgggagctgggtacaatgttgagaacaagtgcaagtgatgacttgattcagttaaggtggctgtcagtttagtttactatcaaacctgcaacaagctgtgtagaggacaaacacaaggttaagaacacagtgagcaggatcactcatgcctccttcgttcatcctgggatgcaccaataattctggagattcagcagca

SEQ ID NO: 906066 - DNA, 579 bp, Homo sapiens
gcaaagtaatcaaaagctagcagaagataagcaataactaagattagagaagaactgaaggagatacagacacgaaaaaccctccaaaaaatcaacaaatacaggagcaggttttttgaaaaaattaacraaatcgatagaccactagccagactaataaagaagagaaagaagaattaaatagacaataaaaaatgataaagaagatatcagcactgaccccatagaaatacaaactaccatcagagaatactataaacaactctatgcaaacaaactacaaaatctagaagatatggaggaatccctggatgcatacattctacaaagactaaaccaggaagaagttgaatccctgaatagaccaataacaagctctgaaactgaggcagtaattaatagcctatcaaccaaaaaaaaagcccaggaccagacagattcatagctgaatgctgccagaaatacaaggaggagctggtaccattccttctgaaactattccaaacatttgaaaaggagggactcctccctaactcattttatgaagccagaatcatcctgatacaaaaactgggaaga

SEQ ID NO: 906067 - DNA, 614 bp, Homo sapiens
agaacacatggacacaggaaggggaacatcatacactgggacctgttgtagggtgcgggagtggggagggataacawtaggagatatacctaatgttaaatgatgagttaatgggtgcttcacaccaacatggcacatgtggcacatgtatacatatgtaactaacctgcacgttgtgtacatgtaccctaaaacttaaagtataataaaaaaaattagaaaaaataaaaataaaaaaataaaataaaataaaaaaagaaaatggcacagtatttgcatataacctacacatatcctctcatatatttaaaaatcatttctagatcacttacaatacctaataaaatgtcaatgctatagaaataattaaaaaaaagaaaataacaatggtcaacgctaaaggtattgtgttcagttattgaagttttttctgccaagtgttatcacaaaggacagccgagttgaaaatttatacatggggggcatctgcctgtgcatttgtaagcgtatacatccactgctgcttcttgctctgtgtatgtttatactcaataatatcttgtccttgaacttctagaatacctttcccatgaagacatctgtaaactatcagt

SEQ ID NO: 906068 - DNA, 614 bp, Homo sapiens
agaacacatggacacaggaaggggaacatcatacactgggacctgttgtagggtgcgggagtggggagggataacaataggagatatacctaatgttaaatgatgagttaatgggtgctkcacaccaacatggcacatgtggcacatgtatacatatgtaactaacctgcacgttgtgtacatgtaccctaaaacttaaagtataataaaaaaaattagaaaaaataaaaataaaaaaataaaataaaataaaaaaagaaaatggcacagtatttgcatataacctacacatatcctctcatatatttaaaaatcatttctagatcacttacaatacctaataaaatgtcaatgctatagaaataattaaaaaaaagaaaataacaatggtcaacgctaaaggtattgtgttcagttattgaagttttttctgccaagtgttatcacaaaggacagccgagttgaaaatttatacatggggggcatctgcctgtgcatttgtaagcgtatacatccactgctgcttcttgctctgtgtatgtttatactcaataatatcttgtccttgaacttctagaatacctttcccatgaagacatctgtaaactatcagt

SEQ ID NO: 906069 - DNA, 549 bp, Homo sapiens
tctgtaaaatgctttagcttcttttaaatcatgaaaaggatgaatgggaagaaatacagacatttaaatattccacatctgtattcattctgaaattgcttgtccacaaarcatggtatgtaactgtgataaaatatccttctgaaagtgaaaataatctccttcgtattgtaaattttcagttaaacccaaatgctggtcaatgtgaacttatttttattaaaaaaattttaaacagctttattgaggagtaagtgacacccaagctgcacatattagaagtgtaaagtttgatgttttgacataggtatccacccataaagctatcaccactgaagataatagacatatttgtcaccccgacagtttcctcttacccttcagtactgtctccctcctgcctctgatccacagccagtcactgataaggtttttataactgtagattagtttgcattttctaatttatatattatataaatagaatcatgcggtgggtaatcttcttttattctggcttctttcactcaacataattattttgagatt

SEQ ID NO: 906070 - DNA, 593 bp, Homo sapiens
ggggatttgtgagttaattactctctggctgtttttaacatcatcagtttaccatggagtttaaggatgtttgggctttagcctggcagttctctgtgctgttgtctggggttgtctggggaggaagagaggatgttgtgtctgatatctacaggcctgtcctggcagaatagggcctctcactggctgaactgggtgtgtttggtttatgtgggattagaatgcacagtggccatataattcaggagacaagaaagagccttgagaggaatgtcaaataaatctctctactttgtgtactcatgatgcttgttctctatgtaataaaagacttagtgatcatcatttgtattgttcatttaattgtccttttactagcctgtaagttttgtgagtgcagggacaaccatgtctgtgttcatccattatacttatacaagaagtacttactgaatgttgaataaggtgtctttatgcttcttgtatttattttacatttgtagttatagagtttctaattgtaggaattaatattaacakctttaagccctttaggaaagatggaaggtaaatatgaactgtttattagtctg

SEQ ID NO: 906071 - DNA, 686 bp, Homo sapiens
tgaatgctgatgataaattttctaaactcatgtgcttcatctttaataattagttttcttgttcaataaaataaaaattacatattgagatttccttatataagtatttttctatttttcaaatagctttcttatttacttttaaaatgtcagagttatatcataactttaaaatttataatggcaaaaagtatctgctaagatacattgatactaaagtagaaactttcaaattaattaaaatcagttttaatagataagagctaatcactctaaaaccaattcatcaaaatggaacataaattgctaccttgaaataaaagaaaaacacatatatttctctcattttatattccatagtatctaataaataaaccgcttggctatattcagtagttttttggatattttgatttaataatattaaacaatgggtaactgcttatgtttactcaatatttttgacatttctctgctcttaaatgattgcttgcttttttcttttactatttaatgatactttcctcttttcctttttttttttttttgtttttgttgggtttccatcatcatatttctgaacatyttttcacctggccatggcaaattggcatgctcagttctaaataaacctatcaacttgaaatctttcttttaaattaaattagcacaaatcactggactcc

SEQ ID NO: 906072 - DNA, 567 bp, Homo sapiens
ataacttggaatatgatgttcaggggtaggaagcatccagcatgggagaaagatgtaggctgggaggctaagccaatgtcgccttttcatgtttttctgcctgctttatattatttgctggcaacgaattagatggtgcccaaccagattaaaggtggatgtgccttccccagcctactgactcaaaggttaatctcctttggcagcaccctcatagacacacccaggatcaatactttgcatccttcaatccaatcaagttgacactcactattaaccatcacacatgctatagcaaagtctggaacaaatttccaaggaagcagagaagaaacaggttaagtgatagtcaaaaaacagaattagagatacattgttgccatttatcattatttgttgcatttgttgcacttgtttctaggtagacatactctacacttttaacgtgtgtrtgtgtgtgtgtgtgtgtgtgtgtgtgtgtgtgtgtgtgtgtgtgtgtttgtgtatgtagacatatcttgccatcttacccaggctggtttgaaactcctggactcaagaaactct

SEQ ID NO: 906073 - DNA, 659 bp, Homo sapiens
atgggggcagatctttcccatgctgttctcatgatactgagtaagtctcacgagatctgatgtttattataaaggggagttttcctgcacaagctgtctttgcttgctgccatccacataagatgtgacttgctcctccttgctttccaccatgattgtgaggcttccccaaccacgtggaactgtaagtccaattaaacctctttctattgtaaattgcccagtcttgggtatgtctttatcagtagcatgaaaacagacaaatatggtgaattggtaccagtagagtggggcgctgctgaaaagatacccaaaaatgtgaaagcaactttggaagaggtaacaggcagagattggaacactttggagggctaggaagaagaaaggaaaatatgggaaaggttggaacttcctagagacttgttgcatggctttgaccaaatcctgatagtgatacggacaataaacaccaggctgaggtggtctcagatggagatgaggaactcactgggaactggcgcaaaggtaastcttgttatgttttaacaaaaagactggtggcattttgcccctgccctagagatttgtgaaactttgaacttcagagagatgatttgagctatctggcagaagaaatttgtagcagcaaagcattcaag

SEQ ID NO: 906074 - DNA, 355 bp, Homo sapiens
ttctttttttttgagatggagttttgctcttgtaccccaggctggagtgcagtggcgccatcttggttcactgcaacctccgcctcctgggttcaagctattctcctgcctcagcctcccgagtagctaggactacaggcgcacaccaccatgcctggctaatttttgtatttttagtagaaacaaggtttcaccttgttggtcaggctgatctcaaactcctgacctcaagtaatccgcccgcctcagcctcccaaagtgctgggattacaggcatgagccaccttggccggcctagtgctgcrgattttaaaattgctttgtggagtctgtattttaattctgcaatctttat

SEQ ID NO: 906075 - DNA, 559 bp, Homo sapiens
aacacttaaaaatgctgtcctttgttaggtatgtggttgttctcaaacttttccccacagaatgtcatttaaagttttaaagttgagatgacatatgtgcttaactaaatgcttaatttctttttagttcttgcagttacaatgcagaaggatactcctaggaaatagaattcccaatgagattttgtaaagatagagcttttatcaattcttgcctcaaacctcccaaaattatgtttggtgaattctaggggagtaaaacagtcaaaagtctgttaaattatcgtcacctatgggagtttgttataagatgtatctggcatgtagatggaagagattttgtgaaagcttgagctggtggaaacagggtagggcagataagggtggatacactcctggtaaacggtttgtgtatctcaggtgctgatatgtccctgtgaactgagatgacagtggctaacctggccttgcctcagccgagctcacatgagggcagctgattttgcaatagcyaggttttctgcacataggtgatgttaaagccatatactgtggttag

SEQ ID NO: 906076 - DNA, 466 bp, Homo sapiens
cctacaagccagaagagagtgggagccaatattcaacctccttaaagaaaagaatttttaacccagaatttcatatccagccaaaataagcttcataagtgagggagaaataaaatcctttacagacaagcaaatgctgagagatgtcaccaccaggtctgccttacaagagcttctgaaggaagcactaaacatagaaaggaacaaccggtaccagccactgcaaaaacatgccaaattataaagaccattgacgctatgaagaaactgcatgaattaacaggaaaaataactagctaacatcataatgacaggatcaaattcacacataacagtattaaccttaaatgtaaatgggctaaataccccaattaragacaaagactggcaaattggataaagagtcaagacccatctgtgtcctgtattcaggagacccatctcacgtgcagacacacgtaggctt

SEQ ID NO: 906077 - DNA, 666 bp, Homo sapiens
cttgacagtgttttttctttttctttctttttttttttttgtggtagaggtggtgagaatttagactcaaataggtcctgggaagactacacacctttgaattggcctccagcatttatgggatagaggcaagattaaacatttataagtatgaggaagatatatttaggagtctcacgtgtaatgaatatttatatatgtgaaggggagatatatcccccctttaaatgtaggaaagggcaatgggaaagtttttaaaaaattggtgtgagacgtgagtcactgaaacgtccttgatttaagggagattaaggcctggggcaatatagagacacattccacggtccattttatgggaagaaatttgaaaaaggattgtttgaggagactgttatgtctatcaattaaaccagctgtctggtatctatcagggacatgaaaattctactgatgcctttatgaaaaagagcctggggcagttccaagatggctaaataggaacagctccagtctacagctcccagtgtgagtgatgcagaagatgggtgatttctgcatttccagctgaggtactgggttcatctcactggagcttgttggacaatgggtgcagaacagtgggtgcagcccaccgascatgagctgaagcaggctgaggcattgcct

SEQ ID NO: 906078 - DNA, 673 bp, Homo sapiens
tccagaattatgtacggcctgcttccgacaaagaatccgaagcctcttccaatacaagcatccgaaagtagagtttcgagcattcgatttaggagttaaatgtgtggatgagaactttggaatatgaattttattttcccccaaggatttgcaatgtgggataatggagggaggggcgagaggaggattaagttgagattgcaaattcttgaaaaatatttatataatgaccttttcttgatatatgaagatgctgctgctgaccggtttgttacctaatttttcaaaagagaaaggaggcttcactggcgggtcatttttaatcagtggccctagtgacaccattgctgccccctcaagaagcctggtcaggattaggaagtcattcaacagccaataatcgtgccctaaactgaagtcagacaccatctgactgatatagacaccctatatccacaatattggctctgcctccagagacaagaagatattcacggaggctaaaccttttcatgggaagtagatggcccttattaccttgmtagggtgaaaggtgggacagggagcaagggatctagaaaaggggaactgggagacccatagatgttttattcattgagtaaatacttgttgagcgccactctgtgccaaacagtgtcctggatgctgaggc

SEQ ID NO: 906079 - DNA, 640 bp, Homo sapiens
aaacatggactgcttctctcgtgggtttctcctattgaatctctttcattcattctgtggggtttgcttcatctcttttgatttaattttgtgcctatggagctctcctctacttttcccaaactctttaagcatgtcttcctatctgtggtttttgaatcaagaatgatctgatggctgtattcacaaacactatggcttttctgaaaggtgtcagtacaagacttcaacccagtccctttttccttgaattttttccagaggtatgatgtttctgggagctaagactcagaggaagaaacagatacaagactacgtctatatgacataaagccagtgactaataaattgttcattaaatatatattctggtcagtgaagatgtctatcagaaaagttgtttggcaaattatatgaaaataaaaacatcatgtgtgtgaatctttcatttctcttattagttgtcatagtatagaatcaaaattaggaatatagaggttagaaatacatgaaagaaataygagataaaagaaatgtatcaattattaggttggggccaaactgattacggttttgccattacatttaatggccaaaaccgctattactaactaacccaaatatttcttgggatctggaa

SEQ ID NO: 906080 - DNA, 556 bp, Homo sapiens
gatttcatattcctacttcatacatcctataatcagaagatttctagccacaaatgatattttccaataaaaatggtttgtatctttctcttgtccccaytcaatgtcatcttgggtattggaagaatccttttattaattttaacctggaagacataattgtggtcattcttcctagtaaaatttctataatcatgtatgcatttaacttaacgttattctgtttaattatttggagttaattgtatctctgctatttctttcatgctctaagcctactgaatacacagcaagaaaacaaaaatgaccaattttctgctctcaatgctctttttgttctatatcttaatcagccatggtctacttcctggaaccatacctgtcagggcacaatatactacaactaatcctgtttcccatttacaccagttgatactccacctcatgtttttccctgtaagtttcactttctaaatgaatatacacgaggaggtgccggtgagggaggagaataagagtgagtacgctggttgcttcaagcacacattcatgaagc

SEQ ID NO: 906081 - DNA, 556 bp, Homo sapiens
gatttcatattcctacttcatacatcctataatcagaagatttctagccacaaatgatattttccaataaaaatggtttgtatctttctcttgtccccattcaatgtcatyttgggtattggaagaatccttttattaattttaacctggaagacataattgtggtcattcttcctagtaaaatttctataatcatgtatgcatttaacttaacgttattctgtttaattatttggagttaattgtatctctgctatttctttcatgctctaagcctactgaatacacagcaagaaaacaaaaatgaccaattttctgctctcaatgctctttttgttctatatcttaatcagccatggtctacttcctggaaccatacctgtcagggcacaatatactacaactaatcctgtttcccatttacaccagttgatactccacctcatgtttttccctgtaagtttcactttctaaatgaatatacacgaggaggtgccggtgagggaggagaataagagtgagtacgctggttgcttcaagcacacattcatgaagc

SEQ ID NO: 906082 - DNA, 556 bp, Homo sapiens
gatttcatattcctacttcatacatcctataatcagaagatttctagccacaaatgatattttccaataaaaatggtttgtatctttctcttgtccccattcaatgtcatcttgggtattggaagaatccttttattaattttaacctggaagacataattgtggtcattcttcctagtaaaatttctataatcatgtatgcatttaacttaacgttattctgtttaattatttggagttaattgtatctctgctatttctttcatgctctaagcctactgaatacacagcaagaaaacaaaaatgaccaattttctgctctcaatgctctttttgttctatatcttaatcagccatggtctacttcctggaaccatacctgtcagggcacaatatactacaactaatcctgtttcccatttacaccagttgatactccacctcatgtttttccctgtaagtttcastttctaaatgaatatacacgaggaggtgccggtgagggaggagaataagagtgagtacgctggttgcttcaagcacacattcatgaagc

SEQ ID NO: 906083 - DNA, 551 bp, Homo sapiens
atcaccaaaaaaatataataatgattaaaaaaagtttgaaatactaccagaattatcawaatgtgacatggagacaagaagtgagtacacgctgttggagaattggtaccaatagacttgcttgaagcagagtttccacaaaccttcagtttgtaaaaaacacaatatctgcaaagagcaataaagcaaaatgcaataaaatgaggtattcctatatttgagtgtaatggaacagtttatattctctttactttcctctcattgtttttacagccattaatcatatttcagcattaccagtagagacctcttgccatcttggtgaggtatggaaggaactagtgtggcggactcaaaaggacactgaattagttttgtaaaaatttaagctaatcctggctctgttactaacaaggtttgtgacctaggtcaatcacttaatcccactagctctcagttttttcatctataaaatcattttccctttcaactctccttctataatgaaagaaaaatattacacaaattctcatggagtgaaagccattatc

SEQ ID NO: 906084 - DNA, 551 bp, Homo sapiens
atcaccaaaaaaatataataatgattaaaaaaagtttgaaatactaccagaattatcaaaatgtgacatggagacaagaagtgagtacacgctgttggagaattggtaccaatagacttgcttgaagcagartttccacaaaccttcagtttgtaaaaaacacaatatctgcaaagagcaataaagcaaaatgcaataaaatgaggtattcctatatttgagtgtaatggaacagtttatattctctttactttcctctcattgtttttacagccattaatcatatttcagcattaccagtagagacctcttgccatcttggtgaggtatggaaggaactagtgtggcggactcaaaaggacactgaattagttttgtaaaaatttaagctaatcctggctctgttactaacaaggtttgtgacctaggtcaatcacttaatcccactagctctcagttttttcatctataaaatcattttccctttcaactctccttctataatgaaagaaaaatattacacaaattctcatggagtgaaagccattatc

SEQ ID NO: 906085 - DNA, 679 bp, Homo sapiens
ggtcttcaggcttgagggtggggcctttgccagggtacagccctattctacycagtatctccctgtctcctgtccgtatcactgtgatgtgtatgtgcaaatttaatctactgcatagaaccactggtcaaggtttaaaaatactctaatcagaaatcagccccatcagaggtggtagcatttaaaactcactgtaaaaaagaattgtaattattaataacgtttgaaattaattttattggagaaatggtaatattaaagttgagcaagagttcatgaattttatctcaattcaatacatggctaagatttaagcatccagcaaacagagcaatgtaaagccatggcacagggctcaaatccaggcccgcaatactcgcccctctcacttcgcaagtgactctgtcttctaatccaagaaaaggtcatgcatagtgataactggagtcacataggtcagaaagtgggacttaacatgctatttgagccctttttaacttgcttgataataatgtttttatatcttctgtttttccaaagtttattgaaagtctgattttacagtgagtataatatgacaaaagaatatttgagtgtgttatgaaaaatcaagaaaagatcatttggatacattctgagaagttgcattgtagtgggaattattaagatattatatttc

SEQ ID NO: 906086 - DNA, 666 bp, Homo sapiens
caccccactttcagcattgaacagatcatctagatagaaaattcataaagaaatataagacttaaactgcactatagactaaatggacctaacaaacatttacagaacatttcatccaatagctgaagagtgcacattcttctcatcagcacatggaaaattgtccaggataaataatattttaggatacaaaacaaatctcaacacatataaaaaaatcaaaatcttatcaaatacctttttaggccacaagggaatgaaatcagaaatcaataacaaaaagagctctagaaactgtacacatatgtgggaattaaacaacatgcttctgaacaatcaatgggttcataaaaaataattgagaagggaatcaaaaaatttcttgaaacaaatgaaaatgggaacacaacataccaaaagagatatagcaaaatcagtactaggagtaaagtttatagcaataatcccctatataaaaaactagaaaatttgaaataacctaataatgcacataaaaaactagaaaatcaagaacaaaccaaacccaaaaattaataaaaggaaacaaatartaacgatcagagcagaacaaaacaaaacagagatgagaaaaacaatacaaaagaacaaaagatcaacaaaacagaaggtttgcattttataagt

SEQ ID NO: 906087 - DNA, 630 bp, Homo sapiens
ttaaccctgctgttgttatatcccaaaggttttggtatgttgtgtctctactttcatttgtttcaaggaattgtttgatttctgccttaatttcattgtttccccaaaaatcattcaagagcaagttgtttaktttccatgtatttgtgtggttttgagagttcctcttggcattaatttctaattttatttcactgcagtcgagagaagatgtttgagatgatttcaatcttattgaatttattgggatttgctttatgaccaaacgtggtcaatcttagagaatgttctatgtgcagatgagaagaatttatcttctttgattgttgggtggataattctatagatgtctgtttattaggtctatttggtaaagtgctgaattcaagtccagagtttgttagttttctgccttgatgatctgtctaatggtgttggtggaatgttaaagtcctccactattatatggctatctcttttcttaggtctagtcttatttgttttataaatcttggtgctctgatgttgggtgcacacatatttagaatagttaaatctccttggaccaggcacagtgactcacgtctgtaatcccagcactttgcggggctaatgctggagggtagctta

SEQ ID NO: 906088 - DNA, 598 bp, Homo sapiens; identical to SEQ ID NO: 902136

SEQ ID NO: 906089 - DNA, 631 bp, Homo sapiens
tacaaacaacaaaaagggatgaataggatttgcgttcatgtggagtgygtcatctgtgcttttaaatttatcctatgaaaagaaataaaaaatatgtaatatcgaacattggtttcctaaattagcaaatcgaccatttcctcaagttattccacgttcttccaagatgtgtcagaagcattctctggaggcagttgttccaaatggtgaagagtactagatggatcccaatctcacaggattcttgcttctattgcagaagagttactttccaggacttcaaaggtttagagaagctgcttgattcgtgtggcttgcagaggtgcatgggctttggagtcacgaaaagttaatcctggtcccagcccagcctcttagtagctgtgaggctttgcacaacttccttgtcttggaaagttatataaacctcatctgcaagaaaaggcatgatactgattgcaaaaatggcagcaactcttcatcccttcctgtatttatgccctttgtgatgtgcttttatagctgctttcattgagaggcagaatctgtttcccaaaccttgaatctcactggccttatttgctctggcagtagaaagctgtgaatatgaccatgtgccagtttggggccg

SEQ ID NO: 906090 - DNA, 525 bp, Homo sapiens
taggggcttcttttccacttcaaagttaaagccattaaacttactgttccatgtaataaattaataaacaagaatagattaaccaaatgatatggagcattaccttcttccagttcctctcattctcatctagttcgttgttgtttctctcttgggaagtggggaaaacttctatttaaatttagattgaataaagtgcttggtaagatatttcagaatcccagaagtgtggtatgtggtggagagaggaaaatggctttttttttttttttttcctggagcttttgaatacgttggcctgtgagcaggtctgttgagcatggctgccaaaatatactggcagtcatttaggctcccaccagagctgagaaagcaacccagaaacaatttccytaaataccaactgtcttatgtggcttcatgaactataatattgaccttctttatgagcgtttgtcttcaacttgtaaaaataccacaggcttcgctatgccaaggagagaaagatcaacagcagcaaccact

SEQ ID NO: 906091 - DNA, 565 bp, Homo sapiens
tggcagttttacataacaccactgacaatttccttttctcatcactactagggatatctgaaatacagaacaagcattgtctgacctgtccattttgtagcattcttatgaccaggttaataaaaaagcataactaaatattgtataatagatgacatataaaagttgcaaaattccaacctttgaggaatgctatgcttcattcatggctgcagaaatgaagggttctagtctggcttttccactgccctctgaggcatgccttctgatactgtactgattctttcccttctagttcctaattatgtgagcatcacctttagtctttccagaaccataggcaacctttctgctctatagttattctcggttttatgcttcatcatctggattactatgatatccaccaggaatagtttttagcctttgatgagcagataagataaaagtcattttctttctaagaacaagtatgttcacatcatttctcttttgtattgctagtatcttggctgctcactatagtggcatgcttcaccrggaagagttcagcttctactcttta

SEQ ID NO: 906092 - DNA, 633 bp, Homo sapiens
gctctgtgactcgcctccaattcttccctgaagtagacccaagaaccctctcttggggtctggatcgagacccctttttccagyaacacaacccgcggggccgcctcccgcccaccctcaggtgcaggagaccccgggccatgcatccttccgggcaggaaaatgtcagccagcgctcgccggccgctttcctcccccgcctcccgaagttctcgcccggtagctccccgactggctctcgcgccggacaaaggcgcacgctgattggccggagggccgtagtcatgcaggacgcgcgactctaggggcgggaccagacaaggggtgactgccgcgcggcgcgggggaggagaccttcatctgttcacgcggtagcgcggattgcggttcgcgcgcgcgccaccggggaaggagcggtgggccgaggggttggaggtggggccccaggaggacctcgggctgtgggccgggagagcggagtcggggagtggggcgggggagcgaggtggcgccggggagcctgggatatggcgcggccagacgatgaggagggggcggcggtggcgcccggacacccgctcgcgaaaggatacctcccgttgccgagggcgcgccgttgggaaggagagcgtg

SEQ ID NO: 906093 - DNA, 588 bp, Homo sapiens
taatttcctagacttccataatgggcttatattagctgtgycaaatatattcattgccagttacgtggaagggaagatggcccttccatggttcgtactaaaagacagtccagttttataccaagtgacaaccgctctacccctacccatctccctttaccacaacatcctagactagaggtgaccttctggctcacggacagctccaaccttaagctggctaagaacctataaagcatggcagtgaaaagatgagttgggttaactggatcctttcttgggaatctaaattagggaattctgagagaaggaagcaattatcagggaaaattgcagctgaaagaatgtaaggaaagaaaccatgaggaaaagccatgaagtgggaagagtagagagagtagattctggacatggggctcttgacaagtcaaagaagcaacaattaggggtgtaattaaaaacctatgagattgagagtggttactcagaaaaaagctagaagatcaaagcagtgagtagcaaaagagcctgaggaaagcaaacacagagggagagaatcagactgatatgaaagagaaggttgtcccc

SEQ ID NO: 906094 - DNA, 604 bp, Homo sapiens
tcttacttaggtgagagtgtgatcaaaacttagggccttagcaccacccacaattttgggtttctggtctcagcatattattcataggttatggtgccctcatgttcacatactcctttcagctcttgtcattccagttaaagagagaccatttgacattcttgagatggctgcatgcaaacatttaaaacttttgagggaatacagcacaccagggagactactattatgactatcaggaggataatacaacatgtttggagtatgctccttacccagggtccactaaaccagaccacctaaaattaaatacatcaaagaatgagctagagaaagaattgactcacttaactaagcagtctcttcattaatcccctacaactgaatctctataatctacatttgatgtatgtctccatagaccacaaatgccagcagctgcacaaatacttttccatttagccactaaataatctggagctattctgttatttagcataactttcacaagagaatttaaagtctattgtgtaaccacagcctttacagtagaatctgctataragcctttcatgagggatacatttctaatcattgcctcttt

SEQ ID NO: 906095 - DNA, 578 bp, Homo sapiens
cctcaaaatttggcagttcacaactacaaatacttatcatctcacagtttctgagaaccaggaatctggaagaggctcagctaggtggttctggctcagggtttctcatgaggatgcagtcaaactttcaactggggctgtggtgatctcaaggctcaactgggcctgaattatccacttctgagctcacacacttggttattagcaggctgtcatttctcactggccactggccagagatctccatcccattgcacacgggcctctccacagcctacttgagtagcctcttgacatggcatctggcttcttacagaagaagttacccaagaggtagagaaaagtgagcaagtgggtgaagcagtgcccaaagaggaagcggagtttgtatgtagaatatacatagagttcctacaactcaatagtaataagaaaagctgtccaattaaaagtgggcaaaatatttaaacagaaactttacaaaagaagataaacaaatggccataagaagataytcaactattagtagtcattagggaaatttttttttctttgaggtagggtctcattttgtcacc

SEQ ID NO: 906096 - DNA, 622 bp, Homo sapiens
tttattagttctaggagcttttaggataatctttagggctttctaggtatatgatcatgtcatcagcaaagaggaacagtttgacttcctctttaccgatttggatgcctttatatcattctcttgtctgattgctcaggctagggcttccagtactatattgaagagaaatggtgaaaatgtgcatttttgtcttcctccagttctcaggggtaatgttttcaacttttcccaggtcagtataatgatgtctgtgtgtttgtcatagttggcttttattaccttaaggtatgtcccttctatgccaattttgctgagggttttagtcataaagggatgctggattttgtcaaatgctttttctgagtctattgagatgatcatgtgatttttgtttttacttctgtttgtgaggtgtatcacatttattgacttgcatatgttaaaccattcctgcattcctggtctctaacacacttgatcatggcagattatctttttgrtatgctattggattcagttagcgagtaatttgttgaggatttttgcatatgttcatcaggaatattattctgtagttttattttctgttatgtcctttcttgttttgggtattatggtg

SEQ ID NO: 906097 - DNA, 632 bp, Homo sapiens
agtagatattaaataagcacagaataatttattgagctaaaatccttgtctttggtcagacccagtggctcatgcctgtaatccctgcactttgggaggcagaggcagatcacctgaggtcaggagtttgagaccagcctggccaatatggcgaaaccccttctctactaaaaatacaaaaattagccagacatggcggctcacacctgtaatcccagctactcaggaagctgaggcaggagaatcacctgaacctgggaggtagaggttgcagtgagccgagatcacaccactgcactccagcctgggcgacagagtgactctgtctcaaaaaaataaaaataaaaataaataaaatccctgtcttcaaggagcttacactgtacatgtggaagcatgtaaaaaggaagttgtaaaatagtataaatggcataatttctgtttagagatacatatatgttagtatagagagcaaaaataatatctgaaagattctgcaccaaatgattaacagtggttacctttgtgaggtcaaattatagactctttctctttctktagaacatatttctagaagggtttataatacgtagaattattttagttatttgatagtcagaaaatataagata

SEQ ID NO: 906098 - DNA, 669 bp, Homo sapiens
cgaagcgaaagaaacctgaacttccaaaatctaacaagaagatccccaaccccacctacacccagaaagaaggaacccttttgtctaccttaataataggttttgatttatttatctttgctttctttttttttttttttttttttccagaaaacagtcacacagggctccgggggtatttttaaagtggtgaccttcctgccccctccaccaaagggaaaaaggtttgctggctggctggcttgtgcacttccctcttatgaccaaacccctagttcccttgtctctcacatctttatgtctttcgagtgcctctgtgactcatgtctccttagcttgaggtctatgcagtcggtcagttggagaatgagagtttgtaacctgcagtgtgcagaatccaagggccaacaggcaactagggcacgcttctctttagccgatgatgttttgtcagggctcttgttccagtctggttgtgaataggcttcatttcctggttccatcacatcttcctctcttcagagcaactcaaatactctctaactctgtctgtgtctctttgcctcagtcttcattgtgtttctgttctctatctctctctctctctctctctctctctycctccctccacttcccctcattttgtctctttctctttttctttctcag

SEQ ID NO: 906099 - DNA, 613 bp, Homo sapiens
gataatcaagacacccatttttcttgcagrtatttttttggattaattataaatattctttatatatcacagacaccaagtactggtgttttagtgaggaatttcagctcatcaagatataaacccaaatggtttcactttttttctgttaactagtaccagttgtactgtattgaaagctccttttccactgggacagtatcttggcatcttcattacttttcagccatattccattattagaacagacttgttgcattttctgagatttatctctgtgtattttaaagtctaaatctcctatttgatttaaaaattctccatattttccttctatatagatgagacttgcagctctaggaatttggagtggtgtgtatgtgcaagacattgcctaattttacacactgtaggatgttggggcagacgggagtgataaatgaggcagattctgccctgttctactgctcctgaggtgttgaggtttagtttttttttttttcctggttgggctctaaatggcatttgaggtgggctccacagggcaaggaataactccagcaggttgagctgatgatggcctcactcccaagcagctttagaaggcattgga

SEQ ID NO: 906100 - DNA, 592 bp, Homo sapiens
tcattcttgctcctgtgaggagaagccaatgaaactgtagagaacaacagattctgccaattacacccaagtggtgttttattggctgacaaaatcatagrgagagagagcatatggctttcactacagtctctgatcttgcttttttaaaatttattgccctctcttgatttgacatgtggagaattacaatttgaggttcagagaagttaatgatttgaaagtcacacttcagtgactaacccaggcctagactccagcctgtcaaagggagtttagagctcaagaagtcagacccttcagattataaatgggccaagtgcttgacagagatagcatatgacttgtctaagaccaaattgccaaaactagaaactcaggtcttctgactccttctgatgctctttttaatatcttacagtattctcctttgtaaccctgagacatttgtgctgctggcttatgggactgatcttctggatttcagtcctgcttctgagcctctcttttctcaattataaaaggaggatcatagaagtagtgtctgcctctttgccttcttgtggaaaccaaatgaggctgggtctgtgca

SEQ ID NO: 906101 - DNA, 670 bp, Homo sapiens
aggtggagtctacagaggcaggcaggcctccttgagctgcagtgggctccacctagtctgaggttcctggccactttgtttacctactcaagccttggcaatggcrgggggcccctcccccagccttgctgccagcttgcagtttgatctcagactgctattctagcaatgagcaaggctccgtgggcataggaccatccgagccaggcacaggatataatctcctggtgtgccacttgctaagaccattgggaaatgcagtattggggtgggagtgacccgattttccaggtgccatctgtcacccctttctttgactaggaaagggaattccctgaccccttgcacttcccaggtgaggcaatgcctcaccctgctttggctcatgctcggtgcactgcacccactgtcctgcacccactttccgacactccccagtgagatgaacccagtacctcagttggaaatgcagaagtcacccatcttctgcatggctcacactgggagctgtagactggagctgttcctgtttggctatcttggctccaccctcctgactttttaataattgccattctgactggcatgagatggtatctcattgtggttttgatttgcatttctctgatgatcagaaatgttgagctttttttcctatgtttgttggcca

SEQ ID NO: 906102 - DNA, 669 bp, Homo sapiens
aacagagagcagattagcatttgccagtagctggggagtaactgttaacatgtacggagtttctttttgtatatagtaaaaatgttctgaaattagataatcatgatggttgcacaactctgaacacataaaaatcacttaattgtacactttaaattgtagaatatcaactatatttcaatataactgttaatagttttttattcctaagcattattaataaaatagaagacaatattttgatattcttgcttgttatttagaaaagcatgttatttgctgatctgtaaacataatgactcacttaagctcataactttgtgtgtgtgtgtatatgtgtgtgtatgtgtaagtggtaacagacccaaactaaaatacttctacttgtgttttcacttggcttttcagaagtttatgaaacctattaagacttttgaatgatttttatctttcatattttaatctgttttccttcttatttagagatgacactacagataggcatcaaaatttctagaaaactgtataacttttaaccaagtaattagactyctaggacttaaggatataactggacaaatatgcaatatacatgtgctaatatgttcatcatagtattatttataataacaaaaattacaaactatacttaacagtctaataacaggg

SEQ ID NO: 906103 - DNA, 669 bp, Homo sapiens
aacagagagcagattagcatttgccagtagctggggagtaactgttaacatgtacggagtttctttttgtatatagtaaaaatgttctgaaattagataatcatgatggttgcacaactctgaacacataaaaatcacttaattgtacactttaaattgtagaatatcaactatatttcaatataactgttaatagttttttattcctaagcattattaataaaatagaagacaatattttgatattcttgcttgttatttagaaaagcatgttatttgctgatctgtaaacataatgactcacttaagctcataactttgtgtgtgtgtgtatatgtgtgtgtatgtgtaagtggtaacagacccaaactaaaatacttctacttgtgttttcacttggcttttcagaagtttatgaaacctattaagacttttgaatgatttttatctttcatattttaatctgttttccttcttatttagagatgacactacagataggcatcaaaatttctagaaaactgtataacttttaaccaagtaattagactcctaggacttaaggatataactggacaaatatgcaatatacatgtgctaatatgttcatcatagtattatttatartaacaaaaattacaaactatacttaacagtctaataacaggg

SEQ ID NO: 906104 - DNA, 692 bp, Homo sapiens
acagagccatagattcaatttttagggggaaactttttttctaaaaaagtagcaaatattaatcttctttcataatgtgggcaatrtcaatattgaagctatattgtggcttgtagaagcaacattagatatacataaaagcctatatttacttagtctctatgattattagaacacttgacatatcaaggataaaggtattatcaatagtgctcctctccaggaatcaaaagtgtgatgacaaagtattttaaggttaattgctatgcatcaagttttacgctttgaataatttgctaccttagcaactgataaatttatatgcatcaagagaagtgatttatcctatggcaattagaagttaagagagaggagaagtgagggaagaagagagaaagagggagaaagaaagaaaaggacatcacaaaccagttaattgtaaaatctgtaaaagatgaacagaaggagaattgctttagaaacagaaaatttaaggaagagatacaagaaaaaattctgcaactgactaaagtcttctaaaagtttaacaaaaattttacacatagaaaggaatttcagtttcattaatttttaaaaaagtaaatattacaacggaaatcacttggttgcatttgtaaaaaaatttattaataatgcattggagcaacaaagagactagtgcaacccaaaga

SEQ ID NO: 906105 - DNA, 564 bp, Homo sapiens
tcccagtgatggagaagattgttctcatttgcttatggaccaatgaagtaaagacrtaactcctgggggttcttcactgttaacaacatgcatttctttgggagggaaaaaatacaaagcctaaggcaaaaaacaattctacttgatatatttgcttctgtacaaaaggagaatttagttacagcattgacaatcactcaggttttagaatcatttttcaatttcaattttactctaaaccagaacagatattcttgactttgaggttaacggaaataagaaacaattctatttccgcatctcttatatgtaatatttacctggttgattttcatatctgcttcttccacatcttgacttgcttgcttacagcctcatgatctactctactttctgccatctatttttttccaatatttaaatcctcatctctctctctcatctatttcagactttcttctatttctatttaaataagctacattcaccccaaccttttgacataagggacctcaacagcacaatgcctattctcagttaaattacaaaaccaaaaattatagt

SEQ ID NO: 906106 - DNA, 644 bp, Homo sapiens
cacatcaaagtgattagcaccaatacctcatagtggagtactgtggctatataataagtcataaattagaatgaccactttattagtctttyaaaagttgttttagcaattctagttcctttgctttcctatttaaattttagaatagtcttgtttacatcacaaaacatcttgataaaattttgataggtattgtattaaatctgtatatcattttgggaagaattgacatagttgactatgctgagtcttaaaatcaatgaacatggtacaactctccatttttaagagatcttcgatatctttcattggtactgtatagttttcagggtacaagtttgcatatattttgttgcatttataactaagtctttctctttttaaaaaataattgtaatgataatgcattttaaacttccgtgtctctgttcattgttaatgtatagaattacagtgatttctgtatattatcttatatcctaagatcttgatgagctcaaatgttagttacaggagcttttcttttagattctttggggtttcttacatacacagtcgtatcatctgcaagcagggaaaacatatttttttctcttgtgatctctatgccttttatttcctttccatgacttactgcactagct

SEQ ID NO: 906107 - DNA, 619 bp, Homo sapiens
ccaatatccacagagttatctgtgctggagacctgtagaaatactttttttttttttttttttttttggagacagggtctctcactctgtyattcaagttggagtacagtgacacggtcatagctcactgcagcttcaaacccctgggctcaagcaattctctcatgtcagcctcctgagagtagctaggattataagtgcacatcaccatgctctgctaatttttaaattttatttttggagagacagagtctcactgtgtttcccagactgtattcttatacttccatgtccaagatccaaggtttacccacagcatttctcacctgttttgcttactgctttcctaagtgatctttttgcctccaactcaactcttccccacaatccattctccacacgatagttgatacgggctgaatttgtctcctcaaattccctgtcatatatgttgaagtcctaaattccagtacctcagaatgtaaccttatttggagatagggtctttatagaggtaatcaagttaaaatgaggttattagcatagacttcaattcaatatgattgataactttataaaaagagaaaatttggatacagagaaaatgtagagggaagaa

SEQ ID NO: 906108 - DNA, 576 bp, Homo sapiens
cttttactctagatcccaataaattccttatctccttctaagaccacctcagcctgaacttaattgttcatatcactataagcatttttgtctaaaccattccacaagtctctaggaagttccaaacttttccttatttctctgtctgcttctgatccttccaaactgtttcaacctctgcccattacccagttccaagatcacttccaccttttcaagtagctttatagaaatgccccactcccagtatcaattttctgtattagttcattctcacactgctacaaaaaactactggagactggataatatatgaagaagagaggtttcgttgactcacaattccacaggctgtaaaggaagcatggaaagaaggcctcagaaaacttacaatcatggcggaaggccaaagggaaagcaaacaggtcttcacatggcagcaggagagagagagagaagggcaaaacgttacacacytttttaaacagccggatatcatgagaactcattcactatcacaagaacagcaagggggaaatccacccccaagatctgatcacctcccaccaagcctgt

SEQ ID NO: 906109 - DNA, 614 bp, Homo sapiens
ttatttctccttcgcttatgaagctgagtttgactggatatgatcttctgggttgaaaattcttttctttaagaatgtcgaatattggcctccactctcttcaggcttgtagggtgtctgcagagagatctgttgttagtctaatgggcttccccttgtaggtaacctgacctttctctctggatgcccttaacatttttgcttcatttcaaccttggagaatctgatgattatatgtctttgggttgatcttctcgaggagtatcttagtgatgttctctgtatttcctgaatttgcatgttggcctgtcttgctaggttggggaagttctcctggataatttaataaagagtgttttccaacttggttccattctccctgtcactttcaggtacaccaatcaattgtaggtttggtcttttcacctagtcccatatttcttgtaggctttgttagttacgttttattcttttttctctaatcttgtcttcatgccttatttcagcaaggggatctgcaatctctgatattctttcttcaatttgattgattcagctattgrtagttgtatatgcttcatgaagttctcatgctgtgtttttcagctccatta

SEQ ID NO: 906110 - DNA, 645 bp, Homo sapiens
aaaaggaacagaaaaaaaaaaaggaagacaaagctaaggaagaccacgataaagaaaataaaggagaagagatgactatgatgaccgttcgcacaactgtcagatgcaggtcatggtggttaaatgcaacaaagcccagagatgtcttgcctgcctttcctacctttactaatcatcaaatatatccacaaccagttgctcttcatcaggatttgctgggtgctaagactgaatgcttatgtccccctcacaattaagggattgagtgttcttacaaaagagactccagagagatcctgtgtccctttcaccagcatgctcctccacctgtctgcatgtcggttgctgcgtccatataaagtgctgcagggatatttcgagaagctaataagacaagtcaatgtgcaaataccttgcaagtatctaaaatgaaaaatgtgagctcttcttccccaagcaaagaaaagacccaaataaaaaataacacatatgtagaggttatctatgatattttagattttatgagctctctataaatgaacatttgtttcctttgttcctgaaatgaaaccattayctgtttttcttgtttgccttttccagcctatctgccaaaagttattttattttacaaaatgtcttcct

SEQ ID NO: 906111 - DNA, 611 bp, Homo sapiens
gtattaactaggtatcatttgttaaggaacattttctaaaaatgacttaacaataatttgctctttttgaaagcagacaaactggagaagcataatgcaacttttgaatacctttggataatctaaactgcattttagatgaataaagaataaattcttgtgatcactgaaaactgatagatgaaaataaattaggtatttattctcaaattagcatagagaacctgaggaatagagacttcaatttcagttgtgtttagagtctactattcagtgtcttaaaagtatattttgttctttcattagaataatccaggtagatttcactctattttttgtcaccctgtcactaatactcttctatgttgtattattttgttttcgtttttaatttcctggaagatgatttctgaaatgcagttgaaacataatttattattatatagtctgttagagaagcacaaccaagaggatatagatataaatatatgagaggagatttattagaggaattggctcacaggattatggagactgagaagtcccaaggagaggccatctgcaagctggagacagggkatgctggtatatgtggctcagtccaagtctaa

SEQ ID NO: 906112 - DNA, 630 bp, Homo sapiens
gtattattggtttcttgtttctccttaatagacagtggactcctagagccccttcgtgaggcttattctttattggattagagcatggtatccaggggttaaaatatgtatttacgcattcttgttgaataaacaaaactcttaactcatcttcttaattacctgctgtggaccaggccatgttctgtgttacagcagtgagcagcaaagaaaaggtccccgccttcatagactttatattttgtgaatgattaccatatgacaggtactgtacaaagtacacacattgtctctttttctcttggcactctccctttgagactggtcctagggtttttccctttttctttctttttttttttgagatggagtcttgctctgttgcccaggctgaagtgcagtggtgcgatcttagctcactgcaacctccacctcctgggttcaagcaattcttctgcctcagcctcccgagtagctgggattacaggcacacgccaccatgccaggctaatttttgtatatttttttagtagaaactgggtttcaccatgttggccagtctggtctcaaactcctgaccctgtgatcttcccacctcagmcttccaaagtgctggattacaggtgtgag

SEQ ID NO: 906113 - DNA, 605 bp, Homo sapiens
ccactgactgtcttccttgattttggtatgcttactgagtatgtccttcatkccactttatacactctggcttcacggtgttccttttcctgatttctagtctctctgaaatagtatatagcatgtactgtctgagcccctaagaggcttagtgctgtgggcagccaagcacaatgatggaagggctgatagatgacaatggcgctgtacttgaagacagcccatgatggtgtgcagagctgggaagatggcagagagaagtcccgagagtaggtaggaagtgggtgcagcaaggctggagtgtggtttcctggctgagaggggaacacatgattccaagtcttgggggagtcatgagctgtggggaagatgaaggaaaatgaacattccagccatgaaggccggtgcagagaatgcagaaacagatgacccactatagcccgcacagccatcttagctccatcaactatgctaaaagcataaagaacaacttggattttgtatgttcatttttttttgtaagaaacatgatataattgtataccagtttttttcacagaatccacagtccctctttctcaaatgtttgcagtgattagaattca

SEQ ID NO: 906114 - DNA, 592 bp, Homo sapiens
ggcatgagccaccatgcctcactgcttcrtttcacttctcttctctcttctctcctctctcctctcctctcttctcctttgtcccttgtcttcacttttcttcctttcccttttcccttttcttttctcttctttccttttcaaatctcactgtcaccaaggacagtgtgcagtggcgggatcatagctcactgcaatcttgagctcctgggttcaggccactctcctgcctcagcctcctgagtacctgggactacaggtgcccaccaccacacctggccaattttgttgttgtggttgtggttgtagtttgtttgtttgttttttgagaagaagtttcgctctgttgcccaggctggagtgcagtggtgcgatctcggctcactgcaacctccgcctcgcaggatcaagcgattctcctgcctcagcctcccaagtagctgggattacaggcatgcgccaccacgccttgctgatttttttttgtatttggtagagatggagttttaccatgttggtcaggctggtctcaaactcctgaccttaggtgatccacccgcctccacttcccaaagtgctgggattacaggca

SEQ ID NO: 906115 - DNA, 634 bp, Homo sapiens
tcgaattgacaactgggcattcctagcctaaacaactgccttagccacctcaccaccacaaaccctcattcatccagtgaaagtaaataatccatctttaaacacaggtgacatttatattgacwaatgttgccattttccaattgagaaactgaggcccagagccatgaaatgattgaaagaaaaccacgaacttaaacggcagaattagttgcttcttcttcccagctcaatgccctctctgttgagcagcgggagcccagctctcctgaacacatgcaggtcaggcagatcgtctggcgggcactgtgggggcatcaggatgtgcaggtgtactaacatcagacaccaggacccgaggatgcctcatttgcaatgggtcagcctgaatcatatttgcaacatgtctatcacaggcttatcaagactttgtgaactgagcaaacaacagacagctcagcatgaagtaaagcatgttgtaccccataggccaaacatcagaaaataagtagacatggcaccaggccacggggccttggtgtgtatcacgaatgaatgacacaacatttgagaaggatcttcttcaaatcataaaatcactgaaacataatggaatcacttttcatagattcct

SEQ ID NO: 906116 - DNA, 565 bp, Homo sapiens
gaataaacagtgttccagaaattacaatttgtggaacaatttggcccaataaataacctggtgatgtaattgaaattggagaattaggtattatctggcatacaggaaagaagagaaagttatgtacaagaaggaagtgtcagagtagcctcagatttatccacagaagtgtttaatgatggcagataatagtgttatagctacgagattctgaagaaaataagaggtaagatgttactcaagacctatacattcaggtattaaatgttattcaagcattaaaatgtaccctcactcttgatatcaaaataaaaaataagagaagaaataaacaaccgataggcctttctggaaaaaaaaaagaaagagagagataaataaagagacaaacaaaacacatttttgacaattaaaacaatcaaataatggaaaaataaagcaatcattagaatctaaactaaataaacagaaataaaactaaggaaccatggtaatgaaaattaaccaaaaatayacatcttaagtacgtcagtaatgtcaataaccttggaggaataaaataaag

SEQ ID NO: 906117 - DNA, 642 bp, Homo sapiens
ctcactgtcacaggaacagcatgggagaaactgcctctatgatccattcacctccttccctcaacatgcagggattacaattcaagatgagatttgggtggggacacagagccaaatcatatcatcctccaactctgatcattattttagaaatgattttagctatttttgtttatttgcatttcaatagagattttagagtcagctaatcagtgtctgtattttggggggtatctaaagatacagtttagaaaaattaatattaacaaaattaggtttttaatccactcacatggcacatttctccatttatttaaacagtccttaatatttctcagtttaattttaagatggtatcatcccttccaatcagggagtttgtggagctccttctggaatccccatgctgagctgtggcttgggaattccctgtgagcagggagctggggcaatcaggactcttttgtttacctgctgtcaacactgtcctacatggcttgatgttcaatgccttgaaaataattgtttcatatacatggactgatttayatttttcaaacggtagctttgttttaatcaatccctactgtttcattttggtctagggcacaactcttgcaaacaattttccatacatgtgag

SEQ ID NO: 906118 - DNA, 643 bp, Homo sapiens
tttcttccccttgagttattaaatccaaactcaaaaaatcacatacacacacacacacacacacacatacacacacacaaacgcaacaaaacctctggactgtgagaaatgtatttctgctcattawaaattactcagtctcaggttttctgttatagcagcattttggtaataactaataataaaacaatacactcttgagaattcatagctatgtgatataagtattatttataagaactagtttacatctaagatgtaattcactctgtgaaatcagaaaaaagtattaatgcctaattattgggagttatgactgcatattgtaacaattttgaactgcttgagttcagtaaaagaagtcttcatggaagtaaagtaactaacatcaaattagagaaaataattcagaagcaaaacaataacaagtaacagtgaaccttcagtacacttctctgcattaaaaattatttgtatattttaaagacataatttagaacttcctgacactgctgtaaaacatagtctactgatcagaaatataagttttccacacataatgctcatcttacttgaagaaaaatgtttcaagcaaagatgtcttttataacaaagacagccacctaagaaaaagtagaacact

SEQ ID NO: 906119 - DNA, 590 bp, Homo sapiens
cctggtttgaaggtcaaggatatcacattttcttacctggtcttagaagttatggagcatcccttcaaccacaktatgtttctaataattgggtgactaactcaatcctatatttagtaggaaggaaattagattctaactcttaaaagaagtatcaaataatttgtgtatttattttaaacactccatacatactttacactccattttgtgtatatattagcttagaacatctaaattaatccaataatgtcttctagaatcttctatttcctatctattgcacaatgctatcaatgttccccaaattcttttatgttccctcatgctctgttgtaatataaaacggatcactgattattcatacacttaatatgaatagttcacatttgtttatagatttcttctccgtttgttaatgaccttttttgtttgtgcttatatctaagggcaaatacagatttccagtacttctatattcccaaagaattgctgatttaatgtaattttattttaatacttcacttcattctctcttggctgcttagctttcttttctacttcaaatttcagttctgtattcaccagga

SEQ ID NO: 906120 - DNA, 657 bp, Homo sapiens
ttattttaggtaaatataatgttgtgagggcaaaacttcacctctatttccacaaaacagaagaggagcaatttatgaagctatttgattcattctcaaggagattctttcttagttaataaagatggttgcagtcctgttttgagtttctgggtgggacttttcttttcttttcttttttctctcttttttttttctttttgagatggaatcttgctctgtcatccaggctggagtgcagtggctcgatctcggctcactgcaacctctgcctcctgggttcaagtgattctcctgcctcagcctcctgagtagctgggattacaggtgcctgccaccacatccggctaatttttgtatttttagtagagacggggtttcatcatgttggtcaggctggtcttaaactcctgacctcgtgatccacccacctcagcctcccaaagtgctgggattacaggctgggtgggacttttcaatatgaaagatcttagatttttaaagtttgtcatttgcctctgctgctgtgtggagatttccattttggaaacattytgctcagcgtcaggactatgtgagctgctgcagttatgtgacctccttccctgtcccttccagagggcaaggatttctgctgggaagggctgaacagacaca

SEQ ID NO: 906121 - DNA, 629 bp, Homo sapiens
aacaatatagtacaatccattggctcctgactagggatatgtttcaataattttaacactttaggatgygtatacatgctatgaaaatgattttcaattctttgtgcccctacaaggctgattcgtcatttgcaaagatctgggaagcaatattagcaaagcaatccatgagcttggcaacatttctgaggatgactacaaagttcctaggatatcaagaggtagcaataatgatccctgccagtgctgtactgggagactagccaatatcaagggaagtaatggcaagttgtggatccacgctttgtcctatcctgcgtgttccacatctattcatattgaagttttcattttctggccaccccattcattccattccattgtagcctttctggccactgtggtatctctacttaaataccacttgtaagtgcacccattcctgacaattctctattagtaagcaatgtatctttcttattacatcctaattctgtctcttgctttatttttatctttggtgttcattatcctgtgatatgtaatgcatttacatatgtatttttaaaatgtattgtctgtcttcaactggaatataacctccttgagaatatctttttaatttttca

SEQ ID NO: 906122 - DNA, 629 bp, Homo sapiens
aacaatatagtacaatccattggctcctgactagggatatgtttcaataattttaacactttaggatgcgtatacatgctatgaaaatgattttcaattctttgtgcccctacaaggctgattcgtcatttgcaaagatctgggaagcaatattagcaaagcaatccatgagcttggcaacatttctgaggatgactacaaagttcctaggatatcaagaggtagcaataatgatccctgccagtgctgtactgggagactagccaatatcaagggaagtaatggcaagttgtggatccacgctttgtcctatcctgcgtgttccacatctattcatattgaagttttcattttctggccaccccattcattccattccattgtagcctttctggccactgtggtatctctacttaaataccacttgtaagtgcacccattcctgacaattctctattagtaagcaatgtatctttcttattacatcctaattctgtctcttgctttatttttatctttggtgttcattatcctrtgatatgtaatgcatttacatatgtatttttaaaatgtattgtctgtcttcaactggaatataacctccttgagaatatctttttaatttttca

SEQ ID NO: 906123 - DNA, 629 bp, Homo sapiens
aacaatatagtacaatccattggctcctgactagggatatgtttcaataattttaacactttaggatgcgtatacatgctatgaaaatgattttcaattctttgtgcccctacaaggctgattcgtcatttgcaaagatctgggaagcaatattagcaaagcaatccatgagcttggcaacatttctgaggatgactacaaagttcctaggatatcaagaggtagcaataatgatccctgccagtgctgtactgggagactagccaatatcaagggaagtaatggcaagttgtggatccacgctttgtcctatcctgcgtgttccacatctattcatattgaagttttcattttctggccaccccattcattccattccattgtagcctttctggccactgtggtatctctacttaaataccacttgtaagtgcacccattcctgacaattctctattagtaagcaatgtatctttcttattacatcctaattctgtctcttgctttatttttatctttggtgttcattatcctgtgatatgtaatgcatttacatatgtattttwaaaatgtattgtctgtcttcaactggaatataacctccttgagaatatctttttaatttttca

SEQ ID NO: 906124 - DNA, 559 bp, Homo sapiens
  misc_feature 295: n = A,T,C or G
tttctccactttccctgtctcagttaattacactgccatgcaccaagatacctgagccagaaacctgaagggcatcctccagtcctccttctgcccacctcctgtttctattcactgtgtcarcaataagctgtcctgatattttacctcctaaatatctcttaaaacctcacttccccttcatattcactggcaccccctattcagcatctcatcactcaataaacaatatttaatgagtataaagcatagctaggtgttttaaaagagaataaaaacagtgtgatctttgttntctagtggctaacatctagtactttttttcttttttttttttttctgagatggagtcttgctctgttgcccaggctggagtacagtggcgtgatctcagttcactgcaacttttgccttccagattcaagcaattctcctgcctcagcaagtagctgggattacaggtgcccaccaccacacccagctaatttttctatttttagtagaaatgggattttaccatgttgaccaggctggtcttaaacttctgaccttgtgatcc

SEQ ID NO: 906125 - DNA, 575 bp, Homo sapiens
ttctatagaatcagtcccaatctcagcaaaatgttaatggaaactgaaaaggtaattctaagagttacataaaaatgtggaaggcagagtagccaagatagtcttacagaataatactataggatgtcaagagtttttataaagctacagtaattaagacagtataggactgacacaagaatggacaaacggaccagtggagcaaaatagggaatatattaaacagaaacaccccaacatatgtggatacttgatttaagataaaaataacacttaagagcagtggatagaagatgttttttcaataaaggatgctgggaaaaattaatcttgacctattcccattgacctatagatctatatgtaaaaggttaaaacaataaaacaataggtttgttattaaggttaaagcaaataagcttaaaacaataaagcttctagaagataagagaatgtctycatgaccttgaggtatagggaaagatttcttgggataggaaaaacattatctataaagtaaaaaattgataaatttagaacttctgtatatcaggagatatcatcaagagagtaaa

SEQ ID NO: 906126 - DNA, 649 bp, Homo sapiens
cccagataaagaaaagtagctgccatatttcggaggatgagaacaataaaaggggacaatgggtaaaaaaacaaaaacaaaacctgaaagagaggagaggaaaatggagaaggaagagagaaaggggaggaggtgttcttacacactgtcattgccaaaaacaagtttgaaagctttaagacagggtgaaattcgatcacttgttagtcttgactctactaaaacgtatttttaaaaaagaccctctagcctttttggcaatcattttccccaaagcctcccaaaataatcacatgtaagagccaaataaacaccaaatttcaatctctccttggcccagaggatgccaagttggtgttttattacccaaagtttttttggaattggcatattcaaattcagaccctcatcttccttactctagaaaagagaacagacaatgtggattttttttattaaaagaaccctttattgtgtaaaaacagaggttttacccagagaactgttttaatagccctgagagggcttatggatgaggaaataaggctcagggaggtaaataatttgctccaggttcttacagacwgcacatgatggagacactgaaaccagatcagtctgaccacaaggatttccctctttcctctat

SEQ ID NO: 906127 - DNA, 468 bp, Homo sapiens
agctggcaaacgttgctgctgggaaagtaagcgccatggcatggcctcatccctgaagtgtcataggtctgaggggtgtgtaggaatgagacagagaagggacaggtgaggttattcctgacaccatgaccagctggaaattgaagaggtggagatgaggtagggcaaagagaaaagggaacccatgcttacccatgcaccagccatctgctttccacacgccattatgttaaacccaccgggactctgtttccctgttttacatgtgaagacgtcacatgtttggtcacagctccagtaggtagcagagcctgcctttggcctcacatctgtctgactttgaagtcaatgcttttccccttgtttaacattcttcctcgatagcatgtgtggtttagaaaggaacttcagaatccatctcagactttatatctcatgatagaagmagagagaacagctgtgattgtg

SEQ ID NO: 906128 - DNA, 684 bp, Homo sapiens
ctctgtcgcccagctagagtgcaatggcatgatctaggctcactgcaatctctgcctcccagrttcaagtgattctcctgcctcagcctcccgagtagctgggactacaggtgcccaccaccacgcctagctaatttttttgtatttttagtagagatggggttccaccgtgttagccaggatggtcttgatctcccaacctcatgatctgccctccttggcctcccaacgtgctgggattacaggcatgagccaccacgcccagccaagtattaatctttttgatggtggagggtcttgcctcagtgtggatgactgctgactgatcaggatagtggttgctgaaggttgggaaggctcaaagttatccatgactttggaattaacttctttcaaactcctgttaatgttgataacttgaccttctcccatgaattacaaatgttcatgcagaatggtgaatcctttccagacaacttccatttcctttactcagatccatcataaaaaaaattattatctatgggaactacagccttacaaagtgtattcttaaataagatttgaaagttgaaattactccttgatccatagactgcagaatagatgctgtgttagcaggcataagcataacatcaatctccttgtacatctccatcagagctcctgggtgaccaggtgcac

SEQ ID NO: 906129 - DNA, 594 bp, Homo sapiens
gttaaagaaaaatcaactccattatcaaaattgaccagttaatattaaagggagcatctttctgggaatcctggcaaagaacatgaagatccttgcatgtgagagcataatagatacaggaataacaagaatyaatgatattaaccattcatgtagatgtcaaagctgcatggatgagcatggttgagaaaggaaaatgtcagtttccatccgatttttgtcagggttgttcagaggaaaagagattaaaaaaacaaagcagccttacagtgatggggtaattctagatataacaaaactactactgggtttgtttaaaaactgggcaaacaattttactttcagattttgttttattttattatcttaatgtcaggcctctgagcccaagctaagccatcatatcccctgtgacctgcatgtacacatccagatggccgttcctgtcttaattgatgacattgtcttgtgaaattcctacttctggctcatcctggctcaaaagctcccctactgagtaccttgtgacccccactctgcccaccagagaaacccccctttgactgtaattttcctttacctacccaaatccta

SEQ ID NO: 906130 - DNA, 609 bp, Homo sapiens
tcatctttggtgtcttatctaccttcaatgtttgaagttgctgatttggagatggagttttgtggggtttgttgttgttgttgttttgtgtttgtttttcttttaatagccctgtagaagtctggccactcatccatagggctattgtggtttgctgggagtccactcgagacactagttgcctctgtttttcctgtacctggaagtataatatcagcaatgaagcctgcaggacagcaaagttggcagcctgctgcttcctctggaagttccatgctagggataactgacctattgctggcccaagtgtgcctggaggaagtggttggagactactgttgggaggtctcattcagtcaggaggaatgaggtcagggattgacttaaaaaagcagtctggctgctttttgatagagccactgtgctgtgttggagatttcttcagcccctaatcggtttgggctctccaaggcccacaggctggactagctgagaagcctgaatgtccaagttggtgacctgccccacccttcaggcactttgtcccgtggagaacacaggcaggggtggccaraggccccagctgggacaacctgccctgggaagaag

SEQ ID NO: 906131 - DNA, 666 bp, Homo sapiens
gctggtaaagcattaattactctcaatgcttcggttggcactgagcatgtctctcttctgctgaagggaaagccaggtggttctggttttgattaaaataattgggctgccccagggatgtctgtgagggtgtttccagaggagactggcttttgagtcagtggaatgagtggggaaaattcacactcattgtggccaggcacctttcaatcagtgagggctggatggaacaaaaaggtggagaaagaacaaatttactatctttgctggatttctgataccccttttctcctgccgttgtacacagagctccaggttctctggcctttgtactccggtgctcacataagcagcgcctgctcctgcctcttaggcatcagtcttggattgagaattactccatcaggttccctgtgtctgaggcttggactgagcgagactaccagatttccttatttggcaggttaaagatggcctattgtgggacttctgagtgtctgtattcaagtgaaccaattctcataatagatttacttttcatctctctctatatatatcctattggttctccctggagaaagctgaccaaaacaatggtccagtgagtttcattgtccacgtattagatatttgggttaaaaaargaattaatgctaacagaggcag

SEQ ID NO: 906132 - DNA, 595 bp, Homo sapiens
ggactgggattttatccttaagatattgttgaaggtactagtccctacctattaaaattctaattagctgtccagattgaatggtctgaaattagtctgcagtcctcatttccactgctyagggtccctagaagtaaactgaacccatgaatgtccctatgagtactattatggtctctccatcatgtgtgtccagtctgtttaatgggctgtcttgttactcactccccttccatgctggaatgggagcttggtttactcattctcaagaaaaggatgtgtgcaaggaaatagaaatattaagtccttttctatcccccaggccactcataatctaattaaaggcaagacaagttaaagatacctctattgaagaccttatggtatgaattgattggtcttcttatcaaggtctcttttgtcatggaattcattattgaaagagcacatggatacataaataggtcagaatatagtatgctaagggctgtgatagagtttgtgtgtgaaaatactatgggacaatagaggagttactaatctgcttttagacatttgagctagatcttaaagcaagtctaggagttttccaggc

SEQ ID NO: 906133 - DNA, 589 bp, Homo sapiens
tggaaagatacaacccttctggattgaattaaaaaaaatagaaatcttgaacaggccaataaaaagcagtgaaactgaatcaataataaaaaattagcaacaacaccaccaacaacaaaaacaaaaacagaaacagagggagttacagccaaattataccagaaattcaaagaattcaaaccaatcctactgaaactgttccaaaagatggagaaagaaggaatcctcccaaacttgttctatgaagccagtatcatcctgataccaaaacctggaaagggcataacaaaacaaactgcagaccaatatgcttgatgaacatactcaacaaaatactagtaaaccaaatcaaacagcaaatcaaaaatataatgccccatgatcaagtggtttcatccagggatgcagggatgctttaacatacacaagtcgataaatgtgatacatcccataaacagaattaagaactaaaaccatatcatctcaataggtgcagagaaaagcatttgatgaaaatccagcattgctttatgatgaaaaccctsaacaaactaggcctagagggaacatacctcaaaatgacagaagc

SEQ ID NO: 906134 - DNA, 673 bp, Homo sapiens
aagagatcaagagtcaacaccagaaatgtcctacaagaaacgttaaagagagttcttcattctgaaagaaaaggacttcartgagtaataagaaattatatgaaggtaaaaacctcactggtaacagtaagtacactgacgaatatagaatattataacactgtaattgtgatgtgtaaattacttatatcttgagtgggaagactaaaaggcaaacctatcaaaaaaaataactacaacaactttttaagacatagatggtgtaataatatatgaatagaaacaacaaaaagtcaaaaaataggaagacgatgttaaagtttagagtttttattagttttcttttttcttgttagctaatttgtataatcagagttaagttgtatgtttaaaataacaagttttgtcatttgcaagcctcaggctaacctcaaatcataaaacctacgatagatacacacacacacacacacacacacacacacacacaaaatgaagcaagaaattaaaacataccacctgagaaaatcactttcacagaaaggaagacagggaacaaggaagaaacacaagaccacaaaacaaccagaaaacaaataacaaaatggtagaagttaagttcttacttatcaataatacattgaatgtaaatgaactaaattatgcaatcaaa

SEQ ID NO: 906135 - DNA, 638 bp, Homo sapiens
agaacaaacgaataatttcatatacactttgcccaggttcagcaatttctagtatgcccatttactccttaatagtttatgtgtatttcctaaaaacaaagtattttatttaagtaacaatgctatagttatcatgtttagagaatgtaacattggcacaacactttagcctgaagtatatattaaaatttcatcaaattttacaacaatttccaattttatttgctttacccaaaaggattcaatcaagacaaaggcttgccattgtttgccatgctcatttgatctcatttaatctggaaactttcctcagtcttgtcgtgtcttcttgggcttcagtaataacagttatttcaatttgacttcagttgttttctgtttttcttcctcattatttggttcaagatacgtatttctggctacaacaaaataaaattgattattccttcacagagtatcgcatgatacctgtttttccattatcgtttattttaatttcaaccatttggaggaaatcttgcctgcttttkctactctatatttatgctattaatttttgaatttattaagtaacttgtgcagaaacaaaaagactgtatatattctgtttaaaatagttctaaaactctaatgtacac

SEQ ID NO: 906136 - DNA, 618 bp, Homo sapiens
tgacaaaaaaaaattactgaatacattaattagcatgagacaattagargaaaatgagttctcattctactctcctcccagaaagaaaaatttaaaaacagatttaaatgaaactctgtgtaaaatatattctatttatttgtttatataatatgttgaaaggatcttctggttacatttttttttttgaactttggcttcaaaatgactgaattctttcctgcttcaaatgtcagagttctttggttgtcatggatgaacagtgtcttaattcaaaactaatacttttttgactggtaacagtccagtggctttctatttttgcaaaggacatatctaaagtattaagaaaattctcacaagttctctcaaactctagctcaaatgcagtactccctatcttgcttgcttagatgacctggtttatattctgtcaacttgtcagaggttgctacacatacaaaagttctgagggcttggtttggtgtttttactggctgaagcaggaataaaaaagaattctaccagagttgagagcagctgcagttgtttcagatgatatttgtgtccaaacactcaatgaacatatagtaatgcaagttaagtatgatcatctcc

SEQ ID NO: 906137 - DNA, 653 bp, Homo sapiens
atgctaggtaccttaaaagaacataaatgcaggaggtgaatatattacttaccatttctcatgcctaattatcttgaaatctatagtactgtcgtgcgtattgcttcagaagcgatttgctctttcagacttcccaattcaaaagccgactgtgcattaacggatccttgttctctgctgcttctattcttaggttgtttctcatcttcttaaatttcattccctcttttatgtattatgtctttttaccacttagttctcattttttttccaaaattcttgtatgtgcgcctgtgtgtgtgtgtgtctgtctgtgtgtgtgtgtgtatgtgtgtctggatcctacagtaactgagcaatttaagtttaacagaatttcaaacttgcctttggagataggagcagtttttttcctgggcaaagaggagaaaatacagccttaatgaagcaggaagatagtgccagtgaaaaaaagatgcctcaatttacaagttttctaatatgtatgtctaaaatgtgtcctaaaaaatttgtcttcayaaatgctgcataactacattattgacaaaagcaaaacaaaacaagatttcccctgcccaaataaaaagaaaacaaaacaaaaccaaaaaacaacaaataaaactactggaatg

SEQ ID NO: 906138 - DNA, 601 bp, Homo sapiens
tcacaatcatggtggaaggcaaggagaagcaagtcatgtcttacatggatggcrgcaggcaaagagagaatgaggaagacaaaagcagaaacccctgacaaaactatcagatctggtgagacttattcactagcacgagaacagtatgggggaaaccactcccatgattcaattatctcccagtaggtccctcccacaacatgtgggaattatgggagtacaattcaagatgagatttgggtggagacatggccaaaccatatcagatagggtctcgccctgttatccaagctggagtgcagtggtgccatcacagctcactgtagtcctgaattcctgaattcaagcaatcctcccagctcagcctcccaagtagctgtgactacaggtgtgtgccaccatgcctggctaatctttttgtattttttgtacaaacagggtcttgccttattgcccaggtgggtctcaaactcctggcttaagcattccttccacctgagcctcccaaagggctaggattacaggtgtgagccaccacacttaccctcagtctaaccttaatcaagtcatgaacattctcaatattctttatctaaagcta

SEQ ID NO: 906139 - DNA, 658 bp, Homo sapiens
ttaaatttcatgcatgtgattgtttaagtgataatctgaaaacacagtgggtaacttgagctcatataacccagcacttgaaagcctagttgttcccagttaagtgtcaaaaccaggccagttggtaacaaaataaaagacccttaagcttttattttgggagcctgacatagctgccaggtctacacagctgcaatcagtgttagaaaatgctgtctgactggctggtactaaccagctggacccagagcatctgagggctgcagactgctgtgacaaggcccagccccaactcccagcactgtgccagcccttgccacaaaatcaacgggcactccctactactcaacctgtaggcagagggcaaaattgctggtccacttttctgtgtaaggattcacattataggtcaatatttggaaagaggggacaggaaagtgtcctagaaaacaggctttggcttcagacacacccaagtcgaagccccaacctctgccacttattacttgtgtgatctcagcaagttaatccatgtttgagattrtatcttcatctgtaaagtggggctgacagtccctcactcttcaagttggtgtgaggacgcttggcaagatcttaacatagttcctggcaatcattcatgttaaagaacgctgcg

SEQ ID NO: 906140 - DNA, 581 bp, Homo sapiens
caactatgtcttagtctttctggcaaccagagtccatcctgaatctgtctagggtcctccagtcaccagccatctcattagcatacaaaaagacactcttagcactctggagattccaagggtcttagaagctctgtgtcagggaccagggactaagaccaaatattataacaaaagatactcctatcattcaggaagttagaaggatttttccgtgccaggaactggggatgaagaccaaatatatattttttaccatatcataatgtcacatgaccttggataccttttttttttttttttttttttttttttaccttacagcaattcccaaaaaatactggtgaaagctgttggtcactaatactttttggggttggggggataattgcctcagttctgaaggggaaaccttggaggaacatgtccagcatccactacatgtgattactgataaaactgagcatcatgaaacatgggcttaaatcttggctttgctattaattggctatgtgaccttaggcaagccatgtaacattytaggaaataatttcctcatctataaaataagggggagggaa

SEQ ID NO: 906141 - DNA, 573 bp, Homo sapiens
atttctttccacttgcaaaatgaatcatcagagagaggatattttgtcttattcaagggcacacaaaccgcagccagaattccccattgcaagccagtttggtgaatagattaccatcagttgatgtatagtggaatgccgagtcagattctttgaaaaggaataaataatatattttaaaatatatatttgtcttggaatatttaggccctaaaggcataaaacatttttatgatttctcaattgctttataaaacagatgtttcgactacaaatgtctgttagtcctcagtttagtttcttgcacaggatttcagaaactctcacttaagccactgttagcaggtgatttagcactcgtcagtttgtctagccttttcatataacccgttacttttttcctctcactgtgatctgtgtgatactatttctccccccacaaaaatgttcataaagagatcatgagcataattatcaaacgacatgmtgttttgcctaaaatggaaaaccttgaaggaagcatttatttactcattcgttgaatacttaattcatgtttactcaattccagac

SEQ ID NO: 906142 - DNA, 606 bp, Homo sapiens
ccaagtcctgagggagcctagtcctcctaaatgcagacaatgtacccatgacaagggctacagcttggctttagcaaccaggaggatgaagayagcaaactgattaagagagtaggtataagaaccagggagagtggggtccaaatatctatcctgcctctcacttgctaaaagactttaagaaatttgctcaacctctctgaatctcagcgtccttatgaaaagatagcattaattataccttctccataagatttatataacatgccagtgcagataaagcacaaagctttacataaatgttcatcttcaaaaacagaagctatgaataacaatgacaacattgttaataatgcagtgttatgcatggaagtggacaacttctaacatatttatgagtaaagagttaagatagccttttcccttctgcatgagaatttgaccttcatttaaatttcacgctgggtttccctgttaaggttggctatgctgctaaccagtgttgtttatggtaacacaaatcccatgattaacactggaaggcctatacataagctgtatatatttgataggaagtcacacttggggtcttcctgagtgtgatga

SEQ ID NO: 906143 - DNA, 591 bp, Homo sapiens
ctagaaatggaataagtgggtcaaagcatttcagtgatgtcttttttttttctccagagttcatttctcctctaggcagaaagtagaatgtgaaatgtggaagaaataccttcacaaagaacaaygtattttgctttggtgaaatgtcaaagtctccttaaggtggctcctaataatagcaacagtcaacctttatatgatgcttaatatgtgccagacactattctaggcactttatatatgcattaactaatgtagtctcacaacagttctataaagtagagacgaatactattcccattttacatacgagaaaactgagggagagaagctaagttgcttctaagaacatgaacagctttatagaattcactgtgtctgtggaacagatgatgctaagacatttgtttcatgcatttgttcaccgtaggtaccttatttggacccgcagaaaaaaaacattacttacttttgcaccaaataatccttatgcttactgaaatggcagatttgtatctgatgagttttgtaccagataatcattgtgttgctcctaagcaaatggcagatttttattggtaagattttata

SEQ ID NO: 906144 - DNA, 585 bp, Homo sapiens
aatcattcccccaaatttatgctagtttatttgacttttaattttattgttttgcaaactacccaaagttcattttaactgcgtagtagatatggagagacagtagagcatgatggttaagaaagtgtattctrcatgggacagtaaaatcctctccaccctttacctttgacccaggccctctactccttctaatgagggtcaagaacacagctagaaaatcagggagaaggcaaactattccccaagccactacaaataccatttctgacaccttatttcagctgcacaattgtattagtctgttttcaagttgctgataaaaacatactagagactgggtaatttataaagaaaaagaggtttaatggactcagttccacatgtctggggaggcctcagaatcatggcagaagttgaaaggcacacctggcatggtggcaggcaaaaagggagtgagaaccaagggaaaggggcttccccttataaaaccaacagatctcgtgagaattattcactaccatgagaacagtatgggggaaaccaccaccatgattcaattatctcccatcaggtccctcccac

SEQ ID NO: 906145 - DNA, 596 bp, Homo sapiens
ttgtaggatggctacacgttcctggtatcacaaagacaagttaacaatgactgaagaagaaaggcattatcctcccttgaaattttttwaatttaggtttaaatgacctttgctaaagccagccctgtgctgcactaggctgtagcagcttgcaccacctcccaggataccttagagaaagcatttgcacctgcatcatctcagcatctgccatccttgctctaagcaaaggaaaaactgaaaaaactgtcacagattggaggatataaaaactaattgaatatgcaattgtggattggatcctaagacaaaaaagtacactagtggaaaaacttgaaatgtagaggtgtattctttaatagtattggaaaattaaagtattgtaatttggttaatactgttatatgggcattaatttcttggttggttttgatcattgtgcttacagttatgtaaaaagttaatataaatgggagctgggtgaaaggtctataagaattcttgttatttttaatttgtgattttggagaaaatattatgtcaggggtctacaaaatattgcctctgggccaaatcccacactcaacctgtttttt

SEQ ID NO: 906146 - DNA, 596 bp, Homo sapiens
ttgtaggatggctacacgttcctggtatcacaaagacaagttaacaatgactgaagaagaaaggcattatcctcccttgaaatttttttaatttaggtttaaatgacctttgcyaaagccagccctgtgctgcactaggctgtagcagcttgcaccacctcccaggataccttagagaaagcatttgcacctgcatcatctcagcatctgccatccttgctctaagcaaaggaaaaactgaaaaaactgtcacagattggaggatataaaaactaattgaatatgcaattgtggattggatcctaagacaaaaaagtacactagtggaaaaacttgaaatgtagaggtgtattctttaatagtattggaaaattaaagtattgtaatttggttaatactgttatatgggcattaatttcttggttggttttgatcattgtgcttacagttatgtaaaaagttaatataaatgggagctgggtgaaaggtctataagaattcttgttatttttaatttgtgattttggagaaaatattatgtcaggggtctacaaaatattgcctctgggccaaatcccacactcaacctgtttttt

SEQ ID NO: 906147 - DNA, 621 bp, Homo sapiens
taaagacggggtttccactgtgttagccaggatggtctctaactcctgacctcgtgatccacccgtctcagcctcgcaaagtgctgggattacaggtgtgacgcaccgtgcctggcccaggtactttcttttttttttttttttttttttttttttttgagacggagtctcgctctgtcgcccaggctggagtgcagtggcgggatctcggctcactgcaagctccgcctcccgggttcacgccattctcctgcctcagcctcccaagtagctgggactacaggcgcccgccactaggcccggctaattttttgtatttttagtagagacggggtttcaccgttttagccgggatggtctcgatctcctgacctcgtgatccgcccgcctcggcctcccaaagtgctgggattacaggcgtgagccaccgcgcccggccggtactttctttttgatgtgaccacctcatccctctataacttcacttscctatttcccccaagacaatgtccagaaaatgattgaggggtgttggagaaaaacaccttttaagacttgtcttccatgacagccaggctcgtagtaccactggttgtcttactgatattaaagtgcagtgta

SEQ ID NO: 906148 - DNA, 576 bp, Homo sapiens
gttctcattgatacctcactcttaccaaaattcctccaattctcctcattgttctcattgatacctcattcttatcaaaattcctccaattctcctcattgttcttatttgatacttcattcttatcaaaatttctccaattctggcccaggccaccagcaccagaattttctggacaaaagagtccactcattttaaagatgcagattcctgagtgcactccagacttggccaaaaatcactgggtattgaaagcaggggatctacatgttcaccacacccactagtcaaaacgtatgtccaggcaagtctgaaatataccacaaaactctgtgccatgattcttttcagaaggtgcagagagtagatggaaatcgaaatatccctgcaagtttccacactcccgcttccaaaggcaaataactactccatgtcctagacaaatgggtaacccacaatttgttctgatatctgattgaaaccccaaatcctggacttttgacttygataaagatgacactctagggggagaaatagagaagccattaactggaggacattaaggccatggtaaca

SEQ ID NO: 906149 - DNA, 649 bp, Homo sapiens
tccagctgtcagcagatagcctcaaactsttagcttctgcagtgtttccctaagcctaggaggactacctcactgtagcgacggccttcccggtacagtctacctcaaatgactaagcatggtggtggataaaggcccaaccagtttgttccactgaggaatgggccatatgcaccagagctctgcatggggttaagtggtgctgtgctgggactgcatcactggtcaactcctcactctgtccaatactgattccttcccttgtcaaattctctaatggttagtctgcatgccaagcactttctcattgtttgcttctggaaaaccaacctgcaacagggagcatatgaaatcatctctgccaggaaaatgtcaagacacaactcctctctgaatatattacaacaaacaggtcagcctgaagaagcctttgatggggccaaaaaagaaccatccatgatatctactgctggacccataaccaaatttctcactaccttgccagaaagagttgtaggttatttcctttttttccagacacttacttataaaatgagaattgttgagaaattttctggatttgaaaaatctggttaaaaaataatttacctctaagacagagagctccaaaggagggaaatgtacatgt

SEQ ID NO: 906150 - DNA, 678 bp, Homo sapiens
tgtttgtgctgcttgcatgtttagttcttgcaggaaacagttaatacagtctttttctcggtttacagggaatataattttctgatattatagatggctaatatatattatgtgtcaatgttctaaatgcttttacatatatgaatgcatttaatactcacaaaaatcctatataaacagtagtattagtagcaccacattatgtataggaaacagaagctaagtggtgttaaataacttgctgaaggtaacacacctagagctcagactacaggcttcagtgtccacatccttaccattcactctgtacaacacttcaattagcacaaaggataatttagttaagatacaaaatatactcaagtaatattactaaagatattgataacattttctataaccaaatgcaaaagcacaaaataagaagggcaccttatgagatatgccaaaaacatggactttttgactatgattcaatagcataataatgttgcttatagttctgtatttgtaggatacaaaaataaattattatatgctttaatcatttttgttaaatcttgactaaatatatgtttgaaccagaggccacaagtcttaattcttaatgaaaaacmtattaattaccacaatatttacattacatttattttttgtatcttgccaatgcaaggttaa

SEQ ID NO: 906151 - DNA, 332 bp, Homo sapiens
taaataaatacctgtttttgtggtctacttattgccacagttttacatttttgtactttttatcttaatttcactgttcaaaatgagccccaaactgttcaaaatagggccaaagtgctgtttagtgttcctaacaccagaaggctgtgatatgccttgtggagaaaacgtatgtgttagacaagctttgttcagcatgacttacagtgccgttggccatgagttcaatgttaatccattaacaatgtatattaaatagggtgtctttaaacagacacaaatawaaaacaaaatcttatattgattggttgaggaaaattttgtgaccagaa

SEQ ID NO: 906152 - DNA, 593 bp, Homo sapiens
accaatcactcatcaaaagttgtgcatttatcactaaggaagtcatttaacaaaaaatcatcatcaagctgaggaagacttctccctactgcactacctrcttacatatctttcaaaggtttaaagtaaatacttacactagcaatatttgctattattactgggagaagcaattttctttgaaaactagtaaacttgtagtgcttatctgctattatctctcttcttcttccacatgacagtagtactcttttgcccttttttagttaagcaggaccatctaagtatgtcagggcaatgggatgtgatagggagtgatgtctgtgctgcagaactggaacatgtattttctggttcaagacttgcttgttcccgttgcagcaattaggaaagcctaggttgagatggaagtgacaccacagcaaagcagcctgcacctctgagcacactgaggacatatgcctggaagaatttcctgggcctcaacggattttcttttaaaatgaaataaatttaattgtgccatgtcactgaaatagtaattatgctaattactttaacataactttcacctcaacagattgattttaaaa

SEQ ID NO: 906153 - DNA, 593 bp, Homo sapiens
accaatcactcatcaaaagttgtgcatttatcactaaggaagtcatttaacaaaaaatcatcatcaagctgaggaagacttctccctactgcactacctgcttacatatctttcaaaggtttaaagtaaatacttacactagcaatatttgctattattactgggagaagcaattttctttgaaaactagtaaacttgtagtgcttatctgctattatctctcttcttcttccacatgacagtagtactcttttgcccttttttagttaagcaggaccatctaagtatgtcagggcaatgggatgtgatagggagtgatgtctgtgctgcagaactggaacatgtattttctggttcaagacttgcttgttcccgttgcagcaattaggaaagcctaggttgagatggaagtgacaccacagcaaagcagcctgcacctctgagcacactgaggacatatgcctggaagaatttcctgggcctcaayggattttcttttaaaatgaaataaatttaattgtgccatgtcactgaaatagtaattatgctaattactttaacataactttcacctcaacagattgattttaaaa

SEQ ID NO: 906154 - DNA, 597 bp, Homo sapiens
gatagaagataggcaggtagactgctataaataactagagatacattttaagaatatatacacacacatgcatatacacacrtacaaacatgcacaaacacacatacgttataaataataaatttggaatatggtttaacattaatttgtaataattatttaccctagtaatcttgaaatacagttttttattcctgtttttcagctgtatatactgaagaaagaaatcaaatgttgcttaaagagcagagtatcctcaaaaacatgacctgagagtttttcacctttcatgttgattttatagttatttccctcagcaaaatttcctcacttcctgcagtgttttgtttctctgtctctggattctcagtaatgtcaacactccactcagatctacaaaagaatgtccacctattaaaatgtgtcacgttaatgatgggcagatcaattcttttttaaaaaaatacttgaattaaaaactttaatgtaaacagaaactactaaagagaaacaatacatttttcccaaatcttaaggtttttctgtatttgcttaaccctagcctctcaacttatttcaggtaaaaataacccatat

SEQ ID NO: 906155 - DNA, 597 bp, Homo sapiens
gatagaagataggcaggtagactgctataaataactagagatacattttaagaatatatacacacacatgcatatacacacgtacaaacatgcacaaacacacatacgttatawataataaatttggaatatggtttaacattaatttgtaataattatttaccctagtaatcttgaaatacagttttttattcctgtttttcagctgtatatactgaagaaagaaatcaaatgttgcttaaagagcagagtatcctcaaaaacatgacctgagagtttttcacctttcatgttgattttatagttatttccctcagcaaaatttcctcacttcctgcagtgttttgtttctctgtctctggattctcagtaatgtcaacactccactcagatctacaaaagaatgtccacctattaaaatgtgtcacgttaatgatgggcagatcaattcttttttaaaaaaatacttgaattaaaaactttaatgtaaacagaaactactaaagagaaacaatacatttttcccaaatcttaaggtttttctgtatttgcttaaccctagcctctcaacttatttcaggtaaaaataacccatat

SEQ ID NO: 906156 - DNA, 662 bp, Homo sapiens
gcagagggaaaagttgggttctaattggtaaataagcaatgaaattgaatgagatcaacagcctagacagtttgccacagaatcttccattcakttactcaaataattcacttttaaatggcaatcagatttcaggtttttggtatacaaagatgaataagcatgctatactccttgccctcaagcagcatacactctttgtttaaaagggaaaaaaaaaagacaatgactaatttgtacaatgtgctccagaagcacaaaagaaatcgattttcttggaaatgaagggaaggcagagaggggtaaggaaaagcttcatagagaacgtaaacttaagatgggtcttaagatacaagaagagaggtattccccatcaaaagaaaaatatataaaaatgtaaagactatttcaaaaatagacttattacctaatgaatttcaagaaaggaataatgtgagtaaaattttctaagtgaatcaaagacaaaagaatgccttgaaaattaaatctgcttttctccgtattgtagctcatagtgtattcatttgtaaattctaaattcaattcaatcgagcagatagttgttaaagacctcgtcaatgctttatatgctaggaaacgtatatacaaatgaactggaaatcacacctaaaaagcctaca

SEQ ID NO: 906157 - DNA, 601 bp, Homo sapiens
acatgatccccagtgaaattctttccaaatgatgtatcgtgtgcacaagttataagtgattatcttcaattttcttagaaatgagtaataagataactcttaagacccatgcttttgtatatgcatcaaacactgaagttggcgtggtcattgatagctgtcatttagggagaaaacatattttctgtcttgtctcataccagacaaatccaggactcttttcccccagatcagtaataagccgcctttttctaggctacagtgaacagcaaacattgcaactctaaagatggaagtagcagaatgctcaaaaatattgcatcaaaatattggatacaacctaccagcccataagaaaaaaacacattgcaaaactgacgccatctgcgtcatttagcaaccattaaaattcttcttatgtctgtatttcctaatgcttccaaaatggaatttgctccaagaattaagaaactctttttaagatggcggccctattaakagacttctccctatctcccacttcatctcttcagttcttttcccttgcccaggctggctattgtgaccatttcagccaatttcctggaggtattttctagcc

SEQ ID NO: 906158 - DNA, 639 bp, Homo sapiens
cagattgtgatgacagacgcaggccaaccacattccgaagcagattatacactggggccactgctctgccgcggagatagtaagtagtgtcaagaaaaagctttattttcataataactttttttggttataaaggggtagacaaatgcccttgttcttgccagaaagagaatagtggcagtactaggacaggggcgaatatcaggaaaacacacataccataaaggcacagtcagtactgaagatctgtgtttccttactgaagcattagtttatagaaaatgaatcatctttgttttaacttattacttgcttggctggatttattatcaattgattgtattttttccagaacaatcatgagatgaactattttctgaatgctaagggatatttattcattgcccttatactcttcagacaactatagtggtaggaaattattggacactctctattttctgacctctgtacatactgttttacattacatggcaccgaatgtgtattaatctctttcctgcagcattttcgttcatgggtggctttcatggtcaagtcctcgctcccccacctcwgtggcactataagcccagggttcttagaggatctacctactgggtagcacaggaaccacaa

SEQ ID NO: 906159 - DNA, 593 bp, Homo sapiens
ttggtaaaataaatggtcagcgtagcaagaaaatgagtttaattgaagtttttcctgccaaagattgtaggttccctcgtttatagatactgtatcatggaatttactttaggtagttttttttttttccttctctgtctctgaaaagaccttgcatagtagtaggcttattttggcttagtgattgtcagccctgacttgattactcattaaagtaacctggaaagctttaaaaatactgaggccaggcccctccccacagattatattgaattgaactgtgatggggctagagaattaggatgttttttgaagcagctggacttgtgagtcactggtagccacacgaaaatattatttattacatgcagttgtttgattgaattaaatttttgtctgaatttctgaccagttttgataaagtatttcatccagtaccccatgtgcatacagactcacttgtctactataagatgaaagtattgtgtgacatgttttcatgagtccctcacatttctgcacagtttacgagcwggcacagactgccctttgttttgaccatcttttcaagcatgttggtatctccttctgga

SEQ ID NO: 906160 - DNA, 578 bp, Homo sapiens
tatgtctcctgctgaatgaggtaggtctaggaaattttttattaatgtggtagccattaaaaattaccatttcmacttctgtgatcatcattttagcaagacagtctagtagagaaaatgcaatttaattatttatggaggatgcttgtattttaaaagatctatttcacgggagctccaagtttcattccattttcaatactgactgtgcaaaatattgagaatgtgtaaatgaaatccacatttcagtttaattagggcagatactataataaagtcttgttttttcattgttttggaaagtctggtgttttcattctgagcataaagatagccagtgtttttcaccagtttcttattgttacaggcagattcccaacctttggaaatcaaaatagaatactcaggatttgtaatagttatcagacttcctcaaaacttcctaattaatagggacatctcatttttcttttctccctattattttctaaagcttatactatagtctacacttggaaatagtgctttcataggtaccataatctcttggagcagtattaaaaattcagtaagagaac

SEQ ID NO: 906161 - DNA, 715 bp, Homo sapiens
ccgggtggccgggcggccggtgctgtcgtcgttaccagtgctactgctgctgcmgttgctaatgttgcgggccgcggcgctgcacccagacgagctcttcccacacggggagtcgtggggggaccagctcctgcaggaaggcgacgacgaaagctcagccgtggtgaagctggcgaatcccctgcacttctacgaagcccgattcagcaacctctacgtaagttcagccccctcctggcacttttcccgcagcttcttccctggggtcggtctcacggaaaccctgcctccagaggggaggaaacagaccccactcctggagccccccagcacccttgcggtggtacccggccagagagcgatgccgctgcctgccccgctgctgtaggggagcaagaatgacctggaggggagagcaagaattgttcgcagccacgtacgcgtcccaggcagaaaaggtggcgttgctagggcggccagcgggctttgcagttaggaccgcgagaaggctgtgcccgtctgcggagctggggtgttccctcttcagacctggaggcttcctctccgaggacatggggctccggggttgtgaggggagtgagaagataggtgaacgagttttagggcccctggacctactgcagcgcggagctgggacagtcgcaaaagttgcgcttgtttccctgaatccagactccctggccagtggggaagg

SEQ ID NO: 906162 - DNA, 668 bp, Homo sapiens
ggtgccacgtccagttgtcagggaatacagacggagcaggcgctcagcttctctgttacctttggctgagggtgttgccaactcctcttattgtggtaaggtggctatgctctgaggtgtgcagatcagggctcagcctccagacagggcctgccaggaggcagcagtgacagatgatgccccttcatatcctcttcctgcccacacaggcccatggtggcctgaccaccggtggcctgagtgatgcttatcattttcctgccttcatcactgtctcttacccatgccctccaatcacactttgcctgtgagtgttaaatcataattggtccctgctcatgtctcattcaacacatactccatgggtatgagaggtaaggagaggaaggaaaagaagaaagggctgtcctagaagcaagtgaagaaagatggatgagaaacagatcacatgacagggggaggagctgagggtattccaatgccatccactgctctgtcctgtcatgcatatttggaaggtgtccccagcccagccatgcactcccccaccctccctgtcctcagagtactcccgtgctgaagtgagatcgtcawctcaatattcactcagctgcctcattgctttctcccaaacaggccctatgtgtcagcgcttggaatgggctcgc

SEQ ID NO: 906163 - DNA, 659 bp, Homo sapiens
agccgcattttacaggtgaggaaactgagtcacagagcggtaattcacttgcctggggtcacacagctaatgagtggaggatctggagtttaaacacagaaactctggctgcagacccctgttctcttgacttatctgcatctaaggaaaagagagaatgtggccgggtgcagtggcttatgcctgtaatcttagcactttgggaggccgaggtgggtggatcacttgaagccaggagttcgaaaccaatctggtcaacatggtgaaaccctgtctctactaaaagtagagaaattagccaggcttggtgatgcacgcctattatctcagctacttgggaggctgaggtacgagaattgcttgaactgaaccctggaggcagaggttgcagtgagccaagatcgtgccactctactccagcctgggcgacagagcaagactctgtcaaaaaaaaagaaaagaaaaaagaaaagagggaatgtgacccagaggaggtggagctggaatctgagagtagaggcgacagcccttytgaaactggagatgtgatgaaaggtaagaggccaggaggtgacagggacaaggagctgagagacttctgagggtccctcttgaggaaggctgtggccctgggaagcagagagtgagatagtccattt

SEQ ID NO: 906164 - DNA, 700 bp, Homo sapiens
cacgttctctacctatgggtgagcaaaagcctcctgccctctttggaaaataagcatggcagttcctaggctcattggcccagagcatttaagcacttaagagcagagcagggccagagctggaagtggttggracggggtgaaggggacgatcaggggaggcagtggctccatagctgcagtgtttatacatttgcagtgtcctgctccagcaatcagcaagcactactccagaccaagtagggttcaggcactctgctgttcctctgcatgactcaaaggagatgtggctgctgctatgatgacactctcaggacatccctcaccacccacctactgccctcctgatcagaagaaatctcccagatcccgaggcttggatcaaaataatgatgactactgcaacaacaataatgttaatgacaataattttgcacatttaccaggttccaggcaggcattactttaaactctttatgcatattaatttatttgatgcttgtaacaacctaggaggcagatactattattacacttattttacagttgaagtaacggaagcagaggaggcttaggaacttgctctacacaggaagactggtaggggcctgagctgggatttgaatgaggctggcaatgtgagagctcatgcttcttacttgctatacccaagcatttactgattcgtcatttctaagta

SEQ ID NO: 906165 - DNA, 555 bp, Homo sapiens
gaaaaaaaaaaaagaagtttttatatgtttaagggctcactgaaagcccaraaggatggataataacagactataccaaagtatatcaacaaaaaatttcagagctataagaataagaataaggaaaaaagtgctaaaagttctatacaagttttatacaagaagattttaaaagctatatactggttctttacaagggagaatgaaacttctgattcattggacctctcagaggaaactagaaaagagtaatggcttttttttttcttttctttttttttttttttttgagacagagtctcactctgttgcccaggctggagtgcagtggcacgatcttggctcactacaagctacacctcccaggttcaagcaattctccagcctcaacttcccgagtagctgggattagaggtgtacaccaccacattgggctaatttttgtgtctgtagtagagacagggtatcaccatgttggccaggctgatctcgaactcctgacttcaagtgatctacccacctcagcctcccaaagtgctgggattataggtgtga

SEQ ID NO: 906166 - DNA, 555 bp, Homo sapiens
gaaaaaaaaaaaagaagtttttatatgtttaagggctcactgaaagcccagaaggatggrtaataacagactataccaaagtatatcaacaaaaaatttcagagctataagaataagaataaggaaaaaagtgctaaaagttctatacaagttttatacaagaagattttaaaagctatatactggttctttacaagggagaatgaaacttctgattcattggacctctcagaggaaactagaaaagagtaatggcttttttttttcttttctttttttttttttttttgagacagagtctcactctgttgcccaggctggagtgcagtggcacgatcttggctcactacaagctacacctcccaggttcaagcaattctccagcctcaacttcccgagtagctgggattagaggtgtacaccaccacattgggctaatttttgtgtctgtagtagagacagggtatcaccatgttggccaggctgatctcgaactcctgacttcaagtgatctacccacctcagcctcccaaagtgctgggattataggtgtga

SEQ ID NO: 906167 - DNA, 600 bp, Homo sapiens
caatattgtttttgtgatatatccatgttgacacatatggcatttgtgtatcctttttacttatattactttgcattaatatattggtttattcttactctttatgaacatattaaagcttttttgctatttaaaattataaacaataatgcaataaacattcttgtaacttttacctctgaatactttcttaaactccatttgaaaaaaaaaaagaatactattatggagatatgcatagagactcagctgccctgtctaaattttgtgttagaataatgcaggactgagtagcaaaagcaagactctttggctatatttacatttgaggagacacagtctaagcctaaaaccaattcacgttctgtgtacaccacaattttcagttgatacatcaggatctatcattacatcttgaaacctcacctattaacaaactggctattattaatgatactgctttcctgaaccagacctgaatttctgtggtctgcagaatttttattgggttgaaaaaaaaaaaatggcagcaacccaagtattgggttgacagaggtgtgctcygaataaagcaagttttgtcactatagaaatagaaat

SEQ ID NO: 906168 - DNA, 659 bp, Homo sapiens
cctgaactggatgcttcttccttgggtgtgtctgccagtgaagagaaatttttaaaaattgttggaaatgaagatatgtgttttttttttaaaaaaagaatcccaattatagagtatgctactgggcagagactgactgtgctctacagtgattactctgaagaagaactagagtccatttctgttcattgttaaccccttccccactccttttgagatctctgattctctgcggccagtgcctctaattgtcatctttgccttattctaataaagtgactctatttaataaaactttccctccttgagtgtgctggtcaccggggaaatcagtggtgtttgaataatggcagaaaatggagcagccagagtggtggagtgctccctgaatcaatggctccaagtcttctggatttcttgaactaataaaaaacacaaacctatggtttccaactttgtactttgccaagtaatgatattaaaattttgttcaaattatcatcttcattcatcattgtttcatacagaattagaacatttttgaagttaaaagttagtgtaagacatgattattttaagaaaggccaattctttaaacagaataaagtcagctttatatcacttttttttttttttwaaatttcactgcagcaacattt

SEQ ID NO: 906169 - DNA, 626 bp, Homo sapiens
ctttagtttaattagatcccatttgtcaattttgacttttgttgccattgcttttggtgttttagtcatgaagtctttgcccatgcctctgtcctgaatgktatggcctaggtttttcttctagggtttttatggttttaggtcttacgtttaactctttaatccatctttagttaatttttgtataaggtgtaaggaaggggcccagtttccattttctgtatgtggctagccaattttcttaacaccatttattaaatagggaatcctttccccattgcttgtttttgtcaggtttgtcaaagatcagatggttttagatgtgcggctttatttctgaggcctctgttctgttccattggtctgtgtatctgttttggtaccagtaccatgctgttttggttactgtagccttgtagtatagtttgaagtcaggtagcatgatgcctccagctttgttctatttgcttaggattgtcttggccatacgagctctttttttcattccatatgaaatttaaagtagttttttcctgattctgtgaagaaagtcaagggtagctggatgggaatagcactgaatctataaattactttgggcagtatagccattttcatgatattga

SEQ ID NO: 906170 - DNA, 626 bp, Homo sapiens
ctttagtttaattagatcccatttgtcaattttgacttttgttgccattgcttttggtgttttagtcatgaagtctttgcccatgcctctgtcctgaatgttatkgcctaggtttttcttctagggtttttatggttttaggtcttacgtttaactctttaatccatctttagttaatttttgtataaggtgtaaggaaggggcccagtttccattttctgtatgtggctagccaattttcttaacaccatttattaaatagggaatcctttccccattgcttgtttttgtcaggtttgtcaaagatcagatggttttagatgtgcggctttatttctgaggcctctgttctgttccattggtctgtgtatctgttttggtaccagtaccatgctgttttggttactgtagccttgtagtatagtttgaagtcaggtagcatgatgcctccagctttgttctatttgcttaggattgtcttggccatacgagctctttttttcattccatatgaaatttaaagtagttttttcctgattctgtgaagaaagtcaagggtagctggatgggaatagcactgaatctataaattactttgggcagtatagccattttcatgatattga

SEQ ID NO: 906171 - DNA, 634 bp, Homo sapiens
tttttttttttttaacctcaaaaggggagggccttggatatggaattgttgttggtggtgcttagattagacaaccagattattctcaattgttcaaaagtctaaaattatacaggtagggctgattgtcrgccagggtatcctctagtgcagtggtccccaacctttttggcaccagggaccagtttcatggaagaaaatttttccacagatggtgggaggggatggttttggggtgattcaagcacattacatttattatgcactttatttctattattattacattgtaatatataatgaaataattatacaactcaccataatatagaatcagtgggatccctgagcttgttttcctgcaactagatggtcccatctgggagtgataggagatagtgacagatcatcaggcattagattcttataaggagcatgcaacctagatccctcacacatgcagttcacagtatggttcatgctcctatgagaatctaatgccactgctgatctgataggaggtggagctcagcttcactcactcacccgctggtcacctcctgctgtgtggcctgattcctaacagttaccagtctatggcctgggggttgggaccacttctgtagtactaagg

SEQ ID NO: 906172 - DNA, 581 bp, Homo sapiens
ttttctttaagaattttcaatataggcccccagtctctcctggcttgtagcgtttctcctgagaggtttgatgttagtctgatggacttccttttgtaggtgacttgttctttctctctagctgcctttaacattttttctttcatttcaatcttggagaatctgatgattagtgtcttggggataatctccttgtgcagtattttgcaggggttctctgtatttcctgtacttgaatgttggcctctctagctaggttggggaagttctcatggatgatatcctgaaatatgttctccaagttgtttccattctccccatctcagggacaccaaagagctgtagactaggtctctttacataattccatacttcttggaagttagttccctttcattattttctctttattcttgtctgtcttatttcagaaaaacagtcttcaagctctgagattctttcctctgcttggtctattctactattaacacttgtgattgcattaygaaattcttgtagagggcttttcagctgtatcaggttgttcaattttgtttcctataaaccctcttttacctgtc

SEQ ID NO: 906173 - DNA, 651 bp, Homo sapiens
agaggtacaaagaggagctggtaccattcyttctgaaactatttcaaacaatagaagaagaaggagtcctccctaactcattttatgaggccagcatcatcttgctaccaaaacctggcagagacacacacaaaaaaggaaaatttcaggccaatctccctgatgaacattgatgcgaaaatcctcagtaaaatactggcaaaccaaatccagcagcacatcaaaaacttatccaccacaatcaagtcggtttcatccctgggatgcagggctggttcaacatacacaaatcaataaacataatccatcacataaacagagcccatgacaaaaaccacatgattatctcaatagatgcagaaaacacctgcaataaaactcaacaccacttcagattaaaaattctcaataaatcaggtcttgatggaacgtatctcaaaataataagagctatttatgacaaacccacagccaatatcatactgaatgggaaaaagttggacacattccttttgaaaactagcacaacatagcacaaaacagcacaacatgaaaactattcaacatagtattggaagttctggccagggcaatcaggcaagacaaagaaataaagcatattcaaatagaaaaagaggaagacaaattatc

SEQ ID NO: 906174 - DNA, 621 bp, Homo sapiens
cctcccaaatctcatgtctttctcacactgcaaaacrcaatcatacgttcttaatagtcccctaaagtcttaactcattccaacattaactgagatctcccaactcctaagttctatctgagactcaagccaagtttctttcacctataagcctgtaaaatcaaacacaggttattaacttccaagatacaatggtgttataggcattgggtaaacattcctgttccaaaagggagaaattggctaaaagaaaggggctacaggcctcacacaaaactgaaacacagcagtcactaaacattaaagctccaaaataatcttctttaactctatgtcccacgtccagggcaactgataagagaagtgggttccaaagacctttggcaactccacccctgtggctttgcagggttcagcacccaaggctactctcacagctgtagttgagtgtccgcagcttttccaggctcagggcacaggctgctggtggatctaccattctgggatctggagggcagtggcccaattcccacagctccactagaaagtgccctattggggactctgtgtggcagctccaaccccacatttcccctccacactgccctagtagaggttctc

SEQ ID NO: 906175 - DNA, 554 bp, Homo sapiens
gtgtctgttcatatccttcacccacttttttgtcttagagatctaaggcaaatagaatacaagtggagacttgggaagtgcatgaatagtttttttttttttttgagatggaatcttgctctgtcrcccaggctggaatgcagtggcacgatctcggctcactgcaagctctgcctcccgggttcacgccattctcctgcctcagcctcccaagtagctgggactataggcgcccgccaccctgcctggctaattttttgtattttttagtagagatggggtttcaccgtgttagccaggaaggtgtcgatctcctgacctcgtgatccacctgccttggcctcccaaagtgctgggattacaggcgtaagccgcagtgcccggccaagtgcatgcattttttttctcagctaggaaccctgcaaatgccctatgataaaagaatctgaggtcaatggatttgccaatatcttttcttcaaaaaatatatgtcagaggcttcagatttccctactgtccttgtcatattctctgccattgtgtttcagttttcc

SEQ ID NO: 906176 - DNA, 638 bp, Homo sapiens
atttagcattaggtagatcagcactttgggaggccgaggcagggggatagcttcagcccaagagtttgagactagcctgggcaacatagtgaggccctgtctatgcaaaatgaatgaatgaatgaggcattatggtcactcttactagatttgattgactgtgcctttacttttcaataaataatacatagactttcctgacctaagctttatgatgatctcaggttgtgatatgggggtaggaggaggttaactctctctatagccactgctttccttaaaatcattgctttttatttaagtgtcttaacatggcattttaaaaagcaaccttggccaagcatggtggctcatgcctgtaatcctgacactttgggtgggtgaggtgggaggattgcttgagcccaggagttggagaccagccaaaaaaaaaaaaaaaaagcaatgctttacactccagtcattgagagaatcaaaaattattttccaaccactgccatgtcaaatgtaatttaagaaagcacccttcttccctgaagaaaatgcartttggtttactttattccatctctgattagtggcattggttttgtttacaattagaaaataaaatgtgtttagagtacaatttaatggca

SEQ ID NO: 906177 - DNA, 624 bp, Homo sapiens; identical to SEQ ID NO: 903572

SEQ ID NO: 906178 - DNA, 622 bp, Homo sapiens
tatattttgttacatgcatggaatgtgtaataatcaaatcagggtatttaggatattcattaattcattacctcaagtatttgtcatttctatgtattggaaacatttcaaatcctctcttcttgccattttgaaataaatagtacattgttgttaactatagtcaccttattcgaagattagaactttttccttctatctaactgtatatctgtacctactaaccaaccaccccctgcctcgttgcccacatccttgccagtctctggtatctatcattttactctctacctccatgagattaactttttaagctcccacatggaagtgaaaacatgtgatatttgtctttctgtacctggtttatttcacttaacataatgacctcctcttccatctatgttgcagcaaagtgacaggatttcattctttattgtggctgaattgtattccattgtgtatatgtagcacattataattttttaattttttattttttaacttttattttgagttcaggaatacatgtgcagtattgtgcaggtttgttacataggtaaatrtgtatcatgggggtttgttgtaccaattatttcatcacccaggtattaagcctactatc

SEQ ID NO: 906179 - DNA, 592 bp, Homo sapiens
ttgttttccttaatgtagtaatttacaaaaaaatacatttgagttacatttttttttaaagtaggaatccaggcatcgcagccacgtacctcgaattgcctgtcacttaactattttcacactccacaggagactgatcttctgcatttttttttcatgtttctcaaacggggtctcaagtctacccctcaacccccattcctccagcctaactctggcttgcagtaaaatactaaatttccagtttcttctgattatcccaaatgccaactttccctctctaattcacattattatctgtttgtcctttagggtacatttttgatactgtattttaattatttttttacaaaccattgggtgggacatttaaaaagatttgttttctgtttgtaaatatcgcccatgaaaataaaccaaaactaattccctgacactgtattgtaaaaaaatctctgggcctctttttcttttgtctcccctaggcacagagatcttgtgaamgtgttttggggtcaagtttgttttttgttttttttttttttgtttttttaatttttatgggatgatgtattctcagccaccctttagt

SEQ ID NO: 906180 - DNA, 562 bp, Homo sapiens
ttactgaatttatgtatcagattgaaaagcmtttttttcttttttctttttgagacaaggtcttactctgttgcccaggctggagtgcagtagcatgatctctcggctcactgcaacctctgcctcctgggttcaagtgattctcctgtctcagcttccctagtagctggaattacagcctcttgccactgcgcctggctaatttttgtattcttagtagagacagggttttaccatgttggctaggctggtcttgaactcctgacctcagatgatccacctgcctccacctccccaagtgctgggattacaggcttgagccactgcacctggccctaaaagctttttagatgagtatttagggtttcccagctatacaattatatcattggtaaaaagtgacaatttgacttcctctttaccaatgttgtttattttttgctttactctgattgctctggccaagacttccattactatgttgaatagaagcggtgagagtgggcattattgtcttgttccagttctcagaaaaaatcctttcaactttttcccgttcagt

SEQ ID NO: 906181 - DNA, 469 bp, Homo sapiens
  misc_feature 186: n = A,T,C or G
atgatacctcctgtgggcagagcctaagatagagggtcacatcacctgcaawctgggctcagtacaatgtttcaatctcccctgaggccagagcccaggcagaagaggagagttatatcacctaagtgcttgggcctgtggtatgtcacagttcatttttggggggtggcagaatgcaggcaaagnaggagtgttacatcacctaggtaagggttcagaagtatttcacaatacctactgtgggcagggcccaggcagtacagtcacatcatggagatgctgggctcagtgatatctcacaaagactttgtggacagggcccaggctgaaaataagagtcacatgacctaagtgctgggcccagtgaaatttcacaataccctctgtaggtagggcttaagcaagagagtcacatcacaatcttttctgagagctgggcccaggcagggaagtaaaatcactcaggtgc

SEQ ID NO: 906182 - DNA, 623 bp, Homo sapiens
gctgcatctgttgacataatcatgtggtttttgtcattgtttctgtttatgtgatggattacatttattgatttgtgtatattgaaccagccttgcatcccagggatgaagctgacttgattatggtgrataagcttttcaatgtgctgctggattgggtttgccagtattttattgaggattttcacatcaatgtttatcacagatattgttctaaaattctctttttttgttgtgtctctgccaagctttggtatcaggatgatgctggcctcatacaatgagttagggaggcttccctctttttctattgattggaatagtttcagaaggaatggtatcatctcctctttgtacctctggtagaattctgctgtgaatccatctggtcctggactttttttggttgataggctgttaattattgcctcaatttcagatcctgttattggtctattcagagattcaacttcttcctggtttagtcttgggagggtgtatgtgtccaggaattcatccatttcttctatatttctagtttatttgcttagaggcatttataatattctctgatggtagtttatatttctgtgggataggtggtgatatccccttaatcattt

SEQ ID NO: 906183 - DNA, 619 bp, Homo sapiens
gatatttctcagatttctgaacagaccttttcagtgtcaaggacgtttgttgcttcctgaccttggtaaattttggcctagttaatamcccagaagaagccctcttactaccctgaacagagaaggcatcattttaaatgacctcctaaattggcagcctcctaaaccataccgcttttcaaaaatacaattccaaattaaaattctgtgtcaggaagaaaacattaaccgaattgcaagcgttcttatgagcctcatttaactcaggtgcatgaagttgagaaggcaaatttacataaagcttgttttgagtttctggcgggggcggggggagtgggatctatatatttataactgtgaaaaggctgtagctaaaatttagatataaaattacaaaattaaaattcagcatttgctctagggcagtggggaggaagaacgagaaagctagctaaaattgagacagcataacagtatgtggattgcgtgccatgcaaacttattaggtttccttgattcaaagagggaaacctaagtggcaacttcactgaaagattcaaaatactcatgaatcaaaccaatgtttttagtattcttaatttctcatttattttatgta

SEQ ID NO: 906184 - DNA, 636 bp, Homo sapiens
ctgcatgaactcagtgcctactaggtctgttaggcactatattcacatcttcaggtgaaagagagtgtagcttctctgaggaagatgactgaragtgcgcgaggctgtggacagggagtaaacttcaccccttgtgagaaaaaatgaagtgagtgaattgcagggttcatgggctatatttggtgtagacttcataacagtaaacagctccatccctgtctggtacgcagggctttgtgggtttctctgaataggcaaatgcttaaatacattcaagtatacttaagagagtatccttggtagtggcacttctcgcacactagaatttgggaattaggagtcataagtggaagttgtgattattacagcagtgaaaaatgactggttcaattcagagcagaaaagaaaatcattttcccagcatgggtattatcttcagccaatgttatcagtagaagtcaggtaggtcagctacctcttatgaacttcattaattattatcaacgtcatttattaatgttgatttcaatgtgctgacaaagggcaaacacacggctcagatcatttcattgaattctcacagcaaccctgtgaagtacttagtattgcatttatataaattaaaagctgaggttt

SEQ ID NO: 906185 - DNA, 695 bp, Homo sapiens
tcctaaatttaacctaatagctctagtggcttacttgttcatagctgtatcttccacagactacgagtttcaggataytgttttcttcatcattgtatccccagtatttgcacagggcttagcacttagcagaaattcaataaatattggttggctgtctaaagggatggatattaaaactactttaatatattagatacattggctgacaccagtaattccagcactttgggaggctgtgttgggtggattactttagctcaggagtttgtgaccagcctgggcaacatggggaaaccccatctctaccaaaaatacaaaagattagctgggcatagtggcatgtgcctgtgatcctagctattgaggaagctgaggtgggaggatcacctgagcctgggaggtggaggttccagtgagccgagattgtgccactgcactccagcctgggtgacagagggggcaccatatcaaaaaaaaatgtattttaattaaaagtatacaaactgagccaggtgtggtaatcccagctacttgggaggctgaggcaggaggatcacttgaacctaggagtttgaggccgcaatgtgctatgatcacacctgtgaatagccacggctctacagcctgggtaacagagacccagtctctacaaaattaaaaataattttaaaaaccatggaaaatgcaactga

SEQ ID NO: 906186 - DNA, 599 bp, Homo sapiens
gttttctaatgtaagtcaataattgcaatgctatttcatgatgaagggctttcaatcttccttctatctcaattctgaactggtttggtacaattctttgatacgtgtcactcatctaaataagaggagaaaaatatcttacattagtagtttaattgtaaatcactagtttcacaaaagcctggccttgtggctataccagctctgaatctaatataggctttctttccaaactttaattgttcctttccaatccactatgaaattttaaaatacccacttggcccacattttgaataactctccagattgtgctgcatagcttcataaatacttctgatagcctcacataaaagcaaaatttaaaaactggcatactacttgatattcaaatggtgtctattataaaaggaattttcccagcaaaatagtaacttgctagtagcttgttccctgttcttccaatgcttcaattttgttgctttaaaaaaattatattctttttctttgagattatactaatatttcctaacatttataagctacattgtggtttaccaaatggcttcacrtgaattatcttagttaatctcgaaaat

SEQ ID NO: 906187 - DNA, 423 bp, Homo sapiens
aaagagcttccagtcatctatgggaaggacaattcaataggcaataacccccagggtaagggatcagggctcagggcttaacacctcactgcaagaggctgaataattggctcctgaaaatgaccgtgtcctaatccttggaacctgtgaatatgttatattacatggcaaaagggactttacagatgtgattacataaagaatcttgaaatgaggagggtagcctggattactcagttttatcatgaaggcccccataaagagggcagcaacggggctaaacagagaaagaagatgtgtgaaagaagcagtcgtcagagaagagagaggtgctaggaaggggccatgaaccaagcaatgcaaacggcccctagctgctggagaaggcraggaaatgactgtccccaggacctctagaaggaa

SEQ ID NO: 906188 - DNA, 680 bp, Homo sapiens
accggattaagaacttgtcttccygcttggcatgctttcctctgactgatcaccacccttagcctattttacatatacctaccctttcctaattgtttttctacactgtcgtgcccacctttgagtggtgtttttgcttcaaacttttttgcatactcacaaaccaatcagcatgcactccccattttgagtccataaaagctccaggctcactcatattgggggactttcctgcttttaggtaggggaagcaccccccgcccttctttctctttgctgagagctttcctttcatttaatacattctactccactcactctctggtgtctgtgtgcctaattcttcctggtcatgagacaagaacccgtacctagctgagctaaggagcagaaaaaaatcctgcatcaaccccaataactggattgtaatcttgttcattctgcttataggcctaacatggtagcctttctaataatccactctagattgagattattccttgttttcgtgtgtacattcattttctattactaccataacaaatgccaatcattcagcatctttaccaaacctatttataatatcacagttcatagatatctaagctcagcagagctcagctgggcctctgctctgggtttacaaggctggaaccaaggtatcagcagtgctgcattcc

SEQ ID NO: 906189 - DNA, 529 bp, Homo sapiens
tgcacatattgacccatcttytaagtttcctcgcctcaacccccacccctcgacaggccctggtgtgtgttgttccctctcagtgtccatgtgatctcaacattcaactcccaattatgagtgagaacacgcggggtttggttttctgttcctgtgttagtttgctggggatgatggcttccagcttcatccatgtccctgcaaaggacatggtctcattcctttttatggctgcatagtattccatgtgtatatgtaccacattttctttatccagtctatcattgatgggcatttgggttggttccatgtctttgctattgtaaatagtgctgcaataaacatatgtgtgcatgactctttctagttaaatgatttatatgcctttggatatacacccagtaatggggtttctgggtcaaatagtatttctgattctagatccttgaggaatcgtcatgctgtctttcacaatggttgaattaatttacattcctaccaacagtgtaaaagcattcctatttatcca

SEQ ID NO: 906190 - DNA, 529 bp, Homo sapiens
tgcacatattgacccatcttttaagtttcctygcctcaacccccacccctcgacaggccctggtgtgtgttgttccctctcagtgtccatgtgatctcaacattcaactcccaattatgagtgagaacacgcggggtttggttttctgttcctgtgttagtttgctggggatgatggcttccagcttcatccatgtccctgcaaaggacatggtctcattcctttttatggctgcatagtattccatgtgtatatgtaccacattttctttatccagtctatcattgatgggcatttgggttggttccatgtctttgctattgtaaatagtgctgcaataaacatatgtgtgcatgactctttctagttaaatgatttatatgcctttggatatacacccagtaatggggtttctgggtcaaatagtatttctgattctagatccttgaggaatcgtcatgctgtctttcacaatggttgaattaatttacattcctaccaacagtgtaaaagcattcctatttatcca

SEQ ID NO: 906191 - DNA, 529 bp, Homo sapiens
tgcacatattgacccatcttttaagtttcctcgcctcaacccccacccctcgacaggccctggtgtgtgttgttccctctcagtgtccatgtgatctcaacattcaactcccaattatgagtgagaacacgyggggtttggttttctgttcctgtgttagtttgctggggatgatggcttccagcttcatccatgtccctgcaaaggacatggtctcattcctttttatggctgcatagtattccatgtgtatatgtaccacattttctttatccagtctatcattgatgggcatttgggttggttccatgtctttgctattgtaaatagtgctgcaataaacatatgtgtgcatgactctttctagttaaatgatttatatgcctttggatatacacccagtaatggggtttctgggtcaaatagtatttctgattctagatccttgaggaatcgtcatgctgtctttcacaatggttgaattaatttacattcctaccaacagtgtaaaagcattcctatttatcca

SEQ ID NO: 906192 - DNA, 529 bp, Homo sapiens
tgcacatattgacccatcttttaagtttcctcgcctcaacccccacccctcgacaggccctggtgtgtgttgttccctctcagtgtccatgtgatctcaacattcaactcccaattatgagtgagaacacgcggkgtttggttttctgttcctgtgttagtttgctggggatgatggcttccagcttcatccatgtccctgcaaaggacatggtctcattcctttttatggctgcatagtattccatgtgtatatgtaccacattttctttatccagtctatcattgatgggcatttgggttggttccatgtctttgctattgtaaatagtgctgcaataaacatatgtgtgcatgactctttctagttaaatgatttatatgcctttggatatacacccagtaatggggtttctgggtcaaatagtatttctgattctagatccttgaggaatcgtcatgctgtctttcacaatggttgaattaatttacattcctaccaacagtgtaaaagcattcctatttatcca

SEQ ID NO: 906193 - DNA, 199 bp, Homo sapiens
agtcaaatgcacaatatttggaattgcacaggttctgcctgtctgccaggtatctatcagggaggcttttccttaggtctgttctgttcccgggagctgcagtgattattgggtcagtggggatcacgtccagtactgggcacttcctatacccttgtaaaatgctcaytgatatgattcccagcaccacctacatggg

SEQ ID NO: 906194 - DNA, 628 bp, Homo sapiens
aaagcaaacaagattcttgytcttgtggtgcttgtgggagaagggttgggatcaccttattagatggcaggggaaggttacaattttcatgcagtgtgaaggtgacattgggcaaagtctcaaatggaggtgagaagtaagtcctgagagatatctgaagaaagagtgttccaggaagtaggaacagtcaatgcaaaggccccgaggcaggagcacagttgtgcatttgaacaaaaaaaagaccagcgtgactgaaactgagtgagtgaagggagaggtaggagggggacatgaactcagagacataatggaaggggcacaggttgtagggacaagtgcagtgtttcaagcagagactgacatgttatgactcctgtttgtaaagtattactgtttataaaagataatagactgtagtaggacagggtttgacagcagagtcctgggacatagctaacatttaagagatgggaagaacaaaagggtgtttagggaagtgggaaggtggacagtcaaatccaggtggtcttaagaatgttaggatcttaagattctccaggacttggtgactaattagacatggtgactatttatgacagaaaggccggcaaggcaggagaagaccaag

SEQ ID NO: 906195 - DNA, 481 bp, Homo sapiens
tgtacacaataggcttccaaaatatttagcttctcattygcacatatgcccaagaaaggctgtaaaacccagtacaatggcttttctatttgaacatgatccagaaggataaatgttccttctgtgtacccaggttataggaaacatttgaggaccttttccaattaagttatccattgatttgttgtgtaacatatattcctaataatagctttcataatatttgtaatttaacaatctgggagaggagatacaatgtagtaaacaatttcagtaaatggtggggcaaagccttgagataactagagatgtatatatattttttaaagacaaagattggaagaaatcaccaaagatgccatgttctgccacattgctgtgagcaatgattcaaataattatgtatgtgaaaaacataccagccttgatttttcaaaatgcacatttttcatattgtttgaatttacaggaactggcacca

SEQ ID NO: 906196 - DNA, 612 bp, Homo sapiens
actctccacagcagagagctttcttcttttgcttattaaactttcaccctttcaccttctaacctcaccctttttgtctatgctccttaattctcttggtcatgagacaaaaactccaggtgataccttacaagtagagactgctacattgtggtgcactggtgagactgtaacacttagagtgttaactgcttcaaaaatggaaagtccttagaaataagccatccaaccaagttttctctgtgactttccccacaatctctgtctttcaattctctctctctcccaaagcacaggaggagcctgttctctgaagtttcttcatttacctagatcctcaaaagatctccaaagagaaacacaattgtcttctattcctttgctgaaaggtgcagtgaagggggaagatttcttcactcctacaccaccttttggtgtgacaggatgaccagagctggctggaattgggtatttctcyttttccaaatcaattaggctctgataaaaccccagcaggttaggctctggttaagtagttttacctgagggcagatcttcttaagaagaacagaatgttttagtgtatagtaagtgttcacttaactttgtcaa

SEQ ID NO: 906197 - DNA, 635 bp, Homo sapiens
cctacaataatttattcccccatctttatttgaaaaattatattctactaatttccctattcaatttcatctgctaccttctccaagagggtttccgattaaccagaagaaatttctgccacctgaacatttttgattacaacacttgtaacattctatactatcgtcttctctcctaatacactatgaagcccctaagagcagaaaccatgtctcaattacagattgagattctttctcacaaatgaggacagtgaaacagagaaaaatagttgattaattagaaggcagcacaataacttagtaacagaattgaaaccaaatcttatatctcctgactcttggtagcatatagttctgcagagaatttaaaataatagatgcctaaaaatatttgatgaatatattatcaaacaaataatagaattaaactgatttttaaataataaagataatataaattttcaagatataatcttttaagaaaaaattagatctaatgtaccatttatattactttgagattaacattaagataaataatttttattcacatttattgctgagtgaaaaacctgggttttaagaatttcccatacatttctaacttmatagggtcagatgcgcaactataa

SEQ ID NO: 906198 - DNA, 675 bp, Homo sapiens
ctgccaaaagcaatctacagattcaatgcaattcccttaaaacgccatcatcattcttcacagagttagaacaaaaaattctaaaattcatatggaaccaaaaaggagcctgcatagccaaagcaagactaagcaaaaagaacaaacaaatctggaggcatcgcactatctcatttcaaactatactataaggccacagttatcaaaacagcatggtattggtataaaattaggcaaataaaccaatggaacagaatagagaacccagaagtaaattcaaatagttactgccaactgatcttcaacaaagcaaccaaaaacataaagttggggaaaggacacgtttttcaacaaatagtgctgggataattggctagccacatgaaggagaattaaatgatcttcatcccttaccttatacaaaaatcaacttaagatagattaaggacttaaacctaagagatgaaactataaaaagtctagaagataacattggaaaacccttctagacattggcttaggcaaggatttcatgaccaagaacccaaaagcaaatgcmataaaaacaaagataaatagctgaaacctaattaaactaaagagcttttgcacggcaaaaggaacagtcagcagagttgacaacccaccacacggaatgggacaaaaatctgcaca

SEQ ID NO: 906199 - DNA, 576 bp, Homo sapiens
gtgcacacacacttataaatgttaaatgtgttcatgacatctgaaaaaaaagattgaagcatatggggagatgaactggaaaaatactaaaatgttctctacctcatcatatattttaagtgatttgagggtttctaatgcattaaaaaagtcccaggcccaaatatcttcccccaaaattaatatttctacctgtggtgatatctgcatattttattaaaatacatcgatttgtattaaataaaatacctaacctgttattcagtaatgtattcacaaatattttctgttacattccattttaaaggttcagaaaaacaaaaatgaaaatgacatataatggactttaaaggtttataaactaaaagtttagatgaaaaatgaacatctatgactaaaaatgaatctgcatatggcaagcgtaatgattctgtgtcatgacagtggtattcaraagcactgttcaagaccaagcactaaacatggctgattttctcaatacagagattcagtaaatcattatttgagctcaaattccagacagtttatattgaaatagtcaatatactaggataa

SEQ ID NO: 906200 - DNA, 526 bp, Homo sapiens
cttactccctgcccacattccctgcacaacaacccccacaaaataagcaaagtgccctggaaagaaccttaaccaccattgatggaaacagaaataggtgaagtgtaaggaggactgagaaggkatgggcctcagcaagaaaaataggtgttttatggaggcgattatacactaaagtggaatttgtaaattgaaaactcccggacgtctcaggattactctcatgaatgtcaagggcataaagctcttatgtttatcgagaggcagcgaggagtgctaggatgtacttggctgtggaaccacacagactgggtttaaatcctatttaagtcatcctgagaagttgtttaagtccttggagcctcattttctttatctgtgaaatggggataataatatcctctatccagggttgcattgaagattaactaggaaagaactggtcatagtgctgggctataaaacacaggcagttgtgattttcctaaatttctgaaagatcatggaagactttctgattcattga

SEQ ID NO: 906201 - DNA, 587 bp, Homo sapiens
cactgcaacctctacctcccggattcaagcgattcttgtgcctcagcctcccgagtatctgggattacagatgtgcaccaccatgcctgagtaatttttgtatttttttttttttagtagagacagggtttcaccatgttggctaagctggtctggaactcctggcctcatgtgatccacctgcctcagcatcccaaagtgctgggattacgggtgtgagcccactgtgcccggccccgtctccccattttcatgagtggtcatggtggtggttttccgcctgccatatcacaggaacccctgagtgggagcagagggggaaaaccaagcctcctaccctgccaatcaggaaatcctgaaaccctagcataattcattaccttatatagctggggggaatggggaagccctttctctagcaagtcacctcacctggatctataatctgggcacgaagtgtaattttattgckgtgcccccagcactgtcttgctacattgctagcaggttatgcataaagacaaggcctcctgcatacactctctcactacctctgtgtagtgaggacttgtctgcaggcctgggtt

SEQ ID NO: 906202 - DNA, 621 bp, Homo sapiens
tgggcagcaggtgatcccactagtggcaacttggtgttctgcgatgtggcacatccacttcttaaatgcagattattgcactgtamtaaaaatcctccatattcagtgctttcattgtgtataattatgtaaactgtagacaaaaaatattcctgaatttgtgtgtgtgtgtgtgtgtgtgtgtgtgtgtgtgcggatgcgcaatccgagatggttgttaaagctcgaaagcgagtttagcttctagagtcgcccctcctccgaggcccagccgaggtggactcgcaccgtcgcaagaccggccaggcggtggcaatgaataaaaagccagtcttggtgctagggacccaggtgttctccgtcccgcccctgcctggcagccccgcccctcccccgccccgggccacgccccaccctggcccagcccccaaaagtaccgtttgcatctcccgtgagcctcttcgactgtcactctttggaaaaaaaagtgacgtctgcactgaggtggccgctaaagtgcgaatcacgacgggcggtggccgttgggtcccggcgggaggcggggtttccgctccctggggcgcacgtcagtcaggaggcggaagcgcagcgggggcggga

SEQ ID NO: 906203 - DNA, 621 bp, Homo sapiens
tgggcagcaggtgatcccactagtggcaacttggtgttctgcgatgtggcacatccacttcttaaatgcagattattgcactgtaataaaamtcctccatattcagtgctttcattgtgtataattatgtaaactgtagacaaaaaatattcctgaatttgtgtgtgtgtgtgtgtgtgtgtgtgtgtgtgtgcggatgcgcaatccgagatggttgttaaagctcgaaagcgagtttagcttctagagtcgcccctcctccgaggcccagccgaggtggactcgcaccgtcgcaagaccggccaggcggtggcaatgaataaaaagccagtcttggtgctagggacccaggtgttctccgtcccgcccctgcctggcagccccgcccctcccccgccccgggccacgccccaccctggcccagcccccaaaagtaccgtttgcatctcccgtgagcctcttcgactgtcactctttggaaaaaaaagtgacgtctgcactgaggtggccgctaaagtgcgaatcacgacgggcggtggccgttgggtcccggcgggaggcggggtttccgctccctggggcgcacgtcagtcaggaggcggaagcgcagcgggggcggga

SEQ ID NO: 906204 - DNA, 670 bp, Homo sapiens
atgtttttctatttgtttgtgtattctcctatttccttgagcagtgatttgtagttctccttgaagaggttcttcacatcccctttaagttgtattcataggtattttattctgtttgtagcaattgtgaatgggagttcacccatgatttggctctttgtttgtctgatattgatgtataggaatgcttgtgatttttgcacaatgattttgtatccagaaactttgctgaagttgcttatcagcttaaggaggttttgggctgagatgatggggctttctaaatatacaatcatgtcatctgcaaacagagacaatttgacttcctttcttcctatttgaatacattttatttctttctcttgcctgattgccctggccagaacttccaatactatgttaaataggagtggtgagagagggcatccttgtcctatgctgaatttcaaagggaatgcttccagcttttgcccattcagtatgatattggctgtgggtttgtcataaatatctcctattttttgagatatattgtgttaatatctasttttttgagtgtttttagcatgaagcggtgttgaattttatcgaaagtcttttctgcatctattgagataatcatgtggtttttgtcattggttctgtttatgtgatggattacgtttgttga

SEQ ID NO: 906205 - DNA, 633 bp, Homo sapiens
cagctacaagctctgcttttgagctgaagtagagggcgtctggaaaattttaccttttgagccagaataagaagctttaccattactagacccaccagtaaaaacattctcagcaccttcaattggtttgaatttagttattttagggagaatccaattagttaatttcaaaaattgaaacagtttcattttaggaaaatgattattgagaatacccacaaagtcagctaaatgggtttgccaagtaagactatttataaaggcttgctgtatttgtgccttcatgagagggacaatattttttccaggatcatatccatgtaatttaacaatctgagttcacccatttcctatcatagtagcaatttgatccaaataaggagtcaaagtccctgaattagtatgtggaagagaaagacactgtacaagatcttgctcttgaacaataacatcagtaggtgaatgctgagttgaaaaaatttgcaaatctagagtcttctctggatctattctattgatttgagctttatggacttgctttttgatkacttgcagctctgcctcagcttcttttgttaactgctgagggctagtgagactaggatctcctctaaggatagaaaatagattact

SEQ ID NO: 906206 - DNA, 682 bp, Homo sapiens
gaaacccatggcatgagaactacatgaygcatgcacaagcttcagtagccaatttgatcaactggaagaaagggtatcagtgatggaagatcaaatgaatgaaatgaagtgagaagacaagtttaatgaaaaaagagtaaaaagaaatgaacaaagcctccaagaaatatgggactatgtgaaaagaccaaatctacatctgattggtgtacctgaaagtgacagggagaatggaaccaagttggaaaacacgctgcaggatattatccaggagaacttccccaacctagcaagacaggccaacattcaaatgcaggaaatacagagaatgctacaaagatactcctcgagaagagcaactccaagacacataattgtcagattcaccaaagttgaaatgaaggaaaaaatgttaagtgcagccagagagaacggtcaggttacccacaaagggaagcccatcagactaacagctgatctcttggcagaaactctacaagccagaagagagtgggggccaatattcaacgttcttaaagaaaagaattttcaacccagaatttcatatccagccaaactaagcttcataagtgaaggagaaataaaatactttacagaaaagccaacgctgagagattttgtcaccaccaggcctgccctaaaagagctactgatggaaaga

SEQ ID NO: 906207 - DNA, 556 bp, Homo sapiens
tcgtggaaaacttaatcatgtaattacataattgtgtgcttctacttaaatactccaaaagagagaaaataacccatttccttttcctgctgtgctcctgtgtttctattggaaacacttgtcatatttcttccttagtgggggtcacctttgtccctggtctctgcagtgtcttttacaaagcactggtcacatgactctgacactttatttctaaatgtgattctccctcctacctgtagattgctctctgcaaatcatgggggacaacttttataatgttaatgtgtcttttgttgtcaaataatgtcctggtcagatgaaatgttggaaaggaattagaaggaaggactcattcgggagaaggatgtcccatctataatgaagatgactctgattccgtgtatgcttcttgaatagtttgggagatggtcagatctyaaggaagttataaactctgtgtcagatctcattccaccactccaagtgaaagtacttagccatgactcattgcctttaatgagtaaaaacacatttttctgtatgtcttacagta

SEQ ID NO: 906208 - DNA, 649 bp, Homo sapiens
gtgttctgagtctgcactggctctgatgcacccagacacagcatcgtattgaggtcctgagcctttgtcctcagtcagagtgaacagaagcaggttccaagctgttacggggttaaaaccctggtgagcccctttatggtgtatgagaacaactctaagatttcatcgagaacttgaattatgggaaaagaatcacatccttgaagaaccctgatgactggtacctaccgatgacccggtggagatcacttttattcacatgaattgactattttttttctttgtaaggtgagcgtgtgtgttttgcttaatgtaaatttgccttatgtttagaaatctctcaagatttcttctagagctccagcactttcatttttccccagctttattgaggcagagttggcaaataaaattttaagtataccaagggtccaacatgatgccttgatatgtatatattgtgagatgattatcccaaccaagttagttaatacctatcccctcacgtagttattgtttccctgtgtgtgtaatgagaacaattaagatctactttttcagaaaatttcaagtactctatacagtattattaactataatcaccatgctagttactagatccctagaayttagtaccaatgtcagattt

SEQ ID NO: 906209 - DNA, 547 bp, Homo sapiens
acggtgaaggtatgaaaaaagatattccaagaaaatagaagccaaaagagcatgggcatctatactaacataataaaaaataaaccttagggccaaaaacattaaaaaaaagacataggagggcattatataatgataaaggatctattcatcaaacagatacaaccattgtaaatatatatgcactcaatatcagaatacttaaatatataaaacaaatattagaagatttgaagagagagatagattgcaattaaatactagtaagatatttcaatatcccactttcagtagggaaacattaataaggagatactgaacttaaacaacattttagaccaagtagatcaaacggacatgcatacattttacccaacaacaacagaatacacattcttctcaagcacacatggaacattctccaggacagattacatgatagggcacaaaacaagcctcagccaatttaagaayagcaaaatgatatcaaatattatttttaagtacaatgataaaaattagaaacagtaataaaaggaattttctg

SEQ ID NO: 906210 - DNA, 652 bp, Homo sapiens
ctttgacaaacctgagaaaaacaagcaatggggaaaggattccctatttaataaatggtgctgggaaaactggctagtcatatgtagaaagctgaaactggatcccttccttacaccttatagaaaatgagtgaactcccgttcacgattgctacaaagagaacaaaatacctaggaatacagcttacgagggatgtgaaggaactcttcaagtagaactagaaatctctgctcaaagaaataagagaggacacaaacaaatggaaaaacattctatgctcatggacaggaagaatgaatatcatgaaaatggccatactgcccaaagtaatttatagattcaatgctagccccatcaagctaccaatgactttcttcacagaactggaaaaaactactttaaatttcatatggaaccaaaaggagcccacatagccaagacaatagtaagcaaaaagaacaaagctggaggcatcacactacctgacttcaaactatactacaaggctacagtaacaaaaacagcatgatacttgtacyaaaacagatatatagaccaatggaacagaacagagacctcagaaataatgccacacatctacaaccatccgatctttgacaaacctgatagaaacaagcaatggtgaaagga

SEQ ID NO: 906211 - DNA, 627 bp, Homo sapiens
gttatggacacccaagatacattgacttgatgattacaaagtctaggcaggtaacaaaatattacatgtaccccatgcgcatgtaaaaatatattaatgaaaaaaagttcctcttctataataaaattttattattgttaatctgactaattgagaattcatgatgacttagagattatttggcaaaatgttacctgtgcaaagcaagcttttcttcctatattgtgcaaattattaaagtaatataaatatgtgtataacttcaaaaaatgatttttaaaatcttgttctacagtactcaagcttttaatgtcactgctattatgttttctattaacaggtaataatttagcactccctgtaaatcaagttctctattagcctatttatttttttcaacaaacttacagataagaaatttaaatagcttgtctcacattacttagcaaatatattgtatttttgagatctgactccaaactctatctattgttttaaactagtactccaatgctaatctcattttaatccaacagaggagaactatttattctctytctctggaaacttttagcaaagctttttatatgtttatctgaaatataacaataatatttctatcaacat

SEQ ID NO: 906212 - DNA, 600 bp, Homo sapiens
ctccaatcccatccaggttgctgcaaatgccatcaattcattcctttttatgtctgagtagtattccatcatatctatatatgtacactacagtttctttatccactcgttgactgatgggcatttargctggttcaatgtttttgcaattgtgaattgtgctgctataaacatgcatgtgcaagcatcttttgattttgttgggttaaactgagtgctggttctcttctagagccctatttctagaaatcaccccaaatttcctctcttctggcacacacccctgctcagctcccctgaattctattctcttcctattttgaattttggttttaaaccttttctaattgccagtcccttgtaggtgttcatgcagcttatctagaaagtcttatctgccatccccagaacagcttcatttatactctgttgaatcatccattttctgaaaaaagcctttatttctttcatgtcactgtcacttctcacaccacacccccagtcacacatccagtatgctgttggcagccttctcttgtctcgtctgtcatgtaatctgattgtcaaacaagttgtcactcactacaaatgttagcatat

SEQ ID NO: 906213 - DNA, 561 bp, Homo sapiens
gaattacagaaaagagtcaaaagwttttttaatcaactagtgctatgattggtagctccacttcagctccttcttctacctcccgtggtatgcctgttaatcacctgctgcaaagctcccctcgcctctaaggccactctctttgcaggattcagtcaagttcctcaaacctggctaccttttgcagtgtctactccacccatgagtaacacacatatgtctgggctttggggaaaaggatacctctctcaaaactctctataacttccaataactccttttagaaattactatctgtcacatgggcttgaatccaggtgattacagtagggatgattctgctactggtaaatcctatgggctgtctttgaagaatgtgggtatgcttggtgcctattattttcagcagtggagctttagttacaaataccagaaataggaaaaatcccctttaataacctgttactactacaattgcaatacatactatgaaagaaagtatcagatgtcatgagagcttaggatgttgttataacaagatgatttcatccagattggagt

SEQ ID NO: 906214 - DNA, 628 bp, Homo sapiens
ggaggacaaaggcacagaaagctgctgacctatctggtcacatcctgggcagtgccaagaagaggytgcttctatcttcctccgactttttgaggttctagtcacaaaattgtttttcttgctcacaaatggctctgtcctatgcaaagtgctgaacaaataaaatggaagttttaaagttcacactgaccttttttggtgcttgggacaatgcaatcttttcagttcgtaatggaaaatagattaagctacctgcctggtttgctttttaggaagttgcagccttcccatttttaatgccctgagatctttgctcaaactgtcttttttggtacaacccatgggcattgtgcatagtcaaggagggcttatttgtaacctggtttgggttttacttctctcccaaagcaagtcaccagctttttgttttaacgtaatctcccattttctccagttccttaattcacatcataaaagttcactttctttagctactgacaattgaaatcagaacaaagggcccagagaagtatatatattataaacgtttttaaaaggtattttctgggcctggagtctttcaatgccaatttatccagagttttattttgttttgtgtgtgtgtgtt

SEQ ID NO: 906215 - DNA, 590 bp, Homo sapiens
ttgataggtgtacctgaaagtgatggggagaatggaaccaagttrgaaaacactcttcagaatattaaccaggagaacttccccaacctagcaaggcaggccaacattcaaattcaggaaatacagagaacatcacaaagatactcctcaaaaagagcaatcccaagacacataattgtgagattcaccaaggttgaaatgaaggaaaaaatgttaagggcagccagagagaaaggtcaggttacccacaaagggaagcccatcagactaacagcagacctcttggcagaaaccctacaagccagaagagagtggaggccaatactcaacattcttaaagaaaagaattttcaacccagaatttcatatccagccaaactaagcttcataagtgaaggagaaataaaatcctttataggcaagcaaatgctgagagagtttgtcaccaccaggcctgccttacaagagctcctgaaggaagcactaaacatggaaagaatcaaccggtaccagtcactgcaagaacatgccaaattgtaaagaccatcaatgctgtgaagaaactgcataaattaacaggcaaaataccc

SEQ ID NO: 906216 - DNA, 640 bp, Homo sapiens
ggggagggcaagaagcccctaaatgactgagaaacaaacagaagtgattgagtttgtagaaattcattagattactattttagccaagagatagaatatagaattgaagtagaattacagacaattaaaataaaaaaatgaagtttttctagaactaataaattggtacatcaagttgcaggatacaggttaacatgcaaaaattgttttcctgtatacagcaatgaacaattgcaatttgaaatttaaaacacaatccctcaatggatatagtttcagttatccaagatggataagtttttaaataaaaatacatataccatttacatgaggacaactcccaaaaaacagagaaagaaaggtagatttaggtatgaatctagcaaaatatatgcaagatctatatgaggaacactacagaaccctggtaaaagaaatcaaagaatatctaggtagagagatattacatattcatggatagaaacttcaatattgttaagatttcagttatttccaattcaatctagagatttaccacaatcctgatcaaaatcacrgatgttattttgtggatagcaacaaactgattctaaagtttacatgaaaaggcaaaagacccagaataaccaacgtaatacag

SEQ ID NO: 906217 - DNA, 684 bp, Homo sapiens
agaatcataaactcaaggagtcgcacactatatgacaaaaaaagcactgtgatctcaatctctgacccagtgtttttgtccatctayagagataataccgtgtactaaaaatgtgctaagtgctaggaatacaaagacaaatgaaattataatcttgatctagatggtctcattttctaataaaggagaaaacattttcaatccaatgacacagaaaagcatcagacattaagatgcttatcacggtattacctatgattatataacttttttaacaataagagtatgtttaaataatgatttattaacaaaaagtacacatctattgcttgttaagagtctgtaaaaacatcaaattattttcataatttaatattacatgaaaaataacagaaaacagtttgctttaattgtcatctatgtataaagtagcttaaaagacttgatggaaaaacagaataatgtatacactcaacattctatactagtgagacaatagaaaatttatttttgcatgttaatagtatcctgaaatcttcatgtacacattgtataatgtaaataaatgaaaaggagtgaattcgatgtgaatgcctacctaagaatgaacttcttcttatataccagataacgctctgaaataaatttctaattataaaatgaataactaaatagagtatttta

SEQ ID NO: 906218 - DNA, 577 bp, Homo sapiens
acctcctttgtgaaatctcattgtttcatctattttgattttatctattttcaactagatttaagctcctcaagagcaagaacttattttccattcttctaatgtatttaccaatagcttatgtaccaagctagatgtcatacaaaaattgtattaatcaagaagtaggcttttctccaccctgcctcatccctaatctttgaaattggccacttgccaagacagtccattgcaaaatgaaaatgtagggccctagctggggcaagaaactcaatctcctccttcccataggcccactctcccaacccagggtcaataggtgattccttaagagactacagcttccatgccaggatgcagcaggtacttgaataagggatgggtgagagggctccatcaagtcaccagccaaatgcactgtggcagtgccagcccaggacagggatcgctgctaccttgctctrccctgacgtgccagggggcgcatacccaaccttccccatgcctgtgcccaggcccctgccaggaatagagggcaacagtggaacacaggcaccccccactaatgcaacctggc

SEQ ID NO: 906219 - DNA, 585 bp, Homo sapiens
ccaatggaggagggagtgaatgacaaggagaggaaaggagaaggaatgaggacagtcatggggccatggcaccatatggcctgaaacagcccaggactcagtaaygtttgctgaactgaaagcctctattcttctatcatcccccccgactttccagtccctggaaatcagatagtgttataaacctggagggccaaggcagatgatagacagtgactcattgcgtgtagggaggatggcctgggtgaaacagcagtcctagtttttacttaggaattcagacccatgttgagatgaagctcacacaatcccttagggcagggggtggctcaaaaggcccaaaggaatgtgtgcttgggtttgaatctgccctagctcctgactgaagccaatgtggggtcaaccacagccatccatggatcgctaagagggtttgcttatattaccacatcaacagcagatttcctctggcccccagtcagccaggaatggataaacaacagaagtgcagaatggctttaccaagtctagctccaaattatgagatgtctcagtctaaggtgtagcccaagcaatccttgggac

SEQ ID NO: 906220 - DNA, 645 bp, Homo sapiens
aaactgtgagtccactaaacctcttcttctttatgaattacccaggctccggtatgtctttatcagcagtgtgaaaatggactaatacagtaaattrgcaccagtagagtgggggcactcttgtaattataccagaaaatgtgcaaacagcttcggaactgtaacaggcagagattggaacagtttggagggtgagaagaagacagaaaaatgtggaaaagtttggaacttcccagagactttttgaatggctttaaatgaaatgctgataataatacagacaatgaaatccagggcgaggtggtctcagatggagatgagaaacttgttgggaactggagtaaaggtgactctatgttttagcaaagaaattggtggcattttgcctctgccctagagatttgtgaaactttgaacttgagagagatgatgtagggtatctggtggaagaaatttctaagcagcaaagcattgaagggtgacttgggttctgttaaaaagcgttcggttttaaaagggaaacagaccataacagtttagaaaacttgcagcccaaccacccacgcaacagaaaataaaaattcatttgcagaggagaaatttaagcctgctgcagacatttgtataagtaacgaggagccaaat

SEQ ID NO: 906221 - DNA, 600 bp, Homo sapiens
atttacacctgacatttaaaactatacaaatctgagaatagatattagggtgattgttttagagttttcaaattattgtctatatttagattttgaaaaaaggcattataattaatacctctgtcaaaatgacaagttctgttttgcaaaaaataaatctgagaataagactaatagtgatattcaaagaatacgttattataaatgtttaaggatgattgtacttaacttccacatggtttactctctcactttattcacccctcatcttatcagaaaggcctttcaggtccacttgctctaaaatagcaattcttggtcctactgcatcactttctcctttcctcactttattttattacagaacacttataatcacctgaaaaagtatgtatttattcacttagtttatctgttgtctttctttgccatttcatcctctctatgatgtaaactacaagataacagaaatttttgatttttaaagctgaattcagcaagcacctgtatggtacctactatttgccaggtacaattytaaggacttgtaggtctctgaaaagattaacttatttaagcttcatataactctgagaagta

SEQ ID NO: 906222 - DNA, 574 bp, Homo sapiens
cttcttagtgatgtgtgcattcatcccacagatttaaacttttcttttgatggagcagttttgaaaatctatttttgtaatatctgcaagtggacattttgagtgatttgaggcctatggtggaraaggaaatatcttcacataaaaggtagacagaagaattccgagatacttctttgtgatgtgtgagttcgtctcacaggattgaaactttcttttcattcaacagtttggaaacactctttttgtagaatctgcaggtggatatttggagtgctttgtggcctatgacagaaaaggaaatatcttcacgtaaaaactatatagacacattctgggaaacttctttgtgatgtgtatgttcatctcacagagttgaacctttctttggattgagcattttggaaacactctttttgtagaatctgcaagaagcaatctgtgaaacttctttgtgatttgtgtattgatctcacagagttaaccctttcttttgattgagcagtttttaaactctctttttgtcgaatctgcatttgtacatttggaaggctttgagacctatggtgaaaaa

SEQ ID NO: 906223 - DNA, 564 bp, Homo sapiens
tttgtagaatcttcaagtggatatttttagcactttggggcctatggtggaaaagaaaacatcttcacataaaaactagtcagaagctttctgagaaacttctttgtgatgtatgcattcaactcatggagttgaacctttctcttgattgagcagtttgggaacagtctttttgtagtatctgcaaatggatatttggagagctttgaggcctatggtggaaaaggaaatatcttcccataaaaactagacagaagcattctcagaaacttctttgtgatgtgtgcattcatctcacagagttgaacccttgttttgattgagcagtgttgaaacactttttatagaatcagcaagtggatatttgttgcgctttgaggcctatggtggaaaagaaaatatcttcacagaaaaaccacaaagaagaattctgagaaacacctttgtggtgtgtgktttcatctctcaaatttgaacctttctctttattgagcagtttggaaacaatctttttgtagtatctgcaaatggatttttggagctctttgaggcctgtggtgaaaa

SEQ ID NO: 906224 - DNA, 542 bp, Homo sapiens
ttttgaagaatctgcaaacggatatttgtkagcactttgaggcctatgcaggaaaagaagtatcttcacagaaaaatataaagaaggtttctgggaaactgttttttgatgtctgcattcatttcacagaggtaaacaattcttttcttgttcaattgtgaaactctgttcttgtaggatctgctaagggacatttttgagtgcctagagccctgtggtgaaaaagatattgtcttcacataaaaactagacagaggcctactgagaaacttcttggtgatgtgtgcattcatctcacagaattgtaactttcttttgattaagcagtttagaaacgtcttttgtggaatctgtaaagggatatttctggtcactttgaggactatggtgaaagagaaagtatcacctactgagaaactgcttggtgatgtgtgcattcatctcacagaattgaaactttcttttgattaagcagtttggaaacgtctttttgtggaatctgtaaggggaaatttctgagcactttgaggcctatggtgaaa

SEQ ID NO: 906225 - DNA, 606 bp, Homo sapiens
actctttttgtagaatttgcaatttaatatttgsagcactttgaggactatggtggaaaaggaaataccttcacataaaaactacacaaaactattgtgacaaacctctttgtaatgtgagcattcatctcacagatttgcacctttcttttgattgagcagtttgaaactctctttttctgtaatcctccagggtatatttggagcattttgtggcctatggtagaaaaggaaatatattctcataaaaagtacacagaagcattctgagaaacttctctgtgatgtattcattcaactcacagaattgaacctattttttgattgagattatttttcaataatctgcaagtagatattgggagccctttgcggcctaataaggaaaaggaaatatcttcacataaaaactacacagaagaattttgagaaacttctttgtgatgtgtgcattcatctcagagtgttgaacgtttcttttgattgagcagtttggaaacactctttttgcagaatgtgcaagttgatatttgtagcgctttgagccctccagtggaaaaggaaatatctttacataaaaactacacagaagcattctgagaaatt

SEQ ID NO: 906226 - DNA, 599 bp, Homo sapiens
tacataaaaactacacagaagcattctgagaaacttttctgtgatgtgtgcattaaactcacagagttgaagctacctttgattgatcagttttgaatctctctttttgtagaatctgcaagtggaagtttggagccctttgcggccaatggtggaaaaggagatatcttcaaatgaaaactacagagaaatattctgagaaacttcttgttgttgtgtgcattcatctcacacacctgaacctatcttttgattgagcagttttgaaaccctctgtttgtagaatctgaaagtggatatctggagcgctttggtgcctattgtggaaaaggaaatatcatcacaaaaaaactacacggaaacattctgagaaacttctttgtcatgtaggcattcatctcacagagttgaacctttctgttgattgagcagttttcacattctttttgtagagtctgcaagtggatatttggagcgctttgaggyctattgtggaaaaggaaatatcttcacagaaaaattacacagaagcatcctgaggaagttctttgtgatgtgtgcattcatctgacagagttgaacatttcttttgtttgatc

SEQ ID NO: 906227 - DNA, 569 bp, Homo sapiens
gtagaaactgcaagtggatatttggagtgctttgaggtctattgaataaaatgaactatcttcatataaaaactacacagaatcattctgagaaacttcattgtgatgagtgcattcataacacagagttaaacctatttttgattcagtagttttgaatctctctttttgtataatctgcaagtagatatttggagcccttttcagcctatggaggaaaaggaaatatcttgaaataaaaactacatggaggcattctgagaatcttctttgtgatgtgtgcattcacctcacagtgttgaacctttcttttggtagagcagttttgaaacactgtttttgaaaaatctgcaagaggatattttgagctctttgaggcctattgtggaccagaaaatatgttcacataaaaactataaggaggcattctgagtaacttcatttgatgtgtaaattcaacraacagagatgaacctatcttatgattgagcagttttgaaacactctctttgtataatcttccagttgatatttgaagcgctctgaggcctgttgtggaaaagaaatat

SEQ ID NO: 906228 - DNA, 622 bp, Homo sapiens
ttccagttgatatttgaagcrctctgaggcctgttgtggaaaagaaatatcttcacataaaaagtgcacagaagcattctgagaatcttctttgtgatgtgtgcattcatctcacagagttgaatctttcttttgttagggcagttttgaaacacagtttttgtaaaatctgcaagaggatattttgagggctttgatgtctattgtggaaaagtcaatattttcacacaaaaactatgcagaggcattctgagtaacttctttgtgatgtgtgcattcatctcacagagttgaacctttcttttgattgagcagttttgaaactctttctgtagaatctgcaagtggatattttgaacactttgaggactatagtggaaaaggaaatatcttcacataaaaactacacagaagcattctgagaaacttctttgtgatgtgtgcattcatctcacagagttgagcctttcttttgatggaggagttttgaaaccctccttttgtagattctgcaagtggatatttggtgtgcactgaagcctattgtggaaaaggcaatatcttcacataaaaactacacagaagcattctgagaaacttatttttgatgtgtgcactcatc

SEQ ID NO: 906229 - DNA, 598 bp, Homo sapiens
ttcatctcacagagttgaatctttcttttgttagggcagttttgaaacacagtttttgtaaaatctgcaagaggatattttgagggctttgatgtctattgtggaaaagtcaatattttcacacaaaaactatgcagaggcattctgagtaacttctttgtgatgtgtgcattcatctcacagagttgaacctttcttttgattgagcagttttgaaactctttctgtagaatctgcaagtggatattttgaacactttgaggactatagtggaaaaggaaatatcttcacataaaaactacacagaagcattctgagaaacttctttgtgatgtgtgcattcatctcacagagttgagcctttcttttgatggaggagttttgaaaccctccttttgtagattctgcaagtggatatttggtgtgcactgaagcctattgtggaaaaggcaatatcttcacataaaaactacacagaagcattctgagaaacttatttttgatgtgtgcactcatctcacatagttgaamctttcttttcattaagaagttttgaaacacagtttttgtagaatctgcaagtggatatttggagaga

SEQ ID NO: 906230 - DNA, 624 bp, Homo sapiens
gtgggtatgtggagctgattgtggcctacggtttaaaaggaaatatgttcacataaaaactgcacagaagcattctgagaaacttctttgtgatgtgtgcattcatcrcaaagagttgaatgtttcttttgattgaacagtttggaaaaacactttttgtagaatcttcaagtggatatttagagagatttgaggcctccaggggaaaaggaattatctttacgtaaaaactacacagaagcattctgagaaacttctttgtgttgtgtgcacccatctcacagagttgaacatttcttatgattgtgcagttttgaaaccctctttttgtagaatcagcaaatagatatttggaaagatttgaggtctattgtggaaatggaaatatcttcacataaaaacttcacagaagaattatgagaaacttctttgtgatgtgtgcattcaactgacagatttgaacctatgttttcatttagcagttttgaaactctcttgtcgtagaatctggaagtgggtatttgaagtcgtttgcgtcctatggtggaaaaggaaatatcttcattaaaaaactacacagaatcattctgagaaacttctttgtgatgtgtgcattcttttcaa

SEQ ID NO: 906231 - DNA, 622 bp, Homo sapiens
ctctcacagagttgaaccattcttttggttgagcagttttgaaacaatgtctttgtagtatctgcaagtggatacttggaacactttgaggcctattgcggaaaaggaaatatcttcacatagaaactatacagtagaattctgtgaaacttctttgtgatgtgtgcattcaactcacagagttgaacctttcttttgagtgaccagtttggaaacattctttttgtagaaactgcaagtggatatgtggagccttttgcggcctaaggtggaaaaggaaatatcttcacataaaaactacacagaagcattctgacaaactaccttgtgatgtgtgcattcatctgacagagttgaacctttattttgattgagcagttttgaaacactcttttgtagaatctgcaagtggatctttggagagctttgaggcctattgtaaaaaagaaaatatcttcacataaaaactacacagaaggagtctgagayactttttgcaacgtgtgcgttcatttcacctttcttttgactatgcagtttggaaatactcttttagtgtgatctgcaagtggctatttgcagtgctaggaggcatattgaggaaaaggaaatatcttcccat

SEQ ID NO: 906232 - DNA, 596 bp, Homo sapiens
cacaaaaaaactacacagaaacattctgagaaacttctttgtgatgtgtgcattactctcacagagttgaaccattcttttggttgagcagttttgaaacaatgtctttgtagtatctgcaagtggatacttggaacactttgaggcctattgcggaaaaggaaatatcttcacatagaaactatacagtagaattctgtgaaacttctttgtgatgtgtgcattcaactcacagagttgaacctttcttttgagtgaccagtttggaaacattctttttgtagaaactgcaagtggatatgtggagccttttgcggcctaaggtggaaaaggaaatatcttcacataaaaactacacagaagcattctgacaaactaccttgtgatgtgtgcattcatctgacagagttgaacctttattttgattgagcagttttgaaacactcttttgtagaatctgcaagtggatctttggagagctttgaggcctattgtaaaaaagaaaatatcttcacataaaaactacacagaaggagtctgagatactttttgcaacgtgtgygttcatttcacctttcttttgactatgcagtttg

SEQ ID NO: 906233 - DNA, 611 bp, Homo sapiens
cacttttgaaacagactttttgtaraatctgcaagtggatatttggaaccccttgagacctactgtggaaaagaaaatatctttacataaaaacaacacagatgaattctgagaaacttctttgcaaggtgtgcattcatctcacatagttcaactttcttttgattgagcaattttgaaacgcactttttgtagaatcttcaactagatatttggagtgcattgaggcctatggtggaaaaggaaatatcttcatataaagctgcacagaagtattctgaaaaacttctttgtgaaatgttcgttcaacacactgtggtgaacatttcttttcattgagcagttttgaaaaccactatttgaagaatccgcaagtggatatttgtagtgcttagaggcctattgtggaaaaggaaatgtcctcacataaaaactacacagaagcattccgagaagcttgtttgtgatgagtgcattcagctcacagagttgaacctatcttttgatagagcaattttgaaactctctttttgtagaatctgcaagtggatatttggagccctttatggcctatggtggaaaaggaaatatcttcacataaaaactacaca

SEQ ID NO: 906234 - DNA, 624 bp, Homo sapiens
ttgtagaatctgcaagtggatatttggaacgctttggagagaatggtggaaatgaaaatatcttcatataaaaactatggaaagcattctgagaaacgactttgtgatgtgtgcattcamatcacagttgaacctttcttttgattgtgcagttttgaaactctctttttgtagaatctgcaagtagatactcggaggactttgtggagtattgtggaaaaggaaataactttgcataaaagctacacagacgcattctgggaaacttctttgtgatgtgttcattcaactcacagagttgaacttttcctttgattgagcagttttgaaacactatttttttttttaaatctgcaagtggatatttggtgtgctttgtggcctgtggtggaaaagcaaatatcttcacgtaacaaccagacagaagcattctgagaaacttctttgtgatgtgtgcattcatctcacagtagttgaacttttcttttgattgagcagttttgaaacactcttcgtagaatctgcaagtgcatatttagagtgctttgaggcgtgtggtggaaaaggaaatatcttcacataaacactagacagaagcattctaagaaatgtctctatgatgtg

SEQ ID NO: 906235 - DNA, 608 bp, Homo sapiens
tttttgtagaatctgcaagtggatatttggaacgctttggagagaatggtggaaatgaaaatatcttcatataaaaactatggaaagcattctgagaaacgactttgtgatgtgtgcattcacatcacagttgaacctttcttttgattgtgcagttttgaaactctctttttgtagaatctgcaagtagatactcggaggactttgtggagtattgtggaaaaggaaataactttgcataaaagctacacagacgcattctgggaaacttctttgtgatgtgttcattcaactcacagagttgaacttttcctttgattgagcagttttgaaacactatttttttttttaaatctgcaagtggatatttggtgtgctttgtggcctgtggtggaaaagcaaatatcttcacgtaacaaccagacagaagcattctgagaaacttctttgtgatgtgtgcattcatctcacagtagttgaacttttcttttgattgagcagttttgaaacactcttcgtwgaatctgcaagtgcatatttagagtgctttgaggcgtgtggtggaaaaggaaatatcttcacataaacactagacagaagcattctaa

SEQ ID NO: 906236 - DNA, 617 bp, Homo sapiens
aaacaacctaaaaagtctattgagggacgatggataaacaaaatgtggtatagacataaaatggaatattagtgatctttaaaaagggagggaattctgatacttgctaccacatagataaaacttaaaaacattatgctaagtgagacgtcaaacacagactacgtgattccatctatatgaagaacctggaacaggcaaattaatagagacacaaagtagaatagaggttttcaggactggcaggaggtagaaatgggcggggttagtgtctaatgggcacagagttcctgtctgggatgatagaatgtttcaaaaatggatagtggtgatgattgcacagcattgtgaatgtagctaatgacattgaattatttaccagaaaacaaaagcaaaaacagaaacattgcttaagcttcccagtcagacaggtgatgtgcttggtgtgagctggggcctgaaaccaggctgccctagccagagcggsttcaaaacccctcttcattgtacttaggcctgattgctctggagagccccatacgtgaaagccagctctggttctatctcttctcactccagtcctccctacccccaccatcccccagctgagcattatg

SEQ ID NO: 906237 - DNA, 546 bp, Homo sapiens
actttctttttattgagcagttgggatagagtctttttgtagaatctgcaaaaaatatttgkgagccctttattgcctatggggaaatggggggggggttcacatataaactaaacagaagcagtctgagaaacttctttgtgatgtatgcattcatctcacatagttgaaactgtctttggattgagcagtttggaaacagtcctcttgtagaatctgcaaagggatatttctgagcccattgagtactatggtgcaatgtgaaatatcttcacataaaaactagacagaagctttctaagaatcttctttgtgatgtgtgctttcatctcacagaattgaaactttcttttgagtgaggagtttggaaacactctttttctaaaatctgcaagtgaatatttggagagcttctgaggcccatggtgaaaaacgaaataacttcacataaaaactaaacagaagttttctgagaaactttcttgtgatgtgtgcattcatctcacagagttgaacctttcctttgattgagcaggttggaaagag

SEQ ID NO: 906238 - DNA, 676 bp, Homo sapiens
cttctctcagccaagtggttagtttggtgaaacaagggatcaagactctgctgtctgctaatgagactgattcttgagaggattataacaatgagcctgagagctttgcatgttcatttttctcctgctggaaagatcaaggagctcttaaaattaatgttgagggttggatgagtccaaagcactagaagttcacctctgtgagatgaatgcacatatcacaaagaagtttctcagaatgcatctgtctagtttttatgtgaagatatttccttttgcaccataggaggcaaaacgctccaaatatacacttgcagatggtacaaaaagagtgtttcaaaactactcgaacaaaagaaatgttcaactctgtgagatgagtgcacacatcacagagaagtttctcagaatgcttctgtctagtttttatttgaatatatttgttttacaccataggcctctaagcgctccaaatatccacttgcagattcaccaaaaacagtgtttcaaaactgttcaatcaaaataaaggtttaaatctgtgagatgaatgcacacatcacaaaraaatttctcaaaatgcatctgtctagttttgatgcaaagatatttgcttttccacaaaggcctaaaagcactccaaatattcacttgcagattctacaaaaagagtgtt

SEQ ID NO: 906239 - DNA, 676 bp, Homo sapiens
cttctctcagccaagtggttagtttggtgaaacaagggatcaagactctgctgtctgctaatgagactgattcttgagaggattataacaatgagcctgagagctttgcatgttcatttttctcctgctggaaagatcaaggagctcttaaaattaatgttgagggttggatgagtccaaagcactagaagttcacctctgtgagatgaatgcacatatcacaaagaagtttctcagaatgcatctgtctagtttttatgtgaagatatttccttttgcaccataggaggcaaaacgctccaaatatacacttgcagatggtacaaaaagagtgtttcaaaactactcgaacaaaagaaatgttcaactctgtgagatgagtgcacacatcacagagaagtttctcagaatgcttctgtctagtttttatttgaatatatttgttttacaccataggcctctaagcgctccaaatatccacttgcagattcaccaaaaacagtgtttcaaaactgttcaatcaaaataaaggtttaaatctgtgagatgaatgcacacatcacaaaaaartttctcaaaatgcatctgtctagttttgatgcaaagatatttgcttttccacaaaggcctaaaagcactccaaatattcacttgcagattctacaaaaagagtgtt

SEQ ID NO: 906240 - DNA, 616 bp, Homo sapiens
ttgagcagtttggaaacactctttttataccatcggcaaatggacatttggggcrcttttgggcctatgttagaaaaggaaatatcttcacatacaatctagacggaagcattctgagaaatttctttatgatgtgtgagttcatctcacaaagttgaacatttcttttgattgagcactttggaaacactctttttgtagaatccacaagtggacaatttggagtgctttgcggcctttggtagaaaatgaaatatcttcaactaaaatctacacaaaagcaatctgagaaacttctttgtgatgtgtgcattcatctcaaagagataaacctttcttttgattgagcagttttgaaactctctttttgtataatctgcaagtggacatttggagtgctatgaggcctatggtggaaaaggaaatatcttcacataaaaactagacagaagcattctgagaaacttctttgtgatgcatgcattcatcgcacagagttgaacctttcttttggttgagcagtttggaaacactgattttgtagaatctgcaagtggacatttggagcgctttgtgacctatggtagaaaaggaaatatcttcacataaaacctag

SEQ ID NO: 906241 - DNA, 616 bp, Homo sapiens
ttgagcagtttggaaacactctttttataccatcggcaaatggacatttggggcacttttgggcctatgttagaaaaggaaatatcttcacatacaatctagacggaagcattctgagaaatttctttatgatgtgtgagttcatctcacaaagttgaacatttcttttgattgagcactttggaaacactctttttgtagaatccacaagtggacaatttggagtgctttgcggcctttggtagaaaatgaaatatcttcaactaaaatctacacaaaagcaatctgagaaacttctttgtgatgtgtgcattcatctcaaagagataaacctttcttttgattgagcagttttgaaactctctttttgtataatctgcaagtggacatttggagtgctatgaggcctatggtggaaaaggaaatatcttcacataaaaactagacagaagcattctgagaaacttctttgtgatgcatgcattcatcgcacagagttgaacctttcttttggttgagcagtttggaaacactgattttgtagaatytgcaagtggacatttggagcgctttgtgacctatggtagaaaaggaaatatcttcacataaaacctag

SEQ ID NO: 906242 - DNA, 616 bp, Homo sapiens
ttgagcagtttggaaacactctttttataccatcggcaaatggacatttggggcacttttgggcctatgttagaaaaggaaatatcttcacatacaatctagacggaagcattctgagaaatttctttatgatgtgtgagttcatctcacaaagttgaacatttcttttgattgagcactttggaaacactctttttgtagaatccacaagtggacaatttggagtgctttgcggcctttggtagaaaatgaaatatcttcaactaaaatctacacaaaagcaatctgagaaacttctttgtgatgtgtgcattcatctcaaagagataaacctttcttttgattgagcagttttgaaactctctttttgtataatctgcaagtggacatttggagtgctatgaggcctatggtggaaaaggaaatatcttcacataaaaactagacagaagcattctgagaaacttctttgtgatgcatgcattcatcgcacagagttgaacctttcttttggttgagcagtttggaaacactgattttgtagaatctrcaagtggacatttggagcgctttgtgacctatggtagaaaaggaaatatcttcacataaaacctag

SEQ ID NO: 906243 - DNA, 582 bp, Homo sapiens
agcagttctaaaacactgtttttgtagaatctgcaaggggatatttggagcgctttgaggcctactgtggaaaatcaaatatcttcacataaaaactacacagaatcattctgagaaacttcgttgggctgtgtgcattcatctcacagagttgaacctatcttatgattgagcagttttgaaacactctctttgtaaaatctgcaagtgtatacttggagcgcttggaggcctattgtggcaaagaaatatcttcacatagaaattacacagaagcattcatagaaacttctttgtggtgtgtgcattcatctcacagagttgaaactttcttttcattgagcacttttgaaaccctgtttttgtagtatctgcaatggaaatttggagcgctttgagccctactgtggaaaagcaaatatcttcacataaaaactacacagaagcattctgagatacttctttgtgatgtctgcattcatctcacagagttgaaactttcttttgaatgagcagttttgtaacactctttttgtataatatgaaagtggatatttgcmgtgctttgagtcctattgttga

SEQ ID NO: 906244 - DNA, 609 bp, Homo sapiens
tgtgagaaactactttgtgacgtgtgcattcatcacacagagttgaacctttctttttattgagcagtttggtaacactctttttgtagaatctccaaggggatatttttagcgctttgagatctttggcggaaaaggaaatatcttcacatagaaactacacagaagcattctgagaaacttatttgggatgtgtgcattcatctcagtgagttgaatctatcctttgattgagcagtttttaatcactctttttgtagaatctgcaagtggatatttggagcccatttagacctatggtggaaaaggaaacatcctcacataaaaactatgaagaagcattctgagaaacgtctttgtaatgtgtgcattcatctcacagagttgaacctttcttttgattgagcaatttcgaaacactctttttgtagaatttggacgtgtatatttggagtgctttgtggcctgttgtggaaaagaaaatatcttcacataaacactagacagamgcattctgagaaacttctttgtgatgtgtgcattcatctcagagagttgatctttcttttgattgaccaatttggacacactcttttctagaacctgcaa

SEQ ID NO: 906245 - DNA, 609 bp, Homo sapiens
tgtgagaaactactttgtgacgtgtgcattcatcacacagagttgaacctttctttttattgagcagtttggtaacactctttttgtagaatctccaaggggatatttttagcgctttgagatctttggcggaaaaggaaatatcttcacatagaaactacacagaagcattctgagaaacttatttgggatgtgtgcattcatctcagtgagttgaatctatcctttgattgagcagtttttaatcactctttttgtagaatctgcaagtggatatttggagcccatttagacctatggtggaaaaggaaacatcctcacataaaaactatgaagaagcattctgagaaacgtctttgtaatgtgtgcattcatctcacagagttgaacctttcttttgattgagcaatttcgaaacactctttttgtagaatttggacgtgtatatttggagtgctttgtggcctgttgtggaaaagaaaatatcttcacataaacactagacagaagcattctgagaaacttctttgtgatgtgtgcattcatctcagagagttgatctttcttttgattgaccartttggacacactcttttctagaacctgcaa

SEQ ID NO: 906246 - DNA, 641 bp, Homo sapiens
gatgttggctgtgggtttttcataaatagctcttattattttgggatacattccatcaatagcttgtttattgagagtttttagcatgaagggctgctgaattttgtcaaaggtcttctctgtatctattgagataatcatatggtttttgtctttggttctgtttatatgatggattacgtttattgatttatgtatgttgaaccagccttgcatcccagggatgaagccaacgtgattgtggtggataagctttttgatgtgctgctggattcagtttgccagtattttattgaggattttcacattgatgttcattagggatattggtctaaaattccttttttttttttttgctgtatctctgtcagggtttggtatcagaatgatgctgtcctcataaaatgagttagggaggattctctctttttctattgattagaatagtttcagaaggaatggtaccagctgctctttgtacctctagtagaatttgtctgtgaatctatctggtcctgggcttttcttggttggtagcctattaattatygcctcaatttcagagcctgttattggtctattcagggattcaacttcttcctggtttagtcttgggagggttatgtgtccacgaattcatc

SEQ ID NO: 906247 - DNA, 565 bp, Homo sapiens
ttctaccagaggtacaaggaggagctggtaccattccttctgaaactattccaaataattgaaaaggagagactcckccccaactcattttatgaagccagcatcatcctgatacctaaacctggcagagatacacacacaaaaaaaaaaagaaaagaaaagaaaacttcaggccaatatctctgataaacattgatacaaaaatcctcaataaaatactggcaaactgaatccagcagcacatcaaaaaccttatccaccactatcaagtcagcttcatctctgggatgcaaggctgattcaacatacataaatcaataaacataatccatcacataaacaaaaccagtgacaaaagccacatgattatctcaatagatgcagaaaaggcctttgataaaattcaacatcccttcatgttaaaaactctcaataaactaggtactgatggaacatatctcaaaataataagagctacttatgagaaaaccacagccagtatcatattgaatggtcaaaagctggaagcattccctttgaaaaccagtagaagacaaggatgcct

SEQ ID NO: 906248 - DNA, 567 bp, Homo sapiens
tatgagaaaccacgtggcttctggagaggctgagagagtagctgcaccctaccatttgtactggtggttttctggatccagatccagtttccatacaattcttataaaaattccccttttcttaaggttagtttatgatcctagatacccaaacttctctaagcacactgatgtttatctcttctggaaattcatggataaagtgattccaaccctttaaaaaccttatgcatattcatatttcaactttgtatgtagcctaattgtggagatgatatgctaagttacaatctatgacaccataagaaagacaaagaatggattctggtgaagaatgtgatcatagacctaatgcttgatgttccctgcctcaacaaaatttccactaaaattatcaaagaaaataaactgtgtagagttaaaaattcaccttatccctggaagctagggaattgtggcactcacatsccagcaattttgaggaatttctgcagattatagcacaggcagcactgaattggtggagggactaccaatacactgtgtggggaaataacactgcctgag

SEQ ID NO: 906249 - DNA, 624 bp, Homo sapiens
gtttgagattttactaatgcttaattgcatctaagtaatgaaaagttaataaagccattataaatataatcaaaactataactttgctatagaggtaaataattaattgcttgtgaaacactaaattgtaattcagtggcatttatgaacaatataaatgtataaaattcaaataaatgaaacatcaataaatgtgatctattgctggcaacttgaggagggaataattaatagcatctttttttttctgcccaagttgggaaccaattaagaaacacagggatcagacagatagagatcaaaagagcatcgagaatactgataacacctaaattagagaatgtgtctttcagtctattagccatgttggctagctcagactataacctgaagttgaacttgctcactcagttccaagtattgctgggaatttacaagatgtctcaatggggtcctgctcttttaaggatctaaggaatgtgatgcagagagtatgtgctttttgctagtaggcatattccagtgaggaagaggctgggtcacacttattatcttctctcaatatcacccatgggaaaagttacttctctcatgggcaasagtgaatattaagtcagaaagcaa

SEQ ID NO: 906250 - DNA, 644 bp, Homo sapiens
tgaacttaatcctcataactcgtgagatggtctttatctttgacattttgcagttacagaactaagttcaatcrccagtataaataccttctttattaacttgaggtagaggtgaatttgggattgaatttggtctatagcaaactgtttttcaaagattaaggtgctcagggaatgtatatcttttgggtccctttggaagaacccgagtaaaaataagcttaatttaattggaagttggctgaaacttaacgtgtgagccgtatctgagataaccagagaaggatgcgagtagtgtgtttccttatgggtcaaaatagataacttaccttgccaaattgttagagtaaatgagaacagcacctggaattctttaggaataatctggaaggtgaatcttgtttgtttccttagaaaccacacagacatcaattttcaggcctgattcctttcccctagaagtatttttccttcttttttctcctggctttttaaaatgttgcagtccctttgctgaattgtctttttttcccatcaagttttgataatgtattgtattctgtacatatacagttctaagaagccagaaagataagttggagatgactagcctcataaagtttgtctcttgaatgactgggaga

SEQ ID NO: 906251 - DNA, 565 bp, Homo sapiens
attctgaggtactgggccttaggacgtcaacatatgaattttaaggaacataattgaacccataacagtggtctcaacacrgactttttaaaacaacttagttctctctgcatcaacagaaggcccaatcttcatattacacaaagaattggttattaggggtgggaggtggagagtagattaataaaaaaggtaaacattataggaggccaaagtgagagccttgcttaagcccaggagttcaatacgagcttgggcaacatagtgagactccatctctacaaaaaatagtagtactcccatctacttggagggttagggtgggagaatcacttgagcctgagaggtgaggctgcagtgagctgtgatcgtgccactgaaattcagcctgggcaacagaactacaccttgtctttaaaagaaaaataaacacaactcattcttttgagacgagaagctacaattcatttatcaaacaggttatctgctcactagggcatctggcatatagtagattcccagtaaatatttgttcaattaggatgagttgaagtaaatcagaatt

SEQ ID NO: 906252 - DNA, 630 bp, Homo sapiens
attcttgtgatagtgaataagtctcacgtgatctgatggtttaaaaaacacgagtttcagccaggtgtggtggctcatgcckataatcccagcacttgggaggctgaggcaggtggatcacaaggtcaaaagatcgagaccatcctggccaacatggtgaaaccctgtctctactaaaaatacaaagtttagctgggtgtggtggtatgcacctgtagtcccagctactcgggaggctgaggcaggagaatcacttgaacccaggaggcagaggttgcagtgagccaggattgcaccactgcacttcagcctggcaacagagtgagactctgtctcaaaaaaaaaaaaaaaaaaaatcaacaacaacaacagcaaaaaccaacgggagtttccctgcacaagctctctttcttctcttgtctgcccccatgtgagatgtgcctttcaccttctgccatgattgtgaggcctcctcagccacgtggaactgtaagtccattaaacctctttattttgtaaattacccagtcttgggtatgtctttatcagcagcatgacaacagactaatacaataaattggtactgggagtgctgttgaaaagatactcaaaaatgtgtaagcaactttg

SEQ ID NO: 906253 - DNA, 551 bp, Homo sapiens
catgtggacttaaatgccagccccatctttgctggctgtgtraagttgggagagcctgcctcagtttctctcccagtagatggggatacaggccccagatgggtggaaaaggggtgagagaacaattggccattgttgtgatgggtcttcctatgagatgacatttgtagtttttcatacttcttagtttctgtcatgaagtctcgcgattttgacagcagcagaacagacttataatttgttttcacacaactaatttcatgctaactcagttcatgatctatttcatttttgacaggagtccgaattctctatcctaggaccttggactgagctgctgggtggggcatgttttaaactgtgtatatagtggagatcagagaatttctccttcaattctcacctcccccctctctaacctctcagtcctcagcgttaggattaaatgaggtaatgtttgtaacacacctgggaattaactggaactatttgatgctcaggtgacagaactgacttattatctcaatttccatccacagccttatttttga

SEQ ID NO: 906254 - DNA, 628 bp, Homo sapiens
tattaaaagttgcagatatgagcatagtttgacactatgcttcaaaaggcttaaaaaaacagtgcatacctagtcacatagtaagtttagttacaggrctataaggtgaggaaataattagacaattgtgcaagatttatgaacacaaatgttcattgtagaatcatttatgatggagaaaaccttataaataatctaaaaattcagcaataaggggttgatttgataaattatgatacataaacatctacatatgatggaatactactcataccttaaaagtaatcttgtagaagactatttaatgagtagaaaattttcaagatatagtaattaaaaatcagatcataaaaatatatgtagactgcaatcctcttttaaatgtgtatatgtatatgtgtgtatatatgtatatgtgtgtatatatgtgtgtctgtatatacatatacatatatacacacacatagaggaaaatactgaactctgatgacataatgtggggctgttttgtgctttttttctattttccacattttagattaatgatttattataaatggtatattattttaaaaacaaaacaaaaacagaattcctggtgacataccatgtatgtaggaagcccagg

SEQ ID NO: 906255 - DNA, 573 bp, Homo sapiens
tctgagttgtctatttccataacatatggtagtgcttccctggcaaatgctaatattctgtgtttgtattcaggcagtcttagcacatagtctattctcttactccaagtcctgggagctgtaggcaataataaccataagtgcttgaaggacagtaatatttaggatgatatgcaggttctctcactctggaaggcagaatttagggcattgattctcagaccttaatgtacatatgactaaactagggattttgttagaattcaaattctgattcaatacattttgggtaatcttagatatttgctgcatttctagcaatcttccagcaatgctaatgctgttggataatgggcgactctttcagcagcaaagtttcaggaggtatgtagaaaggtactctcttctggcctttcaagagcttgacaagtagtcgagactttgaactgttataataacacctcaggtggcaaggcttggtcttgtaccactgaaattgacctatctgtgtgtgtgattgccctcgttatggaggmaatcaattacttcttcctctcctctgctttgtgtatg

SEQ ID NO: 906256 - DNA, 680 bp, Homo sapiens
tttgataaattattattactatttgtagaatataagtagttcctatatttttgagtgtcagttttattcattaactcttattaaataagtacttactaagtatttacaaaaaatttattaaaatatatggaaataataaattggcagataaatgtatttcattttatgattatttcataaacatggctaaattttcatgcgctgtgcagaaaatgataatatatttatagacaaatgaacagcatactaaaatatggtgagattcactatatttgattgtgttataggaatcaaatatttaaattttttttatgttaaaaaagaagatataaagcaagtggcaacttttaaaaccttttttagatttagcatatatttatacaatcatctagatcaagattttgaacatattcagcacctcagaatattttctggtgtcccctggtgtcctactcattaattacctacaaaggtagctactattctgatttatttttacgatatattagttttgcttattcttgaacttcatgtacatgaatttatgtgatatgtactcttgtatctggcttctttttttcaacataatgtttatgggatttctcttgttgttgyatatggtagtaatttattcatgtcattgttccataattttctgttttgttaatatgtcacatttt

SEQ ID NO: 906257 - DNA, 567 bp, Homo sapiens
tggttttcagctccactggtcatttaaggacttttctacactggttattctagttakccatttgtctaatattttttcaaggtttttagcttctttgcgatgggttcgaacatcttcctttagctcagagaagtttgatcgtctgaagccttcttctctcaactcatcaaagtcattgtccgtccagccttgttttgttgctggcaaggagctgcattcctttggaagagaagaggcactctgatttttagaattttcagcttttctgctctggtttctccccatctttgtggttttatctacttttggtctttgatgatggtgacgtacagatggggttttggtgtggatatcctttctgtttgttagttttccttctaacagtcaggaccctcagctgcaggtctgttggagtttgctggaggtccgctccaggccctgtttgcctgggtatcaccagcggaggctgcagaacagcgaatattgcagaacagcaaatgttgctgcctgatcattcctctggaagcctttgtctcagaggggcactcggccgtgtgaggtgtcagt

SEQ ID NO: 906258 - DNA, 457 bp, Homo sapiens
cctcctctggggtctctatttttttctgcttttaaaatttcagcctcagttgcaccactggcaccccagcctgggtgacagagtgagactctgtctcaaaaaaaaaaaaaaaaggtcagcctccggtgccggagtgcctgttctataggagactctgcatcgcatctctgcaccccttaatccctattcccacacagccttgctattcataactggaaccacaatgtatgtttctttctctctctctctcttttttttttttttgacagagtctggctctgtcgcccaggctggagtgcaatggcacagtctctgctcactgcaagctccgcctcccgggttcaagcgattctcctgcctcagcctcccaagtagctgggattacaggtgcccccaccacgcccagctaatyttttttttttttttttttttttggatttttagtaaaaacagggtt

SEQ ID NO: 906259 - DNA, 605 bp, Homo sapiens
caaacatgttattttcagaaaataaaaggtcttcgtcattaggtacaaatcataaagggattatctacggttactacactgtaacaactttttacatattgtattatagaacaagcttttgagaagacaaagcaacacatcagcagtttaaccaattgtctttctcttttaacaggctggtctacattagattagatataaaaggcccaggtattacttgtgttcgatcttagccacatggctgagaaacatccaggtacatttaaatcagtgacaaaagaaaacattatcccttagtaaaattacataaaataggaaacatctcttactttaagagcaaccatggtacttgttcctatggtgaaaactgatgttatctcgattagttaattattcatcccaacacctggtcttgctcccttttccacctctagctatgttaacactagagttcagtaatttgttgataaagaatcttaactgcagtatctaacagatcttagtgattaagcatatgacttacyctttgtacagataagtaaactgaggccaaaagaactgaggtatcttattaaaaatcagagagctagttagttgaaaagtcc

SEQ ID NO: 906260 - DNA, 563 bp, Homo sapiens
agtcatggttagattgatagttttactgaaagtaatttatcaaaatccccattagattgycttttaatgtcaacatattaaacctgttccctgagagatactttcctatttgttctccttgccctttaaatatcatttggtgccagtgagatgaagaatagaaaatgtatatcttttaggggaacttcgcaagcctgagatcccccactacatatagtcattcagaaaatgtttcttaagcacttactacctactttttctcagacattgtaccgggacatatagattaaaagaaagagtctttagtctcaaggattttacagtctaatggggaagcagatgtgtacaaatataaatgatgcaatacagaaattattgtggcatggtatacagggagaaatgaaagcattgaagaaggcaaagaagtcttcctcgggaagtcatggcttcaaagagaaaagtaggctgtgtcttaaaggataagtatgactttgccaagctaatttagggaactttgtattctaggaagagggaacagaatgtgcaaagcctcgaaggtgcac

SEQ ID NO: 906261 - DNA, 584 bp, Homo sapiens
acttcataattctaatttggaaaaaaggaaaaatacgaaactttcyagaatattcaaaattatataatattagggccaatataagcgacatacacattatatttaatggggttattctttcaaatacgacagaatatcctgctggatagcaataccttacactatgcttagcacactgttggtgttgaatttttattgaataaatgcttttacatccctagctttctgtgctaataagtaactgttatgtaggtcctaagatttggctcagatgacccataaatcttattttacaagtgccctaagagtttggcatgtaaattatctgaatttttggcaaaagatgatcatttacataaagatccttgggaactcaaaatgctgaaaacagttctttctttgggtggtctcatagatgaggtcagatcacacgatggagccttgaagacatcatggaacttttacatttgaaataattataaagctccaaagtgcttaattttgcatgacacaaattaacacactactatttatgggtcaaaaaattatgacataactaagtgaaaatttaattaatcacaact

SEQ ID NO: 906262 - DNA, 491 bp, Homo sapiens
atttagtttgttttccaaatttgcaatttctaataactttggatgaataaccttgtgtataagttgtttagtatgtgtggaggtatatcctcagggcatgtggctataaatggcattcattgctggcttcatgggaaatggttatgtaattttgaaaaatattgccaaattcctcctgagaggggttctgcaggcctatgagccatgtatgaaagtaggtatttcgtcacagttttgtcggtagagtgtgctgcctatcttttcaatccttgctaatctgataagtgagaaatgataattcagtatagttttagtttacatttttaaaaattatgttaataatcatcacttgtataagagccatttttgtgttttatctcaactgcctwttgatatgatatatatattattttttcctagtttttaatttttatataatttatatagttttctttttgttaatacaaaagctttctttttataattcgtat

SEQ ID NO: 906263 - DNA, 491 bp, Homo sapiens
atttagtttgttttccaaatttgcaatttctaataactttggatgaataaccttgtgtataagttgtttagtatgtgtggaggtatatcctcagggcatgtggctataaatggcattcattgctggcttcatgggaaatggttatgtaattttgaaaaatattgccaaattcctcctgagaggggttctgcaggcctatgagccatgtatgaaagtaggtatttcgtcacagttttgtcggtagagtgtgctgcctatcttttcaatccttgctaatctgataagtgagaaatgataattcagtatagttttagtttacatttttaaaaattatgttaataatcatcacttgtataagagccatttttgtgttttatctcaactgccttttgataygatatatatattattttttcctagtttttaatttttatataatttatatagttttctttttgttaatacaaaagctttctttttataattcgtat

SEQ ID NO: 906264 - DNA, 633 bp, Homo sapiens
aaattgatcacataattggaagtgacatattcctcagcaaatgcagaggagctgaaatcataacagtctctcagaccacagcacaatcaaattataactcaagattaagaaattcactcaaaaccacaaaactgcatagaaattgaacaacctgcttctaaatgactcctgggtaaataatgaaattaaggcataaatcaagaatttctttgaaactaatgagaacaagacaacacaccagaatctctggaatgcagataaagcagtattaagagggaaacttatagcactaagggcccacatcaaaaagctagaaagatcttaaactgacatcctaacatcacaactaaaagaacaagagaaccaagagcaaacacaccctaaagctagcagaaggcaagaaacaaccaagatcagagaagaactgaaggagatagagacacgaaaaaccttcaaaaaataaatgaatccaggagctgtttttttgaaaaaattaataaaagagatagaccactarctagactaataaagaagaaaatagagaagaatcaaatagacacaataaaaaatgataaaggggatatcaccactgaccccacagaaatacaaacaaccgtcagagaatgctataaa

SEQ ID NO: 906265 - DNA, 570 bp, Homo sapiens
tactacagcaaattaaaacaaatcaggttgaataaacacatataattttcaacttctttcagcataaattgaactgcgtaatatgatattgataaaactttatgtaaacaaaattaaatctgacaatgaaaatgcattttagcatcatttgaagtaagctaacagaggagcacaaactattggcaaaaagattattaagagttgtgctattgacattacaattaaaatcgtagactagtgggctgttacaaaaaacacagttagtagcattgtctaaaaatgaagcccagaaaaaaattctagcattatatccaaagtgcttgatgaattactttggaggctgagattatgtaaaatctctatacagttcaactggatgacagtatagactttgtgaatctctccatgtttgtttttgtatggtgtgttcaggcaggtgaatacgaggaagatgtattacrttttaaaatgcttgtcacataaatgtaactggataatggagcagtctgaacttttatcttttccaatcacatccttctaccacgctctgtcaaatctctcatttaaagc

SEQ ID NO: 906266 - DNA, 537 bp, Homo sapiens
gcagaagtttcctgcaggggtgtggtcctcatggagaacctctgctagggcagtgcagaagagaaatgtgggatcagagcccccacacagagtccctactggaacactgcctagtggaggtgtgagaagagggccaccatcctccagatcccaggataatagatcgaccaacagtagcaccatgaccctggaaaagccacagatacccaatgccagcccatgggagcagccaggagagaagctgtaacctgcaaagccacagaggcagagcttctcgagaccacgggaacccacctcttgcatcagcatgacctggatgtgagacctagagtcacaggagaccattttggaactttaagatttcactgccctgctggatttcagacttgcaaggggcctgtaacccctttgttatggccaatttctcccatttggaatggctatatttacccaatgcctgtacycccattgtatctaggacataactaacttgtttttgattttacaggctcataggtgaaaagcacttgccttgtc

SEQ ID NO: 906267 - DNA, 610 bp, Homo sapiens
atgaaagaacatcacaaatcagaattgcaaaatctctgaaatgaaatggtaaaatctacgaaagaattagaaacaagagaaaaaatattttaaaaattaagacttcaataaaakagataaaagagcaaaaaaagtctttaagtagataaaaaggagaacttcaaagaaaatgctaaaaaggatttcagaagaagtggcaaatattgaaaatagctgaagaaggttcaagatacagagaaagtcaatatttaaggaagaaaaccaaagtaagagaacaataagaacaacaaaatacgataaatgttcattatataataaacaaaattcgtcctaaaataaaggaaaagatttaacaaaacatattagaagagcaaatgggaagactaataccagcacttaatctagtaaaattactggactttaaagaaaaagccaaaagattcttaaggtatctgagtaaaaagaatatgtaatttataaggaaaatgcaatttagcatcagactgttcaacagtaatattttatgatagaaaaaaatggagtaatatatttaagagtctcaaggaaaaaaattggaagcaaacaattttatatccagcaaaactgactc

SEQ ID NO: 906268 - DNA, 679 bp, Homo sapiens
cttagtcagcagtctgaactggatctaggctagcaatctattaaattctaattgatagcctgtatcrtcgtggctcaattttttcaaacgcttctgaccgactgtggtatatcatccataagtgaattttcattccacactgtaactgaaaattcattcattcaattaaatattgagcccctgtgacgtcttaagcactgtcactattaaacaggacagtttatgctcccttcttggagctcatttgcttctttagagacatagacaataaataggaaaatataaaaatttaaaaagttatgaatacaaattatgtttctggtgggttacttcagattggcagacatggaaaatatctccagatgcaggaatgttctttgaaaatgatattttaattttgctcttgaattagtccacttcttcttgatgctgatactcaagcagctgtttcctaatgactgggtacagaaaacctcaccatgctggctgatggcctcagatcaagcgtaagagcatgagaaggttcagaaaattgtttggcacaaatgtgtaataagtagatgcagtgtctgtttcacctgaagatgagaagtaatagttctatttagagaatatttttgattctcccttgttcaatggggataaatgctgccttaatttttaaattgacatgtgaaat

SEQ ID NO: 906269 - DNA, 679 bp, Homo sapiens
cttagtcagcagtctgaactggatctaggctagcaatctattaaattctaattgatagcctgtatcgtcgtggctcaattttttcaaacgcttytgaccgactgtggtatatcatccataagtgaattttcattccacactgtaactgaaaattcattcattcaattaaatattgagcccctgtgacgtcttaagcactgtcactattaaacaggacagtttatgctcccttcttggagctcatttgcttctttagagacatagacaataaataggaaaatataaaaatttaaaaagttatgaatacaaattatgtttctggtgggttacttcagattggcagacatggaaaatatctccagatgcaggaatgttctttgaaaatgatattttaattttgctcttgaattagtccacttcttcttgatgctgatactcaagcagctgtttcctaatgactgggtacagaaaacctcaccatgctggctgatggcctcagatcaagcgtaagagcatgagaaggttcagaaaattgtttggcacaaatgtgtaataagtagatgcagtgtctgtttcacctgaagatgagaagtaatagttctatttagagaatatttttgattctcccttgttcaatggggataaatgctgccttaatttttaaattgacatgtgaaat

SEQ ID NO: 906270 - DNA, 534 bp, Homo sapiens
gtttaactctgcgagctgaatccacacatcacaaagcagcttcacagatagattctttctagtttttaatcacaaaatgttaggattttcttttccttttttttttttttttactgtcagcccctgtgggctttgaaatttttttttgcatatcctacaaaaagagtgttttcaacctgctgaatgaaagaatgttttaactctgtgagcaaaatccagacatcacaaaggagtttcacagatagcatctttctagtttttatcacgggatattcagtttttcactataggtctcagtgggctgtgaaatgccttttcacagattgtacaaaaagagggtttccaacctgctgaatcaaaagaaaagttttgctctgtgagctgaatccacacatcgcaaaacagtttcacagattgcttctttctagttttaatyggcagaaattcagtttttcaccatagacctcattgggctccaaaatgtctctttgtggattctttaaaaggagtgtttcaaatttgctgaatcaaaag

SEQ ID NO: 906271 - DNA, 652 bp, Homo sapiens
gacctcagtggactctgaaatgtccctttgcagattctacaaaaggagtttttctgaactgctgaatgaaaaggaaggtttacctctgtgaaccatatccacacatcacaaagcagtttcatatatagcttctttctagtttttatcacaggatattctgttctccaagagaggtctcattgggttgctatatgtcccattgtagattctacaaaaaagagtttccagcctgctgaatcaaaagaaatgttttcctctgtgaactgaagcacatcacaaagcagtttcccagatagattatttctagtttttatcatgggatattcgatttttcactgtaagccttcatgtgctccgaaacgactcttctcagtttctacaaaagagggtttccaacctgctgaatcaaaagaagtttaattctgtgagctgaatccacgcatcacaaatcagtttcacaggtagcttctttcatgtttttattgctgaatatttggtttttcactataggcctcagtgggctccaacatgtccctgtgcagtttctacaaaaacattgtttccaacctactgaatcaaagggaaggttttactctttaaggtaatccacacctcacaagrcagtattgctcatcattttcttctagttttt

SEQ ID NO: 906272 - DNA, 649 bp, Homo sapiens
gctcagggaagatactatgggtctcatatttacatctccaaactctctttctcttttgagcctctcctctatctccaatatacatgactgtaacttaatggggaagcttctctaataacccagcacatagtgaggaaggccacatttccaggggtgctagaggaggatggagaaaaactatagaaaacgctccgtgtggaggtttcttttaagcaagctgaagatcctcaaagctctttttttctaaaataatagtatgtcttattgcttcagagaaagttagaatctacttggaattaatagtattttatcagtttcacactttagccatgtagacccatagaaactcaggagaatcaactcccttattttataaatcaagacctggtgcccaacagtgggaaatgcatcctgaagtcatagttatgtatatttaaagtattgaagtggttggctttatcttgaccttttttttcatacagaaatgaacattaatcagatcatgagtgttactacttacatgatcatgaataaaagtccacaaaatgaggtcgaaatttgggtgttggctgttaactaggctcactytcctgcagagtgattcacagcacacataattcagatgtatcacttggtaaaataaaatatc

SEQ ID NO: 906273 - DNA, 650 bp, Homo sapiens
ggaacctatgtggctgcaagatttctacattttatttgaagtggtayaatattaactcaaggtagaatctgtaagattaggtaatattgtaatccttagatcaagcaccaaaaatagtataccaaaagatacagccatagtaagaggtcctaacaccctctctcagcaattgctagaataattacacacagaaaaggaagctgtgaacactatcaaccaccttgatgtaattgatatttatagaacactacatccaacaactgcagaatacatattatttgcaatgaatattaacttcattaacatagaatatgtcctgggccataaaaaactcagtacatttgaaagaattaaaattattcaaagtatattttctgaatacaatagaattaaataatcaataacaataagtagaaatgatcaaatacctgaaaattgaacaacaaagttgtgaataatttatgcgtcaaaaacaaaagcacaggacaattaaaaaatattttaactgaatgacaatggaaatttgtggtatgcacctaaggcagtgcttagataaaaaatatatagctttaaatattgtattagaaaaaaagaaacatctaaatcaatacctaaggtttcaacttaagaaactagaaaaagaagagaag

SEQ ID NO: 906274 - DNA, 580 bp, Homo sapiens
gagcactccggggttactcgctcttccacgscactggagacctctgactgtaatctacactgtgcccttcactggcccaagtgctctcagtcccccgagactgctcctgtctatcagtgtctcaccatccccacagtgtctgtctgtggggatgtccctaccctcacctgtcacctgcaccatcgaaggcatcttaactgatctctttgctgccagagcctccctccctgttcacctgcacccaggtgccttccccaaacgccgaggatctgaacacatcctcctgctgcaacagtaacaggctgtggcccacaggctaacatgcaaactcttcacccaacattccaggcccctcctgctctgatgcctgcagctcccagccttctgtgctgcttcctcctcccacacaccaacacacagcctcccaaatatctcccagatccctgaccacagggcacttgctcccctgcacctgggcctctgcacagcccctcattctttaatcaatggcctccccctcctccactaggccctcagcccttgacatcttccccgttctttgtctgctctgaggtccctg

SEQ ID NO: 906275 - DNA, 628 bp, Homo sapiens
atgttttatattttaagctccgggatatgtgtgcaggatgtacakgtttgttacataggtaaacgtgtgccataatggtttgctgcacctatcaacccatcacctgggtattaagccaagaatgcattagctatctttcatgatgctttccctctccccaccctctggccaggccccagtgtgtgttgtttccaccgcccatggccaggtgttctcattgttcagctctcacttatacgcaaaagcatgcagtgtttggttttctgttcctgtgttagtttgctgaagataatggcttccagctccgtccgtgtccctgcaaaggacatgatctcattcctttttatggctgcatagtattctatggtgtatatatatcatatattctttatcaagtataggacatttgggttgatactatgtctttgctattgtgaatagcgttgcaatgaacatacatgtgcatgtatctttataatagaatgatttatattccttttggtatatacccagtaatgagattactaggtcaaatggcatttctgtttctaggtctttgaggaattaccacactgtcttctacaatggttggacaaatttacattcccaccaataatgtaaaagcatt

SEQ ID NO: 906276 - DNA, 628 bp, Homo sapiens
atgttttatattttaagctccgggatatgtgtgcaggatgtacatgtttkttacataggtaaacgtgtgccataatggtttgctgcacctatcaacccatcacctgggtattaagccaagaatgcattagctatctttcatgatgctttccctctccccaccctctggccaggccccagtgtgtgttgtttccaccgcccatggccaggtgttctcattgttcagctctcacttatacgcaaaagcatgcagtgtttggttttctgttcctgtgttagtttgctgaagataatggcttccagctccgtccgtgtccctgcaaaggacatgatctcattcctttttatggctgcatagtattctatggtgtatatatatcatatattctttatcaagtataggacatttgggttgatactatgtctttgctattgtgaatagcgttgcaatgaacatacatgtgcatgtatctttataatagaatgatttatattccttttggtatatacccagtaatgagattactaggtcaaatggcatttctgtttctaggtctttgaggaattaccacactgtcttctacaatggttggacaaatttacattcccaccaataatgtaaaagcatt

SEQ ID NO: 906277 - DNA, 606 bp, Homo sapiens
ggacaacgggagagacctgagaccttcccatatcatactaagtcaaaatgctgatacaaccttcaggaattcggccgggcgcggtggctcacgcctgtaatcccagcactttggsaggctgaggcaggtggatcacgaggtcaggagattgagtccatcctaacacagtgaaaccccgtctctactaaaaatacaagaaattagccaggcatggtggtgggcgcctgtagtcccagctactcgggaggctgaggcaggagaatggcatgaacctgggaggccgagcttgcagtgagccgagatcatgccactgctctccagcctgggcgacagagcgagactccatctcaaacaaacaaacaaacaaacaaacaacaacaacaacaaaaaccctcaggaattcaatgctttcaaggggaaaaagccaatgacactcacacagtgtcattcaaaaggaaactaatatgaattaaaaaaaactaacaaagaatggtagcagggaaatctgtgagctacatcataacccctggcagcaagcatgcaccaactccacttcctggccatcattcacgcctgatgttcttggaaatgtgtgttttgcccctc

SEQ ID NO: 906278 - DNA, 576 bp, Homo sapiens
gggaactgatttgtaaaggggtatgaggaacaacattccctctggtacaaagctaactgtgttgggcacagctctaagcctcatactaatcttactggacatagctctaagcctcatactgatcttactggcatgttgctctaagccagtaactagcatgtcacctggcaactgagcagaagaacagaggtttactaggtcctgagggaggctgttactgcacaagttctttgctggtgacagcagaaagtacttaggggccattccaagggtctgccttgtttgcagagttgattcatttgtggttgccatataaaggcctctgaaccaacaattgtttgggagcaaaagcaaacgagtgccaagatccaagttctcgtactgtggctgtagggttgagggctgcatagggtcgaaaggtataagtcactgtaatatcagygtggggacaccatgggtctcatcagtggttttgcccatgggcacagcccttgtggcggatgtctaattgtgtgcagcccagatgtcagcggaggcccttggagatcctattaaacttgacccgaaccccaatgc

SEQ ID NO: 906279 - DNA, 600 bp, Homo sapiens
tcccaaagacaacttgggagccaagtaaaatagggaaacgtaccgagattgttacatgtttgcacagggcaaatttatggacccaatgtccttccctgatctaacacatgttgtgttaacctattgtgtggttgcttaagaatcgaaatttacttgaccatattctttaaaaaactcttactttctctggctgcaccacagtggcctatttccatatgaagaagggctgactttccgtctgggcaaaaagcagtactcatgctttacaatttttataatagatttccacctttatccctggccatttgaccttgaaagaatataaagcagccttccttaagccatataaaatatcataatatgaggtcatttcaaaaagatgaacatcatgatatttagagaagattacgacatatttttggtggcaaaagagctgacaagaggagcacaggctaggaccacttagctagcacagagctcacttttaatttaagaacttcagatttagaattgtattctgtaattgaagttacactttaaatcgtaaagatttttttttctttttggaaactatkaatttttagtataagtatttagata

SEQ ID NO: 906280 - DNA, 609 bp, Homo sapiens
tataactttattttggaatttattttttatttttaatgcacaagttaaaaaatgtcctaattttctcttgacatatagctaaaccttgactagatccctggaagttaaattatattggctgaattcctcagagaatatatttcatacattgtaatgctatagtctttcataacacatcactacaacagatcctgttctgtttgttataagcaagttgaaaagagtaaaaaaagcagtataaaaatggcagtgcaatttgaaatgtgagctcatgagtcaaagacagaactggcttaatattgttacagatacatgtgcaaattatgtgtcttctctaagtttggtttcttcattcttagagtagggatttaactgttgatgttaggattaaataaaatactgtagcaccacacacaatcccaaacccataataagtatccaataagtgttagcttatatcaccactatttataatatcatctataatttaattggattatctctatawaaatctccctacataagaaattttgtttagaatttattgccaggaaaaaaatgttctctccaagaaagaattgctgtgctttcctcttctagataaaaaga

SEQ ID NO: 906281 - DNA, 670 bp, Homo sapiens
cttcatttgagatcacctcattctggacttcatcatccatatcactatcagaattttggtcacaacagtttaacaagtctctcggaagttccaaactttccctcagmttctcttcttctaagtcctccaaactgttccaacctctgcccattacccagttacaaagctgcttccatatttttagttatctttatagcaattccccacttctctggtaccaattttttgtattagtctcacgctgctataaagaactacctgaggctgagtaatttatgagaaaataggtttagttgactcacagttccacaggctgtacaaaagtcatggctatagaacaggaaacttacaatcatagtagatggtgaaggggaagaaagcatctctccacatggctggcaggagagagagagagagagtgagtgaagaaggaggtgctacacactttcccacaaccagatatcttgagaaatctatcacaagacagcactagggggataatgctaaaccatcagaaaccacctccctgatcaaaacaccttccatcaggccccaactccaacactgggaattacaattcaacatgagatttgggtggggacacagagccaaatcatattaatgctcaacttttcttttctttctttttctttttttgttagataggttc

SEQ ID NO: 906282 - DNA, 693 bp, Homo sapiens
ggaaccttactatagtaaaaagatagaygggggctcctctggttgcagcgagggtgagtggccaggggctctaccctctcagttgtctcagtttgggacataatatgtgtgacctaccctcaaacagtttagaaaataaatatatatatagtatgtttacacatacagagaaaacagtggttctcaaagtgggatccctggaggggcatcagcatcacttgggaacttgtttctaaaaataaaaattattgggccctacctcaaacctattaaatcaactgtctggggtagggcccacgagtctgtgttttaacctgagacttcctagttgttcagacacaggctaaagtttgaaaaccactgatacagaaacaatgagaaaacaaatatggtgcaatgttaaaattggcgaatctgggaaaagggcatagggagttttctgtattattcttgaaacttttctgtaagtttgaaattacttcaaaataaaaattaacaaaaacaacaaaattaccctgggacaataagcatggagatgtggagaggggacccaggaggtagggaggcaaatcacgaggttagtgcaggaaccactcaagagtgacgtgatttacaactaagactgtagcagctccagggccgagtgagaacaggatatccgcagtcttcaaatataaatctctcccttgtaga

SEQ ID NO: 906283 - DNA, 655 bp, Homo sapiens
ccctaaaaacagtgtttcaataatatgagaaataacaattgcagcacccctcattctccaaagtcaccctttctttaactgtgactaatgagatggtattggaagatagcatccagggggccaaaaatctcccaggttttattcacaatacctgagatcttttcataactattcctgatagacgctggaaaaataaaagccatagcttctagctcttgtagattcttgaaaataacactgacccatgcttaaagttttggttaggtttgagttgcctacctgggctggaaggcagattatttatggcagctgtatcgatcagaccaaaatgaaatttgatgtgaaacagggccggaggaatgcaaacttcggggaggtggaagtggaatttgttacaccttaaaggagacagctggcagctaatccacagcggagcccacttggcctctcttaggcaaagtaccttttataatcacacaacccaggagttattaaaagaatgtgtgcctgctgagcttttagctctaaaaatgtaccttttaaaggaaacctcaaacctggcctgataggaagtctgggcttggtatggtcgctgtccccatgggatacagctggggaagggggtgttctrgttggtaaacataccaattttgca

SEQ ID NO: 906284 - DNA, 606 bp, Homo sapiens
gaaagacagcctgggacattaccagtcayggcacatgagcttatttaggaagaaatgatacttacacttagacaaagcaattcaaaccaaagattgggatgcacctacagccactgttttactacacagtgtctcttggctgggcccagggacgcagggctggagattggaattaggtagcttcaaattgattcttctgccttgagttttcttttgcaatagcagtagcatttgtttgttaggtcccatgaccacctctcatttcattctcaaaaggagcctatgattcaagagaacagaggctcaaaggggtttaacaaccttcccaaattcacacagggaggaagggacagagccaggactagaggttgggtttcctgattgctgacccacagcagctgctgcttcttgggagcctgtggcttccccgggggacgtgtccttccccaggagagtgtgggcatgaagggattcttcccgggacagaagagcatcatccatgtgttcagggagctccttccgctcctgcttctgtatctgcttctgctctgggagggcagggtctccagcgccgtgcttccccagcatggaatacagggtctggca

SEQ ID NO: 906285 - DNA, 664 bp, Homo sapiens
gacctgctatttggagattccataagctaagtttctttgttaactgtttgtgtagtagcttgacccttaggcaggttgggaacacccagcccagaaaacctgtgtaatgagaattaggagcaatggagatagagtgtaaactcttagcaaccagatagtactcattgcaagccacttctcccatcttcacaaatgattttgatcctcaaaggtggtccaatcccacctactttactacattccttactgtattcaccacagagatgtctggctccaaatatgtgaatgctgcctcaaagatgggttctaataaatggctctatttagacaaggtgaagattaagattactttggcattcttatatactcaactcttaattatccacattaataaaagaatcaaggggataagagttcaaaattaaggataatacaaaagtaatttatatttggctttagtattcattatgtgattttgagggtaagcaaattaactttctaattataatttggcttttcagaatgagtttctattcttctcaattagctcgtgttgaaagccagctagtggtgtgctagaagtcaaattaaatttgacctggaatttataagtttctgcaaatggctmacccataaattatcaaagtcaattttttctgcttca

SEQ ID NO: 906286 - DNA, 587 bp, Homo sapiens
aagtgtgcttgacatgttggaaaaatggagtcaggccgggtgcggtggctcatgcctgtaatcctagcactttgggaagccaaggtgggtggatcacctgaggtcaggagttcgagaccagcctgaacaacatgacaaaactctatctctactaaaaatacaaaaattagccaggcatggtggcatgtgcctgtaatcccagctacttgggaggctgaggcaggagaatcacttgaacccgggaggcggaggttgcagtgagccaagatgatgccagtgcactccagcctgggcaacagagtgagacccttatttccaaaaaaaaaaaaaaaaaaacggagtcagtgtggctagagaggttaacacagaggaaagaggtgggagaagctggcgaggcagcaggggacagaggatagaacctagaaccttgaaaccatcatgcactggccaggataggaagccatgggaggtggtaaacggggagcaagtcatctgacttgggtttctgctatgtggaggacaggcaaagggggaagcagggagacaggagtctatggcagtaatcrgccgagagatagtgggggttt

SEQ ID NO: 906287 - DNA, 544 bp, Homo sapiens
tctgtttttattttatagttactgtagcctttcatatttctccgaaagttyaaattatatttattttaaaaatcatcttctctcttccggatgcattttgtcctgaagagttgcacatgctgcctctgtgtcatggtgcttgtgtttgctgcttctcaggcttgtaaacatctccctcaagcctcccagctctctcctcctccatggtcggcttattcagtctccacttgtattcaagcccttctttctttctcagctcaggatgttttcttgttaattgccccgagaagtagtcgtggtggtcatgagccattatccagatgctgctgcctcccaggcccagccccaaaggatcacatgcaaaacagaggaaatgcactgcagtgtgttatcaagctgggaccccagtccagagacagatgggaaagtcggcggaggtgagggcagatgggtgtgaaccggagatgctggtcttgattcccggcctcggcttcctgcacctgtcggcccacacttctgtgcactcccccatctcacctgatag

SEQ ID NO: 906288 - DNA, 588 bp, Homo sapiens
ccagcctgggcttctctcctttggaaagaggcacagcatggctcccaaaaggccaactacaagtcaaaggctatgcatcatcatgctttgacttttcaccatcaaaattcatctatcagtgagacacagatcatatgactaatcttgtttgatttggcaatgaagtgaaatgtcaataggcttcctattttgagtgaaattattaaatataccaaagggaatattacatgtgtgttagtcatcccagaataaagatgagcatacatccctgaaaacttcaactccattaatgggataatggatcaccagaatattttatatttcaaatacatactttgttcacattcttgcttcacttggagaattgtgtcactgttgcctaagtcttgggtttcctttactccatgcctggattctccattgacactaatgggaatttcaccttccagcacaagacaatatatggaactaaaatgacaatagcagaaggaaaataatacattttgtacattgtgctacagaatattttyttgactgtttctgttatagtcattgactattgctaagaaagatccatttggaaaccca

SEQ ID NO: 906289 - DNA, 636 bp, Homo sapiens
tattgatcctttcccataaagagagcagatgctgggagagcagatgctgggagaccaggcataggagaaacatactgcacacatccttgtaccttttggattttgtaccatgtgaatgtatttcatattaaaaagtaaaaataaaaactagactttgaagtatagagatacctagataatcttagaaatgtccctcaatctttggttccccagtttcttgatttgtaaaatggggaataaaatatgcataataataacaatttatatttctatatataaattacaattcagatatgcctcacatgagaatcaactttgataatgcccatgaagggcttacacaatgcaggacaaatcatttgtgcacaataagtgctaactatcatcattatggtttcttgttggaagggatagagagtagaaattctgtttgtttcaaggaatagacccttgaacaaggttctggcattcttttcggccccaggaaggcttgcatacaatgaaccttctgctgaaagatcttggttcttcatttcagctgtctttgggacgttcttgcctggaacttgcaacaggccatttgcaaggtgcccacrtactaaaactggaaactgggagaggattcctcagctttgg

SEQ ID NO: 906290 - DNA, 607 bp, Homo sapiens
tgaaatattatttgattcatcattataatagaaaatatttctaattgyagaaacccagcttggctgggcgcagtggctcacgcttgtaatcccagcactttgggaggccgaggcgggtggatcacgaggtcagaagctcaagaccagcctggccaagatggtgaaaccctgtctctgctaaaaatacaaaaaattagttgggtgtggtggcacgcgcctgtaatcccagctactccagaggctgaggcagagaatcgcttaaacctggaggggcagaggttgcagtgagccgagattgcgccgctgcactccagcctgggggacagagtgagactctgtctcaaaaaaataaaaaaaataaacaagagatcaagaccatcctggccaacatggtgaaaccccgtctccactaaaaatacaaaaattagctgggcatggtggcacgagcctgtagtcccagctgctcaggaggctgaggcaggagaatcgcttgaacccgggaggcggaggttgcagtgagctgagatcacgccactgcactccagcctggcgacagagcaagactccgtctaaaaaaaaagaaagccaacttaagtgcccataatgg

SEQ ID NO: 906291 - DNA, 596 bp, Homo sapiens
gacattaatcttcaggtagaaaaactaatgtcactttaaaaataaaaatttttgtrctaattgcagattcaaccatgctaatatttcatagaactttcatttggctaaaagcagagtatctgttacagcattactatatgaaggatgctacatagttttctactccctgaaaatagaaaaatggtaaaggagcctaatttataccaggaaagattaaaaattaaagcactttctatctaataaaaatagcaagaagccatcctagatgatgtctagtacttttttcaggcctgttaggctttgaagtgacaaggaatcgtaaagacattcccatagttatttctcctagcattccggcaaaattgcatggctattgaatagcaatgtttaaggcttttacaaacaaaaaaatacacagtttttctatgcaaggccctgagaaataattgcacatcttaagtaatttggctttgaatttaaagtagtcattaggaccaagactttctattgttgcattagtcagtgcgaacagcgcttggatatgacaggtgtataaatcaccctcgctgacagcaccaacagcatgtgacttacaa

SEQ ID NO: 906292 - DNA, 596 bp, Homo sapiens
gacattaatcttcaggtagaaaaactaatgtcactttaaaaataaaaatttttgtgstaattgcagattcaaccatgctaatatttcatagaactttcatttggctaaaagcagagtatctgttacagcattactatatgaaggatgctacatagttttctactccctgaaaatagaaaaatggtaaaggagcctaatttataccaggaaagattaaaaattaaagcactttctatctaataaaaatagcaagaagccatcctagatgatgtctagtacttttttcaggcctgttaggctttgaagtgacaaggaatcgtaaagacattcccatagttatttctcctagcattccggcaaaattgcatggctattgaatagcaatgtttaaggcttttacaaacaaaaaaatacacagtttttctatgcaaggccctgagaaataattgcacatcttaagtaatttggctttgaatttaaagtagtcattaggaccaagactttctattgttgcattagtcagtgcgaacagcgcttggatatgacaggtgtataaatcaccctcgctgacagcaccaacagcatgtgacttacaa

SEQ ID NO: 906293 - DNA, 648 bp, Homo sapiens
atcattcttaaaatacatattttaygtatttataattctctataatacagtctaatcttatctgtaaaatatatttataattctgcaaagcactttctatgtcaaatcattccctgggttataaattctgtgatacttgaatctattaaattcctaaactatggtaagccctaaattggagataattcagcctgattctcagccctgaagatagaaataatgtcataaactcttgagaagtccttagcagatttgcagcaggcattggtggtatgccaatgaaagcagaatgaacctacaccagtgattcaaacctgctgaggcttaagggcagaggggagcaaaggatagtctccctaaaactctttttcctgtgtagccagtgttttgttgcttactgtaaatcagtgcttttacagacagcataatggctgaaggaggccaatacttctggcttggttgggactaagacaggccacttcagagaatttaggaaaaaagcaaagaggtgtttcagtagccacccaactcacaaccctcttctcattctctctcccccctctatctcctccagtctccccataaaatacattatacgttacagcatatggaagaaaaaaatgcacacaatgatggcttttcttgtta

SEQ ID NO: 906294 - DNA, 577 bp, Homo sapiens
aactcctgaacattccctatctgtaaatgttccctcccaccccatccatggctttcctcaaaaacaacatgacctggccgggtgtggtgactygcctgtaatcccagccctttgggaggctgaggcgggtggatcacctgaggtcaggagtttgagaccagcctggacaacatggtaaaaccccgtctctattaaaatacaaaaattagccaggtttagtggcatgtgcctgtaatcccagctattcgggaggctgaggcaggagaactgcttgagcccaggaggcggaggttgcagtgagccgagatcatgccactgccactgcactccagcctgggcgacagagcaaaactccatctcaaacaaacaaacaaacaaacaaacaaacaaaaaaaaaaaacccaacatgacccatcatgtaaggggctttgtttttttgtttttggtggtgcgttgtgcagagatttgagatgaaggttgaaccagcaaaagtttttatgaccgccttgtcccagcatgaagaccagagggccagagccacctgctgacatctgctgagtattgcttgaagtgcctc

SEQ ID NO: 906295 - DNA, 637 bp, Homo sapiens
ccactcaccaaaatttgtgcttttgaaaagtctgatctcatctaccctaaatgcttaacacttctcttgagttctccaaagaatttttgaaagttcttatattaataatatgtaataaaagagcaagataataaagaacaaaatacaggaccaagtgggtgggataggtaggggttgaggggcggggacataagcagatctgtataatggaactcagccaaaggtttccagcttgttctctgaacgttgtgtttgtatttagtcagacattattcccacaaggggaattgtttaacaattcatcagctctcttctcctctataattgaagacctctcaattgtatttcagtaaagtacagaatctgaggaagagaatccttaataggcaaacctagatcagtataaaagaaatgagcaaggtaaccggcacaattataagtgtgatttttatgaaacgagttctgtagtcctttgcttatattattaaaaaatgcctttgttttataaactttgtagttaaagtgtaaagataacagacatcttataagktctaaatatccatgaaaccatcacaacacctatattatacatgacaatattgcactcgtattacagaaaatggaatgaagaaataat

SEQ ID NO: 906296 - DNA, 585 bp, Homo sapiens
atagctttgttcctttctcagaaacacgtactggctcaaaactgttgttatattaactcttaactaccacatctattctaatgtttytctaaactgggtccaccctgcttatcaatccttatcacctaccaaatgtcccaatagtaccatttgatcatttttgtcctcactttacttatgaaaactctttactgatgctcatttggcaaaaaaaaaaaaaaaaatctatattaacacttgttctccatatgaagttgatccttataataacgtcttgcttttcctattttcacctggaaacatcatgcttccctacacaaacactaaattccaggtgtctagagatgataacataggaagcaatatattgtagtaattaagattcaaactctggagtagactgctcaactccaaattccatctccagcacttaaaagttatatgagctcaggcaagccttttaacttctgtgtcttcgtgtccatcattatctgtaagatggggataataatatctatttcatacagttgttataagaatcaaatgagcttctacatacatatacagtgcttagaggtggacatg

SEQ ID NO: 906297 - DNA, 652 bp, Homo sapiens
attctctccattccctctctaatgaaatttcttgaggctacaatttttctagtgagtactatttcagccataatacatatgtagatttttgtgtgtggttcatcaactacgatttcacttcactttcagtttacatgagtgttttaacttcccaaggtgttaggtattggtgtcgttttgttactgaggtctagctctatactgggagaagtgtattaatattttttactctaattataacttcatctggctctctttgtatttctaagatttatggtacaagtatcaagatgaactattaggagtagtatttatgtgaattctatgtattaagatgaatatgaccattattatatattctttgaggactaaaccttttaccaatataaaatgtttcttatcttttttaatgcttctttaaattcaaccttgcctgaaggcctaatgtttacattttcctgtcttttttgtttgtttgcttaacataagcctggtatacgtaggtttatcctctgatttacaactattctgtgtcattttattttcaatttttttattgtaagcaatgcatagctcaatgttctkttttaatccattaggaaatgtttgtcttacattggaaaaattcaattattcacataggctgtggtta

SEQ ID NO: 906298 - DNA, 616 bp, Homo sapiens
cacctgcagagatccattttttctgccactggagttaaggacaacagataaatggttttaatggcgagagagagagagagagagacttgccaaataagattccagtttctgaactcacattgaagctctcaggtyggtatcaagataaaatacttcaatgtggtgggaaaagaaagaacattaacctgtatttgggtttctgtttaacaccaaataccaaaagatcaaaaataccaaaagatcaccaagttttaaaaattcaaaatggaatgctcaccaccaacgaagatctctgctccacatatttgaatttcatcactattgatacaggccagtttgcagacaaacaaggttgtaccaaggggaagacctgtgacttgagaattgagggagtggccatggtgaaaattgattcttctgtcaaacttgtacaggattaacttgttacgtctggaatagtgaaagcagccttgtctgggcttcaaagagcatgtaatattgacagtggatccaagtaaaattacatgggaaggcttcacagtcacatcgcctctcttgcacgcatctgcaataagatacagatgcaatatttagttggtgataataaacccatttc

SEQ ID NO: 906299 - DNA, 652 bp, Homo sapiens
ggaggagtgcaggtgcctgagccggcagggctgggaaccacagagaccctagcaaggatagaggagaaacggcagggcctcaccgtccttgcagcgactcttttggtcctgtccccacagatgccccattggctattctggcttgtcctgcgagagctgtgatgcccacttcactcgggtgcctggtgggccctacctgggcacctgctctggttgcaattgcaatggccatgccagctcctgtgaccctgtgtatggccactgcctggtgagtagtgccagcagacacttgaacactaaaataggagaagggacaatgtgtgagattccctgtgttcatgagctcagcacaagcctccagaatgactgtcatgactgccagatgaactatcatgacctctggatgcaataacagaaatataggtcaggcgcagtggctcatgcctgtaatcccagcactttgggaagcctagatgggtggatcacttgaggtcaggagtttgagaccagcctggccaacatggtgaaaccccatttctactaaaaatacaaaaattagccaggcgtggtggcgtacgcctgtaatcccagctactcaggaggctgaggcaggaaaatygcttgaacccgggaggtggaggttacagtaggc

SEQ ID NO: 906300 - DNA, 579 bp, Homo sapiens
taactcaatttagtcccatgtgcataaatttcttgtgaagacctggatgaattaatggttccgtgttctatctgaggtggttgtgaacatggaattttttctaaatgaagaatgaaaatcaaagggttaaaaacaaataaaatacttaaattgaaatataaaactaaatactatttcggattttaaagtgagtataatttgaacaaataaaattatttaaaaacaaaaacatattagaaactcgcaaagatatattcctccaccatatctatgttaccatcctcttgttcaataatcatcttcattcatgtcttgttcatcacaaggattaaaatatgcatgaatggaaatgttatctgacatttacataatattccaaagattttggctgtattttgttcaaaaaactgaaagagtggtgattgattaatgtgcctaggtcctaatttattttgtcaggataaagtaatagacacagagaaagaacttctctcttgtttacacraagcacaagagaatattaacctcatttgaaagaattatgtaaaacaaattatacactactgaccaacacagagt

SEQ ID NO: 906301 - DNA, 642 bp, Homo sapiens
ggcgagctggtactgcctcagagtactggacaatctcagagtgaatctgtcattcaagattcttgtaagagagcctgaaggcagagcaggctgacaagagcttacaagagcttgctcttgagcttacaaaagcaggtggtataggactttttgtatctacttgctaataaatgtttccattccagcagaattttgtctaagactttctttcattcttatatctcaactgactcatggccagagcgacaggtttcacaaaggcattggcttttgcagatggtcaaattggcttatcttggttcacaacaggagaactttggtattctatattaaaaagtgactcattggaaggaatgctggggatttcctgtctattccagttcactacagtctttttttttttttttttttttggatgatttgggtcattcttctcactcctatagatttaggtcttcactatgtactaaatatctttatgtagaaataattgaatgccgagagttgtgggagaaacagtcttaccctattttttcctgcrtctgaaactcttaaagttcttagagggattttctaggaaagaaataactgtcaactagtaattaatgtgttaggtgttcactctttaatacaattttaaga

SEQ ID NO: 906302 - DNA, 437 bp, Homo sapiens
caggatgctttgtctgatatctcacagtgccatttgttcttccctgggcaggaaaagtagctcaggcttgtcaaacagccattctattgaaaacatccttaagtgacttcgtatacaatttcattgttctgaggtccactggatcaccctctgtatctgtatatacctatgtgtatgtgtatgtgtatggctaaatttacattttctatgtattccttttagtttggtctttccctctgaagtttttttttatttcttttctcaagttcatcagacaattcattgctttcctctgcatagatgctgcgaactcatagatcttgtagctgcaaacatttagaaccatatcagacagtgctataatttttgcttcagtgtaacttagaaaactcaagaagagtstggaaagtctatttatttaaccatatttttgctta

SEQ ID NO: 906303 - DNA, 616 bp, Homo sapiens
taagcttgttgcaaaccagaaacttcaaggatcccatgcaaacaatattactaccacttgcagcacgtactcatgcaggtatctaaagttagtactaagaygattaaaaacagccaatgctgctgtaattatattttctgaatccctagttgggacataagggccaatacattatagcacaatgaagctactgaaacagaatatttgacatcgaggctgtcttggaaaattgggaatataccaccttgcaataatagtaataataaaaaataacatttcttgaaaacttacattttgcaggagaatttcctaagtgctttacttgtattaatacatcaatcctcaatataaccctatgatgtgggtactactattgtccatattttacagagggaaaactgaggcactgagttgtcagtaacttgcctgagatcccacagctagtaactatgtaagtagagtcaaattgaagcttaggccatgctgaaccagaacccttgctcttaaccatcaatactctactacctctctcccattcttggcagcaaaatctctgttttaaccctcctaggaggatacttgaacttcaaatactatttccagaaatacaaataca

SEQ ID NO: 906304 - DNA, 588 bp, Homo sapiens
agagtactacaggcagcacagaggatacgacatggtttgtggcttcgaggaacctcaatctaacaggaagaaggactctactcttggayaataaagggcaagatcagacttgcacaaatgagcggcgaaggcaataaatgctagagctggtagttcaaaaggcactctgcagacttctcattcctcttcctcctctgctattgtgaagttctttatttttattttttaatctccctgctgcttaaagggaaagcactgaagcaaagagaaagcaagccaccactgcacgcccatggctgcagacagccctttttccaggatccaacaattccctgaggtataagcagagtggatgaggacacctacagggtctcaattttgcatatgcaatttgtgcccataattattttgattgcttcacgggtcacataaggcttttcgaagcaaacatccactaattaaatattattatgcaaaatgtcttgttctgtgcaggcttctatatgtgaagtacatgctaccaaaaaatcttatatcaaatcaaacatgtctgcactggtttcattaagaccctttaagagagtggta

SEQ ID NO: 906305 - DNA, 640 bp, Homo sapiens
agtcactgagatttggagattgctcgctataacaacataacctrgcttatcctgactattataattatcttacagttatttacatgttacagatggagagaacgtttataatgattcaagtttctagatcaaagcaaaataagttatttggccttaacaactggaataaattaccacattttcaatatgattgattatatgaaggcctaccattaatgtgtaccaaaacccaaattaacaaccaaacaatgaattcagtaaatatatcactcacttatttaccatttataaaggaactatgacgacagtatacttaacagatggtgtttggaataggttggcatgagttgtatatactgtttgtggcattggattttggaaatcagatatcagttcttccatttaatatttatgtgaccttaatactttagattttaagacatacttaaaatctctgaatctcagtttcttcatttgtaaaatagagataataatacaaactttattaggctaattgtaaggattaaatgatccaaagagtgctgatcagagtctctagcacaaggaaactttcaatagactgatcattgatggaaattataatggtgggaatgccaccaaatagaaccttggtattaga

SEQ ID NO: 906306 - DNA, 656 bp, Homo sapiens
agttgtctggcttcttcggttctagtggttctttgctgctgctgttgcacatcactcatggcataaggaatagttttcagagttcctgtggtccctcacrggtcttactacttcctggacaatggtttttagaagtagggcatggatcttctctgctctaaggatccacaggcctccctctttttctcatccccctaccctttccatccctgaggaaacttcacatttctctttatgtttaagatacttggtctatgtctcaaataccttttctaagtcctatgcttttatagaagaaaaatggatgtatttgatttactgtcgttttatatgtctccttcaacttataaacatagagctactaacttgagaagggaaaggtaatgaagaaaaataaggattaaaaatatatctcttaatattatccctcaataatttctgaaataatgctataagggaaatccacggtgacttgagaacagttaacaaaggaaccaaatttaatttgattgggtggtaggtcctatgagagggagcttagagagggttcttctgaggagatcagataggaactgggatctgaaagccatgtagagttaatgttttgaaggagagtgaggagtggggaggagggtgttctcaacagaaaggataca

SEQ ID NO: 906307 - DNA, 567 bp, Homo sapiens
tatcataactcaccagaagacccaataggcactgtgatgcaaactattattgttcagtgaatggactctgatgggggattcttagaggagggattgccaccatcactctggctattactgaccagtctcctagacctaacagacaaagcctcagaaggaacatgatactgcctaagtcttgattgtgagaggacacctgttctttccagggtttttcagagttgcacagtccactaccagggattggtttagcccaagcagctataaaggtatatttacctcctgctcgagtcaatttcatatataacctttaccacgtgcaaggcatttgaaatgaggcattagcagaggatagaaatgaataaaatacagtctctgcactcaaaaatctgctttttaacaaaatatgtaactataatacaaggcaaagtgaaattcattctaatgacattctcggagaggagctacaggaggacagagatttgagatccttaaaatttagtgtatcacatggaattaggatgratcactcagttgcaagcaaaagacaacatctctagctaatgt

SEQ ID NO: 906308 - DNA, 536 bp, Homo sapiens
cagcaataaatttagatctatttaaaaataagatgtctgagtccttcggagaaaagtgtggaagtgtgatgtggacattttccacataggatacatgtggaagacaaaggccccaggtcccaggacctctgagggaatccagaggctgaaaatgagattaaaatgtgcttatgtggcaaccagaccaccaactccctgtgcagtgaggaaccaacagccaggatcctgctccctgggcaagacaccagaagttccctgtttagaaaaagacagcaaattctctctcttctggctttggaggtctactaggaatgactggtccctgcctgtggtaagctaaataatgccactccccttcccagagaagttcatgtattaatccccagaagctgtgaatatgttactttatgatgtggtttgkctctgtgtccccactcaaatctcatcttgtagctcccataattcccatatggtgggacctggtgggagataattgaatcctgggggtgggtcttcccatgctgttctcctgatag

SEQ ID NO: 906309 - DNA, 558 bp, Homo sapiens
atgaaaagcctgtgtggaagagtggaagctgtagccactaggaacgaattctatatccctggatcagccatccatttcgtgtgttttatgatcacacatagatgcatgaggtatctacaataatgctctgtgaaagaagcattgcttttctggaaaatgatgtgagtatttgaaaccactgacaggagatattcattgaaaattcctgtgatatgttgatatgtagctaatgtcttaaatccatatgagtttttaaagaattctaatttagacagttaagctagcaaacatgaaaattgttccacatatggaatgtatctttggttttaatatatagcctaattttttctttttctattttccaaataagaaaaaacatgttccatattacatgtataataaaccaatatatttataattataatcttagtttgtgggatgttatattttatacgatatattagtaaaggtgtactactaatttcagatatatttgacgggaaagtttaaaacttcagatcatgtcaagtktgtaggagggtaaaggaacaaatgcct

SEQ ID NO: 906310 - DNA, 408 bp, Homo sapiens
agaaggaacaaatcctttgctgttctagcctatatgtagtgtctatcagggattcaactagcaaaagagaaatgcagcttacacattstcagccccagtatcccaaagtggaatatagtaggacatcgttggggctggaaacaatagcttaaaaactggcacagtccacctcttgtctatcaggcattgatacacatttaccctcccatacataattaaatttcacacaataacaataacaaacttatgctagttttttcaaaccaagattatttcattctatgcacatgaagaggtaactaatgtcccaaaagccatttctgattaattattcctttttgattaatagccatattatccatctctgggagatgttatataaacctcaaattttgtcatggtttatat

SEQ ID NO: 906311 - DNA, 588 bp, Homo sapiens
tggattttataggttattgtttaaagttgtatgctatatctgtcagtgtggaagatttaaaatctcactctttcattaaaaaawgatattaatggtgtgcaattcagacttcctgtctcaaagggaacagtactgatgatcttcatactgaatcagagccattcaatagcataaacaaaaaggaattactacaccatctacagtgctctaaatgatataaaataacattgtattaaacaaaaacacaacacaattttttttttacttcaaccaaagctatccatacatattctattcatctcttgccatatagataactttgtgagtttctgcttacatatgaacatattctttctatgaggggaaatgttctatttttatggagccatggcttggtatatatctgagaaaactcatgtgctagcaagtgcttccatttcactttttccacagtatctaccacagagctgagtacagactatctacccaataaatatttgtagactaatgaataaaataatttgtttgtggtagtatcacgtggacctcaagctctatttggtgtgctttcctggactatatatttgc

SEQ ID NO: 906312 - DNA, 592 bp, Homo sapiens
aagtgtcatatatgacaaactcagtcaatagcatactgaatgggcaaaagctggaagcattctccttgagaaccagcacaaaacaaggatatcctttctcatcactcctattcaacatagtatcagaagttctggctagggaaatcaggcaagagaaataaataaaacctatttggatacgaagagagggaatcaaattatctttatttgcagatgacttgattctacatccagaaaatcccattgtctcagcccaaaacttcttaagctgttaagcatgttcagcaaagtccaggatacaaaatcaatatgcaaaatcacttgcattcctatataccaaaaacagacaagccaagagccaaattatgattgaactcacattcacaatttctacaaaagaataaaatacctaggaatacagctaataacggaagtgaaggaccgtttcaatgagagctacaaatcactgctcaaagaaatcagaggggacatgacaaatgagaaacattcyatgctcatgaataggaagaatcaatattgtgaaaatgaccatactgcccaaagtaatttacagattcaatgctattcccat

SEQ ID NO: 906313 - DNA, 607 bp, Homo sapiens
aattaagcaaggctgagatagtggcagtggccagagcctggagcaagtggcagagaattaaactagaaaagcatagaatttggacccacactgggctagctgtcccatgttttgaaaattctaggagtcaactagaaagattatgtgcaaaggcatggaagattcaggaaggagaaggaacctacgttcgtggatgtgtgtgcagactttaaggttcatgaaaatattctgtcaacgatcacatccacaatctgttgactcaacagttctcaaagaaacttaccttatccattgggactttttctttctagctcagacacactgctgaatacactacggcaacaacagtggaaatctaaacagattttcaaggatgttcttttcctggggaggagaggaaggcaatagagggaaagagaaaaccacctgcctggattgggtgtgttttgagataagcattgtctaggtcagcagttataacattagaatcctagactagcatggtaggaacgacctctgaagattgttttcaactcattcacccaaakgcacacaaacacacacagacacacctgcttacctattcacacacgaacaaacatgcttc

SEQ ID NO: 906314 - DNA, 712 bp, Homo sapiens
attcaagacttaatcacttccccaaaagccccacttyttaataccgccatgataggaattaagtttcaacctgactgatggaggggacaccatcactgaaaccaaagcacttgctaacaactgatcttcccaaagagtttccaagaatgtaagttctctcaagtgagatactcaacgcaaggtagtattttactttggatggggtggcctattttcatctctttttcagattagcaaattctattttagctctcataatttgaatgggagctgatccctcccagggtctcagtgattcagcctctttgccgcacactcatatttctggcctgaaattcttttgaggttgaagcggatagactaggtttcctctcttttgattgaaggatggaaaggctgatgacacacaggccaggtgacagcagagcagctcagcacaagggccgaggctggctgcagctctgacgggcatgttctggacttcagcaagtatggaacctccctgtgcctcagtttatacacttgtaaatgggtggataataatggcactgtcaatcaggaatccagactcaggtaaggagagactttatccaaaaggaccaatgccattgagggaggggctgttgctgtgggggatgcttcgtccatcagacctgcaagtgtggcaaaggccagaaagaaagggattttctttaataggaaggggtaggta

SEQ ID NO: 906315 - DNA, 622 bp, Homo sapiens
tcaatttccagacttgagccagttcacataccyagaaccccttgaatgaaggggagtctgtgtccccttgagtaaggaccccactacactaccaacaatttatgctgttaatctttctcacattcttccccaaggacccaaggagacccccggccttttaccagggtaactttgcattggggaaagggaaataatcagacatttcggggaccactgacctggctctgagctgacggtgattccagggaaccagaaatgtcactgttgtcctccagttaaagtaggggcttatggaggtcaggtaattaatagagttttagctcaggtccgacttacagtgggtccaagggtccccggattcatcctgtggtcatttccccagtgtcagaatgcataattggcagagatacttagcagatggcagaatccccacatcggctccctgagtgaagggtgaggactattatggtggggaaggccaaaaggaagtcagtagaactgcctctacttagaaaagtagtaaatcaaaaacaatatcacatccctggagggattgtggagataagtgccaccatcaaggacttgaaagacgcaagggtggtgattcccaccacatctccat

SEQ ID NO: 906316 - DNA, 578 bp, Homo sapiens
aaagactccatttctaatagtccagaaaacattgctagtccatgtcataaacagcttaagagatatgcaaacatctagctttgacactcctaatcaacactgataaaagacagggaacttggtgactctgacatcacatctttaaacgtctgtggaaaatcaaggcctctgcttctagcattgatgagtaaagtgatcgataaaaaagataagctaagagattcacatttcagaatttcaaaattcggcttcacataaaaagccttagagcttcttacagcgctctgagtgagaattatatctcctatagtcacggggctgaaaacgctagaagtcaaacacaaaccctcactgtgaagttggctgagttactatgaaagttgaactttcagcctggcaaggtacctactgtaaatttacagcactgtaccgagaagaatggaactctgtagagtgggttgggaacattttgagagaccatgttgaggctggagacattgagctctgaaattccgaygtcttctttgccagtagacctgaccccctactgacaccctcttggcagtagcctcttcacc

SEQ ID NO: 906317 - DNA, 650 bp, Homo sapiens
attccctacctcaccccacaaccaaggcagggaggcgctgtccttgtgcatgcagagcccccagagaggctctgagctcagaggctcccctgtgaacctgtctttgttgggcatggtctggagggggactctgttcacagaatcatctacagcagggcagtaggcagccagggctgcctctccaggttttcaacaacattggctgttgtctaagatactaaatacataaagtggatagtggtgttgggagactgcctaagattcacaaggacgtagagatttcagagtcaatagcaacgttctaaagttgtatatccacagcctcattcaaggtacagctgaaaggattgctgtaggtgcaaggcatgcacgtctgaacttctttcacctcattatagagcagctcagtgattaaaagaacaggccctgggccaggcacaatggatcacgcttgcaattcctatgctttgggagactaaggagggtggattgcttaaggccaggagttctagatcagcctgggcaacaaagagagacctcctctccattaaaaagaattaaaaattagccgggcatggkggcttgcacctgtagtcccagctactcaggaggctgagcggggaggatcacttgagtccagcagctcacac

SEQ ID NO: 906318 - DNA, 519 bp, Homo sapiens
ggccctttctatagcatcattaatccattcacaagggcagagcccccacgacttaaacacctcccattaggcctcacttcccaatactattgcattagggattgagtttccaacacatacattttgaaggacacatacattttgaaggacacattcagaccatagcagctataattcagattcttaccccttaaaccctcttatgcatggcctgctttttctttgtaagaggagcgtgaagtttcatcattctctatatttgattcctctgttttcagtacagtgcctcactcttgtcattcattgcccctggtgtcaagtatcctataataaatttatccagaaaaacaaatgtctcttctcttgtttgagtacacagtaagtaatcacctggcttcstaggataaggagggaaaaatacgattgtaatggacatgtttttaatcctgttcctcatacctactgagggaaacattgtggattgaccacgtaatctcatcataccctccttctgttagg

SEQ ID NO: 906319 - DNA, 649 bp, Homo sapiens
cccactgctaacaactccattgccaataaggtttagttctgcgatttttaaatttttcatttttcctctatcattctttcctagcccatgctctgtgcatccctcttagcactgttcttgttttcagycttgctccctcaaattcattcccaaatacaaatttgcttataccactctcccattttaaatgcctctgtgcatttccactacccctagaatcaagtccaagttgcccagatgcctgatgcatggtgtctctccactgtccccactgaactcttcaccagagctctcagaagttcactcctgcctgacactggggcctgttagagctttccttattgatttttatgggacgtggtattggttcaaatagatgccatggcaagacaggaaaaagcaattattgaaattcttgggactcaaggaatccgtgcaccagacattcctcattgcttgggcactatctttagctcagtcacccatttggcattacaatgtttgaactgatttgaggactgcgaagtcccattacttggtggtcaatgaggtactaatgatttccttaaatcctagaacctgaactaatgagttagcggcaccaacatgccacttacttttgacttttcttagattatctcattttgta

SEQ ID NO: 906320 - DNA, 591 bp, Homo sapiens
ttattcaacatttttatacagagtaaatcattaagtaattaaaaccattaagataaagtaggaattacatttttgctatgctagttaatgtaaggtattggttctccaacttcagtgagtttggagtagaggccatgttggcatgttaacaagtacatgaagatactccaatttagatagtccttaaacacaactgagaatactgccttaatatcttactatttactcatcaaaactgaaaagattatttactttttttcccccaggtattgatgagcaattaactctcagtgaacaaaggtaaggaaatggaagctgggagctgggaataagtcaaagaaaacggaacatcacaattaaaatagaattaaatcctcattagcaaggaagattaaccatctccagaatagactgtgattaagaggtagcagaacctaagagttatgcctgatcacctcttggaagaactcagtagctggtgagacatctgctggatcaattgtcagcttcccatcctcacagataccagaaggggaagacaggaatcawcagaaaaggattccctaagccagtcaagtttcctaaggctcc

SEQ ID NO: 906321 - DNA, 479 bp, Homo sapiens
caatcctcaaaagaagacatacaaatggcaagaaggtgaatgaaaaggagctcaacatcattgatcatcagagaaaagaaaccccaaacttcactgagatatcatcccaccccagttaaaacggcttttatcccaaagacaagcaataacaaatgctgacgaggatgtggaggaaagggagccttagtacaccattggtgggaatgtgcaacccactatggagaacagtttggaggttcctcaagaaactaaaaatagagctaccatatgacccaacaatcctactactaggtctatacccaccccctaccccccaaaaaaagaaagtcagtatatcgaagagatatctgcactcttatgtttattgtagtactattcacaatagccgagattcggaagcratgtggatgtccatcaacagtcgaatggataaagaaaatgtggtacatatacacaatggagttctagtcatccataaa

SEQ ID NO: 906322 - DNA, 613 bp, Homo sapiens
gtggattctcaattaatgttgattgatacatctttataaaaatttacatttattatgtcagctgagtaatactgcagccatgcagttagatattattcttaagttttaaatattataaactgaagtttggctttgaggactcaaaccaggttagagcgagggctaggtccagagctaggtctcaaatttaagttctgttacttaagggcaaatgctctttttgctgattcatggataaaaatgttcttagatctgtggcattcatcatcagaggcagtgttcacattttccacatttgttggagaccctgggcagctccgaaatggtgttctcactacctgaatggtagtgaatgatgcttcctaactgaaggggaaaggattgatctggtgatcgtttcatattaggccccattattgaccaatactcaaccagcccgattcaagtgctgttataaatacatacagcaaaatgagtttcattaaaagactcttgatgctccttacaggggcctgatactgaatcccaggcaattatcaaaacttgacttcttttagaatcacagaaggtcaaagttggcagggyccttagagctaatccgtgccaccatcct

SEQ ID NO: 906323 - DNA, 669 bp, Homo sapiens
taaatccatcacagaagcaccaagtgattaaatgaactaatttaccagaacatcaaattgggctcttaaaagtgattttattttgtstaagcccccataatattcacagagagatgttcatttcccacaggatgaagcccattcttccttaagaggaatcctggacagataatacaaacaattaaacggaaataaaccattttaaccaccccctacccccgacacccccaacctctgcagttcaaatgctccagccatcaaagctggccagcccaaaccagctgcttaagatcatcctttgaggtacaatgaactagggctttgttagatctggagtgagaaaggatttcaaagacaagtgccctgcttgggaaatgatttcctgatgacctcttcaaattacatactttttctcagaatacagttaggtcctagtccttattccctccactatgaatctcccctaaaccccagagtgaagcatggctagaagaaaatgataagagaaatggtgagatctccccaacccatgacaaaatttcactgattaaccactgcctaaaaatataaaatgaactagaaacaagatgtcctccatttctgactctgcacattctggataacttgattctgtgtctttatatcttggtttaatttcaaaaaacaaaa

SEQ ID NO: 906324 - DNA, 626 bp, Homo sapiens
agtcataataaagtcagttagtaaatcaagtgcatttgatccaagtttaagtacaaaccaatatatatataatatacattatatgtatgatctcaagactctgaagtcattgcatgagcatcccttctyggcaacatcagagtgagatcactgaggtgctgtcattcatgcacacatttattcaacaaacgtttgttgaagatgtactaagtgccaggcactgtttatgataaacaggagagtctactcaaagtaatttcacatcctattaggaaacaggaacattaaataaatagacaaaaaaggcaagataaactcagtacttacagtgaccaagaagacactgagttttaaaaagaggtaagagactatatgggggatactggtttaagtcgggtgctgagggaagatctattcaacaaggtaatgtttgagctgagaactgaattatggaaaggctccaaatgcaaagagctaggggaagggatttctggtagaggaaacatctatacaaaatctctaatatatgagtaaatgggacttttctgaggagcatacataagccagttgttgggggggcgggtaaagagagtgaaaaggagagaggtgtaagctgagtctggaga

SEQ ID NO: 906325 - DNA, 626 bp, Homo sapiens
agtcataataaagtcagttagtaaatcaagtgcatttgatccaagtttaagtacaaaccaatatatatataatatacattatatgtatgatctcaagactctgaagtcattgcatgagcatcccttctcggcaacatcagagtgagatcactgaggtgctgtcattcatgcacacatttattcaacaaacgtttgttgaagatgtactaagtgccaggcactgtttatgataaacaggagagtctactcaaagtaatttcacatcctattaggaaacaggaacattaaataaatagacaaaaaaggcaagataaactcagtacttacagtgaccaagaagacactgagttttaaaaagaggtaagagactatatgggggatactggtttaagtcgggtgctgagggaagatctattcaacaaggtaatgtttgagctgagaactgaattatggaaaggctccaaatgcaaagagctaggggaagggatttctggtagaggaaacatctatacaaaatctctaatatatgagtaaatgggacttttytgaggagcatacataagccagttgttgggggggcgggtaaagagagtgaaaaggagagaggtgtaagctgagtctggaga

SEQ ID NO: 906326 - DNA, 600 bp, Homo sapiens
agattttgacaacagaacagctcccaatgttcacaagagtactcagaaaaactaacaatagcagctgttttgcaaaaagtgcaaaagaaggttgaaagaatgagaacaacaaacagattgtgaaaattcrccacgttaactcttggaatagaagctgtaaatgtttcgatacaaaggggactcctctacaattcatctgcttatcctttaggaccagagtacatgacaaaatgacagtgttcaggaaagaaaaaggcttggacaaaagtgcacagaaatggggtgaaagaggaaggcatgtgtgaagataggtttcccttgaatttcagaactcatgaacccatgtaattgcaaattgcattcctgactagcaataacgtaaagaaacacagctgagatataaatggaaaaaaaaatgaaatgtaaagatattcacatttgctgaaaagtaatagcattcattctcttgccttatgtttataactttacgatagaaaggaaaatgatggggaatattttggggaaggatctagaatttattaaacatctattgaggaccaggcacagtgcttgaaactcatagcctctctattagtattc

SEQ ID NO: 906327 - DNA, 697 bp, Homo sapiens
tagggaccagattaaatgtctcccaatgatgtcttcaytgataattcagagtagaatggtacccctgataaatttcagtagcatcctgcccttcaccttttgtaaaacttccatctatgattatgtaagtatttgtccctgttttggttactgttcatctctgtgactagaatgaatgaatgttacatgagactggaacaactcctgtcttgttttctgctccgtcccagcacttagagtaggctaccttgttacctaataaatatttgctgaattaatgaatgaaatcctcatagtgttttccttactgagaatcctaaagctgttttctcatatttggcgacctacacttgagatatttatcaagattagatctatttaaattcttagctcatcattgacaaaagccagatttctttaatctactgttttgctccatctagtgacaatgttttaatcaaaatgtctattgtgtgagtactattttcagttttaagtgaaatgagaaaggaaacagaacatttttgccattttgtagacaggaatgacaaacaatgagattgtcagatatttaaatacagatgtgttggctccaaatttaaacttactgcttgcagcctcctagcccatcaattatactagcattttcctattgtaggccaagattatcagctacttgtagatttgtagaacaact

SEQ ID NO: 906328 - DNA, 588 bp, Homo sapiens
atcctttctaaatctctcaaaggaatactaatgcatttacagttgcacatccaaaataaaagaactactctgtttggtttttgatagacaacttgcataacaaacagaaaacacagccacaatttctagagaaatgcttattaaaaagacatacagttctaaaaaacaaagtctactaataaaaaaataaaggaacaatttttaaaagatgcacagccaagactacagagtccttgttttaaacagagaatgcttgagttgagacatattctttcaatctctgagtcccactgtttagacatcacccgtggtagtttagggaaaggatcatcttggaccttaacaaaaaccatccagcttttcactaacaattttcttatctctagctataaatagcaatctttcctttctgaagaattgcaaggtcactttccttttttatcaaaaacaaacaaatccrgttttgctgggggtactgatctgagttgggggagctactttgaaggaggtaggtttagtactgggggaggtaccaggagatcccagcttaagataaatgcccaaactccctcagatacatgagaagca

SEQ ID NO: 906329 - DNA, 625 bp, Homo sapiens
gcatggtccttagattccagaagagcctgtatgtcatggcatctatatctttgtcttccttcccctctagcttgtgaatccccctctccttaaggggaayggggatcacatcttacccacagttgggtctccaaggtctagcatagaacctgatacattgtgagcacccaggatgttgaatgagtgaatggatgaatgaacgaatggaacaacagtctgagactcaagaagatgcatcttcttcctcgtccccattgtattcccactgggtgtgtcattaaccttgctctcagtttcaatccctccttccaaattggcttaataaattatccatatagcctgatccttgtgaaatagcatgagctagcttggatggaagtgtactgagctccatgtaggagagaagatcaacccttttgcactaagacaatattattttcatgtgttactctgataatatctgttagccctctgtgcctaagggaagccctggataaagaaaggctttgtgctctgaatagcagagcaatagtcttgtggatcttaatctcttatctgtgactttattttggaaaactgtgctccaagctccacccttgtccccaagtccatgctaatgccttca

SEQ ID NO: 906330 - DNA, 589 bp, Homo sapiens
caactggaaatcctacattagaaggataaccaccaaggtgaagtagggtctataccaggaatataagatggtccaacaaggttattttgacacagrtcaaaaaggaatacttggtaaattcaaaatccatgtgatttaaaacaagaataataaacagctttcattaaactagaagtagaagtatgcttctctaacataatactgattttctttttcacatcaatagaaacatcatttatagtggaggccttcccattgaaagcataaataaggatgctcatgattactttttagtgatttttaagaagttttagtcaatgcaataaggcaggaagaaaactacataagatgaagataaacaagaaatagagacataaaaatataattatttgcagatgatctgattgaatcaatggaaaactttaagaataagagagttaaaaaaggaaacaaaatcttctctagtttaaaaaattagcctaataaattttgaaaaaagttttcaaagaactcatcaagattaagcaaaaatgatcttaaagttaaaattaaatgagagtagccataaagttttttgtgaaaaataaga

SEQ ID NO: 906331 - DNA, 615 bp, Homo sapiens
cctattttggtatggcttgcaaatcaagagttatttttattttcaagagttttttatttaaaagaatatgtaatagagatatgcctcacaaagcctaaaacatttacyatctgcacctttacagtaaaaatttgctgacccttgggttaaaataacaacctcctcagcctcccaagtagttgggactacaggtatgcactgctgtgtctggctaatttttttgtttttcgtagagatgaggtcttgctttgttgcggaggctggtctcagactcctgtcctcaagcaatctttctgcctcagcttccctaaatgcttagattacaggcgtgggccacctgtaatcctgacgttcatgtccctgtgggcttggaggctattctcatccatgtccatcctgaacctggactgatggagcagctgccatcttgaatgttgctggttgctgtgatggagacagagagggagctttaggcatcacatgcctaccattaaacctttagcccagaagtgacatatggcatttctattcaaaatttgttgatcataagttatcacgtggtccctcacaatcataaagggaccaggaagtacagttataccctgccatagggaa

SEQ ID NO: 906332 - DNA, 615 bp, Homo sapiens
cctattttggtatggcttgcaaatcaagagttatttttattttcaagagttttttatttaaaagaatatgtaatagagatatgcctcacaaagcctaaaacatttactatctgcacctttacagtaaaaatttgctgacccttgggttaaaataacaacctcctcagcctcccaagtagttgggactacaggtatgcactgctgtgtctggctaatttttttgtttttcgtagagatgaggtcttgctttgttgcggaggctggtctcagactcctgtcctcaagcaatctttctgcctcagcttccctaaatgcttagattacaggcgtgggccacctgtaatcctgacgttcatgtccctgtgggcttggaggctattctcatccatgtccatcctgaacctggactgatggagcagctgccatcttgaatgttgctggttgctgtgatggagacagagagggagctttaggcatcacatgcctaccattaaacytttagcccagaagtgacatatggcatttctattcaaaatttgttgatcataagttatcacgtggtccctcacaatcataaagggaccaggaagtacagttataccctgccatagggaa

SEQ ID NO: 906333 - DNA, 606 bp, Homo sapiens
taattttagcattctgagagatgtgtagtgatatctcattgtaatttttctaatggctgatgatgttgaacatccccagatcccaaaggctatagcctattttttttttttttaagtggtggccgggcgcrgtggctcacatctattatcccagcacttttgaaggccgaggtgggcggatcacatgaggtcagtagttcgacaccagcctggccaacatggccaaaccccgtctctactaataatacaaaaattagccggacgtggtggcgtgcacctgtaatcccagctacttgggaggctgaggcaggagaatcacttgaacctgggaggcagaagttgcagtgggccaagaccatgccattgcactccagcctgggcagaaagagcaaaactccgtctcaaaaaaaaaaaagtttcatagttgtacatcttacatttaagtttgtgattcattgttttcatacatttattaattttaattgaaatataattcacaaaccataaaatttaccatttttaagtatgcaatccagtggtttttagtatattcacgagattgtgccacgtcactgctatctaggtccagaacatttttaccgcccc

SEQ ID NO: 906334 - DNA, 606 bp, Homo sapiens
taattttagcattctgagagatgtgtagtgatatctcattgtaatttttctaatggctgatgatgttgaacatccccagatcccaaaggctatagcctattttttttttttttaagtggtggccgggcgcggtggctcacatctattatcccagcacttttgaaggccgaggtgggcggatcacatgaggtcagtagttcgacaccagcctggccaacatggccaaaccccgtctctactaataatacaaaaattagccggacgtggtggcgtgcacctgtaatcccagctacttgggaggctgaggcaggagaatcacttgaacctgggaggcagaagttgcagtgggccaagaccatgccattgcactccagcctgggcagaaagagcaaaactccgtctcaaaaaaaaaaaagtttcatagttgtacatcttacatttaagtttgtgattcattgttttcatacatttattaattttaattgaaatataattcacaaaccataamatttaccatttttaagtatgcaatccagtggtttttagtatattcacgagattgtgccacgtcactgctatctaggtccagaacatttttaccgcccc

SEQ ID NO: 906335 - DNA, 720 bp, Homo sapiens
atttcttctagattttctagtttatttgtgtgaggtgtttctagtattctctgatggtagattgtatttctgtgggatcagyggtgataacccctttatcattttttattgcatctatttgattcttctctcttttcctctttattagtcttgttagtggtctaccaattttgttgatcttttcagaaaaacagctcctggattcattgattttttgaagggttttttgtatgtctatctccttctgttctgctctgatcttagttatttcttgccttctgctagcttttgaattgtttgctcttgcttctctagttcttttaattgtgatgctagggtgtcaattttagatctttcctgctttcttttgtgggcatttagtgcataaatttccatctacacactgttttaaatatgtcacagagattctggtacattgtttctttgttctcattggtttcaaagaacatctttatttctgcattcatttcgttgtttacccaggagtcattcaggagcaagttgttcagattccatgtagttgtgcggttttgagtgaatttcttaatcctgaggtctaatttgattgcactgtgatctgataggcagtttgttgtgatttctgttcttttacatttgctgaggagtgctttacttccaactatgcggtcaattttagaataagtgtgatgtgctgagaagaatgtatattctgtttat

SEQ ID NO: 906336 - DNA, 548 bp, Homo sapiens
tcagttccaagatctgtagtcagaaaaccggagactcaagagagctgatatgtagctaaactcygaaagctgacaagcttgagattcaagaagggccaaaatttcagtctgagtctgaaagctggaaaagacgcaagttccagctcaagcagtcaggcagaaggggtaccctcttactcaacttttttgttctattcagattttcaattgtctggatgagatgtgcccacaatggggagggcaacctgctttactcagtctaccgattcaaatgtcagtctcatccagaaacactctcacagacacacacaataatgtttggccaaatgtctgggcaccccatggctcagtcaaattgaaatataaaaattaaccatcacgctcagcttttcaatcatgtttgcataagccgatagcagaaagaagatgtgcatatgaagtcaagttgctggcctgagatatcagaaggcatgcaattggaaaaactcagaaataagcctatacggcacaacattgtgcataaaatgaaaattgaaagctcttgactc

SEQ ID NO: 906337 - DNA, 609 bp, Homo sapiens
tgtcccatgtgtgtactacttagtggtaagtctgggacccatcttctcatttctaaacatttttatgctaaatagaattagatttatgtatgtgcagtttggggatgagcccaaagttttataaacaaatttatggtgtcactttccctcttgctctccatggcagccccagtaatttttctcgtgcttctttttgattgtccagctagaaaccacctactttcataattctaccatgcctggggctaattagttggaggatcaaaagtgagaaagaaaggcaattgagtttggatacattatattgacgcaacagatccactacatggagatgaatgttttctacattcagagctttggctccaacaggcctccattgctgactgatgtcaatgtcactgatctcttcaccatgggatttcctggtgactgaagaatgagaaagcatagaaaaagaagagaaagaaagtcaaaggatttaccytcattctttttgagttttagaaattccctttcaagctcatacatgcagtactctctacctttctctctgcctgcactacaatgctcaattccaggtttcaggctttgttgaattttaggctggga

SEQ ID NO: 906338 - DNA, 681 bp, Homo sapiens
attacatggaccccaggaccaatgcctcattactctctgggggacccttatcctcctcttctcagaaaaaatwaaaaaaaatgtcaattgttacaactgataccaaaagccatgacacaagagccctgtttgctgatttcctttgatcatcttttcagtatcaaagggcatgtggttagcgcggcaaagttcatattggttacgaagagattttgttgttgtttatttttttaaaaaagacattttctctccaggctaagccatctcagcttcccaaccctttcttatgggaaatgcttacaatttgatttaatatactcttatatagctcttgctatgtgccaagcatgattgtaggagcatttgcaaataccaaactatttgaccctcataacaacactatgagataggcacctatgacataggcatctctgttttacagaaggggtaaaagaggaagagagaagttaagcaattttccaaggtcacacagcataccagtggctttaagcccagtcaggctatgatcttggtcctttctgtgctgcctccaccgtggctttcctcagacacttgaaaggttgtggaaagtaaaattagccacgatgttctaatgatgacctgatcttaccagatatgagggagaggctttgctcattgccatttctgttcttgtattcc

SEQ ID NO: 906339 - DNA, 593 bp, Homo sapiens
tgtgctcccaaatgtctattctcagaatggacaaaagcagtgtttccaaactgctgaatccaaaggaaggttaaactagtgagatgattgcacacataacaaagcagtttcccagaaagcttctttctagtttctattgatagatgtttcctttttcaccataggccacaatgctctccaaattttccctttgcagtttctacaaaaacagtgtttccaaactgctgaattaaagagacaaataactctgttagatgaatgcacacatcccatagcagtttctcagatagcttccaactactttttatcctaggatattcactttttccccattggtctcaatgagctcccaaatgtcaattcgcagaatggacaaaaaatgtgttgccatactactgaatccaaagaaatgtttaagtctgtgagatgaatgcacacaacacaaagccatttctcagaaaacttctttctaatttttatctgcagatatwttctttttcaccataggcctcaatgctctttgaaatacccattttcagattctacaaaaagagtgtttccaaattcctgaatctaaagaaaggttcaactct

SEQ ID NO: 906340 - DNA, 497 bp, Homo sapiens
cattgcccaggcttgcttaggtaaacaaagtaggcaggaagctcgaactgagtggagaccaccacagctcaaggaggcctgcctgcctctgtaggctccacatttggaggcagggcacagacaaacaaaaagacagcagtaacctctgcagacttaaatgtccctgtctgacagctgtgaaaagagcagtggttctcccagcatgaagctggagatctgagaataggtagaatgcctcctcaagtgggtccctgacccctgacccccgagcagcctaactgggaggcaccactacagcagtggcagactgacacctcacagggccgagtactccaacagacctgcagctgagggtcctgtctgttagaaggaaaactaacaaacagaaaggrcatccacactaaaaacccatctatacatcaccatcatcaaagaccaaaagtagataaagccacaaagatggggaaaaaacagagcagaaaaactggaaactctaa

SEQ ID NO: 906341 - DNA, 644 bp, Homo sapiens
tttcttgaatgaaattattggtgatcatgttccaccacgaatggttaaccacagggaggtggtgtataytgggtgggtccagggtctagaaatagatgtggtcactaggctgaggagatgattgggcacgagatccagctctgcaaggaaattcagtaagacagaaaatagcaagttttatgaatactaataaagcatgactagtaatctaagcaagttgctggcatcagggatgtctgctgatggctaaaaatagagaatccagaaagggtcagtgttcccagataaacgtatgtggtctgcctcaagtaagcaactgataatagaactacaatcatgaaagccaaaggctgagttcacacatgtgggaagaggggtggtagtcaaagtcacaacagagaataggcactaagaaacaatcagctgggtgcggtggctcatacatgtaatcccagcactttgggaggccaaggtgggtggatcacctgaggtcaggggtttgagaccagcctgaccaacatggtgaaaccctgtctctactaaaaatacaaaagttagctgggcatggtggcgggcacctgtgatcccagctacttgggaggctgaggcaggagaattgcttgaacccgggaggcagaggttgc

SEQ ID NO: 906342 - DNA, 542 bp, Homo sapiens
gcttaagataaaatctatttctctgaaactaatttcttcccaattggacaatgtttattcccacttgggtctccttgatttmtgttgcataatgccaggaggaaaatgcctagagatatctttgagacaaactttagtcctagtagatcatgggcttccacaaatataactgaagatttaatatgtacccttatatttacagatgtcagtgcaagttgaagaagatgtgaaaattactagaaaccaatttacagcagctggagcaaattagggctcattgcaaactttaaaaaaaaaaaggaagtaatgaaacaaccagctctaggcaaaccatatgtgccagcccaaatctttattaatggaagtatagctacatattaaaggaaatttagttcctacagcaaatctcaatagtgatatgcacagattgtaattctttattctcaaggtatgtaatcaaaaatatgtacagtgatctagaggcagtttttatggtggccttatacagtactcacatgtttgaaagacctccacattcttca

SEQ ID NO: 906343 - DNA, 584 bp, Homo sapiens
cttaaagttataacacactccagctgtagtttcctgcagctattgatcatatgtttgttggacaatcctctcaggctacagtgatgtttataatgccaatcacaaggtccaagaatttccaccaattactaattgcctgataattttaatatttgtttcttaatggcatctcaagccactgtgaaacttgtaatctaatgcccagagtgaaacatgtagatatttaggtatacatagatatatatctaaaatatttccaatatacagtatatagcaacttaagaaatcaacgttgtataggagaatgctgaacaaggtatgttcaatgagaaggtcattctgtgggacaatctagaatgaagtatgtgattgtcaatagcctactagaactgttaataagggagcctcttcacacctgttgaaggtgagggattatagcatttgtggttggaaaaaaaatcatcacaaaattaacaasgaggttatgaattaagctaccacataattttcccatttttcttctcatgacaccatcccagaacttttaggctcagctattgcatttactacattacctaaacgtt

SEQ ID NO: 906344 - DNA, 611 bp, Homo sapiens
attactcagcaatgaaaaagaaatgaaccatttatatacttaacaactttgaccaacctcaagaaaatctatgttgggtgaaaaaagtcagtctcaaaaggatacatggctgcatgattccatttatataacatttgtggaataacacaataataaatatggagaacaaatttgtggttgctgggggttagggataagaaagaatggtatgggctgggtgtggtggctcacgcctgtaatcccagcactttggaaggccgaggtggtagatcacctgagattaggagttcaaaatcagcttggccaacatggcgaaaccccgtctctactaaaaaaatacaaaaaattagccaggcatggtggtggatgcctgtaatcccagctgcttgggaagctgaggcagtagaatcgcttgaaccaaggaggcagaggttgcagtgagccaaaatagcgccactgcactccagcttgggcaagaagagtgaaactccacctcaaaaaaaaaaaaaaaaaaragagagaaagaggaaagagaaagaaagaaagaaagaagaagaaaagaaaaaaaggatggtatggctataaagggtaacacaggaaagtcttatggt

SEQ ID NO: 906345 - DNA, 557 bp, Homo sapiens
tcttttaagttgctgatggaaagctgactaatgtggaattcttagaaagattatacccactgttgttggttgcctttatcaatctgtatctttaccttctctaaacttttagaaggctttgtcacttaagaaagatgaagtagtagcacaaccctccttttccaggttaaacctacttctccctgccccaaaagatcagaaaaaaacagacagtgatccattgcttcagaaaataagtttattttgacaattcacccaagcctactctttttttttttttttttgagacggagttttgcccttgttgcccaggctggagtgcaacggtgcaatctcggctcactgcaacctctgcctcccgggttcaaacaattcacctgcctcagcctcccgagtagctgggactacaggcatgcgccactgkgtccagctaatttctgtatttttagtagagacagggtttcaccatgggccaggctggtctcgaactactgacctcatgatccccctgccttggcctcccaaactgctgagattacaggcgtgagccactgtgc

SEQ ID NO: 906346 - DNA, 628 bp, Homo sapiens
caaaacctaagaattattatggctttccccacgacagtttcagcgttctactgttcccgggtttcctgctaggttagagagctctgcctaagtgcaccagtcaggcctcaakgaatttgaactgaaaactgaaacttggggtagcagtcaggttgggccaggttgggctctggcagcaaacaaccctaaacctcaggggctgaactctgcagaattttttatttcttcttcatgcaaagccataggtgctgctgaatagccacagcaattcccctccaggtccccagcccgacatccagactgctttgactttttagcatctccatcccaatatgcacttgtaccatggccacaggagagacagagaagcctggagattcaggtactgttgatttaaaagctctggcaaggacataggctgtttccatttacatttcattgcccaggactggtcacatgttcagcccagacaaaagggggaaggaaagtgcaccaggaagtaaaggagccctccacggtggtacctgggtaatgtctaagtgctcgggaacttttgactactggtgagttgtttctccctactctccatgaatgttggtatcttgacccaggtgtcagccatctggga

SEQ ID NO: 906347 - DNA, 590 bp, Homo sapiens
aagaccactggatataatttcacttcctcttggattttttttgatggtctaamaatttaaatactgtacttcctgttatacaaagaacatggtctgctagaacggaaatgtttaattctcagaattcattgaaatccattgatgatcatatttgacatctactggtcatcctgagtgaagtttagccattcagagttcaaacgatgagtcttcatatacagatggttataaaaagactcacctctgcttaaggtaatcaagtttggcatggaaacatgagcaaaggtaattaaactcagaagatttgctaacattaaaaaatggcaatttcctggaacaaaaatgtgaaaagctaattccccccaccccctcatcacctgctcctctctctgcttttgccatagcaaagccctataaagaaactggccaccagggtcattatcagtctgagctgaaaatttgattaagctggcctcctagggttagtatgaaaaatgctacatttttgttcttggaccttaattcctctttccctcatttttgtcatgtttgcaaatttcatttgcatttaatttcctgtggtttgccaa

SEQ ID NO: 906348 - DNA, 605 bp, Homo sapiens
ggggtggggacacagccaaaccatatcattccacccctggctcctcccaaacctcatgtcctcacatttcaaaaccaaccatgccttcccaacagtcccctgaagtcttaactcatttcagcattaactcaaaagtccagtccaaagtctcatccaagacaaggcaagtcccttctggctaggagcctataaaatcaaaagcaagttagttacttcccagatacaatgggggtacaggcaatgggtaaatacagcctttccaaatgggagaaattggccaaaacaaaggggctgcaggccccatgcaagtctgaaatacagcagggtagtcagaggtcttcacagcagctcctcccatcacaggcccagaggcctaggaggaaaaaatagtttcatgggccgggccagagtccctgtgctgtacaagtgcacagaagtcaagaattggggtttgggaacctctgcctagatttcggaggatgtatrgaaatgcctagatgtccaggaagaagtctgctgcaggggcagggctctcacagagaacctctgctacagcagtgcagaagtgaaatgtgggatcagagctctcccagagtccctactgg

SEQ ID NO: 906349 - DNA, 477 bp, Homo sapiens
tattgatttgtatttttattctactgtggtctgatagcatggctgatgtgattttgatacttttgaacttactgagacttgctttrtggcagagcatgtggttaatcttggagtatggtccatgtacagatgagaaggatgcatattctatggttgaggggtattctgtagatgtgtattagatacaatgggtcaagtgtcaaatttacatccagaatatttttgttagtattctgcctcaatgatctgtctaatgttgtcagtggggtgttgaagttcctcactattattgtgtggctacctatgtctttttgcaggttgagaattacttgttttatgaatctggatgctccattgttaggtgtgtatacatttagcatagttaagtcttctttttgaattgaaccttttatcattatataatgcccttctttgttcttttctactgttgttgatttaaagtctattttatctgct

SEQ ID NO: 906350 - DNA, 610 bp, Homo sapiens; identical to SEQ ID NO: 903682

SEQ ID NO: 906351 - DNA, 572 bp, Homo sapiens
ttgcaattttgcaagtgccttatttttgaacagatgaaggaataatggctatcttcaggaaatcttatctgaaacctcttagattgcactgaggcacaataatgagatacattagctcaggtaattcggctcctgggggagtttaatttgaaacaattgaagttgtgaatgcgaatacccagcattttccctctggtttgtggagagagaaccaaaggggccttcaacaggaagctggaagaggcagcttggtaggcagcagagctgtgacttgctttctttccaacttcctcctgccaactccagtggcacagttgtttcctattgagaacagattctgtttgttcagtgcatgtttgtgaagagagagattttcagacactcagatataatggggcattcacacattcaaaactcagctaaatttgcccccagggcacatggagatgatgccagaagcacaagcttgyccggaaatggtgatggaaatacagcctctgttgacttagggtgagtccaggcaaacagcccagccacccagtgccacagattcatgtctagagcatgctggc

SEQ ID NO: 906352 - DNA, 609 bp, Homo sapiens
tgaggagtctacattcctcaagtgagcttttcttacaaatattacaaaacaatgagagatttgaatmtctctcttgaaaatctttttttttttattatactttaagttttagggtacatgtgcacattgtgcaggttagttacatatgtatacatgtgccatgctggtgcactgcacccactaactcgtcatctagcattaggtatatctcccaatgctatccctcccccctccccccaacccaacacagatcccagagtgtgatattccccttcctgtgtccatgtgatctcattgttcaattccaacctatgagtgagaatatgcggtgtttggttttttgttcttgcgatagtttactgagaatgatgattgccaatttcatccatgtccctacaaaggacatgaactcatcattttttatggctgcagagtattccatggtgtatatgtgccacattttcttaatccagtctatcattgttggacatttggattggttccaagtctttgctattgtgaataatgccgcaataaacatacgtgtgcatgtgtctttatagcagcaagatttatagtcctttgggtatatacccagtaatgggatgg

SEQ ID NO: 906353 - DNA, 642 bp, Homo sapiens
atctttcattttaaaattgcatgcccagttaagctcctgtgtttctgtacatgctaaatcttgctcagtgaaaagtccacttcaagacatgtatcagttccaatgaattyacactctcatggtttctaatcgctccagttttctgttcttactttgactttaattttctcacttttcacctcatttaccttttgtcttctttttgctacaagggaatccagacactgagcacagatatacttccccattttttgttcccccaaggaactacgcacacaaccatctctatgtgtaccaaactactgttaataaaatgaagattaaatgaacgggttcagagcaatgtaaaagtacattggcaatgagatttctctgggttgtagcaatgtcatttattgattcagtggtggttatcagggtgtgtttatcttaacaattcatgtaccattgtggtttttgaacttctttacattaatgctttactgtctaagtgtttaccttaacaaccactcccctataaaagtgaccctttggtcactaatatagtgaccaaaataaatttctttccctgtagcatttccccacagtgctctcctgtacacactcccactcctttacaagctttttgccaccgtggtgctt

SEQ ID NO: 906354 - DNA, 584 bp, Homo sapiens
acacattaaacaaaaattaattcaagatgaattaaagacttaaatataaaacccaaaamcattaaaaaccctagaagaaaacctaggcagtaccattcagtacataggcatgggcaaagacttcatgatgaaaatggcaaaagcaattgaaacaaaagccagaatttacaaatgggatctaatcaaactaaagcacttctgcacagcaaaagaaactatcatcagagcgaacaggcaacctacagaatgacagaaaatttttacaactacccatctgacaaaggtctaatattcttaatttaaaaggaacttaaacatatttataagaaacaaacaaccccatcaaacatgggcaaaggatatgaacagacacttctcaaaagaagacatttacatggccaacaaacatatgaaaaaaagctcaacatgaccgatcatcagagagatgcaaatgaaaaccacaatgagataccatctcatgccagtcagaatggcaattattaaaaagtcaagaaacaacagatgctggtgaggctgcagagaaaaaggaacacttttacactgttggtgggaatgtaaattag

SEQ ID NO: 906355 - DNA, 654 bp, Homo sapiens
aatataagtcagaattgtgcagaatttgaaatctaacaccaaagtttaatatttttatggaagtattgatatttataaggatattcaaaatgtattcttcctgagcattacattgatatctttcaacttttggtgggggaatttgcattatagaattacacagtctcttgtggaggagaaggatcttaggaaggcagttataacagtcccaacttgatggaattcattagaaggtatttatttgtatgtttcattcttaaattatgattcacaaccgattttcattgttcttggaaatataaaggtttactcatttactgtaaaatttcttcttgagaagctttgtgcacttcctatatatttgtcctatagcccctcaacccccatccatgcctttagaggttgagggaatttgctgacatttctcttatcgatgcaccagctggttacagtgaattgctttttgtctaaattcaaggaccttccaaggcttaacattgcagggggcggtgtggctattacactgcctttgcaatttcggaaggcagactttggttctctttatacattcagccatgtgacagtcctttagtgggtttcctcttgctcaactcgttctatragattccttttagaaagtctctggaaacattt

SEQ ID NO: 906356 - DNA, 632 bp, Homo sapiens
cataatgaggcccaccctgcatatgctgcataaagaattatcctgaaacttagtggattaaagcaacraacatttattatcccatagttaatgtggatcaggaaatttggaaggagcggatgagtagctgtgcctcaaggtctctcaggaagccacagtccaggtgccatccaggctgcagtcattgaagtgttccctgggcaggagggtcctctaagctcctggcactggctgttagcaggaggcctcggtgcctccccatttgggcacttctcacaatatggtggctggctttttctagatttagtgacccaagagaaaggcagaggccattatattttatgacctagattcagaaatgatgtatcagtatttctgccctattctattggccacacagaccaactgtggctcggtggtgcatggggctaccccagtgtgtgaagaccagatagtgggggtcattagagcctactctgaaggccagccctgaccaaccatcttattctaagtggaaattcatcacctactgccggcattcccgattccctttacctaatgctcagtttgtcctttctttggcactttcaccttcctacacatgaaatgatttagtcgtttatcgtgtatta

SEQ ID NO: 906357 - DNA, 568 bp, Homo sapiens
tttcagaattaactcaaaagtccacagtccaatgtctcatccagaacaaggcaagtcacttctgcctatgagcctataaaatcaaaagcaagttagttacatcttagatagaatgcgggtacaggccttgggtaaatacagccattcccaatgggagaaattggccaaaacaaagaggctacaggccccatgcaagtcctaaatcctgcagggaagtcatactacagctccaaaattatctcctttgactctgtgtctcacatccagatcacgctgatgcaagaagtgggttcccatggtcttgggcagctccatcccactatggctttgcaggatacagcctccctcctggctgctttcacaggctgccattgagtatacgcagcttttccagaagcacagtacaagctatcagtgcatctaccattctgggktctggagaatggttgccctcttctcacagctccactaggctgtgccccagtagggactctgtatagtggttctgaccccacatttcccttccggacttccctagcagaggttttccataagagcccttcccctg

SEQ ID NO: 906358 - DNA, 617 bp, Homo sapiens
aagtttggagggctgagaagaagacaggaatatgagggaaactggttgaatggttgtgaacaaaatttattgagaactgkagcaaaggtcacacatgtgccttagcagagtttggttgcattgtgcccctactgcagggatctgtggaggtttgagcctcagagtgataatttagggtatctggtgaaagacatttataagcagtaaagcattcaagaagtgggctggctgcctctagaaacctatgctcagatataggagcaaataaatgacttaaagttggaatttatgtttaaaaggaaagcagagcataaatgtttagaaaatttgcaggctggctatgtggtagaaattaaaagcccatttttcaggagaagttaggcagggtgctgagaagccatttgctagagaaatttgtgtaactaaaaagaaggcaagggctgatagccaagacagtaggaaaaaggcctcaaaggcatttcagagaccttcaaggaagcccttaccacacaggccaggaggcctaggaggaaagaatgatttcatgggccatacccaggataccattgccctgtgcatccttggaacactgctctccatccggcctctctggctcc

SEQ ID NO: 906359 - DNA, 656 bp, Homo sapiens
taatccagggagttggttattaagtcaataaaaatgttttaggggggaaaatattaagaaacttaaactccttataaatgttctgataaaatttaaaacgtggccttttttttaatgacagtaccttgaaagctgtttcttttccaacattaaatgtgagctgactaatatgagcttcctagcatgctctgcccaagttatccagcacaagagtgtttaggttaataaaggtcattttactacaaattaccctctgtagttgtagttgaatctttttatttttgagaagaaattatagtgaaaatatcattattatatttgtggtaagtataaaatttggtcttttttttcctgctgtactaactgttcataggtctgtagtgaacaaaataatatttactaaaacacaaattaatatttagaacagaaacaacttagactcactctggactcccataaaaattgattacttagacatttaaatatatttacttaatactgtaatattatatacatttcctaaagcaaattttaagacataatatttggaaaatctagtagaggttgtcaaagctacwtctgttggccaatagcagttgcttttataaaatcgtattatttcctgctcaaacacttcattaactacattatggccc

SEQ ID NO: 906360 - DNA, 548 bp, Homo sapiens
tacggtgaaggtatgaaaaaagatattccaagaaaatagaagccaaaagagcatgggcatctatactaacataataaaaaataaaccttagggccaaaaacattaaaaaaaagacataggagggcattatataatgataaaggatctattcatcaaacagatacaaccattgtaaatatatatgcactcaatatcagaatacttaaatatataaaacaaatattagaagatttgaagagagagatagattgcaattaaatactagtaagatatttcaatatcccactttcagtagggaaacattaataaggagatactgaacttaaacaacattttagaccaagtagatcaaacggacatgcatacattttacccaacaacaacagaatacacattcttctcaagcacacatggaacattctccaggacagattacatgatagggcacaaaacaagcctcagccaatttaagaayagcaaaatgatatcaaatattatttttaagtacaatgataaaaattagaaacagtaataaaaggaattttctg

SEQ ID NO: 906361 - DNA, 607 bp, Homo sapiens
tggaactaattgacatctaaagaactcttcaccctaaatcaacagaatatacattcttctcagcaccacatcacacttattctaaaattgaccacataattggaagtaaaacactcctcagcaaattcaaaagaatggaaataataacagtctctcagaccatagtgcaatcaaattagaactcaggattaacaaactcactcaaaaccacacaactacatgaaaactgaacaacttgctcctgaatgactactgggtgaacaacgaaatgaaggcagaaataaagatgttctttcaaaccaatgagaacaaagacacaacattccagaatctctgggacatatgtaaagcagtgtgtagagggaaatttagagcactaaatgcccacaagagacagcacgacagatctaaaatcaacaccctaacatcacaattaaaagaactagagaagcaagagcaaacaaattcaaaagstagcagaagacaagaaataactaaggtcagagcagaactgaaggagagagagacacagcaacccttcagaaaaatcaatgaatccaggagctggttttttgaagagataaacaaaatagatagaccactagcc

SEQ ID NO: 906362 - DNA, 655 bp, Homo sapiens; identical to SEQ ID NO: 905283

SEQ ID NO: 906363 - DNA, 591 bp, Homo sapiens
aatatcagtgatagacagtattcatacatgtaagctccaacctcaactgcaatcactgtctaattagggcagtcactgcctcacaggtatgctgatgtttaktataaaagtcaccattccacctgtgaactggttctatatatgagagtcacaatgtcaactttcaactgatctggatgtgatattcagaatttccacaatggactgtgtctatacgggaagatgacatacctcagtgtatgttctgggtgcatagagcaatcacaatgtcacctgcgtgctgggtgtttataagataccttctgtgccacttaagagcttcgtatggtctgcatgagaatgaaacctgctctgagaccttaatgatggtataaacccatgatcctacatgttgccctaagttcaggtatgagagtcatcaatgtgcctgtgatctgggtccagaaatgagaaaccatctcatttgtggatggatccagatatgacagtcacaattccaactgtgaattgtttctgtgagtgagaaccaggacctcatgagtgggttctgttcacctttaatcctaacttgggctgtgtgcatacaaaagt

SEQ ID NO: 906364 - DNA, 538 bp, Homo sapiens
ttctatgcccacgtgcctaaaatattaggctggaagggaccttgaatttcatcaagtgaaacagtccccagaagtcagtctactattcaaatctccacatattttaaactatctatgtaacacctaaactaatatgacaatatttttatttaaatagatttataatttttaataaaatatttttataaaagcttttgtcattaccgacaatgaaaaagctagtgtcatttgctataaacaagaagtatatggctgaactattttcaaaataatcttgttgctaagccaccctcaaactcagtgccttataacaaggtgtgcttattctcacatgcacaggtctgcagattggcttagtttggctgatccagctggacttagttggccaggctccaagttgtaggtctgcctcacatatcttattttggagctcagaattaaagaacagaggctgtctttggtttgaaactggcaccccatcrtgtctactcatatttcattggccaaagcaagtcacacacctcccagcatcaatgag

SEQ ID NO: 906365 - DNA, 538 bp, Homo sapiens
ggttgggatgtgggtagtagattgtttgatttgcctattaaaggcatatgaaaaggatgctggaaggggagtctttttttttaatctctaagaattgcctaactttggaaagggcagtctttccagagtcagcaagtccctagatgtcaaagcatcaaaagtacagaaaataaaaagacaggattaatattacatctcatggcggccagtagccagggaaaaaggcataagatacatgttctcaatggagttgacatcacccccaaggaggtgaaaattggctctggggtattgggagaaatgaaagaaaatgttactttccatgtataaggcacagaaatacataaacagatatatacagataaacaatacaaatgcagtatcaaaatttcattggcagtggtctcaaaagtctcctttgtgaggagaggagggtgataatgaactaaaggttgagaacagggaatcctagataagagatgtaagtatatggtaaatgaaaaaaraaaacagcagattacaataatacattattagc

SEQ ID NO: 906366 - DNA, 687 bp, Homo sapiens
  misc_feature 629: n = A,T,C or G
acatccattgattgtgaccatatggtagttatcaygtaagcatttcaaatttcttatttcattaatggttatatcaaccctatgaagaaggcactactattattctatttttacctttttaaataatgtgagtctagacaggttaagtgacttatcaaagatcatataactaacaaatggtggaactgagccttgaaactcttatttttgatgtcagtctatattcttcagtgccaagacataatacttccacttaatgctggttagctgaggttactgtatgcatgctgagtcattaaatggcaagctgtgtcacactgtgcactctaaatttaaatacgtaaaagttatttaaaacaatagcacagcaaaacctgattgtgttaacctgcgcttaatttggttaattgcaggactttaatagctcaatatggctagcaggtggcaatggtgttccattaagccaacacagcaacttcaggcaaattaatgtacatgtaacatactaatgtacatataacatacaaaactgcaaaagagtgagaaggagtgggctacgtttctttagtaattcttgtcatctaggccctaggattcttatgcacttagcctcttgcacacatggaatntttgagttgttcaaatacgtggagtttaattgctgtgtgggtgagctaagttgaggaa

SEQ ID NO: 906367 - DNA, 519 bp, Homo sapiens
gcaggatattgagaaatattcaattttcatgtgagagcaggggtaggggaatagagtcattcatgcctttgtctggctcagtgaatctgcatttttacaaaagattacatagacaataaggcagaggcaacaatcagatatgcatttgtctcaggtggtcagaggatgactttgagttctgccctatgtccctgcacctatgaagataagctatgaatttacattgccatggtgaactttaacagaaatgctttagggcaaagatcttggggtccacaaggaatttctctgtgggcaaaatgtgagagaggtatgtagcttttcatctttgtagctatctaatttaggacacaaaatgggaggcaagttttcatgacccagttctgagcttgactttccctttggcttagtgaatttgaggttccaagatttattttccttttacagttcctaaccygcacatgaattccagccttccctccaacaggccatttgtttaaaggtagtttctgattctga

SEQ ID NO: 906368 - DNA, 554 bp, Homo sapiens
gttttaagaatgggagtttccctgcacaagctctctctttgcctgctgccacccttgtaagacgtggcttgctcttccttgccttccaccatgattgtgagctcccccaccagacacgtggaaccataartccattaaacctctttcttttgtaaactacccagtcttagatatgtctctatcagcagcttgaaaatggactaatacagtaaattggtaccaggagtgaggtgctgctgaaaagatattcaataatgcggaagtgactttgtaactgggtaacaggcaggggttggaatagtctggagggctcagaagaggacgggaaaatgtggaaaagtttggaacttcctagagacttgttgaatggctttgcccaaaatgctgatagcaacatggacaataataaagtccatgctgaagtggtctcagatggaaatgaggaacttgttgggaactagagcaaaggttatgttttagcaaacagactggtggcattttgcccctgccttagagatttatggaactttgaacttgagaagggaaaatttagg

SEQ ID NO: 906369 - DNA, 652 bp, Homo sapiens; identical to SEQ ID NO: 906210

SEQ ID NO: 906370 - DNA, 649 bp, Homo sapiens
cttaataattcctaataattcaatcttcaaagaggattatttgtctctttcctacttcccaaattttttaaactaaagcaagagatataagaaagtcttccaaattgtctagaaagtttcccactaattaacatggaatgttgcagctataacttacggttattttaaccattaatcaaaagcatataattaaagattaaactgaattaaatgtctccactaagtaattggcttaggggacttaatgcatactacagtaagagtccatgcacacacatgtcattggctgaagtgaatcgatgtgcagatgggacttctacctgcaagtggtatataattcatgtttattgtagataaaaatttgatgcagggctgccaatatgaaaaacaaagttttataatagattttgttttcattcaaagagtttgtccaaagagaaattaataaacaaaacttaacattgagcacgttctgttcaaaaataaattaatttcaacgtccttaattcagtttttaaaagtgaaatcactttccttagtaactcaatttatctgtaacttgctgttttctcaactcaatttaaaagttaatcttattatattttaaamcctgaaacaagctgttcttcatatgtggaaaagcttattt

SEQ ID NO: 906371 - DNA, 598 bp, Homo sapiens
gtcctactgaaaaaatatattgatgaaacactgttacatatatgtgtaatacatatatatatatgtaaaatgtaaagtaggggatcctcttcaaagactttcctccccatctaattaggaataaatagtaacttctcttagaagcaaaatgtattcaaagacctgtactaacattcttaaatatctgctagcgttaataaggaaatcattgtactttatgttcttagctcccacagtttagcctaaatatttgccctggcatgcttatactagtccaagcaagcattaggtcatagcctgttcctcttccttatttgaagatgtttttacctttcttagcattctacaagttacttcctccttcctttgttctcctctgcctttgcctcttttagaaagttctaagttgctagccaatcaggacaaggacagaatgtgaagtcccattccagggaatggaaaccagacacagcagtaagatgacacatcagkttataaatgaccctgtctcctttgttcggtatactcttgcaaaacagctggcgagtgtaccctttctgcagaaagtaaaaatggccttgctgaggaaattaaattt

SEQ ID NO: 906372 - DNA, 479 bp, Homo sapiens
catagttggaatcatacagtatacagscttttcagtttggcttctttcgcttagtcatatgcattttcaacctaccttttaacatattatcctatagggtattgggagatttgcacattttttagagaaaaatctatcttggcagggtgcagtggctcatgcctgtaatcccagcactttgggatgctgaggcgggcaaatcacgaggtcaagagatcaagaccatcctggccaatatggtgaaacccgtctctaatagtacaaaaattagctgggcgtggtggcatgtgcctgtagcttgatgaacaggttttatttttcctttgcggacttcagccagtgatagaaacaaaatcttttccggtgtctttttagtaattgtaccacctgaccatatagtaggtgctctaaaaatagttgttattgtttttctgaagcctttcatggtgaaattgtgcatttggatgattcggtcaaat

SEQ ID NO: 906373 - DNA, 479 bp, Homo sapiens
catagttggaatcatacagtatacagccttttcagtttggcttctttcgcttagtcatatgcattttcaacctaccttttaacrtattatcctatagggtattgggagatttgcacattttttagagaaaaatctatcttggcagggtgcagtggctcatgcctgtaatcccagcactttgggatgctgaggcgggcaaatcacgaggtcaagagatcaagaccatcctggccaatatggtgaaacccgtctctaatagtacaaaaattagctgggcgtggtggcatgtgcctgtagcttgatgaacaggttttatttttcctttgcggacttcagccagtgatagaaacaaaatcttttccggtgtctttttagtaattgtaccacctgaccatatagtaggtgctctaaaaatagttgttattgtttttctgaagcctttcatggtgaaattgtgcatttggatgattcggtcaaat

SEQ ID NO: 906374 - DNA, 647 bp, Homo sapiens; identical to SEQ ID NO: 904277

SEQ ID NO: 906375 - DNA, 517 bp, Homo sapiens
attcctggggtttcatgaggaaaagaaagggttttttttgtttgtttgtttgcttttttccccacaatggggtctgtggcacctcctctgtttttcccaaggactaccagaagttatcttagggcctctcacacatgcattaagagtgtcaagaaataaaatggagaaagatgatttagtcaactgagaaaaataaaaatttttttccagaaaacaagatccaagaagagaaaaatataaaggccttttaaatatatttattacttgaatacccagttttaattaagctgagcactctttaacaaaatccctttaaatccactgttactcaactttagctatgccaagcagttaagattttcagcttctgaactttacaaaaagtaacctcacaggtgaaaccaacaagccttaattatgttacgatgtaacagtgagtgtacaaggtgtttttaaaggggtgataagcagcttttgaaactgtcattgcaaaattrtgactgagacagtgaaagag

SEQ ID NO: 906376 - DNA, 618 bp, Homo sapiens
ccaaacaagattacctccctgaactataaaatttcccatacattgcatacacagagaggatgaaatagatatgatgatcgcagacaggaaaggaggaaattatgataaaaagttggagattctgttgccgacatctcatcagggtagtcagaggctggggtccgtccaaatacctttggataacaatggtggtaaccctggccggaaatcctcaggtacaccaggacttcttccagccccacatgacagctaagtcctccgtgaaaggaagctggttcaaacagggccagtatgcccagtgacccatgggtactgggggatgctccatgttctccctagcaatcctgtcccccaagtcttgtaaggctggcagccatgctaattatttttaaatggctgaaaggggccccgtatttggtttgatctggttctaaaatggaagccaagggcctcagaataaaaggacagagttggagtctgctcctctactcaccatctcgatgaatgttgtatgttgttatcccggacgagcccccattataaagcagctatgtctggggtgtaaacccagggtttgtcrtcacgcaccaggaaaatttaggacacagacacatatga

SEQ ID NO: 906377 - DNA, 617 bp, Homo sapiens
tgcaggattcaaatggaatgttgccagtttttgaccattaagtatgatattggctgtgggtttctcataaatagctctcattattttgagatactttccatcaatacctagtttattgagagtttttagcgwaaaggggtgttgaatttcatcgaaggccttttctgcatctattgagatagtcatgtggtttttgtcattggttttatttatgtgatggattacatttattgatttgcatatgttgaaccagccttacaagggatgtgagggaactcttcaaggagaactacaaaccactgctcaaacaaataagagaggacacaaataggaaaacattccatgctcatgaataagaagaatcaatactgtgaaaatggccatactgcccaaagtaatttgtagattcaatgctatccccatcaagctatagtaaccaaaacagcatggtactcatatcaaaacaaatatatatagaccaatggaacagaacagaggcctcagaaataacaccacaaatctgcaaccacctgatgtttgacaaacctgacaaaaacaagcaatggggaaaggatcccctatttaataaatggtgttgggaaaactggctagcctta

SEQ ID NO: 906378 - DNA, 617 bp, Homo sapiens
tgcaggattcaaatggaatgttgccagtttttgaccattaagtatgatattggctgtgggtttctcataaatagctctcattattttgagatactttccatcaatacctagtttattgagagtttttagcgtaaaggggtgttgaatttcatcgaaggccttttctgcatctattgagatagtcatgtggtttttgtcattggttttatttatgtgatggattacatttattgatttgcatatgttgaaccagccttacaagggatgtgagggaactcttcaaggagaactacaaaccactgctcaaacaaataagagaggacacaaataggaaaacattccatgctcatgaataagaagaatcaatactgtgaaaatggccatactgcccaaagtaatttgtagattcaatgctatccccatcaagctatagtaaccaaaacagcatggtactcatatcaaaacaaatatatatagaccaatggaacagaacagaggcctcagaaataacaccacaaatctgcaaccacctgatstttgacaaacctgacaaaaacaagcaatggggaaaggatcccctatttaataaatggtgttgggaaaactggctagcctta

SEQ ID NO: 906379 - DNA, 587 bp, Homo sapiens
acagtttgaatcttctgcatatggctagccagctatcccagtaccattmattgaatagagggtcctttctccattactttttttcagctttctcaaagatcagatggttgtaagtgtggcattatttctgggtcctctattatgttctgttgatctatgtgtctgtgtaccagtaccatgcttttttggttactgtagtcctgtagtatagctggaagtcaggtagtgtgatgtctctggctttgttccttttgcttggaattgtcttggctattcggaacctttttttggttccagatgaattttaaaatagttttttctagttctgtgaagagtatcattgatagtttgataggaatagcattgaatctataaattactttggacagtctggtcattttaatgatgttgattcttcttattcatcaacatggaatgatttttcatttgtttgtgtcatctctgatttctttgagcagtgttttgtaattctccttgtagagatctttcacattcctggttagctgtattcctagttattttatttttaagggagaagttgtgaatgggaatgtctttctgatttg

SEQ ID NO: 906380 - DNA, 546 bp, Homo sapiens
ttttcccttctcaagttcaaagttccataaatctctaagtcaggggcaaaatgccaccagtctgtttgctaaaacataacctttgctctagttcccaacaagttcctcatttccatctgagaccacttcagcatggactttattattgtccatgttgctatcagcattttgggcaaaggcattcaacaagtctctaggaagttccaaacttttccacattttcccgtcctcttctgagccctccagactattccaacccctgcctgttacccagttacaaagtcacttccgcattattgaatatcttttcagcagcacctcactcctggtaccaatttactgtattagtccattttcaagctgctgatagagacatatctaagactgggtagtttacaaaagaaagaggtttaatggayttatggttccacgtgtctggtgggggagctcacaatcatggtggaaggcaaggaagagcaagccacgtcttacaagggtggcagcaggcaaagagagagcttgtgcagggaaactcccattcttaaa

SEQ ID NO: 906381 - DNA, 476 bp, Homo sapiens
gcagataaaatagactttaaatcaacaacagtagaaaagaacaaagaagggcattatataatgataaaaggttcaattcaaaaagaagacttaactatgctaaatgtatacacacctaacaatggagcatccagattcataaaacaagtaattctcaacctgcaaaaagacataggtagccacacaataatagtgaggaacttcaacaccccactgacaacattagacagatcattgaggcagaatactaacaaaaatattctggatgtaaatttgacacttgacccattgtatctaatacacatctacagaatacccctcaaccatagaatatgcatccttctcatctgtacatggaccatactccaagattaaccacatgctctgccayaaagcaagtctcagtaagttcaaaagtatcaaaatcacatcagccatgctatcagaccacagtagaataaaaatacaaatcaata

SEQ ID NO: 906382 - DNA, 611 bp, Homo sapiens; identical to SEQ ID NO: 901605

SEQ ID NO: 906383 - DNA, 646 bp, Homo sapiens
tggggatgttctaggttggaactttcccgaatgagcrggtcctgtgtgatggggctgaagatagaaactgagggatgggtgggtgggattgtaggatggtagtcatctaggaatataggcatgatttcttatcactctccccacacactggatttcaaatgaagacttccctgactgagataataaaaggtgcattcagctgcctctatggctgtcttataatcagttcataaggagttgatgggtgctttgagcttaaccagacctgcatataacctcaagtctaattctatcatgtggcttctaatgccatcatatggagcctctggcaacaaggccattttccagttgttaatatcttctcccttccatgctcatcctgccagaatcatttacagctctgtttctgaatctacccagaaacgatatatttttttctttggcaacatggtatccagagaacaacactttcctagaacaaatggatataaaagttctgttcattgcaatcagcacagtagcaaagaccttcagaggtcttggtgtcacagaaattcttggatagtatttttaacttataatttttattacattggcaactacacccatttaatgaagaaaactagtttgtttttcatattaacaa

SEQ ID NO: 906384 - DNA, 480 bp, Homo sapiens
taaaagccaagtagcctgtctgagcctacacagctagagtccgtgggtaacacargcagattaactttgtttattaagtctcttgtagaaaattagtggatgggctggcatttaagggaaaatcttgcatttggtattgactattgacatataattccttgcattttttaactttgttagtctctgaattaaaatagggcatatatatgaaacgtggcatttcaaaatgccagttagcaagcatcataagggaatgtaaccccctatggaagacatcaatcgttggtgcctctccagtaaggagaagttgaatcaccgtgcttttgattacagattacatttccacatcaatctgaataaggaagggacatactttctgacattttaaatgttagcattaggcaatgtgaaactagctaatttattctggtcaaaggaaagaggtatagaattgagcattattataaattcatgttaatt

SEQ ID NO: 906385 - DNA, 638 bp, Homo sapiens
cagggagacctttggatattgggttaaagtgcttagttttyatattccaggtaaaggagaaaattagggattgtgcaataaaggtgtctggagaatgcctcagtgaggacggtgtttagccatcttaattttagcagtgagcatggtatgtattggagagagaagttgaggacacaaagaatagccattgttcttgttgctagaggtttaagtatcaccttatgaagatttttattaaggttatggcatgagaaatagaaggaagcttgaatctgtaggacttctgactaataatttacagaaaaaataaggcaggaaaatggaatattctgaaacttggattaataggaaacaaaaaaaggaaggggctttgagaaagatacgtttagaaagagtatataagaaagcagtgcagtggcacgatctcagctcactgcagcctctgcctcccaggcccaagccatcctctcacctcagcctcccgagtagctgggactgcatgcaggcatgcaccaccatgcctggctaatttttgtgtttttgtagaaatggggtttcaccatgttgccccatggctggtctctaactcacgagctcaagcaatccacctacctccggcttccaaaattctgggatta

SEQ ID NO: 906386 - DNA, 655 bp, Homo sapiens
ggctttctccccattgattttcatgtaataataaaggataaggaaagattttggtttgccttgcaaatatactaccaaaaaaaaaaagaagaaaacaagagatagactagttggaaaactaagtcctccctcttaatgagtaaaggtttttgccttgtttaaacatgtttgagtcattattttggctaaaataaataacttatagtaatctggaattctagttcataatatcaagtgatttgaacctctaacatatttaatgggcttccaaaaatcaaacttcagcttcaaaaattgtctttcctgacccctgagttttggatgatgcagagggcccctggagcatctaagagtgaggtaaccagaattatttcacatgtttagtcatgtgggattgccaaaataacaataatatttgaccttcttcaggttacattttagtgagtaatgttaatatatgttccaaaattatataggagttctaaaattctaatgttcgagtatatgctatcaatcataattaaggttactaggttcagttaatgtaaaccacggaaataaccaaatttctttgtcaatcatgttttctattgtaactaccctggamcttttgtcattcacagacaattattgtcttgtttgatccttttcaaaa

SEQ ID NO: 906387 - DNA, 615 bp, Homo sapiens; identical to SEQ ID NO: 903108

SEQ ID NO: 906388 - DNA, 615 bp, Homo sapiens
atttttttttcaactcagcaagccttgatgytaaaagaatagatgtatgtactacagttgtgtttatgtaattgctgagttaatctaagcatatacattctttttcctctagaatagttatcttaattatgcccagtttgtaagcatactctatatcatgctctaggccagggttcaacaaactgtgtcctacagaccaaatcctgcccactacctgcttatgtaaataaagttttatgggaacgcaatcatatcctattatttactattgtctgtggccctgagacctgcttttgccataccatgatagagtcaagtagtcactacagagcttgtgtggccagcaaaagctaaaaactttattatctctgactcttcaccaaaaataggttgtctgctcatgctctaaatttcactgaagcaaacttttaaaatatgtatattataatttgcatatgcaaagatacatatttataaatacgttatatctttataagtctgtactatcttagtttcctattcttaaactaatcaaaggcaagaaatagggtaacattctggtagatgaaataaatgttattctgactgcattatttttaatctttggtgcactaa

SEQ ID NO: 906389 - DNA, 600 bp, Homo sapiens
ggatcttttaatgcttccaaaacttgggctgcattccaggcmaattttgccacaatctctgggggttgattacaggcatcagtatttctgaaagttcccaggggatgccaatgttcagacaagtttgggaatcatttggtctcaccattgtaacttcaaccgttccaacttggacttttaggctctcagctcattgtcttaataatctcccttcctggacctttgtgcactgttgtgaggaatgtaaattggtacagccattatggaaaacagtatgaggttcctcaaaaaattaaaagtagaacttccatacaatccagaaatcccacatctggatatacatccaaaggaaatgaaatcagtatctcaaagagataactgccttcccaagttcactgcagcgctattcacaatagccaagatatggaaacaacctaagtgtctgtcaacaaataaatggaaaaagaaaatgtggcacatacacccacgtacacacacacaaacacacacacacacaatggaataatattcagcctcaaaaaggaataagaataatgccattcatgacaacatggatgaactcaaggacattatgctacg

SEQ ID NO: 906390 - DNA, 644 bp, Homo sapiens
aaatacagagaatgccacaaagatactccttgaaaagagcaactccaaggcacrtaattgtcagatttgccaaggttgaaatgaaggaaaaaatgttaagggcagccagagaaaggtcgcgttacccacaaagggaagcccatcagactaacagctgatctctctgcagaaacccaacaagccagaagagagtgggggccaatattcaacattcttaaagaaaagaattttcaacccagaatttcatatccagccaaactaagcttcataagtgaaggagaaataaaatcctttacagacaagcaaatgctgagagattttgtcaccaccaggcctgccttacaagagctcctgaaagaaacactaaacatggaaaggaacaaacagtaccagccactgcaaaaacatgccaaattataaagaccattgaggctaggtaagaaactgcatcaactaatgagcaaaataaccagctaacatcataatgacaggatcaaattcacacataaaaatattaaccttaaatgtaaatgggctaaatcctccaattaaaagacacagactggcaaatttgataaagagtcaagacccatcaatgtgctgtattcaggagacccatctcacatgcagagacacatgtaggc

SEQ ID NO: 906391 - DNA, 615 bp, Homo sapiens
tacgtctagagatgttagaagtattgcacacatcagttagatctggaatttggaataaatacacaactttaaaaataacaagttataagcattaaacaaaatcactctggattcaattcaagaaattttaaaaagccaaatgaaatattggatgtccaatagtgaactggtaacttatttgtccacaaataacttaatgaagtaggaaattcagacaaaagtcacatcatctagggccatggtataaagcttggcttttattttcaatgtaatagaaagccactaaaattaataagttttagacatggtttgatttataatttgcaaaaattactctgtcagcctttgagtattgactatctgggaagaaaacgatggaaacagggaaactagtaagaaaacaagagagtagaatggaagttgggaggtaagtgaggaatggagagatgtaggccaaagggtacaaagttgcagatatttataatgaataaatctagagacctactgtaggacaygaagaatatagttagtaatattttaatatatactggaaatttactaacagagtagattttaggtgctcttacaacatgtgcacaaaaatgctaatggtgt

SEQ ID NO: 906392 - DNA, 591 bp, Homo sapiens
  misc_feature 204: n = A,T,C or G
ttgttattacccaccttctgttgcctacttctatcaattcctcaatctcattctccatccagttttgcatccttgctgtagagatgttgtgatcatttggggaagaggggttctggcttttggaattttcagcctttttacactcattatcgtgtatttatctacctttgatctttgaggctgatgacctttggatagagtttntgtctggggatctcttctgttgatgttgtttttgttgctttctgttcgtcagtttttcttttaacagtcagacccctcttcttcatgtctgctgcagtttgttggaggtccgctccagaccctctttgcctgggtatcaccagtggtggctgcagaacagcaaagattgttgcctgctccttcctctagaagctttatcccagaggggcaccagccttatgcccgccggagctctcctgtttgaggtgcctgtcaacccctgttgagaggtctctcccaattaggaggcacaggggtcaagcacccacttgaggaggcagctygtccctttgcagagctggtgtgctatgctgggagaattgcccttgtcagaatcagctgctctct

SEQ ID NO: 906393 - DNA, 509 bp, Homo sapiens
aaagaaaatagcatcggccgggcacgttggctcaygtctgtaatcccagcactttgggaggctgaggccagcggatcacaaggtcaggagatcgagaccatcctggccaacacgatgaaaccccgtttctactaaaaatacaaaaaaattaactgggcgtggtggcgggcgtctgtagtcccagctgctcaggaggctgaggcaggagaatggcgtgaacccgggaggcggaacttgcagtgagccgagatcgcgccactgcactccagcctgggcgacagatcgagactcagctcaaaaaaaaaagaaagaaagaaaaagataatagcatcatctatttgtgataaataaaacaaaccagaaaactcttagcaaacaggaagtaatctttctaaaatgataaaaattcatctaaaaaactgatattcaatattatttttcacttaatagtgacaaaacaattgtttccctactaggatttagaataaggcagtgacttctgctctcac

SEQ ID NO: 906394 - DNA, 641 bp, Homo sapiens
atagctctcagctacacttcctgcaatactaagacagtcaaggaaagaaatcatggtcagtacttaaatgcaacaaatgactactatatagtagtcaatttacatagcgacagaaacatgakcaaagtgatgtctactcaagtagaaggctcacttaactccatggctccttggtaagtgatggtgataaaacacaatgttctactagtctacatttggaaactactgtcaggcagtaagtttctgtaaggaaatttgtttggacccagatttgtttctgtaaggaatacctttagtcactctcccaaaaggaatgcaggaaccacagaaaataaagcaaaagaagattttttcatttattatggactacctgggccttctaaagcaacctgtcctcccaagttaattattacatagagaacaagtaatacagctatctttggctacttggcaactgaggaacatgttccctggtaggcaaagtaagagaatttttctcagcaacaagcgtactcttccatatgtaaggaccaaactgtcccttctcttgccaggatttatcactctctgagttaactgcaacccatttggccactttgaagccagcattcttctgtagatgataaaatcatgcaagagaa

SEQ ID NO: 906395 - DNA, 617 bp, Homo sapiens
ttgccacactgtattccacaatgtttgaaacccaaaactataaaaactctggaagaaaatctaggcaataccattcaggacataggcacwggtaaagatttcatgacgaaattgccaaaagcaattgcaacaaaagcaaaaattgacaaacaggatctaattaaactagagagcttctgcacagcaaaaaaaaaaaaaaaaaaaatcagagtgaataggcaacctacagagtgggagaaaacttttgcaatctatccatctgaaaaaggtctaatatccagagtctacaagaaacatacacaaatttacaagaaaaaaacaaacaaccccattaaaaagtgggcaaaggacatgagcagacacttctcaaaataagacattcatgcagccaacaaacatatggaaaaaagctcaatatcactgatcattagagaaatgcaaatgcaaatcaaaaccacaatgagataccatctcatgccagtcagaatggcggttatttaaaaagtcaagaaacaacagatgctggtgagtttgtgaagaaacaggaatgcttctacattgttggtgggaatgtaagttagttcaaccactcatgaaacattttcttatctctattt

SEQ ID NO: 906396 - DNA, 615 bp, Homo sapiens
cctttaaggtttcagctctcactggggtgaaataacactatattgtcctcttgactcatcagccataaaatcagtacccagtttkccactgaggctggccttaggtgctgcaaaatcccatctttgttctgtaaaacttactcaagctcttcactgaagtcttttcatttgaaccatgtgaatagaattttgttttctgtctggatcccatttcataattatactgaatttgtgacccagacattttactaacaatttgctaagggaatatgataagatcatttgttctctttgttcttttcatcagacttagatacaaaagctctggtttgatgaagagtatttgaaggaaatgaataagaattaggaatgaattaggaaaagattatcagaaaggagaatagtaaagatactaaagcaattctcatggtatgcattgaagacaaacatgaggatgataaggaaatttgtatatgggaattaatttgaaaagagtatgattatgatgcagatgatgaaaacagcatcttctatggggtgcctacaaatgccaggtggaacttttaaacacattatcttacttaatgttcattacaacttgcctcctatgtagct

SEQ ID NO: 906397 - DNA, 595 bp, Homo sapiens
tcttgagataaactcctataatctctcattagaaggaggctgggggatctctccttgcctgaaaggaaattaggtgctttctatgacttcctccctggcttgctttagggatatatccasacagaagtcttctgctaggagggtgtgagacttctgcttgctctaacaagagagaaagcactccctgtgccttcttccctggcatactgcagcaataaatccaaatctgtagacattccctataagtagtttccacatacattgtgtacccccaacttttacagtcttcacctgaggaaatgattcttaaattacctaactccagttgatggggctctgtgctcttgagtctgctagtaccacatagaataataaaagtgatatttaaacttgcaaacttttatcagctgtctcctcaggtttaagttgagcagtctgaaaaagagtgcaggcatctgcctcacaccctcttcttggtgtagggtagaatgattgggagataaactctggctctcatcttctcaccaagaaaagaagtaattggaacacatatctatcaccccaacctccttagctataccccaaaggactggtt

SEQ ID NO: 906398 - DNA, 586 bp, Homo sapiens
ttttggaagacatgcattcaaggctctatcactgtctttgggaacctgctgtaacttccatctgtacratttccacatcctcaaaatactgatcataacacttgcctctttgatatcctaagaaaaattgagtgaaataaaatacgtgaaaaccatttgtaaattaccattactcaagagaaaacatggtgatgattccaccctcttgaaatctctcagtaaatgaagttgtgaaaaccaatagcatcttcaggaccaaatatttgtatttgtgcagatctctgcaacaatctctagaacagaaacattccagacgtcctagtagaaagctgaacccccatccatttagatttttgcattaaaatgacagattgctctatgactattacttactggctattacataaggacatcttataacaaatccgtgaaaggctgcaaatggacaaagcatatcttaaagactaaaaaaaaaattcacaatggattgtaaggagaaatgttttattttcatagtaaggaatgttttagtttatactgcagaatcacagacaggtcacactgagataacagaaagcatttgtga

SEQ ID NO: 906399 - DNA, 641 bp, Homo sapiens
ggcacctccatctgcctaccagacatttccacctagaaattacagctcagtctcaatatggctaagactgagcatggggctaccaggacagcagaaccagggagtttcagtaccatggggtaacgatgtggcccacataagcatgccacctatgggtgacctttccagtcgatggacaccaccagcacttcctggacaagccacttcccctccccagagcacattctgctttttcacactacagctcccatcccaaccaagtctggctattagtgcatcactgatggactatggtttggggtgcttaaagtcccaagattactacccatggttgctacttagggatctccatgcatctgcaatatcctggtcattctggtcgactgctgtttggtgaggcctttaccagacacttctactccagtttctgtcacccagcaggggctttacatgccgcaacttgtccactctcatcatggaaaaatctcctaccaagaactggctccagttatgctgcagctgctggaataggggtgggggtggatgggatcatagctccaayagttcttacaggatttggttggggaacaggtgctactcagctctgatgtagggactggcccatcagccttctatcataa

SEQ ID NO: 906400 - DNA, 536 bp, Homo sapiens
tagtatttctagataagtagaaaatttgtttgttttaawgttaatgtagtagttccaaggcatacctagtttccttgtggggcattttttgcccaatcatgttagatttactaaaagagatttaaaagcatgattatatcaagatatgagtgctgggtacggaggctcacacctgtaatcccagcactttgggaggccgaggcgagtgggtcacttgaggtcaggaattcaagaccagcctggacaacatggtgaaaccctgtctctgctaaaaatacaaaaattagcctggcatggtggcgggcgcctataatcctagctacttgggaggctgaggcaggagaatcgcttgaacccaggaggcagaggttgcagtgagccaagattgtgccactgcactgcagcccaggtgacagagcaagactccatctcaaaaaaaaaaaaaaaaaaaaagatacaaaggcatgtctccataatcacaccttggaagagttcttatacagctgttgtctacagaattttgagagttacagaaa

SEQ ID NO: 906401 - DNA, 619 bp, Homo sapiens
caattatcaattgttgttgttaaaattgataagcctacaattgataagttacaattactgttgttacaattgataagcctacattgacacrccattatcacccaaagtctatacattaggcttcactctcagtgttgtacattctatgggtttggacaagtgtatgagaacatgtattcattatactatcatacagaattttatttattttttttttgagacagtctcgctgtgtcactcaggctggagtgcagtggtacaatctcagctcactgcaacctccacctcctgggttcaagcaattctcatgtctcagtttcccaagtagctgggattacaggcacctgccaccatgcccatctaatttttgtatttatttttagtagagacagggtttcaccacgttggccagactggtcttgaactgctcacctcaaatgatccacccaccttggcctctcagagtgttgggattacaggtgtgagccactgtgcccggcctcatacagaaatttttgactgctctaaaaatcctctatgctccacccattcactcctctctcccctcagcccctggcaaccactgatctttttatagttttcatagtttggccttttc

SEQ ID NO: 906402 - DNA, 491 bp, Homo sapiens
atatgaagacaatcccgtttccaacgaaatcctcaaacctatccaaatatcctcttgcagattttacaaaaagaatgttkcaaaactgctctatcaaaataaagcttcaacactgttagttgagggcgcacatcacaaataagtttctgagaatacttctgtctagttttcagtggaagatatttcctttttcaccatgggcctgaaagcgctcctaatgtccaaatccagatactacaaaaagagtgtttcaaacctgctctatgaaagggaatgttcaactctgtgacttgaatgcaaacatcacaaagaagtttctgggaatgctgctgcctgctttttatatgtaatcccgtttccaacgaaatcctcaaaggtagataaatatccacttgcagattccacaaaaagagtgtttcaaaactgctctctcaaaagaaaggttcaactctgttagctgagtagatacatcatgaaaaagtttctgacat

SEQ ID NO: 906403 - DNA, 491 bp, Homo sapiens
atatgaagacaatcccgtttccaacgaaatcctcaaacctatccaaatatcctcttgcagattttacaaaaagaatgtttcaaaactgctctatcaaaakaaagcttcaacactgttagttgagggcgcacatcacaaataagtttctgagaatacttctgtctagttttcagtggaagatatttcctttttcaccatgggcctgaaagcgctcctaatgtccaaatccagatactacaaaaagagtgtttcaaacctgctctatgaaagggaatgttcaactctgtgacttgaatgcaaacatcacaaagaagtttctgggaatgctgctgcctgctttttatatgtaatcccgtttccaacgaaatcctcaaaggtagataaatatccacttgcagattccacaaaaagagtgtttcaaaactgctctctcaaaagaaaggttcaactctgttagctgagtagatacatcatgaaaaagtttctgacat

SEQ ID NO: 906404 - DNA, 648 bp, Homo sapiens
tctggtatttttatattatgccattttatcctgtggtttgggaagttgagcatgtatgagttcatcatcttcaaattctactcttcctacatcttcctaggcaatagctaatctatgtaatatcataaaagctattgaccagtgggaagactattttccataatgaaatatttagtacacagtacatatatgttttaaaataaattataaactaaatgatgaaacaagatataatatataaaatctaagaatttagaataagcttccaggtaataacagagaaaaaataactaatgagggctcaagagatatctaattttttttcaatccaattttaaagagagagcatctttttgtttgcaacattataaagcatcttaggcttttttaagatccactatcaaaacagtagtaaactgaaaaagctgaccatctttctttcaaagaagcttgaatgtaattgacgaatatcaccaaacattgtcaaagaaatatgttaacccattcataaaagcatatattgagtactcactatgtacctggcactgttgtatggaggtaaaggtcatgcaccccagcttcaaggacctcacaaaaatgtaagccaatcatgacaatagtagcamcaatggctcactgtacactttg

SEQ ID NO: 906405 - DNA, 644 bp, Homo sapiens
agtaaccagaacccttctgatgcagttttcttcctgcctcatgagcaaagaattctggcaagtgaaaactgagaaatgattttttctcagtgtagggctcgtgtatcatgacagcaatgttattaagttagtaaataattgatcccagacaaataagcagagtttgatgttgtacaacccatcacacctcacccaaagtcacattgcactgggccacgccatcctaactgctcaaaggggctctgagatgtgtaaattcctctaaattctgcttccaatcagaagacgccagctttgttggggtttaaccacgttcaaatctaggatgtgcccaaacatgacagaggcattgttttctctccctcagctatccgtatgttaaaagcatctattaaaatgtgtctgagatggaaggcacccaacacactgtcattaatttaaggaaataaaattacaccatatgaagggttatcataaggaagatggtgaccagctgttctccatctcctctgggttagaataagagaaagtgggagggagttcaatttgaaattgaatccggagtgggaacttgacagaaggatggaagcatagccaatgagggatacaagacagacaaayggtagagctgtcataaatgggca

SEQ ID NO: 906406 - DNA, 572 bp, Homo sapiens
gttaaactgtccctgtttgctgaccatgtgattgtttaccttgaaaaccctaaggactcccccagaaaactcctagaactgataaaagaattcagcaaagtttccagataaaagattaatgtacacaaatcagtagctcttctatacaccaaaaccaatcaagcagagaatcaaatcaagaactcaaccccttttacaatagctgcaaaaaaaaaaaaagacttagtaatatacctaacaaaggagtcaaaagacctctacaaggaaaactacaaaacactgctgaaagaaattataaatgacacaaactaatggaaacacatcccatgctcatggatgagtagaatcaatattgtgaaaatgaccatactgccaaaagcaatctactaattcaatccaatccccatcaaaatagcactatcattcttcacagagttagaaaaaacaattctaaaattcatatggaaccaaaaaagagcctgcatggctgaagcaagactaagctaaaagaacaaatctgkaggcatcacactacctgatttcaaactatactataaggccatagccaccaa

SEQ ID NO: 906407 - DNA, 591 bp, Homo sapiens
cattttataatagattaggaaaaataacgcaatattcatgacaaaaatagctgcmtttttgagaaccttacttgtactagtcactgtgctaagtactttacaattagtatcttaagtaatcttcacaaaaacatatgaggatcagtgtcaccttatgtattagaaaactgagaccagtagactttaacttgtaagaaataaggccttctagaacccaagtctatctgattctaaactctattctctttccactatgttacattgcttctcatttatccagtttcaataacaacagcaacaatagcaatgttgtaatagcagcaaacacttatatggcatttatgtgccacacaatgtttatatatatctaaattcatttaatacaacacacatataaggtcggtaccatcattacccttatttcacaaaagaggaaactgaggcacagggccattgccaagggcagacagctagtcagtggcagagtcagcattgagtcaggcaggcagtgtggctccagagtcttgagcaacccgtactagaattagcaaccttcactagggacctctgctaccataagatctcatatcc

SEQ ID NO: 906408 - DNA, 591 bp, Homo sapiens
cattttataatagattaggaaaaataacgcaatattcatgacaaaaatagctgcctttttgagaaccttacttgtactagtcactgtgctaagtactttacaattagtatcttaagtaatcttcacaaaaacatatgaggatcagtgtcaccttatgtattagaaaactgagaccagtagactttaacttgtaagaaataaggccttctagaacccaagtctatctgattctaaactctattctctttccactatgttacattgcttctcatttatccagtttcaataacaacagcaacaatagcaatgttgtaatagcagcaaacacttatatggcatttatgtgccacacaatgtttatatatatctaaattcatttaatacaacacacatataaggtcggtaccatcattacccttatttcacaaaagaggaaactgaggcacagggccattgccaagggcagacagctagtcagtggcagagtcagcattgagtcagrcaggcagtgtggctccagagtcttgagcaacccgtactagaattagcaaccttcactagggacctctgctaccataagatctcatatcc

SEQ ID NO: 906409 - DNA, 637 bp, Homo sapiens
ttatgacagctgccattttatgtttatttgtgagattacttaataatgtctgtctccctcactagcctacaaactcatgcatgcagccagggaccatttctactttgcactgtatttctagcataatgctaggcatgtagtaggcacttcataaatatttatcgaatggatatggattgtataagtgttcagggcactgttttagatgctctagggcactgattctcaaactttagcatcagaatcacctgaaggcttgttaaggcacagattgctgggcctgaaccctagaatttctgattcagaaggtcttgggtgtcacataaaaatttacatctaacaatttccaaggtaatgctgatgttgctggtccatggacacacaatttgagaaccattgcttaagggaattaaacatatgactatgatatggtcaccatcttcaagaaatttacaattttattctgggtgtgaaaccaaaattataactgagaaaattattacagtgaaagacgtctgacytgactaactccatgttgcttctaacttccaggctgtccttgttcattcctgggcataggcccaactaactttgggaggaacttagtttatagtttaactttgaaacaaagacaata

SEQ ID NO: 906410 - DNA, 628 bp, Homo sapiens
cccaagaccatggggaaaatgtctccagagcatgtcagaggtcttcacggcagcccttcccatcacaggcctggagacctaggagtaaaaagtggtttcatgggctagacccagagtccccaacctgtgtgtagcctaggaacttggtgccctgtgtcctagccactccagccatggctaaaaggggtcaatgtagagcttgggccatggcttcagagggtggaagcccaaagtggcagctttgacatggtgttgagctgcgggtaccagaagtgaagagttgaggtttggggaccccacctagatttcagaagatgtatggaaacgcctggatgccccaggcagaattttgctgcaggggtgaggctctcatggaaaacctccactagggcagtgtggaaggcaaatgtggggttggagcccccacacagagtccctactgggacactgcctagtggagctgtgagaagagggtcaccgtcctccagaccccagaatggtagatccactgacagcttgcactgtgcgcctggaaaagccacagacactcaacaccagcctgtgaaagcagccaagagggaggctgtaccctgmaaaaccacagaggtggagctgcccaagaccatgg

SEQ ID NO: 906411 - DNA, 533 bp, Homo sapiens
tcatttgtttaaaaaaaattaattttcttcttaatttcttcagtaactcatttagaagcatgttgtttaatttgcatgtatttgcactgtttccaaaattcctattgttcttgattcctaggtttattgcatcatagccagagaaaatgcttgatattgtttcaattttttttaatgacttatgacttgtttgtggcctaatatatggtctattcttgagaacaatcaatgtgctgaggaaaagaatatgtattctgcagccattggatgaaaagttctgtaaatatctattaggtccacttggtctacagtgcaatttaagtctgatgtttctttgttgattttctgtctggaagatctgtccgatgctgaaagtgacgtgctgcagtctcaagttattactgaattgaggtctctctctttagctctaataatacttgctttatatatttgggtgctccaatgctgggtgcgtatatatttaaaattatcatattctcttgctaaaytgacctctgtatcattatatggtg

SEQ ID NO: 906412 - DNA, 391 bp, Homo sapiens
actaaggaacaaaaaaagaaaaaagctataattcattaggaaagatatacaaagactgatgactctatggaaggacaggtatgaaatgtacaagtatggaatgtgtttgtgcagtgggatacaaggaggaagagcaactggaaacataaaacacaggtgaacaacacaggtaatagccagtttcttattgattagcactgcttaaggaagatttaacgtcacagtgcctaatgcataaggtagaatgcatgccattctgattctggcatattggaatgcattttatttctatgatactcaaaactgaacgtttctccagctcacacctgaagcttcatgaaagaakcagagaaaacaccaagcacaagccaggcaggcaatgtgaagacac

SEQ ID NO: 906413 - DNA, 596 bp, Homo sapiens
acaccaaaaacaatggcaacaaaagccaaaattgacaaatgggatctacttaaactaaagagcttctgcatagcagatgaaactatcatcagagtgaacaggcaacctacagaatgggagaaaatttttgcaatctaccaatccgacaaaaggctaatatccagaatctacggagaacttaacaaatttacaagaaaaaaacaaacaaccccatcaaaaagtgggcaaagaatatgaacagacacatttcaaaggaagatatttatgcagccaacagacatacaaaaatgctcatcatcactggtcatcagataaatgcaaatcaaaaccacagtgagatatcatctcatgccagttagaatggcgatcattaaaaagtcaggatacaacaggtgctagagaggatgtggagaaatatgaacacttttacactgttggtgggagtgtaaattagttcaaccattgtggaagacattgtggcaattcctcaaggatctagaactagaaataccatttrgcccagcaatcccattactgggatatacccaaagggttataaagcattctatgataaagacacatgcacacatatgttt

SEQ ID NO: 906414 - DNA, 629 bp, Homo sapiens
ctctgggcttctgaggccccctgtgcacacactgtcaaataactcaasgcatcgtattattatagtctgacttgtttctcctcaactacactgtgaaagtagagatccagctttatttcgtgttaccacattaagcacattacttggtacataataataattgctgaaccaatgtttgcgaagtgaataaatgagagaacaaaggagatttatcatatatcttgagccagagtcttgattaacactggctagccctttgattatttggagatgactaccaatgcagagtggttcagggaagggaggaacacagatagatgcttttgtacagacctgtactgtctgataccacagctgctagatatatgtgactattgggcacttgcaatgtggctagtccaaattgagatgtactgtaaatgaaaaacaggtactcaatgttaaacagtcattaatgtctcattaatactttaaaattatgcttacattaaaaaattataatattttggatagattagactacataaaatatattatcaaaattgtatcttttttaactttttaaatgttgctataaaaattaaaaattgtatatgtggttcaccttcgtgacaactcattacattttt

SEQ ID NO: 906415 - DNA, 366 bp, Homo sapiens
ttcctctttaccgatttgtatgctctttctttctcttgtctgattgctctggctaggacttccagtactatgttgaagaggagtggtgacagtgggcatccttgtcttgttccagttctgagagggaatgctttcaacttttccccatttagtattatattggctgtgggtttgtcatagatggcttttattatattgagatatgttctttcaatgtgagttttgctgagagttttaatcataaagggatgctgggttttgtcaaaygctttatctgcatctattgagatgatcatgtgatttttgtttttaattctgtttatgtggtgtatcacatttattcacttgcatatttaaaccatccct

SEQ ID NO: 906416 - DNA, 582 bp, Homo sapiens
atagatatattataatcatgtatagaaaaacttaawattgtaagggtattagtttccttctaggtgaacagatgtaaatttattgcaattccaaccacaatctcagcaggactgccacagactaggagaaaatatttgtaattcaaatatccaacaaaaatgattgtccagaatatataaaaaataccacaggacaaattttttttaaacacaaagggatcatcaatatataggtgattgtttttaaaatgtcaacaaattctgtctatattcccttcaaaaagcagagctaattctcctctccttgagtatgatctggatttagtaacaatttgaacaagtagaataagatggaaataggataatatgtgtgacttctaataagtcatataagggatcatggcttcctccttgctcactcttgaattacttacactggagtaagctaaccactatgtcatgaggacactcaagcagccctatgggttggtccatgttacaaggagctgagaccttcaaccaatagccatatgagtcagccatcttggaagcagattccatgccccagtcaagccttcagat

SEQ ID NO: 906417 - DNA, 558 bp, Homo sapiens
ctgtgtgtggggacgttgaccycacatttcccttttacactgccctagcagaggtctccatgagggctccacccctgcagcagacttctgcctagacaaccaggtgtttccatatatcctctgaaacctaggtggagttcccaaatctcaattcttgacttctctgcatttgcaggaccaacattatgtggaagctgccaaggctaggggcttacaccctctgaggcaacagtctgagctgtaccctggcctcttttagccaagcctggagcggctgggatgcagggcaccaaatcccagggctgcacataggaggggggccctggacccagcccatgaaaaattttttgcctaagcctctgggcctgtgatgggaggggcggccatgaagttttctgacatgccttgaagacattttccccattgtcttgacgattaacatttggctcctcattacttttacaaatttctgcagtagcttccatttctccccagaaaattgtttttgcttttctatcacatcactaggctgcaaactttccaaacatttatgctctg

SEQ ID NO: 906418 - DNA, 598 bp, Homo sapiens
cagaaaattgtttttgcttttctatcacatcactaggctgcaaactttccaaacatttatgctctgcttcttcttgaactctttgccacttagaaatttattctgccagatatcctaaatgacctctctcaagttcaaagttccacaatctctagggcaggggcaaaatgccaccagtctttttgcatagcaagagtgacctttactccagttcccaacaagttccttacctccgtctgagaccacctcaacctgtacttcattgtccatttcactatcaatgttttggtcaaagccactcaacgagtctccaggaagttccaaactttcccacatcttcctatcttctgagcccacaaaatctctagaaagttcgaaactttcctacatttttctgtctttatctgagcctttcaaatggttccaacctctgcctgttacccagttccaaagttgcttccacatttttgggtatctttatarcagcaccctgctctctgcagtaccaatttactgtattagtccattctcatgctgctataaggacatacccaagactggataatttataaaagaaggaggtttaattaactcacag

SEQ ID NO: 906419 - DNA, 586 bp, Homo sapiens
catgctgaactgtgagtcaattaaaactctttcctttataaatttcccagtctttggtasgtctttattagtagtgtgagaacagattaatatagtaaattggttctgcagagagtgtggcgctgctgtaaagatacctgaaaatgtggaagtgactttggaattgggtaacaggcagggaaagacaggaagatgtgggaaagtttggaacttcctagagacttgttgaatggctttgatcaaaatgctgatagtgatatggacaatgaagtccaggctgaggtagtctcaggtggaggtgaggaatttgttgggaactggagtaaagttcactcttgctatgcaaataggctggtggcattttgcccctgcctcagagatctatggaactttgaacatgaaagagatgatttagggtatttggcagaagaaatttctaagaggcaaagggttcaagaagaaggagagcataaaagtttgtagcctgatgatgtaatagaaaagaaaagtcaattttctggggggaaattcaagcctgctgcagaaatttgcataagtaaaaaggagccaaatgttaatcatgaag

SEQ ID NO: 906420 - DNA, 481 bp, Homo sapiens
caaaagttaaaacataataatagtaataatttaaaaaaaagtttagactggcaggtggtccagggagraagggcagctctgtaccacaaattgtctggggccctcgttcttcttttcttgttattccactgccctttagcgtgttggtttagtcatcttagcttcaattagccctcatctacctcatctgcatttcagtgagctggaagggaaagaggaaaaaggaggcaagctgcttcctcttcagggcatgacctgatgtttgatacattgcttcttctcacatcttgctagacagagttttgtcacatggttatctctcactgtaagaaaggtttagaaatggaatctctagtttcctggccatcagagcagctataacttatagctatgggactataagaaacaggaatcaagatagaatggatattggggacaatcagtaaccatgatacagagacctccatagaagggcaagtat

SEQ ID NO: 906421 - DNA, 651 bp, Homo sapiens
actagcatcatgaaaatggactaatacagcatcatagaaacataactcaaagaaataagagccatatatgaaaarctcatagccaagatcacactgaagaagcaaaaattggaagcattccccttgagaactggaaaaagacaaggatacctactcccacactcctattcaacataaacctgaaagtcctagccaaagcaatcaggcaagagaaagaaataaggagaaaagggatccaaatataaaaagagaaagtcaaactatcttcactaatgataggattctatacctagaaaccctaaagattgccaaaagattcctggaactgataaatgactttagctaagtttctggatacaaaatatatgtacaaaattcagtagcacttctatacacaaacaatattcaagctgagagacaaatcaataattcaatcccatttacaattgccacacacacacacaatcacacaaatacctaagaatacatctaacccaggaggtgaaggatatctacaaggaaaactaaaaagtattgctaaaggaagcagagagatgatacaaaaaaatgaaaaaaaagatttcatgctcatggattggaagaatcaatattgttaaaatgaccatattacccaaagcccaaagcaattta

SEQ ID NO: 906422 - DNA, 620 bp, Homo sapiens
aaaaccaggggagctaatgttgtaaaccctgctggtttggcttcaaaggcctgagaaccaggagcaccagtgtccccaagctggaggagacagagtgtcygagtcaaacagaaagagtaaatttgctgtggtttcttttgttgttgttgttgttgtcgtcgtcctattctagccctcaagggattagatgatggtcacccacattggtgaaggtggatcttctgtgctctgtctagtcattcaaatgctaacgtcttccagaaacactctcacaaacataaccagaaacaatgttttaccagctatctagacatccctttgccctgtcaagttgatacacaaaaaaccatcataagtaggaatacttgtgaagtatatgtaaatatctctgaaaacatggtaacttgagtcaaagtgaaagttaaatgaaggagtgagccaagcagtactcagggaggagagtggccttggcagagataccaggaatgtcaagcaaagctcaagagaagggaagggtaagagaggcattagagggagatcctgcaggtcagagaggtcatggaagatctttagattgtattatgagtaaggtgagcgtctctatacttacaagcaaaaaa

SEQ ID NO: 906423 - DNA, 586 bp, Homo sapiens; identical to SEQ ID NO: 899980

SEQ ID NO: 906424 - DNA, 697 bp, Homo sapiens
ttgatcctcaagagagctctgtgagtttcctcaacagcatttaggaatgcatctcatcttgaatttggaattttgttgtatttccagaaacaaaactggaagaagacttaggtgctacacattcatttatttattccatttttcacttattcagaaaatatttttgagaatcttctacttgcctgggtatgctctatgctggggatacagtggtgagttgctgctacagaattaagggaaacagacaataaacaagtaaacaaaagaaacaaatgatattcactgggatagacagtggctgatgagggagggagcaatgtggtgaccacattcagatcgggtggtcaggaggtccctctgagaagcagtctatggatctgagactcaaacactgaggatccagccagcagagacctgagggaaagggatcagtaacttccctgggcgggaactagcatggagtgctgaaggaacagaggcaggcagggcagctggagatcagtgagcaggagggagtttggtgtgaggtgagttagacagggaggcaagggccaggtcatgcagcactttgtaggccattgttaatagttggattttaagtgctttagggggcaaaaagatgctagtgtcctgccaagatcattagaaagaaggtgcacccmcctccagctactagggactcacagaaacacccatc

SEQ ID NO: 906425 - DNA, 652 bp, Homo sapiens
aaaatacaaccaaatgcaagttwaatgaataataaaactaaagatatgttataatgcattctaaaaataagagatttccctatattgtactttcgaatctacattagaactgttgtacattttgtggatacctatgatttccaaatacatttcaatatgaaaaataataattctactatgaaacataaaaaagaacattaaacaaagattttttggttaatgaacataatggagatttggcctcaggggaatgatgataatgaaaatggtcatatattatgagagttaccattctattgaatgacaagatccattccttccttttggcatagaaaaacactctatagaaccaaagggacctaattctcgtctatgttttatctacaatgtgaataaattttcctaattaaacatatgtattaatagagaattttatgctttcaaactttcctcagctctttctttcctgaaaccttaataatggagacactaagtccatttctctaacaccttcgcacaggacattagagataaaaacaaccctcttcctctggcataagcttaattttccgccttggaaaaacaaatgtttatacaatttgattttatttataccattctatgcaatgaatttctacattactttgacaca

SEQ ID NO: 906426 - DNA, 627 bp, Homo sapiens
caacaatgtatggagcagggtgctgtgcaaattggttttctttttttcttttttgtacttttagcagagacggggtttccctgtgttagccaggatggtctccgtctcctgacctcgtgatccgcccgcctcggcctcccaaagtgctgggattacaggcgtgagccactgcacccagccgcaaattggttttcttatagaacttatataattttatctgcaatactaactctcgtatgcaactggaagctgtagaaaacaattatgctcaatcttaagagtaaacaaataatacatagtgtaggtatagctatggaggaaaaggaatgctttatacactgttggtgggaatccaaattagctcaaccattgtggaagacagtgtggcaattcctcaaagacctaaagactaaaataccatttgacccagcaatcccattattgggtatatgcccaaaggaatatacattattctgttaaaaagacacatgaatgcatgcatatgttcattgcagcactaaccacaatagcaaagacatggaatcaacttaaatsctcatcaatgatagactggataaagaaaatgtggtacatacataccatgcaatactatacagccacaaaaaa

SEQ ID NO: 906427 - DNA, 684 bp, Homo sapiens
ttccatggtttttaaaattatttttaattttgtagagactgggtctctgttacccaggctgtagagccgtggctattcacaggtgtgatcatagcacattgcggcctcaaactcctaggttcaagtgatcctcctgcctcagcctcccaagtagctgggattaccacacctggctcagtttgtatacttttaattaaaatacatttttttttgatatggtgccccctctgtcacccaggctggagtgcagtggcacaatctcggctcactggaacctccacctcccaggctcaggtgatcctcccacctcagcttcctcaatagctaggatcacaggcacatgccactatgcccagctaatcttttgtatttttggtagagatggggtttccccatgttgcccaggctggtcacaaactcctgagctaaagtaatccacccaacacagcctcccaaagtgctggaattactggtgtcagccaatgtatctaatatattaaagtagttttaatatccatccctttagacagccaaccaatatttattgaatttctgctaagtgctaagccctgtgcaaatactggggatacaatgatgaagaaaacartatcctgaaactcgtagtctgtggaagatacagctatgaacaagtaagccactagagctattaggttaaatttagga

SEQ ID NO: 906428 - DNA, 598 bp, Homo sapiens
  misc_feature 502: n = A,T,C or G
attttcgagattaactaagataattcaygtgaagccatttggtaaaccacaatgtagcttataaatgttaggaaatattagtataatctcaaagaaaaagaatataatttttttaaagcaacaaaattgaagcattggaagaacagggaacaagctactagcaagttactattttgctgggaaaattccttttataatagacaccatttgaatatcaagtagtatgccagtttttaaattttgcttttatgtgaggctatcagaagtatttatgaagctatgcagcacaatctggagagttattcaaaatgtgggccaagtgggtattttaaaatttcatagtggattggaaaggaacaattaaagtttggaaagaaagcctatattagattcagagctggtatagccacaaggccaggcttttgtgaaactagtgatttacaattaaactactaatggaagatatttttctcctcttatttagatgagtgacacgtatcanagaattgtaccaaaccagttcagatttgagatagagggaagattgaaagcccttcatcatgaaatagcattgcaattattgacttacattagaaaa

SEQ ID NO: 906429 - DNA, 624 bp, Homo sapiens
ccatgttggctaggctagtctcaaactcctgacgtcagatgatccacctgcctcggcctcccaaaatgctgggattacaggcatgagccaccgtgcccggccagaggagccctcatttatagcaagaataaaaacattttgtcaggaaatttaataataagcccagactgagtgcttgctatgtgccagacactgttctaaatgctttacatgcatttcttcatttaatcctcacagtgtcctgaattaggtgctttattttattatttccactttgccagtgaagaagcagaggtagtgagagggtaagcaacttgcctgaagttaaaagctagtcagttgtggacttagggtttgtagccaggcagttgtggtcttcagggaggggacataacatcattcccctcctgaaactccatattcctttgtaaatcttattctgtgttacatattttcctgtccttcatttagttatttaggtcagcttcttgtacttctgctgcaaaacgttgctgtcaatttacttgacctggtaacctcccggtgagtttcgccagggctkccagtcaatttagcaggtcactctagtacctgtgggagggtgagggcatggaatcctcagga

SEQ ID NO: 906430 - DNA, 581 bp, Homo sapiens
attccctacaggtaagagtttaatgtttacccttctggatctttcattagagagtattttaggcaggaataggcaatgaccagatttgtatttaaaaaaaaatcactttgggaccgggcacagtggctcacgcctgtaatcctagcactttgggaggccgaggcaggtggattgcctgagctcaggagttcaagaccagcctgggcaacatggagaaaccctgtctctactaaaaatacaaaaaattagccgggcatggtgttgcgtgcctataatcgcagctactcaggaggctgaggcacaagaatcgcttgaacccgagaggcggaggttgcaatgagtcgagatcatgccattgcactcccacctgggcgacagagtgagactctgtctcaaaaaaagaaaaaaaaatcactttgggtagaaggtagtggacggggtgactgaaaccagggagactccccaagtcatggggcagttctttcagagagacagtgagagtctgtatgtactgaggcagcgcygggggcgcttggttcctcacccatcatgcaggtgagggagtgagaggaattataaat

SEQ ID NO: 906431 - DNA, 653 bp, Homo sapiens
aagcataaaatgtatttgactaaaatataatgcaatgttttatgtgacagtaaaattatatcttgggttgcttcccyaaggacagttcacttagaaatagtgctgaaaagtcagtcactaggaaaaatatttccatctttatttgaaagattagcaccttgttcttttttgttgccaaattggaaataaaaccagtttccttggtttgcataaggtacgaaggaggagaaatgtgattttatgtgctgtatcctgctgacattagctgtgtctctgatgtcaaaccagctccctccactgggctaaaaatgaccacaatcattggcatggtaggttttctatctgcaatgttcctgatgtgctctgacctggttagtctcagggctaacagtgttatcagtctctggtgtgtgtatttggacaacaaaatgcattagatggtgcagaagcaagcacatttccacgcagggaggtgtaaaggagacaatgcattttttattctttccacatctgggttggttcatgttatggataaatataagcatacacagaaaaactggacaatggattttaaaatcaagatataagaatgtaccgattaaaaaaaaaacagaaaagctaggcacagggatgaaaatagatgttggctttga

SEQ ID NO: 906432 - DNA, 653 bp, Homo sapiens
aagcataaaatgtatttgactaaaatataatgcaatgttttatgtgacagtaaaattatatcttgggttgcttccctaaggacagttcacttagaaatagtgctgaaaagtcagtcactaggaaaaatatttccatctttatttgaaagattagcaccttgttcttttttgttgccaaattggaaataaaaccagtttccttggtttgcataaggtacgaaggaggagaaatgtgattttatgtgctgtatcctgctgacattagctgtgtctctgatgtcaaaccagctccctccactgggctaaaaatgaccacaatcattggcatggtaggttttctatctgcaatgttcctgatgtgctctgacctggttagtctcagggctaacagtgttatcagtctctggtgtgtgtatttggacaacaaaatgcattagatggtgcagaagcaagcacatttccacgcagggaggtgtaaaggagacaatgcattttttattctttccacatctgggttggttcatgttatggataaatataagcatacacagaaaaactggacaatggattttaaaatcaagatataagaatgtaccgattaaaaaaaaaacagaaaagctaggcasagggatgaaaatagatgttggctttga

SEQ ID NO: 906433 - DNA, 654 bp, Homo sapiens
taattccctatgaatggattacttggtatttttcartctcttgcaatttttcacaatgtttgaataaaaactaatatggctaaatctctaaacatttccaaattcttgtcttagggcaaattgccagaaacagaattgctgggttacaaggtatgcgtgcttcttaaagatttaatgtctattgctaaattcacataaaatttaaattatgtgttacgcttttttgtctctggagataattaatcacattcagagtcaggaatcctgagtgtgatactcccttataataagatatggctgggtgcatttatacacatacacttttatccgtgaactgttttgatattgtgctgttttgtgataactcagaagaattgcagtacacatttatgtggctatctttctgctttcctcccagggaatgttgttagagaaagaaaacaaaatcgctacatgtttctgagtttgcagagaattttaaaccgattctctaagactctttctagcttttataatttaagttggtgtttgttttatctcaacacacttattgagtttctactacatgattagtaatgaggcctgtggcatgaagaagcatgatgtttgggaagaagagttatgcagcaatggtaagcgtacattgtcagaggc

SEQ ID NO: 906434 - DNA, 620 bp, Homo sapiens
cccagcacaatccaccccttttcccgtttaaacccacaaaatccttgcaacacatatttagcttctaaccaacaccagcaacaaattaatgagtctgcctaatatgatgtgtctgctcttatataaatgtagatgcactcacccactcttggaaaggtggagactcaaagtttcccttcagaactgtagccatctctggatagtgttaattctccttctagtttagtcacagtccttctttgataatcagtaaactaaaaattaaattacaaattaatcacaactaacaaacttctgtatggaaaagagaagataagaagatgtacgtacatatgcaagaaacaatacatagttaacatggtcctcatttttgcaagcagttacaaggccatacttaggctttaaacttctttcttctacaacccactctgtttcctttacaatcaatcagtcagcatctaagccagtcatagctttttatctgttggaataactcaaatctctactcctgaargtgcctgtagtgggttgctgtatgcttccactaacttcctgcataaggaatgcataccaataaatcccctaggctcccaacacaaattccctaggctccaccttat

SEQ ID NO: 906435 - DNA, 559 bp, Homo sapiens
tcctggataatatcctgaaatgtttcttccaacttggttscattccccccatcacgttcaggcacaccaatcaattgtaggtttagtcttttcacatagtcccacatatcttggaggctttgtccattccttttcattctttttttctctaaacttgtcttcatgccttatttcattaagttgatcttcaatctctgatatcctttcttctgcttgattgattcagctattgatacttgtgtatggttcatgaaattcttgtgttgtgtttttcagctccatcaggtcatttatgttcctttctaaactggttattctagttagcagttagcagttcctgtaaactttttttttttttttttttttttaagatggagtcttgctctgttgccaggctagagtgcagttgcatgatttcggctcactgcaatctctgcctcctgggttcaagtgattcttctgccttagcttcccgagtagctgggactgtaggtgcacgccaccacattcagctaatttttgtattttcagtagagacagtgtttcaccatgttgccca

SEQ ID NO: 906436 - DNA, 575 bp, Homo sapiens
gctgttttggttactgtagtcttgtagtatagtttgaagtcaggtagtgtgattcctccagctttgttstttttgcttaggattgtcttggccatacaggctcttttttggttccatatgaaatttaaagtagtttttttccaattctgtgaagaaagtcaatgggagcttaatgggaatatcattgaatctataaattgctttggttagtatggccattttcacaatattgattcttcctatccatgagcgtgaaatgtttgtccatttgttcatgtcctctcttatttccttgagcagtggtttctagttctccttgaagaggtccttctcatcccttgtaagttgtattcctaggtattttattttctttgtagcagttgtgaatgggagttcactcatgatttggctctctgtctattattaggatataggatttcttgtggtttttgcacattgattctgtatcctgagactttgctgaagctgcatatcagcttaaggagtttttgtgctgagacaatggggttttctaaatatacaatcatgtcatctgcaaacagagacaatttgac

SEQ ID NO: 906437 - DNA, 631 bp, Homo sapiens
caccgtggctcgcacctgtaatactagcactttatgaggccgaggtgggtggatcacctaagatcagggattagagaccagcctgggcaacatggtgaaaccccatctctactaaaaatacaaaaattagctgggtgtggtggtgcacctcctaatcccagctacttgagaggctgaggcacgagaatcacttgaacccaggaggcggaggctgcagtgagccgagatagtgccactgcactccaccctgggtgacagagcaagactctgtctcaaaaaaaaaaaaaaaaaaagacaaaagccagtgctagcaagaatgtggataaaagggaaccagggaaactctgtacactgttggtgggaatgtaaattagtacagctattatggaaaatgatatggaggttccttaaaccagaagtactatgtgttccagcaattccacttcggggtatatagtcaaagaaaatgaaatcagtatgtcaaagacatacctgcactctcatgttccttgcagcactattcataacagccaagatatgsaatcaacagacagatgaataaagaaaatgtggtatttttaaaaagtggtatacacatacaatgtaatctattcagccttaaaaaattgag

SEQ ID NO: 906438 - DNA, 643 bp, Homo sapiens
tgatcaccattctaactggcctgagatggtatctcattgtggttttgatttgcgatttctaatgagcagtgattatgacctttttttcatatgtttgttgaccacataaatgtcttcttttgagaagtgtctgttcatatccttcgcccactttttgatggggttgtttttttcttgtaaatttgtataggttccttgtaaattctggatattagccctttgtcagatgaatagattgaaaaaattttctcccattctgtaggttgctggttcactctgatgatagtttcttttgctgtgcagaagctctttagtttaattagatcccatctgtcaattttggcttttgtttccattgctttttgtgttttagtcatgaaggcattgcccatgcctatgtcctgaatggtattgcctatgttttcttgtagggtttttatatttttaggtcttacatttaagtttttaatccatcttgagttaatttttgtataaggtgtaaggaagaggtacagtttcagttttctgcatatggccggccagttttcccaacaccatttattaaatagggaatcatttcccctattgyttatttttgtcatgtttgtcaaagatcagatggttgcagatgtgtggtgttatt

SEQ ID NO: 906439 - DNA, 631 bp, Homo sapiens
aatagatcaaaaaagaaatcacaaagcaactttagagaaaatgtttagagataratgaagacaaaaacacagtatgccaaaactataagatatagcaaagcagggaacaacagggaaaatttatagctctacaagcttacattaaaaaaaaaagaaagacctcaaattaacaacccaagtttacaacttaagaaactagaaaaagaaaaacaaaacaaaacccaaaactagcagcaggaaggaaaaaataaagattagaaatgagaaaaacaaaacaaagaaatgaaaaaaaaaaaaacaaagaaaatctataaaactaaaagtggagtttttgaaaagaacaatgcaattgtcaattctatagctagatgtactaaagagatgagtccagttactcaaattagaaataaaagtggggatattcctaccaattctacagaaataaaaaggattataagagaaaattgtgatcaattgtatgtcaacaagttggataacttagaagaaatggacaaattcgtgtaaatacaaaagctactaagactcatccatgaagaaatagaaaatctgaatagatctgtaatactgaggacattgaatcagtaatcaaaaatctcctgacaaagaaatg

SEQ ID NO: 906440 - DNA, 636 bp, Homo sapiens
aattctcataacaacactataagatagatartatcaattgccaagttgaccgagacagtatgaagtcaagctggtaagaagcctggctctggagtcccagcaccaatcatgttgctattttgcctctcaggcatttgggcagagactggatctcacttacgatttttttgtcatactttcttttaattgtttgctcattccttcactcaatgtattgagcataaaaaaaaatgccaagctctggaggaataatgatgaataacagaaatttctgcctttcagtagtacccaagtttggtaaggagattcaacttttgatgaaataattacaatacactgagaaaactgctgaaaataggtaaaaatttctttagtaaaaggcgaaagatttacacgatctgaagagaaaccagagtgaaaacaggtaaaaatttctatagaagcaaatactaagggggaatcatttaaacactgaatttcaatttcctcatctataaaactgacattaagtaacaagtatttatctctgaaaatacataattctacaacatgattaaacatgctaagttggtatttacttttcttacacaacaatatgtgccctattttattctatataaaccaaaggcttcaggg

SEQ ID NO: 906441 - DNA, 644 bp, Homo sapiens
tttcaggtctccaagtccattctttgtgtttggactggtgagtgtttctcacactctataatcgcaaagtagggaggtatctcttcaagaagacaagtgtcattcaaatatttctgcataacaaaccagtacaaaacttagtggcttaatgtaataaacgtttgtcattgctgatgattctgcaagtcagcaatttaggctgagctctgcagggcaattatggttacactcacgcaactatggccagcttccagtttagcttgggactggctattagctggggcaacaggggagtctgagtcatacatctcaccatccagtaggctaccttaaggtcatttacatggtggctggcagagttccaaaagagagcaaaatctggaaggcttctgtgcttagaactggcacagcatcacttccacattcatttagccaaagcaggagtagaaattcaaaagagtggaaatagattccacatctagacaagaggagctaccaaggcacgatgtacagtcatgaatacctagaaagagaatattgcatccatttgtgcaatctaccaggagagataaaatatataaaccataaaggaaaagattaatacatttgaatacagtaaaattraaacttatatatgaaaaaag

SEQ ID NO: 906442 - DNA, 631 bp, Homo sapiens
aacttttctttttttgttgtatctctgccaggttttggtctcattgctttgataatacattggtgcggtgcgttctagcccttaactctgaaaattctgataaagaacagacacctaaagaaaaaatgaaatttgtaaaagggaccaaatggaaaattgccatccttgacttttcttgggcgttctgagataaaaatctgtccaagatccatgcatagaagttcaaggctatggcttgtggtcactgaaatctatatcttaggctagaactaaagtaaggtcttttctcattcattttcctatctgtatatctattactctaacatgaaatggaaaacattgtctcttactactagttgaaattcccaaatttacatcttctctgagctagatctagatccaactgcttactcagggtctacacttagatgcctataggcatctgcaagtgatatgcctaagataaaactcttgaccactatgatctttgttctacctagaacgtattccagggcagtctccaatatgtcagtttatcatccaactcttaatcatgtcacaatactgggtaccatctttgattytattttcttccttactctcttaatttgtttcttctgtaaattctgcc

SEQ ID NO: 906443 - DNA, 705 bp, Homo sapiens
gaactagacagtaggctatgtgctgaaaaaggatgaaaaagccataaagtggagatgtcaatacctctttaagaatgataggctacaaagctgattagctgcatacttgcattctttgtcatcactacctgaaggcaaaaggcctttttttgggagcatgtgctaaagataaaattactcttcctagttccttctggcaaatggtcaccaaaaaacacattcaagagccaatgtcttttgtgtgcaatacataggatattaaaagttaaggtaaacaaaggtcaaagattatgctagttggagtctcagggtttcctggttccttaaaatttagttaagtttgggccaatttttggaagtccaaatctcttctcaaatattctgttatttgtgctcctcttaggtgggaatgggaatttttgttctctaccctggggttgacacaaatgtgggactttcttgatcctccctcctaaagaactacagatcaagagcttgtattagatttttaaggggcatagggaaaggttatgtttgatgtcatagagcaatgactaaggcatgttaataaaattccatttaaaatgtatttttttcctaccttcccattatcatrtagtttagcaattctagcatcttgcttgctcctccacaggccaaggtaaaagcctgtgcttatgatttgttgtggtcttgatttctacc

SEQ ID NO: 906444 - DNA, 705 bp, Homo sapiens
gaactagacagtaggctatgtgctgaaaaaggatgaaaaagccataaagtggagatgtcaatacctctttaagaatgataggctacaaagctgattagctgcatacttgcattctttgtcatcactacctgaaggcaaaaggcctttttttgggagcatgtgctaaagataaaattactcttcctagttccttctggcaaatggtcaccaaaaaacacattcaagagccaatgtcttttgtgtgcaatacataggatattaaaagttaaggtaaacaaaggtcaaagattatgctagttggagtctcagggtttcctggttccttaaaatttagttaagtttgggccaatttttggaagtccaaatctcttctcaaatattctgttatttgtgctcctcttaggtgggaatgggaatttttgttctctaccctggggttgacacaaatgtgggactttcttgatcctccctcctaaagaactacagatcaagagcttgtattagatttttaaggggcatagggaaaggttatgtttgatgtcatagagcaatgactaaggcatgttaataaaattccatttaaaatgtatttttttcctaccttcccattatcatgtagtttagcaaktctagcatcttgcttgctcctccacaggccaaggtaaaagcctgtgcttatgatttgttgtggtcttgatttctacc

SEQ ID NO: 906445 - DNA, 547 bp, Homo sapiens
cttctgaccttgtgatccacctgccctggcctcccgaagtgctgggattacaggcatgggccaccacgcccagctgataarattttttaaataaaagttttaattttatcaaatgtcttttctgcatctattgagagaatcatgtggtttttgtcattggttctgtttatgtgatggattatgtttattgatttgcatatgttgaaccatccttgcatcccagggatgaagctgacttgattgtggtggataagctttttcatgtgctgctagatttggtttgccagtattttattgaggattttcacatcaatgttcttcagggatactggactaaaattctctttttttgttgtgtctctgccaggctttggtatcaggatgatgctggcctcataatatgagttagggaggattccctctttttccattgatcggaatagcttcagaaggaatggtaccagttcctcttgctacttctggtagaattcagctgtgaatctctctggtcctggactttttctggttggtagactattaattctta

SEQ ID NO: 906446 - DNA, 578 bp, Homo sapiens
ccattgcactacagcttgggcaacaggagtgaagctccctctgaaaaaaaaaaaaaaggggggggggggatatgaacaaacagacacttctgaaaagaagacatacactacttaaccaacaaacttaggaaaaaaagctcaatatcactgatcatcagagaaatgcaaatcaaaaccacaaatgagacatcatctcacaccagtcagaatggcgattattaaaaagtcagcaaacaatagatgatggggaggctgtggagaaatagaaacacttttacactgctggtgggaatgtaaattagttcaactattgtggaagagagtgtggcgattcctcaaggatctagaaccagaaatactgtttgacccagcaatccctttactgggtatatactcacaggaatataaatcattctactataaagacacatgcacatgtatgtttattgcagcactatttaaatagcaaagacatggaaccaamccaaatgcccatcaatgacggctgaataaagaaatgtggtgcatatacaccatggaatattatgcagccataaaaaggaatgatgtcatgtccc

SEQ ID NO: 906447 - DNA, 570 bp, Homo sapiens
  misc_feature 167, 175, 211: n = A,T,C or G
gggtttcaccatgttggccaggctggtctcgaacttctgacaatatacattcttctcagtgccatatggcactattctaaaatcaaccacataattgaaagtaaacacttctcagcaaatgcaaaagaactgaaattataacagtctctcaggtcacagtgcaatanaaatagancttgggagtaacaaattcactcaaaatgatgcaatntcatggaaattgaaccacctggttttcaatgacccttggttaaataatgaaattaaggcagaaatcaagaagttctttgaaaccattgagaacaaagagataccataccagaatctccgggacacagctaaagcagtattaagaaggaaatttatagcactaagtacccacatcaaaaagctagaaagatctgaaattgacaccctaacatcacaattaaaatagctagaaaggcaagagcaaacaaatttaaaatctagcagaagacaaggtgwtccgcccacttcagcctcccaaagtgctgggattacaggcgtaagtcaccgcgcctggcctattttgagatatgttctatacct

SEQ ID NO: 906448 - DNA, 620 bp, Homo sapiens
atctagaaatgtcactctatgattttctttcttctcccctgaagatccgcatgtgacaagtgtcctaacctatacctaaagaaagagatgctacgctgagaggctgagaagaatctgagcaaacaggccttgctgggttccccccagaattcattaccattagatcataccctttttagccaatcttatttctacacagccatcaattctttactgcacataagcataaaaatacagtttttcctaggtctttgggtcttcattctgaaggttcctgggacgcataaaacttggattaaataaatttgttatgttttcctcttgttaatctgtcttttgttataggaatgtcagctgtgcactttgaaatgggtgcaaaaaaaaatattatacatttttacctttacatagtcttcagaaaaaatatggataatcataacttcttttcagttagtctctaatatactaaatgttgtttgtcatatttaaaatatgagaaataaaattattctgtatatattttcaatttaaagaaccctattatgtattacttcattgggtctattttctgggttttgtcgttgaaatrtctggagtacaataaacagaatatttttcag

SEQ ID NO: 906449 - DNA, 586 bp, Homo sapiens
ttatgaatattcaaccttacaaaattactttttttccccatgaaacttttcagattttggaactgcagaggaaagattatagacctgtgtcaacaaataatgattgttgagtaaccaaccattctctgcctctgaagaggaacatcctataattctttctttcttagatttttttcctttggctttgacattttaattacacaattgatgaatgtttagcatagaaaaaaaaaaaactagaaagtcagaaactcaggacttatgtaatcaaacaactacgagaaaaaaaatagcctcaagctggaatcctattgatttaatccccaaatcccattatacagttccacttcctctgaccagggagccaactttgaaatgtaagaaagaggcacgggaagggctgggtccctgctgcacactgactgtgacttggcacctgttctgcactcaagaggtattaacactttgctgaagaattctgggctaggctcactgtctttctctggctccaaaggaaggatggggaggaagtaacaggtactttggccagaaaatcgtgggaaaaaaratttaaccatttaacatg

SEQ ID NO: 906450 - DNA, 651 bp, Homo sapiens
aattgtattctggagacacacagaatgttgttaatcccaagcaatgtattctactatttttgaaggcttctttatactatctctacccaaatatcttctgtcaacagtaatgggagaaagaaaggaagggaagggaagggaagggaataggggagagagagagagagagagagagaaggaaggaaggaaggaaggaaggaaggaaggaaggaaggaaagaaagaaagaaagaaagaaagaaagaaagaaagaaagaaagaaagaaagaaagaaagaaggaaaatctagaaaggattcactttctagccacatactgagcaaggtgaatgagtcagagggacatggcctgagggaggacaggtgtggaaaacaggtttagccattggaaatgtgtactaatatatccttatcatcagaaataaaatgcaaccttttgttttttggagcttcaggtcagccagttgctggaaagacccaattcaactgaattgaggcacagcatagcaaaccaatattttstaataatgatagaggcaggagacagccacatgcctaggcagataaggaagggtccccagcaaaaccctaccttcaagcttaaaacagcctgaaggctaaaagaccaaactgctggtcccagacgaaaacctg

SEQ ID NO: 906451 - DNA, 586 bp, Homo sapiens
acatttgataaatgtgctttttgtatttttgcctaaggcactggtaaatatattgatctgagaaattcaagtataaatgctagttctctgattragagagcttgctctagtttgaaaatagttcaaacaactaaaaattcacttatttgtcgttatttgtttcacatttctttatatttctgtacctcagaggcactcatgatttactaagttgaattatagtcagccttccatagccatgggttctgcatccatgattcaaccaagctcaggtggaaaatacttcgaaaaaaaatggatggttgcatctgtactataacatgtacaggcttttttccttgtcattattccctaaatgatacaatataacaactatttacaaagcatttatattggattagatattataagtaatctagagatgatttaaagtatacaggagaatgtgcagaggtttatgcaaatatgcaaggcctattttacatcagggcctcgagcatccatggattttggtgtccatgggaggttccgaaaccaatccctttcagataccaacggacaactgtatactctgattaacttaaaa

SEQ ID NO: 906452 - DNA, 609 bp, Homo sapiens
tgcaaattagtagaaaaaggcatgatataataattgttggttaaaaaaaagtctctttatagatcaacattgagcaatcagtctttctgtttatgttgtccagaccagttgtcagcaacattttcagcaccatgaagaaattattttatatgagggttaagatatagttttatattatattttttcagtgctttttaaaatagtaggtctgtaaacacacgctatgtattatagatgtcataagctaaatggtgaaacagcagagataatgatcacccttttctagggagaaaaggtagggaaaatatcagagagaagcaagggagctttaagtctttagaaaggcttaatgggattctatatatagataccaaaaccattggcttgggacttttgctaaggtaggtatgttgcatttctctagacttttctcttggcacaaggctactagtaagaaaatacgtaggaaaactaagtgaaagatttctgtttccagttatatgacagattagacacctgaattgatcttcctgctgacaaactcacaaaattatrgataaaataatttcaatagtcataatggattaatgatcttgcaaaagagtaagt

SEQ ID NO: 906453 - DNA, 637 bp, Homo sapiens
atgctagcaggttatcttgcctgttagttgatgcagtttcttcatggtgtcaatggtctttacaatttggtatgtttttgcagtggctggtaccagtttttcctttctgtatttagtgcttccttcaggagctcttgtgaggcaagcctggtagtgacaaaatctctcagcatttgcttctctttaaaggattttatttctccttcatttatgaagcttagtttggctgtatatgaaattctgggttgaaaattcttttctttaagcatgtcgaatattggcccccactctcttctggcttgttgggtttctgccaagagatctgctgttagtctaatgggcttccctttgtgggtaagctgacctttctctctggctgcccttaaaattttttccttcatttcaaccttggtgaatctgacaattacatgtcttggggttgctcttcttgaggagtatctttttggtgtgctctgtatttcctgaatttgaatgttggcctgtctttctaggttggggaagttcttctgcataatatctcaaagagtgttttccaacttggttcygttctcccagtcacttcaaggtacaccaatcaaatataggttttgtcttttcacatagtcccatgattttt

SEQ ID NO: 906454 - DNA, 588 bp, Homo sapiens
gatggagatgaggatcttgttgggaactagaacaaagctgactcttgttttgttttagcaaagagactggaggcattttgcccctaccctagagatttgtggaactttgaacttgagagagrttatttagggtatctggtggaagaaatttctaagcagcaaagcattcaagaggtgagctgagtgctgttaaaagcattccaggccaggcgcagtgactcttgcctgcaatcccagcactttgggaggccgaggcgggcagatcatgaggtcaggagttcaagaccagcctggccaagatggtgaaaccttgtctctgctaaaaatacaaaagttagccaggcatggtggcaggcacctgtagtcccagctacttgggactgagactgaggcagaagaatcgcttgaacctgggaggcagaggttgcagtaagccaagatcacgccactgcactccccagcctgggcaacagagcaagactccatttcaaaaaggaaaaaaaaagcactccattttaaaagggaaacagcataaaagtttggaaaaattgcaggctaatgatgcagtagaaaagaaaaacccatttt

SEQ ID NO: 906455 - DNA, 617 bp, Homo sapiens
atcatagggcaataaaggagtattggaagagggttgcagtttttatccaaaggctagaaatttatggatgtttctttgatttttgattgtgtagaccctacarttggcaaacccagaatgagccataaagtggcaaactgaggtctcttttcttgatgtgtagcatcccttacctggatatggcacatcatggttcacaggactctcatacaacattgcacttgttccttcaatccttattagtagtcgtgtgaggtagacagggcagggattattaggctcattttacccaatgaggaaactgagatttagacagaagttacatgatttattgaaacttcacagttaatggtatacagaactggatccaattcaggcttctagccaggtttcctagcctagaagcttttccagattaggtgtcccatctttagagttaattgtaagtgcccgaaggaagggccttgttgacattcactctgcagttcttatggaatcacccttagctgtctgtgcatccacactggagtctcagcttccacactgaatttgaagcaactggaattttcactgggaggttctgcatggtgccagtaaagacccactttttcttcatc

SEQ ID NO: 906456 - DNA, 583 bp, Homo sapiens
ctccctgcctcccattcctccacatcagctactgttcccccctgcctgcctccctgcctcccatkcctccacatcatttaatcttcatgcagccctgtgcacttgatgctatcattactcccattttacagaggacaaaaccgaggaatggaaaggttgggcattttgcccaggatgtacagaaaagaggtggctgtggaatttgagtccaggttttcctgactccggttcctgctgatactaatttcctggtgctgctgtaacaaaagagcataaactgggtggctaaaacaacagaaatttattctcacacagttctagaggccagaaattcaatgtcaagatgccagcaaggttgccttctagaggctctgaaggacaatctgttccatgcctctctcccagtctctggtggctccggcagtccttggcttgtgtctgcatcactccaatctctccctccatcttcacatgactttcctctccatatgtctgtcattggatttaggactcacccgaatccaggatgatttggatatttgtcattggatttaggatatttgtcattggatttaggactcac

SEQ ID NO: 906457 - DNA, 642 bp, Homo sapiens
gagtttggtcacttggctaagatagtgactcactatttcaattaagaaatccacgtggtcactctgtagcatcctgtaaagatcctgttccccagtgaccttgaacatcatggttttagcactttttgaatatccttgcctaaatctttgtatgagaattgccgagtggtgatttttccaccactgttattctctctacttcaatgaacaagagccgccttcttcctccctgcctctcccttccccctccctctctcctcccctgcccttgtctctgccatagattcctggatttttatttattcaatgtgttataatcacgtgggacaattttatgctcacatttgcccatttttagccagtgagaggccaaattttaaaaacacatattaaatattttttgaacatttctgggttaatgtgtttttatgaaatgtattttttaaacacttttcttgatctaaatttccagcctttggctccaatgatcctattagcccaggtagaacccattcataatgcttttctaattactagctctgcacrgagagttgaagagtgaattagaaatcacatacatatatgacatcttcaaatagttttagtttgtacaatgaagagaattctttccccggtgtgtac

SEQ ID NO: 906458 - DNA, 556 bp, Homo sapiens
ctgccttcctcagcctcccaaaatgatgggattacaggtgtgagtcaccatgcctggccatgtttttcttttttgctcagcataatacttttgaggttcctccattctgttataggtatcattcatttgttccttttattttagagttgtactcacagtagatgtaccataattcatgtcatcaactgttgatggacattttggttgtttccggattctggttattttgaataaagctgctgtgattattaatggacaagtttttgtggggacatatattttaatatgtttcatgtgttttattaagagtaaaaacatagaattgaaattgctagatcatataaaagtatgtattggctgggcgcagtggcttatacctgtaatcccagcctggatcatgaggtcaggagatcaagaccatcctggctaacacrgtgaaaccctgtctctactaaaaatacaaagaaattcgccagtcatggtgacgggcacctgtagtcccagctactcgggaggctggggcaggagaatggtgtgaacccgggaggtggagctt

SEQ ID NO: 906459 - DNA, 610 bp, Homo sapiens
cttgaattcttgaaactttaagaggaaaaatattgttttggggtagctagggtttggagkgatttgtcatgcagcaggaggtaactaacctattcctctttatccttttcaactctggggtctgcactaaagagttatttttttttcacagcaggattaaaacagatttactaaagaatagtgtgtgtgtgtgtgtgtgtgtgtgtgtgtgtgtctcactatcaataattgaactttactatgtcaaatgtggtgttaggagattgtgttcctggacggagaaaaatgatcatggaggagaattgttgggatggtgaaggagcagaaactcctcagagaatgccttcacagagtgccctcaggctgcaggtcatccgcggttaagttcgtgtcaaggtatgttgcctgctggatagagctatacaaatggaagctcttgttagcagagagcacttcttttttaggttgaaagcagaggtggctcacagagacttgcccttagattggggcctgtgggtgttagttgccagctttccatagcctctacctgctcagctactcacctttatatcacttgcctggtcctggaggcacttgaggttactaccat

SEQ ID NO: 906460 - DNA, 585 bp, Homo sapiens
agaatttatttcctttttgtggtatggctgagagccctggatttttgctggctggtgcctggaggctgccctctgttcctagagccccacttcccccaggttattgtcacataggtcttccaacctgactgcctgtttcttcaaagccacccaagaagatagttctagtcagtcagctagtgagatggtcttataaacctaatgtggtcatggagtgacattccagtgcctttgcattatttaattagttacaaggaagtctcagttcctacccacactcaagggaaacagatttacaaagctgtaatcatcaggagccagggatcgtagcagatcatcctaaagtttatatacacatacatatggcatgtactgtcaccaaatgagtggctaagtaaaacatgccgtaggctgggtccacttattttgtgctaggtttagatacttggggccaaggcagagttttggacttgcttatcttgttgctgtggaagatgtgaagaaggaagtgtgtgtgtgtgtgtgtgtgtgtrtgtgtgtgtgtgtgtgtgtgtgtgtgtgtgtgtgtattgagggatgggctat

SEQ ID NO: 906461 - DNA, 559 bp, Homo sapiens
gtgacaaggttgtcaaatatattaataattactaattattaaccaatacccttaatttttaaaatacagatactaataaataaataaggatattaataaataaggatattaataaataaggaaattaaggttaattaatttcaaataaggatattaataaataaaccatctgcctttattatcatttcataagagaaaggacattctcatacaataaaacagaacaggcataatctttgaagttaaaaattgtataaatttagctttataaaaaatgcattacattatattcttttaaatttaatttggccacagatcagtaaaaattgtcataaaccaacagtccacagtgtttcttctatcagcatttaaagaggaaggccaaccttttcatttcacagatcagaaactggtaatgtggcaaactttaatgattttccaaggtgagtagctagttcagtgttttttggactacattggccaaattaattttctgataacagaaaatgtcttccttgttgatgataacacyggcaaaaactaggtccggtctcaatta

SEQ ID NO: 906462 - DNA, 550 bp, Homo sapiens
aaagttgagaaaaatatatttaatgaaataatagcagagaacttcccaagtcttgggagagatatggacatccaggtccaggaagttcaaagaagaaagattcaacccaaaaggttctctctgaggcacactagagtcagattgtctaaagtcaaagacagagaaagaattttaaaagtagcaagagaaaagcatcaagtcacatataaagaaatgcctattagactaatagcagattcctcaacagaaaccttacaggccaggagagaatgggatgatatatttgaaatgctagaagaaaaaaagtgccagccaggaatatcacacccagcaaaactatccttcagaaatgaagaagaaataaaatcttttgcagataagcaaaaactaagggaattcatcaccactagatcaattagtcttacaagaaatgctcaagggagtctgacatctggaagtaaaaccactatcatgaaaactataaaactcactggcagagccaatacacaaaggagaaaraaaaaggaatcaaaccttatcactacagaaa

SEQ ID NO: 906463 - DNA, 628 bp, Homo sapiens
acagatgaccaggaggcaatatagcacagtaattaacagtgtgtactctggagccagactgcttcaatgtctctgtcctagtatctyaatcaagtcacttaacatcattactcttcgttttcttctttttttaataatataaaataataaacctactattttatgagtattaaataagagtacataagttatatttcattgatacactgtaacttattttaccaggcccctattgaacacataagtcatttccaactttttcctattttatataatactataaagaacgtccaggacatatatctttacatgcatgaacaagtttagctttaggataaattcctaaaagtagaattcctgagtcaaggggcaaatgaattttaagttttgttatatattgccccaaaattctccaaaatacagtcatcccatcaaaaatatacaaaagggtctgtcttatccatttatggattacatccataaatattttagtttcattgactcatgaaccttaacataaagaaaactgagtcagttattttattaaataaaataaagaatactgtttcttataatagacaaaacttgtgaggagggtctgagactgtctcaacatgttagtatgtct

SEQ ID NO: 906464 - DNA, 497 bp, Homo sapiens
ttgacagtgcttacttttccagcaagtgctgggcttagggatattgttttcctctacccattcttatcttgtatgtccaaggtttgttttgggtttagtctaattcactgagctttttaaagtttgagtttggtttataacgagttaaaaaaaaaaacacaggataaattcaaggttcaacaaattattctggggtttttggctcattttaaattcccactcaaaactatgaataagtaaaatccagcagtattaaaaatctcttcaattaattgtgcttcctttccccaacttgtctccaactgggagatcatttatttggagaaataatcaatataagaaaattatcatgtactgaacaaatatagaaaatcttggaggtttgtttcaatgattaaccaytgtggcctattagaaaaatcttcaagccaagtgaatactctttaaaacctaggcctcaacctaacttttatcttctgtacttcagcatcacttgg

SEQ ID NO: 906465 - DNA, 623 bp, Homo sapiens
aatatggttggaccagggaacaaaccatgactaattctstaatacaaagaataccaccttataaagaggaaactttcttgctaaactggcaattttacagaggcctgaatcttttccattagaagaaaaacactttctggcgtgtgcttcatcaggttttggagctttaaaggaatagaatgcgagataaaagataaatcccatcaagctagagaagagctgatgttctgaccctttgaccctgcccatcaagaagacataacactccaggtttgaagtcagacttgatttagatttgaagcccagtttcacgccttattagctccatgaccttaggcatgttacttaacttccttaacaattttctcatctgtaaaatggtgctaacaaaagccacctcactgtattgttataagcatttaaagattcaattcataaatgtttaaatcataccatgtgccatatgcttttcatttaataaatagtatagatgatttatataggcatatatgtatacactccatgtgctcatcttttctttatgcacatataatttacccatctatcctcaatgccattctcccagagttctacccttctgcccctgaggcatttacattctt

SEQ ID NO: 906466 - DNA, 635 bp, Homo sapiens
gtaataggataaaaaacatatataggctgcaaaaaaagtacacataaaaaagtggtatggctacactgatattggacaaagtaagcttcgaggcagagactatgatcagaggtttaaacatggtgtttcatgatgataatcaggaagacatacgaatcataaatatgtgtgcacttaaatacaaagtttgaaaacagatgacacaaaaactagacagaggtaaaagaaaaaattgataaatccacaattgtggttaaagaataaacatgcctgtggataaagaataaacatgcctctctcagaactcacagaaactcttaataaaacaaaatccagtacagatactgtagatgtggacacactactgaataaattaatctaattgatatttttagaacactatatccaaaaattgcacaatgcacattttcaagtacacaagatgtattcatgaacatagaccatatgccataatgataattaaaataagtcctaataaatatctaaattaaattctttttaartttttttaattgacaaccattttacatattcatggagcacatagtgatgcttcaaaacatgtaatgtatatagtgatcagatcagggtcaacaatagaataaagtcagaac

SEQ ID NO: 906467 - DNA, 645 bp, Homo sapiens
gagccaccatgcccagccatgtctgtctttttttaacttttaagttcaggagtacaggtagaggtttgttattargtaaacccatatcatgggggtttgttgcacagattattttgtcatccaggtattaggcctagtacccattagttatttttcctgatcctctccctcctcccactctccaccctttaaaaggcccctgtgttgttcccctgtatatgtccatgtgttcttatcatttagctctcatttataagtgagaatatgccatatttggttttctgttcctgtattaggttgctaagaataatggcctccagctccatccatgttcctgcaaaagacatgatctcattctttttttatggctgcatagtattccatggtgtatatgtaccacattttctttgtccagtctatcactgatgggcatttaggttgactccatgtccctgctattgtgaacagtgctgcaatgaacatacacatgcatgtgtctttatggtagaacaatttatattcctttgtgtatatacccaataatgaaattgctgggtcgaatggtagttctgtttttagctgttcaagaaattgccataatgctttccacaatggttgaactaatttacactcgcaataacagtg

SEQ ID NO: 906468 - DNA, 611 bp, Homo sapiens
ttcgctcttgttgcccaggctggaagtgcagtggtgcagtctttgctcactgcaacctctgcctcctgggttcgagcrattctcctgcctcagcctcccaagtagctgggattacaggcgcccaccaccacgcctggctaattttttgtatttttagtagagatggggttttgccatactggccaggctggtcttgaactccagacctcaggtgatctgcctgccacggcctcccaaagtgctgggattacaggcttgagccaccgtgcccagccccagctatttcttttgtattttcagtaaagatggggtcttgccatgctgcccaggctggtctcaaacacccatgtccaagtgatccacccaccttggcctcccaaagtgctgagattacaggtgtgagtcactgtgcccagcccacagtagctttattcacaatagtaaaattgtaaacaacccaaatgtctaccaacttatgagtgaatagtcaaaatatataatggaatactactcaacaatagaaaggaaatactgaacactcaacaatgtgcatgagtctcatcatgctgagtcaaatagaacagacataagagagtacatactgcatttat

SEQ ID NO: 906469 - DNA, 702 bp, Homo sapiens
caattcagaagcaacaatagcatcatcattctgtttgttaacagctaaagaagattggattcacaaaatcatttgtgatggttaatactaagtgtcaactttattgtactgaaggatgcaaagtattgtttctgggtgtgtctgtgagggtgttgctaaaggagattaacatttgagccagtggaccgggaaaggcagaccttccctcagtctgggtgggcaccatctaatcagctgccagtgcaaccagaataaaagcaagcagaagaatgcagaaagattagactggtgtaggcttctggcctacttctctctcccatgctggatgcttccggacctcgaacatcagattcctagttcttcagctttgggactcagacttgcttccttgatcctcagctggcagatggcctattgtgggacctcctcttgtgattgtgtgagtcaatactccttaataaactcccctttatacatacatctatcctattagttctgtccctccagagaaccctgactaatacaattatcaaattgaataagaagtatgagacaaactggagttaaattacacctcttcaatgatggttctagaacacagccaccagtagttctgaaagtgcaggaatgtttcctggtacaaacaaaatctgrttcaaatttgtaagtacaactcctattagttagacatgatataacagt

SEQ ID NO: 906470 - DNA, 627 bp, Homo sapiens
gaaggtgggtcctggcgggaggtgactggttcaggggggcagatttctcatgaatggtttagcatcattcgcttggtgctgtccttgcattagtgaatgagttgtcacaagatctggttgtttaaaagggtgtggcacctcctccctctctctcttgctcctactctggccatgtgacgtgcctgctccctgtttaccttctatcatgattagaagcctcctggggcctccccagaagcagatactgctatgcatcctgtaaagcctgtagaactgtgaaccaattaaaccttttaactttataaattacccagtctcaggcacttctttataaccatgcaagaacagcctaatacacctataaaggagataaatgggaatgaggtagaagagactgactgggaaaataaaggtaggcaaaaggtgagcccaccattaaaacctgtgacctgtctgctctgaatgctgtgctgccctgggtgtgaaacggaattagggcctggggataggatttgaccaggaccccatggtgtcatgggaactgtaagatctactaaagtgatggattggttgctaaggaawatactgggagaataaactctggactaagagtcaggaaacctggat

SEQ ID NO: 906471 - DNA, 667 bp, Homo sapiens
agtgattggattttaaagagtttcctgctctgagttctaagggcctccctttaagacagcccccctgtcccccagcccaaaccttgaggacaaatctgttacacgccatggtcctcaggagagragctgggaaggaagaggaggcggcagagagagggctacagcctagggcagaaaagctagtggaggtcactaatccagctccaggtggagaactggtgtaagggacaaggaattggcgtaagggacattgggagaatataacatgcccctcgggagttctcaagaccccccccccccaaagtaggtgatgggggctcaagcctatttattttgccattaagtgtggttgcagaagactgggttgactaggttgcacgttcttagtgggaaactcgataaaagccccctgcctctccagagttctccatacactgttcagaggaggaggcccggaggttattagtggtctgccagcactcatgctccctggctgcctgctatctcaggaaggctctgcttcccccatgaggcagagatactagaaattgctgccggggcatctcctgaatcaagggggctggtttctattcttatctcttgcgccgccaggtcgtgcaaccgaaccacggtaactctcagctgttcagctcgacctgaaaaggag

SEQ ID NO: 906472 - DNA, 547 bp, Homo sapiens
caattcacacaaagctggatgtgtgggagaccagagttttattattactcaaatccgtctccccaagcattcagatatgggagtttttaaagayattttggcaggtaggggctcaggaagtggagagtgctgattggtcaggttggagatggaatcattgctgtcctctattcctgggtgggattgctcaactggttggcccagattaccagtctgggtggtgtaagcttatccatccagtgcagggtctgcaaaatgtctcaagcactgatcttaggttttacaataataatgttatccccaggagcaatttggacaggttcagactcttgtagccagaggctgcctgacccttaaaccataatttctaatcttgtagctaatttgttagtcctacaaaggcaaactggtccccaggcaagaacagggacttttcagaaaaaggatattatcaattttgtttcagagtcaacccataaactaaattccttcccaagattagttccacctatgccctcgaatgaacaatgacagtttgaaggttaaa

SEQ ID NO: 906473 - DNA, 547 bp, Homo sapiens
caattcacacaaagctggatgtgtgggagaccagagttttattattactcaaatccgtctccccaagcattcagatatgggagtttttaaagatattttggcaggtaggggctcaggaagtggagagtgctgattggtcaggttggagatggaatcattgctgtcctctattcctgggtgggattgctcaactggttggcccagattaccagtctgggtggtgtaagcttatccatccagtgcagggtctgcaaaatgtctcaagcactgatcttaggttttacaataataatgttatccccaggagcaatttggacaggttcagactcttgtagccagaggctgcctgacccttaaaccataatttctaatcttgtagctaatttgttagtcctacaaaggcaaactggtccccaggcaagaacrgggacttttcagaaaaaggatattatcaattttgtttcagagtcaacccataaactaaattccttcccaagattagttccacctatgccctcgaatgaacaatgacagtttgaaggttaaa

SEQ ID NO: 906474 - DNA, 299 bp, Homo sapiens
ctccctcttccatttaacatatagttgaagcttcttataataaaataatgccctttaggaactagcttctgtttatttctytaagccccgttcaaacccaatatactgtagccatattgtatttcctgttccaaatcagaaaattttagagatgatctattaaagaatactttaaaatatagataaaccacctgaaccagcacagcagcggacacctgtagtgccatctacttgggaagctgaggcaggaagatagctggaacccaggagttcaaagctgtaatgctgagtcaagctta

SEQ ID NO: 906475 - DNA, 637 bp, Homo sapiens
aatagtagagacatggaatcaacctaaacgcccatcaatgacagagagaataaaggaaatgtggtacatatataccatggaatactacacagccataaaaaaaagaatgagattatgtcctttgcaggaacatgggtggaggtggaggacattatccaaagcaaactaacccaggaacagaaaccaaatattgcatgctcttacttataagtgggagctaaatgacgagaacacatggacacaaagaagagaacaacagacattggggcttcctcgagggtggcgggtgggagaagagaaaaaaataaccactgggtactaggcttaatacctgagtgacaaaataatctgtcacaaaacccctgtgactctgacttcttggccaggtttattctcagatctgattcctgccatgatccctcgtgaaactgtgctactttcagaagaatgtggattctgcgtttgtaattataaccctgctagaatgattacttgattaaggttgactttactcccagcctgtaaacttgagatcagcttattcgtasttaaatggtagcactggcttccatgctgtgcctgctgtcagtaggtacccgggtaatagggagtaaaccagcaagttctatgttctgaa

SEQ ID NO: 906476 - DNA, 631 bp, Homo sapiens
gccgactagaactttcgacaggcaagtgtgtgacacagaagcatcttgaaatcctagcattttttcctgttcatttaacagctagggaggtttcaaacatctttcaaaaaatactttcttagaactaaaatcaccataatattgtgacataaagaaaaattcaatcttgtctcatgctctcattttctttgaaacacaaaatccatacttggctgcgaccacaaaggttacgcattctatctagtaggatgcagatgaaggaaggcacaggcacggttatcatggaggaacacaaatctttatcaggtctgtttcttcagtaactgttggggaaaaaatagtgggaataaaagtttggtttctaagctcctcccagcatcaatcagtcacgagagctggaaactcactttccataatactcccattgctggagccatggcccagggcctcattacgtcttgctttggaaactgtgatggtttcctaatgggctctgttgctccagggctgtagcctctccattttatcctgcacaactccgtccctgtgaggcttstaaaggcaaaccccagcattttactgaccttccagcaaccctccattgcactccatcacgggactttgttccaga

SEQ ID NO: 906477 - DNA, 610 bp, Homo sapiens
gccacatggcagaaagtggagaaggaawgcaagcattctcgtgactcatgagggcactaacgccacttatgagggctccttttaaatgaacttacctaatcctaattatatcccagaggtctaccttctaatactatcacaatgtaggtaggggcccgacatatcaattttgggggaaaacacacatccagtctataacactgctttttctctgtgtgcacacccctggtgtgccttccgctccttataaagacactagtcattttggattcgggccacacccttatgacctcatttaaacttaatcatttctttacagtcctatctctaaatacagccacattcttaggtaccgggtatagaactttaatatatgaatttagagaacacaatttagtccttaacagtagggtagagcaagggcctctacagccagaatcaatgggtatagttatagggttaaagtttgtctgaaggcatatcattcctttcctgtctgcaatcagtgtatacagtatgtacaatgagctattaagcagctgcaaataagctaacaaaggagtacatatgctaagatcatggctaaggccatgataatacagggctatga

SEQ ID NO: 906478 - DNA, 566 bp, Homo sapiens
gtaaacatggctttcagctctgaggaatcctcttaaattactctgtatactttmcttgcctttattttctctgtttcctctttctagagctcctattatttaggtatcaaatcttctggattggtcttcccattttcttattttttctctcctactttccatatatttgtgtttttataattttaccttctgcaatatttactaaattctgccttcaatatgtatctcctattttatctaaactccctttatatttgctactgcaattttaacttccaaaagctttttttttttttttttggttctgtgattttttttttttttaaacatagcactctgatcttttttaatgaaggtaacaacttctcttatgtttctgaacttgatggtgcacatctcccggatgtgcctccatttcttccaagtatgtttggtgtcagtcatatcaagaggctttccttgcccttctggtattctctggctgttttgctgaaaccaaaagttgtccaccagaaagctgattagaaactctgtgcatgtgcatatagcttgttggctatagtctt

SEQ ID NO: 906479 - DNA, 569 bp, Homo sapiens
aaaaaatactatcaagtttcatctgtggccttaagagtatagacatgatacagttgttctcaactgggagcaattttgcctcctagtgatgtctgaagacagttggttgtcacaaccaggaggtgagggtatgatcctggcatctagtgattcaaggccagggaggctgctcagaatcctaccatatgcaggacggccaccaccgccctcacccaccactgcaacaaagactgatctagccaaaaacgtaaagggggccgggcacggcagctcccacctgtaatcctagcattttgggaggctgaggcaggtggatcacctgaggtcaggagttcgagaccaccctggccaacatggtaaaccccatctctactaaaaatacaaaaattagccaggcgtggtggtgcgtgcctgtaatcccagctactcgggaggctgaggcaggcraatcactggaacccgggaggcagaggctgcagtgagccaagatcccaccactgcactccaacctgggtgacagagcaagactccgtctcaaaaaaaaaaaaatcaagggtgccagggttcag

SEQ ID NO: 906480 - DNA, 569 bp, Homo sapiens
aaaaaatactatcaagtttcatctgtggccttaagagtatagacatgatacagttgttctcaactgggagcaattttgcctcctagtgatgtctgaagacagttggttgtcacaaccaggaggtgagggtatgatcctggcatctagtgattcaaggccagggaggctgctcagaatcctaccatatgcaggacggccaccaccgccctcacccaccactgcaacaaagactgatctagccaaaaacgtaaagggggccgggcacggcagctcccacctgtaatcctagcattttgggaggctgaggcaggtggatcacctgaggtcaggagttcgagaccaccctggccaacatggtaaaccccatctctactaaaaatacaaaaattagccaggcgtggtggtgcgtgcctgtaatcccagctactcgggaggctgaggcaggcaaatcactggaacccgggaggcagaggctgcagtgagccaagatcccaccactgcactccarcctgggtgacagagcaagactccgtctcaaaaaaaaaaaaatcaagggtgccagggttcag

SEQ ID NO: 906481 - DNA, 573 bp, Homo sapiens
aagttgattttattctgttagtttgcaaaaaatgttccaaatcactctctaatgcagtggtttgccctctcaagagcctcacatttacttttagctaaataaatcacattaaaataactatcttcctgtctctgggattatattgatgaagattctacttacttatttttattgagggagatccttgctttttatatatttccaaagcattgccatcacatataaagtgagggctttagttttatattttaaaaagtgaaagttttcctcttgctcaagatttcctggcttgcatccaattgttgtatttgtctgcttagatttgttcacctttaagtaactttttcaaaggtttagtcataaatatgtaaaaccaattaatggattttgattaggcttatcccaagacaatatgtatcattcatcagatcctttatatgacattcaaaacataatttcacctcatatacttaattgatctttgtaacaataagttctaaaattgaccttcaaacactcattcaggatgcrtagaactagaacttttttctctagaattcttgtgtcaacttc

SEQ ID NO: 906482 - DNA, 570 bp, Homo sapiens
tgtatatctttttttgaaaatgtctgttcatgtctttgctcactttttaatgggcttgttgttctcttgtaaatttgcttaagtaccttataggtgctagatattggacctttgtcagatgcatagtttgcaaaaactttctcccattctgtaggtggtctgtttactctgttgataagtttctttgctgtgcagaagctcttaagtttgattagatgccacttgtcatttttgcttttattgcagttgattttgttttcttcatcatgaaatctttgccctttcctatgtccaggatagtattgcctgggttgtcttccagggtttttatactttttggttttacatttaagtctttaatccatttttagtttatttttgtgtatggtgtaaggaaggggtacaggttcaatcttctgcatatcgctagccagttatctgattaccacttattgaataggaagtcttttccccattgcttgtttttgtcagctttgttgaagatcagatggttgttgatgtgtgaytttatgtctgggctctctattctgttccataggtctatgtgcg

SEQ ID NO: 906483 - DNA, 709 bp, Homo sapiens
aaatacgactaaaattcagggatcttctacctcggttaaattactaggggtccagtgatgtgaaacctgtcaagatattccttctaaggtgaaggataagttgctgcatttggcccctcgtacaaccaagaaagaggcacaatgcttagtgtgcctatttggattttggaggcaacacattcctcatttgggtgtgttactccagcctatttattgaccgacctgaaaggctgccagttttggatatggtccaaaagaggagaaggctgtgcaatgggcccatgctgctgtgcaagctgctctgccacttgggccatatgacccaataaatccaatggtgactaaggtgtcaatggcagatagggatgctgtttggagcctttggcaggccagcacaggtgaatcacagcaaaggcctctaggattttggagcaaggccctactatcttctgcagataactattctctttttgagagatagctcttggcttgttaccgggctttggtgaaaactgaacatttgactaacatcatcaagtcagcatataacctgaaatgcctatcatgaactgagtgttttcttatctatctagccataaagtaggttatgcacagcagcattctgtcatcaaagggaagtgttatatacatgatcagtctcgagcaggtcctgaargcacaagtaagttacatgaggaagtggctcaaa

SEQ ID NO: 906484 - DNA, 703 bp, Homo sapiens
  misc_feature 483, 484, 485, 486, 487, 488, 489, 490, 491, 492, 493, 494,495, 496, 497, 498, 499, 500, 501, 502, 503, 504, 505, 506,507, 508, 509, 510, 511, 512, 513, 514, 515, 516, 517, 518,519, 520, 521, 522, 523, 524, 525, 526, 527, 528, 529: n = A,T,C or G
  misc_feature 530, 531, 532, 533, 534, 535, 536, 537, 538, 539, 540, 541,542, 543, 544, 545, 546, 547, 548, 549, 550, 551, 552, 553,554, 555, 556, 557, 558, 559, 560, 561, 562, 563, 564, 565,566, 567, 568, 569, 570, 571, 572, 573, 574, 575, 576: n = A,T,C or G
  misc_feature 577, 578, 579, 580, 581, 582: n = A,T,C or G
tttcctacattgtctttaaattcagtactacattaagtccaagaaaagtaaaactattcwttaaattactccccaaagacttcaaattaaacagctagaatccttgggatttagaacatatctcacttttatccaaaatggcttgtgttgaatcccttttgacagagatggttcaactgttatagtgacctgctcttatcaaactgctagctattgtcagtatacttcttttactttggaagtagtaagatacagtttaactttaaagaattgaaagctctgcctgtaataactttataataccacgtggtcaacgtgttaaaaatgcttcacaatcactaataataatagcaaattcacggcaggtttttggttaaatttgtggggattttttgtcaattcagcgacagctgtcaaaatgcattttgctatttgaagaaattttgaccgaaagtgaatgttttaattattgaaatgtaatannnnnnnnnnnnnnnnnnnnnnnnnnnnnnnnnnnnnnnnnnnnnnnnnnnnnnnnnnnnnnnnnnnnnnnnnnnnnnnnnnnnnnnnnnnnnnnnnnnntttggtttaaggaaaagatttatttttgaaagatctgatacaatgttagtaagaaaattagtggtggagctcatatttctataatgggaaataattttagaaaatcataccactctcatct

SEQ ID NO: 906485 - DNA, 693 bp, Homo sapiens
ctcttgagtataaattttagcyacattgtatttttacaaatcagagtacagttttgataaatctgtctcttgttaattaagataattcattacattgatgtcaattgcaagttcattgagctatccagcagacatattttaagcaactgctatattccagtacttttcaaaggactaccaaaatgcatgggattaaaaaaaaaaaaataaaacctcatgcaccttagcatctactaggaaacctgtgttcttaacctccagaaatgtggattcactacagtttgcagacagtaactgcttcctttataatagaattgttcactaaataattagccatagtcaagtcatgcatactgtaccagattctgcatttagaacccagaggatgccttaaagtaatattgggtctttccaatcactcaactgtgaagttgtcaataggtatttcgagtgagattatgagcagcaatggaagatttgtgcatgttccagaacagggattgacagtcattttctgggaagagtcagaaaggagacattttcagactgtgggccatctagtgtaggtggctactactcagcttggctctaggaacagctaaggacagcacgtcagcaaatggtgtgactgttggccaacaaaactttatgtacaaacataggcagtgttcgggcttggcccatgggcctgct

SEQ ID NO: 906486 - DNA, 528 bp, Homo sapiens
aggggcaaaatgctgccagttggtttgataaagcatagcacgattgacttttacttcagttcccaaaaagttcctcatctccatctgagaccacctcagcctggacttcactgtccatatcactrctggcatttagtcaccactattcaacaagtctctaggaagttccaaactttccttcatctttctgccttcttctgagccctccaaactggtccaacctctgcctgttacccagttccaaagttgcttccacattttcagttatctttacagcaatgccccacttctctggtaccaattttctgtattagttcattctcacactactgtaaagaactacctgagactgggtaatttatgaaaaatattaattgacttacagtattacaggctgtataggaagcatggttggggaggcctcaggaaacttaaaatcagggtggaaggtaaagatgaagcaaacacctttttcacatggtggagcaggaggaagagggcaaaggaggaagtgctatacacttttaa

SEQ ID NO: 906487 - DNA, 562 bp, Homo sapiens
caggatcaatcagctgctaccgtatgccaataattacaatttattgtatcatttttactatggaagtaaccagtaaatatcaataatgtttttctggtaagaaattcatatagagataactcctattctgaacactgtactgtatatttgtcttattatatttaatctttacaaggaccctatgaattttcccagttttcatttgcacaaactaagtctcagaaattaaccaagtttacactcctattaaatagacaagttaggaattggctgcataaagtttagttccagagtctatgacttaactaacacagagaccacattactttactttgaatcaattagtccatttccccatcacatttgaaatgaaatgcgtgtttaaattttaaaaatttgtgaagatattctgttgtggattatcaccacatatcaacgtcattcaaaaagtcaatctattgataatgaccatggttgtgaccaggataaattaagatctactgactataagatayattttgccagaatgaactccattaaaattaattttcaatgagtagaa

SEQ ID NO: 906488 - DNA, 600 bp, Homo sapiens
cctggccgcttccactgtgtcaggttggagggagaaaaaggctaagaggaattgcgcctttgccagaatctgacggtgttggtgccctgatctcgracttccaccatccagaactgtaagcaataaatttctgttgtttataagtgtcaggcctctgagccaaagctaagctgtcatttcccctgtgacctgcacgtatacatccagatggcctgaagcaagtgaagaatcacaaaagaagtgaaaatggccggttcctgccttaactgatgacattaccttgtgaaattccttctcctggctcagaagctcccccactgagcaccttgtgacccctgcccaggcctgcaagagaaaaacccctttgactgtaattttccactacccacccaaatcctataaaactgccccacccctatctcccttccctgactcttgttttcagactcagcccgcctgcacccaggtgaaataaacagccttgttgctcacacaaagcctttttggtgatctcttcacatggacatgtgtgacaataagccactcagtcgattgtattttgttatagtagtccaaatggactaagacaacatttaatgg

SEQ ID NO: 906489 - DNA, 650 bp, Homo sapiens
tggggggaaacacacatattcaaattacttgtataaaacagtttattctgtgtttaggaacttgtaggggtgaaatgctgacctgtgttactctttctttccatgatcagcrtccagaggaccagaggttaatttattctgggaagctgttgttggatcaccaatgtctcagggacttgcttccaaaggtacatcacttacacattaacttctgaatgtttttaagcactcaccaggttaggttcaggtccttaagtaccttcgtattacttttagcaggaaaaacggcatgttttgcatctggtgtgcaatgtgaagagtccttcaaaaatgccagaaatcaacgccaaggtgtgtctgcctcttcatgatggtaacaatttgtatcattcagactttcaggggagtaataaaagaagttggataaaacgtttattgagagactgtatggtgttattaccaagtaatattttgtttctttcctaggaattagaaactgtattatcaacacaaagtgatgagttaatagtagcagattgttccgttagtgctgtagtagaaaggtggagttacatattgcactatcttatgggatatgatttgatctatggttactgtgtatctagattactgaactaacactaattggg

SEQ ID NO: 906490 - DNA, 599 bp, Homo sapiens
gccaattgctttcccttcttgcctcccatttggtctgttttggttccgcagtcatccaactgtagcgtttcttaaaacatgtcagtggctggtgtttgtgttttgggttgaacagtttcacacacgtcgctggagcccgtgctcgaccagctgctgtgctggggatttgctttctgcggctttgggagtgtcaggtagcaaaacgaagagagtagtcgactagaacggtggcggggaggaggaggagggattgtctgcagtggagtcgggagcctcctccggaccaggacaggtaaaaccggtctgccaggtctcagggggagcgggtggagacgtcccacctcacctggctgcgctccgactcaggctcagccggcaggttctggggcaatgggggaagggagaggggccgggcccttgtgggtcccgcacgcacacagtactcaggggccagccaggtgccatcccaggtggcccagcttggggtgggcagccagggttggggcaggggtgcgtcctgagttctttacctttgaaaggtctgatttccratgctgcccttacacatacccttgctcctgccgagtttagtccgtggc

SEQ ID NO: 906491 - DNA, 646 bp, Homo sapiens
attttaaaactgggactcgattacatttagaccttctagtgaggtaagaaaaggagatgaaggaaagaatgagaaggcaaccttcatacaacttttggaaaaatgactctccatctacaaatcttctccattcctaagatgcaggaagaactaaaattatactaatccttacatttctagtaataagtttcaaactgcaactattattggcttagactctgacccctttagaaaaaaaataccaggaagcattactgtaaggagtaaacgctgtgaaaatttctagctaaaagaagaaaaaagttgcttttgaacaatgcatttttagtatttaccaaaagaaaaataaacatttcaaactcaactgcaaaaatcagaggcaattttttaaagcggatatgtctaaatattaccattttctctcaggaaatatttctcaaaaggaccttatgaaaaataaatatcctaacgtatgtggaaatgcacacacatggcctcagcagtgggattagaagcttttcctgagcttatctgaatagtgacagcaatacatttttccctttgctggtaagcacctcagtacttcctttctcgayctcattctctgagtagcctgcacaccttcatctgattttggagggctgaa

SEQ ID NO: 906492 - DNA, 633 bp, Homo sapiens
ccttacaaagaaagcgatccttttacaggattatatttatcatccattatggaataggaactttatatttggtcacctgagagccaaacagaatacctctttaaaaaacatctgccctaaaggtacattttgctkttgtctctagaataataaaaatatgtcagtttttagaaatagtgatatccaattttaggtaacgccatcataagtatatctatatgtataaataagcctaactttttactacttataattagaaggaagtaacttctgttttcttctgtggatgaaagaagcttttcattccctttataaataagtcttttagaactacaagcttattcttctgaaactgggatgcaggaataaagcagagacaagggtcataatgctctttgactagggagtaacttcaaggcatttatgtgtgcatagaacataaagttagcacaatcatttataacaaaatcatcacagaactgatgtgtacattacaacttagatgactaaattcaatttgctacaacaaacatattctaacaaatacaatttcttataaaaacatacagagagtcaatacaatatccaataacaaatatataaaacgtttttgcagtaattgtagcctcaagg

SEQ ID NO: 906493 - DNA, 659 bp, Homo sapiens
gtttgaagctcaaggttacgaaccaagagtcattctagttgacagatattctcttttaagtcttttgcttttataatgctaatggtccttttttacatgggaacatgtaatgcaagtttgacttaatttgtttccatatttttggcatataggaggaggatgggattacagtcatgcatttatttttaaaagttgaaaatactaatcttagaagtcaaataacttctggaataaagttgtgttctaaatgctttaatctcttcgagggtctgaaacgttattcctttaattgatcttgacctgagctgaggttgtaaattatgcccagtaattaagagacatttaataaataaaatatgtattctagtgtttcctttggaatagcaattcctaaatattctaagttgggtactaaaaattgacacctattttctcctctgctcacataataggataaaaaaggaagttgagtaaagacaggatttgacccgaagtccactgaccacaatttaaagagactagggaaartactgttttaagtgcataatattcttctatcttagacaatttaatagctgatgacaatattgcatggaaaactcatcagcagaagtttctggctacacaaaacatggatgcttgtaattagctcttatcac

SEQ ID NO: 906494 - DNA, 631 bp, Homo sapiens
attgcaggaataataatgactgttaccgaatatgcttgtccatgcaatcaaagcctttgacacttcrttcaagaactctcttgtctgttacatcgaggatcatgtcaaatattcttaaagggaatcttctgttccagtaatttttgtgataatcccaccatatgttactattttggaaaacttgatagagagatgaaaatatcaaagtaggcatatgtttttatgaaagtttcagaaaagtatgtttattttgacttatgtctaaattagattcctaacagctgaatgaaatgtaaattagttgtttttgttgcagaagatagacattccataaaacatggtatcaatcgtcttaaaagtgctttattttggtctgtgaagtgatggccggcatgatcactcttacagctgataagaatgaacaccaaaaagtgttcagacactcaggacataacgtggaagtagtcaggtcgtgcatgtcctttcaatcttcagggtttttgtacctaccactctctctgaacagaaatctttctcttcttcctttctccttttttcctaacctgcatttctgaaaagctcttcaggtaatttggatcatcaggcaggtgggagtgactgatctagttca

SEQ ID NO: 906495 - DNA, 654 bp, Homo sapiens
agccaaataatctcaagaaaaatttagaacagataggcttatacattaaacaggttgctacctcaattacctaggatgctagtatgcactatgattttcccaaggaagtatttagtatacagtttttcccaaacctgtttgaccttagaagcagttatttcactgaattttgaatatcagggaagaaatctcaatggagttaatacataatgggaaaacattaaaaacaaaacagaacaaaatcttcaaatatattaaccacagcaattaaaaactcaaatgccttcacaggcaaggcaacacacaaacaaaaagaacacaaagagggtcaagaataaaaaaacagatacttatttgtactgaaaataagtctagttgctttccattaaaaaaagaaatacatctagatcttctagtttgctacctttgtattaagagataattatatccaactccttttggtgctactttctaagctatttggaaagttagtactagaacagcagcttatgagagaaaaaattacaatcagagctgcagcaatcyaggtaggcttcagtataggttaaaaaaaaagttgtagctcactaaataaaccatgtgggcaaaaaagaaaagccttagaaaatacagcaattcttttcaagttttatt

SEQ ID NO: 906496 - DNA, 646 bp, Homo sapiens
cctagactaatagaaacctccactgctggaaattttacatgatgaatttcctaaaataaggcttgttggttcccagtttgaagaccagattgaagagttttgttttgttttaatagcattggcttttaaaakataaacatgaactagaccctcctgtctggagaattccctatcattttgactaaagcaagggtttttttttgttctttttttttcacacttttggataaaaggggaagaaatgacaggtatttaaatatcaaggtctctttcctcctgggctttgaagaggaagaaaagcagcttaattggctctggaccgtctgggggtggtgggtgggtgatctgatattctttttaaaaagatggatgaaacaaggaaatttttctcatcttgaaatgcaactccctgggtctctagttttaaaggagccttcccaggtatctctcatgcttcctgagagctccacaaggctttctcatctgccttctgtggccagctggcaggactcatgtgatcttctttagccgagagcagggactcaaggaggacagctctctcttgcttccctgagctcactttctgcagttccatctcctccacctttttaggattttcacctttcaagagatatcagaatctcaa

SEQ ID NO: 906497 - DNA, 646 bp, Homo sapiens
ttttaatggggttgtttttctcttgtaaatttaagtttcttatagatgatggatattagacctttgtcagatgcatggtttgcaaatattttcccccattctataggttgtctgtttactctgttgaaagtttcctttgctatgctgaagctctttaattacatcccatctgtccgtttttgcttttgttatgattgatttggtgtctttgtcatgaaagacacccattcctagtggtattgcctaggtggtcttccagggtttttatacttttgggttttacagtcaagtctttaatccatcttgggttgatttttgtctatggtgtaaggaaggtgtccagcttcaatcttctgcatatggctagctagttatcccaacaccatttattgaatcgggagtcttttccccattgctggtttttgtcagctttgtaagatcagatggttgcagatgtgtggctgaccttatttctgggctctctattctgttctattggtctatgtgcctgtttttgtaccagtaccatgctgttttggtcactgcagccttgtagtatattttgaagttgagtaacatgattcttccaactttgycctttttgtcttggctatttggactctttttcattccatataaattttaa

SEQ ID NO: 906498 - DNA, 638 bp, Homo sapiens
gtttacatgcctttacttttaagatttatttttcaaattccttttgttrttcatggcactttaatggattatatcaaaatcctaacatctaggttaaactgggtgcttttaaataatgtgtgtgtgtgtgtgtgtgtgtgtgtgtgtgtgtgtgtgtaatgaaggactgtctgaataaagacaacatttatcaaggatagcaaatccccaagttttatgctcttcatatgtttgatatccttaaccaaagagttatcattatagccagcttatcaaaatctacaaagctgctataaacttcagtcaattttcacatttctgtattcattttttttaattaagctggaaagaaattcttgggaatttgaagaatagatccctaacactggctgagattacctggaaggagctgagagtttaaaaatctaaaccattaacatgtctatcaaaactcttctgtttaaaaagagaatgtttaggaatgagaacactcatgttttctgaggattttccatgaagcttatctttacaacaaattagccaatggtacagaagaagagggtaaatgtcttcttaagaaatcaggcttttgtttccaacactttatccaaactgctttcctcaagataaccaagacc

SEQ ID NO: 906499 - DNA, 555 bp, Homo sapiens
aatgaagttattttggtttttgttgtataccaaatttgctatacatttggctcaaaggcaaatttagcattatatgtacatcctccttagctagtgccatgcacataaaaagagtaaatttaaaccctgaggtaaaaaatatgtgagatgtttctgtttctattttatcttaattcctttttcaatgtagaatatgataggatattacagatgttacatataaccaataataaaatttaaattgaataagacaaattaatgctactatttatttatatgatcaaatagaattttatacaattattcactttttatttgagctcagaagtaagaaatcatgtcctacatgtatattgtaagatattccattctgcttctaagccatatcgcctcagaaaacaggagttttggcagtcagggttcttgtagctgtawgaacttggccaagttatttagtctttctaaggctccattctcttattagtcaaatgaaaaatttgggcaacaattccaactttttcctctctcaggatctaggtgaatgttggttgatga

SEQ ID NO: 906500 - DNA, 555 bp, Homo sapiens
aatgaagttattttggtttttgttgtataccaaatttgctatacatttggctcaaaggcaaatttagcattatatgtacatcctccttagctagtgccatgcacataaaaagagtaaatttaaaccctgaggtaaaaaatatgtgagatgtttctgtttctattttatcttaattcctttttcaatgtagaatatgataggatattacagatgttacatataaccaataataaaatttaaattgaataagacaaattaatgctactatttatttatatgatcaaatagaattttatacaattattcactttttatttgagctcagaagtaagaaatcatgtcctacatgtatattgtaagatattccattctgcttctaagccatatcgcctcagaaaacaggagttttggcagtcagggttcttgtagctgtaagaacttggccaagttatttagtctttctaaggctccattctcttattagtcaaatgaaaaatttgggcaacaattccaacyttttcctctctcaggatctaggtgaatgttggttgatga

SEQ ID NO: 906501 - DNA, 655 bp, Homo sapiens
aggaattccctcaattatagccaaccagttcctgaatctgttccaccggggtcctagtttgtaaatctagtttcctattgatattcatgttstattatgttggtatctctagctactaatgctgcctcaagaaatctgactcaactcaactttcttggctctcttgacttaaaccatgtgtaaggagaatatgcagccaaaatagtacaagatctgaatctcaacctattgagcttaaccttggcctaaccaactggcttgattctccttgattaggtcttgaattttctcaagcataaacctttgaagttttttgtttgtttgtttgtttgtttgtttgtttgtttgagatggagtctcgctctgtcatgcaggctgaagtgctgtggcatgatctctgctcacttcaacctacacctactgggttcaagcgattctcctgcctcagccccccaagtagctgggactacaggcaagtgccacaaagcccagctaatttttttgtatattttagtagagacagggtttcaccatgttggccagactggtctccaactcctaacctcaagtgatctgcccgccttggcctcccaaggtgctgggattacaggcgtgagccacagcgcccagcctcaagcataaacctttaatattg

SEQ ID NO: 906502 - DNA, 657 bp, Homo sapiens
taattattttacctcctcttgggccatattggactcttatctaggattgtatgtatcaataagcttttccacttctaccactgtattcttttctttagatgaccttcatctttgttttggtataaagtctcctcatactatgcaagcagccactttctgctgaatgctccccacttactcagtcaactgcccccctcactcccagtttgtgttagatagtgccttctctcattacaccctgtgtttaagttgactacttcttatatgaaaatatacatcagctgcctttttcatgtctttctgctcaattagattttgaaatcccagagaaaaataagtcatattctcaactttcgcctgtgtttattgccctagtctatacatctgactgcttcattgtgtgcccaacacacaatccaaactaacctaataatagacgtggaattctactacacaaccagtgagtttaatgagctgcaaataaaaggaccatgttgcttcttccccccattaaatttcatcctttatagctsttttggctatcactgattttcatgtgttcaaattcagatgtttgcatagtaaaatgaaaatgttccataaaaggattactttattcttaattggttgtttccattttagtcagagatgagtgaa

SEQ ID NO: 906503 - DNA, 581 bp, Homo sapiens
acacttgaagcccattacatcaagccagctagaccataatttaaatcatycagggataggagtctatatttctcctctgcttgcttgtatgacatcgggtaagtcattcaaactcacttggtctcaggttctacctttatgaaatgataaatctgtgggttttgttctattctagtctgttactttacatggtttttgtaaaataacaataataccataattatgtaaatcccagtccagattctatctttctattttacaatctatataacttacataccatattttctaggagtgtaactaaatgttactgaaacatcaagagttcagtctaggtcctgttgcttgcttcacagaaagccagtcactgaaacaatgagtattgccagggaaaggggctttatttggatgctgcagccaaggagaatgggacatcactcaaaaatccatcttctcaatggactaaaattagaggtagaaaaataagggaagaaatgtaactaagtatggaaaaataggaattaggagaggattaagaagagaaggtggtcaacaggcagcagcaggttacttaggcaacc

SEQ ID NO: 906504 - DNA, 630 bp, Homo sapiens
tgagtattgccagggaaaggggctttatttggatgctgcagccaaggagaatgggacatcactcaaaaatccatcttctcaatggactaaaattagaggtagaaaaataagggaagaaatgtaactaagtatggaaaaataggaattaggagaggattaagaagagaaggtggtcaacaggcagcagcaggttacttaggcaaccataattggcaaggggtctgggtctggcatctcattgtccaggtgcagttatctggtgagttgcagttccttgaaactatcttggagggctgatagttggtttcctgagaaaggaactcagataagaaaagtgtaagtttcttcagttttaatactgggagggtcaactttttatttttattttttcaaaagaaaccataaacatcagttctataggacaattgggccagtttcataaacattataacatataagcaaagtgtatgagataggtactggtccatgatcaatgttcaatgagccccttccttatttctcagccttagtaatatttaagtgcttttcttccataagttaccaggcataaggtgttatctacagtcctcgcasaagagtaagatgtctcgtcgaatctatcccctggtt

SEQ ID NO: 906505 - DNA, 620 bp, Homo sapiens
tttgaaaactggcacaagacagggatgccctctgtcaccactcctatgcaacatagtgttggaakttatggccagggcaattaggcaggagaaagaaataaagggtattcaattaggaaaagaggaagtcaaattgtccctgtttgcagacgacgtgattgtatatttagaaaaccccatggtcccagcccaaaatctccttaagctgataagcaactttagcaaactctcaggatacaaaatcaatgtgcaaaaatcacaagcattcctatacaccaataacagacaaacagagagccaaatcatgagtgaacctcccattcacaattgcttccaagagaatggaatacctaggaatgtggaaacacattgtgagggtggaatactttgtagtatgaaggggaggtctctaagtcatcttgatgcaaaggaggcaccccttaacaggaatgtgttggtcatatctgcggacgatgttgaaatataagggatatgagtttacaatatttttagatgtaataatccagatgctcttactccatgagagtttcattctttcctggcctgagtttttaatgtggttatagcagacctgcttagtttgagagtttaagtttttt

SEQ ID NO: 906506 - DNA, 710 bp, Homo sapiens
ttctatcgttagtttcacaccatttgagaggcactggaaattattaagagcatgcactcaggtcctgggtctgctactacttagctgtgtggccttargcaagttatttaacctccgtctccaatttctttctgtgtaaagggaccctcaataatccctaccttaaaaggttttttgagggttaggtataatgtaaacaagtgccttgtacctattttactgagcaaaataaatgcatttgtaactttttagttacaaggtttcctttgagtaagcaagcgtgtaaaaactatatgtctttagttaccttgtattttataatttgtcctggcaactttagttccctgaagagaaaatagaaaattaaatgtcaaataacataacataggtaattgtgttaaatgtcagaatatttcaggaataataatgttgtgatatacaggccagcatgcatttgttgcttgctggagtagtcaagttttatttctgacaagtctgcagttccagggagcctctccctggctgagtaactgtcacccatccatctgtagatgtcagggagagtttgctgtgcatcccaattatcttagaattgggtagaagtttagctttaattagtttgaccttgagtctagcaacaagagaaggaacaggcagcgaagaggtcgtgactgatgtcccagcaacaggagacagggagtgtcattatc

SEQ ID NO: 906507 - DNA, 609 bp, Homo sapiens
attgaaattctaacaattttaaattaatttaggaaaaattacatttaayatgttgagtttttcttgatatgtgttgacatttgttcaagaccacctttttttcaggaatatttttaagatttttggttgttaaagctgtttcttgttaaatttatatgtggttcttttatttatctctattctatcttaagtgggtcattttctttccttatgtatttattttttgaatgtgcataaaaagatactgatcttttgaatattatttacatctctagtgaatttactagattcccttattttttcccataaatctgccaattttgttgagttttattggcacatttatgtgcatgtttataccatttacatcaaaggtgacattacttcttcctttccaatttttatactccatttctggtgcctaatcacattggctaacttctctacaatggcgttgaattgtcatagagatggtggccttccttgtctagttccagacaaaggaaaataacagaaaaagtaataaagaagctgctggtgtgttacaattaaatcagaactcttgtttgctggagggttacatctctatctaatctacatctacgtcta

SEQ ID NO: 906508 - DNA, 609 bp, Homo sapiens
attgaaattctaacaattttaaattaatttaggaaaaattacatttaacatgttgagtttttcttgatatgtgttgacatttgttcaagaccacctttttttcaggaatatttttaagatttttggttgttaaagctgtttcttgttaaatttatatgtggttcttttatttatctctattctatcttaagtgggtcattttctttccttatgtatttattttttgaatgtgcataaaaagatactgatcttttgaatattatttacatctctagtgaatttactagattcccttattttttcccataaatctgccaattttgttgagttttattggcacatttatgtgcatgtttataccatttacatcaaaggtgacattacttcttcctttccaatttttatactccatttctggtgcctaatcacattggctaacttctctacaatggcgttgaattgtcatagagatggtggccttccttgtctagttccagacaaaggaaaataacagaaaaagtaataaagaagctgctgrtgtgttacaattaaatcagaactcttgtttgctggagggttacatctctatctaatctacatctacgtcta

SEQ ID NO: 906509 - DNA, 439 bp, Homo sapiens
agggcaggggcaaaatgccaccagtctctttgctaaagcatagcaagggtgacctttgttccagttcccaataagttcctcatctccatctgagactcagcctggacttcattgtccacaacattatcagcattttggtcaaaaccattcaacaagtctctaggaagttccaaactttcccacatcttcctgtcttcttctgagctctccaaactgttccaacctctgcctgttacccagttccaaagtcacttccacattttcaagtatctttatagcagtactccactctccatggcaccaatttaatatattagtccattctyacactgctataaagacatacccaagactcggtaattcataaaggaaagagctttaattgactcacagttccaggtggctggaggggggagcctcaggaaacttataatcctgg

SEQ ID NO: 906510 - DNA, 364 bp, Homo sapiens
tttccaaagggtttttaaatgcagtctagtccatttaagtgtgtttgtttakggactattcattgctttgtgtctggagacagctggtggtcatagaacaggtaagaaataagacctagttttaatttctggttactagctaggtgacatttttcagttatatatcctctctgagcttcagggatcttatttaaaagatgaaaaagacaatagctttatttgggggccggcatgaggattagttatttgtctagtacctggtacacagaaaaatgttagttattagtgttaatggagaagaaagttttcagggaaagcaaaaaaaactaaaccattagaaatttgtgtgaaaaggaagtgatca

SEQ ID NO: 906511 - DNA, 657 bp, Homo sapiens
atatatatatctatgagcaagaaattcctctctccagagattgactacacaagtgyattaaatatgcgtaaaatatttataacatccatatgtacctatatgggtccaaagtgaggagaattgaaatgtctgttgatactatagcaactaaaatgaacactattttgctacattggtaacttacatgaatctcacaacataatgttatgtaaagaaatcaaacaaaaatataaatactatattactctaaataagttcaaaaacagataaatttttaatgtactcttagatgtttctaaattcagtcacttttaccctatcttgtattaaaatattctataataatttttctgtcaaaaatttattttaaaatttggttgacttttatacttaaaatatcattgccattcaccaaataccaacttttctcttcattttagaagacaatgtaaatacatgctgtttcattttaacacataaaaataaaaacctaaatattataacaattgagtaataacaaaattatagtaatattttattaaatatataaatgataaattataacacatttataatcatttaaaataattttaaatgatttttaatccattgctaaaattacttattataaagaacaattgtttcatcatttaatat

SEQ ID NO: 906512 - DNA, 678 bp, Homo sapiens
ttaagaggacttttactatatactcaggtagaaacatttctctttttggaaacaatatacctaaaccacagggcctacctgggacctgtggttgaacatacccatggctcagcttacatccttgcattcacttggctatattgactgagctgtattcccagataggaatactcttattccagaaacctgagaggcccaccaggtatcgtgctcccttcttcatggtaggaagtgcatgatgcaataatttaaactttcctttgaaggggatgatctggcatgttccagcccactggctcctaaaaaattcctggatagggatgactcctgaatcttcatagctttcattttaccctttctggaggacatgtgtcttcctaaggtcatgaacatacttgccacttgttgctcaaccagtcagattagcatgatgccgtcaatatagtggaccaatgtgaaattataagggcatgttggattataacagaacaagaaagtaaacctagtcctggggcaacactataaatataatatttgtagcatgctgtagtcagttccaagtgaatgcaaactttttgatgggattgggaaagaacatatttgccaggttaataactgtataccactgctctatcaaaaaagccaygcttgccccagtgataaaattagtacaaatat

SEQ ID NO: 906513 - DNA, 514 bp, Homo sapiens
gttttcagctcctttaaggagttctctgcattgattattctagtttgccattcatctaatttttttttaggtttttaacttctttrccatgggtttgaacttcctcctttagctcagagtagtttgatcgtctgaagtcttcttctctcaaatcatcatggtcattctccatccagctttgctccatttctggtgaggagctgtgttcctttggaggaggagaggtgctctgatttttagtttccagtttttctgctctgttttttccccatctttgtggttttatctacctttggtctttgatgatggtgaagtacagatggggttttggtgtggatgtcctttgtgtttgttagttttccttctaacagtcaggaccctcagctgcaggtctgttggagtttgctggaggtctacgccagaccctgtttgcctgggtatcagcagcagaggctgcacaacagcagatattggtgaacagcagatgttgctgcctgatcgttcctctggaagt

SEQ ID NO: 906514 - DNA, 657 bp, Homo sapiens
ttattttgtttaagataaaagccatattatttaagttagctcagaagtaagaactacrttaagaatgttactgattcctgaataatggcaacctctcttgtgaactgggggatatggttacttttgagacttacccttttccattaataaacatatcaaacagaatctgcttagtctgtgtatgcctagttccctattttttcttcagatgttatttttggtcttttatgtacttttagagaaaagaacagttatattctaaaatctggacccacctattctgttccattatggagactttattggactaatgagtgaaagatagataaatcattattgtttaaatataagacataactttaaatatgttatagttatctaatcatgaaataaggcatctaaaaataataataattactttcttgccaatggaactcttcaagaacaactgactgactatattcagtggtatcttaaaagtattttctgtatttgcagaatattaaaatagatggataaacaatgttaattttcaaaataaatataataaattgataaatgaattaatcaatctaagaaacataatatggtaagctaatttaaaaatcttaagtatgcctttattaagtaaatgcctaaaaatataaaacagtgatg

SEQ ID NO: 906515 - DNA, 657 bp, Homo sapiens
ttattttgtttaagataaaagccatattatttaagttagctcagaagtaagaactacgttaagaatgttactgattcctgaataatggcaacctctcttgtgaactgggggatatggttacttttgagacttacccttttccattaataaacatatcaaacagaatctgcttagtctgtgtatgcctagttccctattttttcttcagatgttatttttggtcttttatgtacttttagagaaaagaacagttatattctaaaatctggacccacctattctgttccattatggagactttattggactaatgagtgaaagatagataaatcattattgtttaaatataagacataactttaaatatgttatagttatctaatcatgaaataaggcatctaaaaataataataattactttcttgccaatggaactcttcaagaacaactgactgactatattcagtggtatcttaaaagtattttctgtatttgcagaatattaaaatagatggataaacaatgttaattttcaaaataaatataataaattgataaatgaattaatcaatctaagaaacataatatggtaagctaatttaaaaatcttaagtrtgcctttattaagtaaatgcctaaaaatataaaacagtgatg

SEQ ID NO: 906516 - DNA, 558 bp, Homo sapiens
gagaacaccacaaagatactcctcgagaagagtaacccaagacacataattgtcagattcaccaaggttgaaatgaaggaaaaaatgttaagggcagccagagagaaaggtcaggttacccacaaagggaagcccatcagactaacagtggatctcttggcagaaactctacaagtcagaagagagtgggggccaatattcaacaatcttaaagaagacaattttcaacccagaacttcatatccagccaaactaagcttcataagtgaaggagaaataaaaacctttacagacaagcaaatgcggagattttgtcaccaccagacctgccttacaagagctcctgaaggaagcactaaacatggaaagaaacaaccaataccagccacatcaaaaacatgccaaattgtaaagaccatcgatgctatgaagaaactgcataaattaacgggcaaaataaccaactaacatcataatgacaggatcaaattcacacataacartattaaccttaagtgtaaatgggctaaataccccaattaaaagacacagactggc

SEQ ID NO: 906517 - DNA, 615 bp, Homo sapiens
aatggtatgctgattttgctttctataaaatattttccacaacctgcctcttgtctataagctttggtgttaattaaaaggaacaacttggaagctcccaatgattgcagggaagtatttgtgtgtaacaatcttcaggcgggaaaagtttccaagaagttgtcttaaccaactaaaacctcatcttcctggtcttcatctgttcagcagttgcctatccaaagcctctgatttatctgactgttctactgatcaagggagcttaagaggcccatatgaataccatgttttagcagtttttttctcattaagtcatctggggagattcagctggtcacctcccaccacgagaaactttctaccatagcgcctcactcatctgtttctaacaagtgatgctcttgcgaacagtctctgagttttctaggcttagagggattgcgctggaaactaaattgggaactctcccaataacgctctctggataccacgacttagcttcagagggaggttytaggaaaagcaaaaaaaaaaaaaaaaaaaaaaaaagaaaaaagagaaaaaagtctttgtcatactcccaagcacaaagttacggtggttgaattcaataaa

SEQ ID NO: 906518 - DNA, 436 bp, Homo sapiens
tacgcatgacctgtgtggtgaagggtaactagtttgaaatggttctgaacactcaaaatgattgtcagattttattatttggaagttcaacttcatattttcctcaaattatgacctagatgtgaacttttttgtttttggtttgttttaatgagctcagaatcatcttgaatgatttgagagggtaatacagtttaaatacaacataggagatggtaatctccaggaatttcttctatcttttaagttacataaactaagaaagtatgtgttcagccaaggtttctgtggaatccttcaggccctggctaacacaaatcctgttgtagtacggggtcttggrattgcttagaaatccattgtttttcttccgttcctttcttcctgtttctctccttctctttcatacattccacccataagcctgtattaatta

SEQ ID NO: 906519 - DNA, 576 bp, Homo sapiens
tttccagttggagatttgaatttgatatctcagtgcttatattaattccaacatttatgtgcaagcatattgattcatttgtgcagtggcggtattggctgcttcagggggctcttacatcaatcctttaaaaaaaacaggctatggaaatgataatggatattgttactaactttgtcatttaaacattgctgtttccattgctgttggacgttagagccaagggcattttaaaaggccatatccatttctgtaagcatattaacattgtgagatccctcctggaaattttagaggattgtgtgttaagaggaggttaaactcatttgaaaagctatgacaaacttttggttggttgttaatcactgtgattttagcaagttgaataaaagtattttttgcagtaggctcataacacctctgacaaatttgctgtctttagcattttagaactatgactcaggccttcccagaaaaggtgggaaggaagggatggaagtggggatgtgaggaggctgggacttaasgggagcagaagagaagaggcaggcaccaggaggaagaagcatccctttg

SEQ ID NO: 906520 - DNA, 699 bp, Homo sapiens
cttctcagtgcatggcatttattctcaaattgaccacaaaattggaagtaaaacacttctcagtaaatgcaaaataactgaaatcataacagcctctcaraccacagtgcaatcaaattagaactcaggattaagaaactcactcaaaaccacacaattacatggaaattgaacaacctgctcctgaaggactcctgggtaaataatgaaattaaggcagaaatcaagttatttgaaaccaataagaacaaagagacaatgtgccagaatctctgggacacagctaaagcagtgttaagagggtagcactaaatccccatatcagaaagctagaaagatctcaaatcgacaccctaacctcacaattaaaagagctagagaagcaagagcaaactaatccaaaagctagcagaagacaagaaataactaagatcagagcagaactgaaggggatagagacacaaaaaaccctcaaaaaaatcaataaatccagcagctggttttttgaaaaaattaacaaaataggtagactgctagctagactaataaagaagaaaaaagaatcaaatagacacaataaaaaacgataaaggggatattaccacttatcccacagaaatacaaactaccatcagagaatactataaacacctctatgcaaataaactagaaaatctagaagaaatggataaattcctg

SEQ ID NO: 906521 - DNA, 690 bp, Homo sapiens
agctaaatactgctgctattttttaactgacaawtttgctctaatcatcatatttaagtgaatattgtgaatcctggatgtataatatattctgggcactgaatacattggtttagatattcaggacatttacgtgagaacttctcatatgtgaaaaatgaagttactgatgacaggaataatggaggagttataaaatgaatttcttgtagaattccacagattgatatttcactaattttgctttaaataaaatattcctggaatgtacattaggtatgacgcatagctcctccaatcatgaaaatcttccttctgaattcattcctcatgccttacctcattaaggattctgcctcgaatgcctgcataaaagctctattatttctaaaaaatctcaaatgggcattaaaaataatttcactgaagctgctacaacacaatttaagtcttcacataagatggagatgtcttaaacctagtctcaggggaggctggctgaaacgccccgaagccctgtctcatttatcacagaggcctcaggttatttgctatcagattcagtgtttttaattttataaacagggaggcacttacagaaagttatccagggtgatagataagctttggatatgctcaaaatgtatattattgtgtgcttaaacaaacaaacaaacaaacatgtatttg

SEQ ID NO: 906522 - DNA, 566 bp, Homo sapiens
acaataaatatagtttatatatatctatatattttatatatatatagatatatggagcttaacattctctaagcagttttgatgacacaatagtaaagagatcagtttttaatgcaatactatatatttctttctgattatcaggcagacaaattaacaaagagacataataataacaatcatattttgagtgtttctcaggtgcaaccataatttgggaccctattatatacattattctacttaatggctactaactgattttagagatattaaacaaaatcagagaggctaatttgcccacatcatgtagctctttagtactaagactgagattcatccctaggcccagcctctttcagagataatacactgttcattgtgtgagcagagaatggagttagtaagttaagtaggaacaagacaggataactgggataactgaaggtacrtgttccaaatatttttcctttattttaaaaagttgaaatacatttcagttactctgaacattatcaaagtgatataccaagtgtttcctattatttcccattttcacttgtttg

SEQ ID NO: 906523 - DNA, 646 bp, Homo sapiens
aaaaatatggtaattctgtgtattagtttgttgcagttgcataacagataatcaccaatttagcaacttraaatacaaatttattaacccacagtctttttaccccagatccaggttgacttgactgacatcattgttctgagttttataaggctgaaacttaagtgtcatctgtcttgggttttactaggaagctctggggagaatctgcttccaagctcatttgagttgttggtagaattacttccctgtggttgtaggaatgaggtcctgtgaacctgctggctgtcatccagggaccaattttagctcctcgaggactcccaggcccttgcatgtgggttcctacatctcagagccagcaacaccacacatatccttttcaaacttggagtttctcaactgcccctgcagccacctctcccttcaagaggtaaatgaagccacctcttctactccatctctcttctgcttctggttagaaacagctctctgctcataagggctcctgtgaatagactaggccaaccaagatggataatccagaataatctccctatattaaggtctgtaaccttaattatatctgcaaagtcccttttgcctataaggtaatggtttcacaggttccaacctcataccatat

SEQ ID NO: 906524 - DNA, 595 bp, Homo sapiens
tttattgaacatgacataaattgcttacattgatgtatccatttgatagttcaggtttagttcagagtaaaaaattttatatttggtgataacaatgtatttttaccttgagaatgaaaattcttctcttaaaaaccaaagaagttgtcataatactctcattggcaacttagaagaaactgaaaaagagagagtttataaagggactccagaatcaaagtctcctttggactaaagtgtgacatgccattactctccttatcttattacgtgacctcctcaacttgctcagaaaaaaaatgaggataaacacccaatcagaaatccagaagagctagaaggtagaaccagccatcgaccattgctataaattatgctggtgaaacggtttaatgcacatatgcttctccttgtgcacattgcacgaaatccatcatctgccaggccaaaaagttcacccttccmtgtcagggtcagaagggagaacttctcagaaggatgttcataatgatgtctgtatatggcagatacgtatccacggggatttttgtttaccttgctaactttgatttgcagaataaacatatgtcatcat

SEQ ID NO: 906525 - DNA, 628 bp, Homo sapiens
cccccgttgacaccacatggaacagagacaagctatccctgccaagccctccccaaattgcagatttaaaagcaaaacaaatgactgttgttttcactcactaagctttggagtggtttgttatgcagtgacaataaccagaagagattttgatagttggatatggggtgctgccaaaacaaaaacttaaaatacgtggcattagcaccgagattgggcagcagacagaagctggaagagccccaaagccagtgcctgtcaagccaaaagggccaaggaaggatggatttgtggaagccttaaaagctataagaaaggtgttgatgaaagcttaaaggaaagaaaacgtaactgtaagctgaaagaaagtttcttctctctctgcagtgttttacctagacctgtggcaaaaatctaagactcactccctctctctgtgcatgtacaaagaagaggtttggtaagcagggtgatgacagccttcaacaagccaggaagagagctctcaccagaacctgaccatgccagtaccctgcagatttccagcctccagaacaaggacgtaatayaaatgatgcagcttcctcttagttctttggggatgcttgctctcagaatccaggcagta

SEQ ID NO: 906526 - DNA, 680 bp, Homo sapiens
ttctattttcttctccttatactgatggaattactttcaaaatacacatacatatgtgagttggcaataaaccaatttttatagtggatatatctaaatgttaacatggtagattatttttatttttttccttgtgcttatttttgatttccaaattttccacaatggaattatattatattccattgcaaaaatgaattaagaaaatgcattactgataaactatttatggaataaaatgagctcacataagtatgaaaaaaatgtgcccaagttaattgattggtaaattaccatttctcctcattcatttaccctgtgctgtctctttcttctctgaagtgatatgaatcctggataaatctgatatatgtatatttatgtgagagtagcaatttacatttcacatgaaattatgcttccaattactaaatcaaggaatcatcaaaaacatcttcatcaccataaaaaggaaggtagtaataaaagtaatacactttttgatattactttaggcaaattaaaacttcaatgaggcacaaaaggttatgctgggaagtcacatacaacaaaagcctaaaggataaactctttatcttgaaaacattcctcttgacttattttygttttggtttgccacaaacctgttataatccaatttatatggaataggttttcta

SEQ ID NO: 906527 - DNA, 544 bp, Homo sapiens
tctaaccacaagtttgatatatttttttaaagaaaaatttccaaaatactataactgagcaataggctaatacttcataaattaaaatatttaaatattcaatctttctgagtggatatttgttgcatatctgataacttggcctaattctgtaattgggatgagaactacccaattttattggtaacctcttttctgctctgcaactttggaaataatatggaggacttcaaattcatttgagacaaaaatattaaaaatgtaacccctgattaggatttcagttccaaagctctccttggagggatatagagctggagacaatcaatcacatttatttttcatctccttaatattgatatataaaagtcaggttaaaattagtatcaaaatgggaagcctgcattgtaaactggctggaataatacactctgcaatatgaaggaaaaaggaaaaatttagttgattyatttacttaactataattttttaaagaattttaagtttctaataaatttaactataaatttttaattttctatct

SEQ ID NO: 906528 - DNA, 669 bp, Homo sapiens
cttccagcaaaatattggttacttaaatacattagcttcatcgtccttgttgacacaggtaattccaatttaacctacatgtcagcatccccaacctggatccttccttctagaacttctgtgcagtcttaaagttaacattctcatggcactaatgcatgggagttcttactcccaagagtctctcaacatcacctctcatgactaacatgttccatcatgtggaactcaggtttattttcttgttttctgcaaaaggaaaaagagaaaatgaaaaaaaaaatgacaaattatatatgtggcagccttttgtgaaggtctaggggcaatggatgaggttatataacaacaacacaaacagctccagattatgtccaccaacttgacagaagcatcgcataatatcactcagctcattctcacaccctctcccccgctccatcctctttacaaatatcaacgtttcaaaaatatgcctctggtcttccctttatatatccaaagactcatccttatgctctgataaacacagttcaccttgtctgaatctaatttttctccccgcaagtctttaaagagaaggaagctgtgtagagattttttactcaytgatatgaattatgtatactccctacttagtagaagcagttaagttagttctttatttta

SEQ ID NO: 906529 - DNA, 650 bp, Homo sapiens
ttaccttgggcagtatggccattttcatgatattgattttttcctacccatgagcatggaatgttcttccatttgtttgtatcctcttttatttcactgagcagtggtttgtagttctccttgcagaggtccttcacatcccttgtaagttggattcctaggtattttattctctgtgaagcaattgtgaatgggagttcactcatgatttggctctctgtttttctattattggtgtataagaatgcttgtgatttttgcacattgattttgtatcctgagactttgctgaagtagcctatcagcttaaggagattttgggctgagacgatggggttttctagatatacaatcatgtcatctgcaaacagggacaatttgacttcctcttttcctaattgaattccctttatttccttctcctgcctgattgccctggccaggcagatctatagataaagaagtccaacatgggtctcactgtattaaaattaaggtatttccaggcctgtatttctttctgggggagaatccatttcattgtytctctcagttttctgaagctgcccctattcctaaacttatgttcccttgctccattgtcgaagtcagcaatgtagcatctttatgaccattcttttatactcaaa

SEQ ID NO: 906530 - DNA, 595 bp, Homo sapiens
tttacactgttggtgggagtataaattagctcaactattgtggaagacagtgtggtgattcctcaaggatctagaactagaaattccatttgaccccgcaatcctattactgggtatgtactcaaagaatcataaatcattctactataaagacacatgcacacatatgtttattatggcactattcacaatagcaaagagttggaaccaacccaaatgtccatcaataatagactggataaagaaaatgtgacacatacacaacatggactactatgcagccataaaagaggatgagttcatgtcctttgcaggaatatggatgaagctggaaaacatcattctcagcaaactatcacaagaacagaaaaccaaacagcacatgttctcactcataagtgggagttgaacaatgagaacacgtggtcatcaggaggggaacatcacacaccagagcctgtcggggatttagtgggtaggagaaggttaacattaggagaaatacctaatatagatgataggttgatgggtgcagygaaccaccatgccacatgtatacctatgtaacaaaactgcaccttctgcacatgtaccc

SEQ ID NO: 906531 - DNA, 603 bp, Homo sapiens
ctgcttccctcttaaacatcagcttctctttcataccatctctttgtgaatgcmtaaaaccaaatgcttccagaataatgcaggtcatgttttaaatgctttgctgcttagacatttcttctgccagataccctaaatcatctctctcatgttcaatgttccacaaatctccagggaaggagcaaaatgctgccagtctctgtgctaaagcatagcatgagtgaccttaactccagttcccaataaatttctcatctccatctgagaccacctcagcctggactttatagttcacatcactatcagcagtttggtcaaaaccatttaaatagcccctaggaagttgtaaacattcccacatcttcctgtcttcttccgagtcctccaaactgttccaacctctgcctattacctagttccaaagtcacttccacattttcaagtatctttatagcagtaagaaactctctgtgataccattttactgtatctgttcattctctcattgctataaaggtactaccaaagattgggtaatttataaaggaaagaggtttaattgactaatagttccacatgcctggggaggcctcgtgaatctcg

SEQ ID NO: 906532 - DNA, 588 bp, Homo sapiens
ctaaagtttagtttttacttgagaagacaaaaatattattataggaaattttatatcatactcataatttgatttgtgaaaataaataaaattcaaataatgttgatttctgttaatgatgctgattgcttattagatcctacacatataagtgaatcatttgcccataaatattatagattattatcataacaagtattgaataacctatacttctcattttgaagaagtgtattctatctttaatcagttgtgcctaaatttaaatgtgtatacatttaagaattttatcaaaaaatgtctttaaaaaatcaaaaacatcatcaaactgccaaaaatagaaaagctggggtagagaagtgaaactattgctcagtgatacagtccctttttgtgccagcaacagctgggcaatcaactttcatttataactatctaccgtaagcagcttgcccgtggccaagtcaatcattatagaatctaakggtacatcaattttcttccaagatttaatttggcacacagggttttgaaaaagaagactatcataaaatattgctacaactccagaatctaatatcttacttg

SEQ ID NO: 906533 - DNA, 651 bp, Homo sapiens
taaaaggtgagtttttaattgataagggctcatcctctcaaagagttctttcacttacatagtcattccaattactaataactaaatctgcaaaataaatgtagaaataacagctgatcttaagaagtgtaatttagtgatttattttcaaagatggccaaataggaacaactctggtctacagctcccagcgagatcgacatagaagacgggtgatttctgcatttccaactggggtacgtggttcatctcattgggacttgttggacagtgggtgcagcctatggagggtgagccaaagcaggaaggggcgtcgcctcaacagggaagcaccaggggtcaggggatttccctttcctcacaaagaaaagccgtcagtgactgtagctggaggaatggtaaacttctgcccaaatactgcacttttcccacagtcttcacaactggcagaccaggaaattccacccccatgcctgccttggtgcatcccaggcccacagagccttgcttgctgctagagcagtagtctgagatcaacccgggtcactggagcttggcggagggaggggcatcygccattgctgaggcttgagtaggcggttctatgctcacagtttaaacaaagcaacagggaagctcaaagtggatgga

SEQ ID NO: 906534 - DNA, 660 bp, Homo sapiens
aggggctattctttgacatggcctggagacattttccccattgtcttgtggattaacattaagctcctcattacttaagtaaatttctgcagccagtttgaatttttcctcagaaattttctattgcatcctcaggctgcaaactttccaaacttttatgctctgcttatcttttaaacataaattctaattctaaaccatatctttatgaatacataaaactgaatgattttaacagcacccaaattacctcttgaatgctttgctgcttaaaaattttttctgacaaataccctaaatcatctctctcaagttcaaatttccacagatctctagggcagaggcaaaaagccatcagtctctttgctaaagcatagcaagagtgacctttaccccagttcccaacaagcttctcatcttcatctgagaccacctcagcctggacttcactgtctatatcactgtcagcattttttcaacaagtctctaggaagttccaaactttcctgcattttcctgtcttcttctgagccctccaatctgtcccaacctctgcctgttaccsagctccaaagttgcttccacattttctggtatctttatagaagcaccccattctccacagtaccacttcactgtattagtcttttctcatgctgc

SEQ ID NO: 906535 - DNA, 605 bp, Homo sapiens
ccatccctctagtgctgttctctggagatctggttgtttaaaagtgtgaagcccctgcccactttctcttttcctcctgcgctggccatggtaagactccctctcccgctttgccttttgctgtaagtaaaagcttcatgaagcctcccccaccaatcttcctgtacagcctgtgaaactgtgaaccaattaaatctattttctttgtaaattacacagtctcaggtatttctttatagcaagcaagaacagactaatacactaattcacttttccattcaacaaatatttcttgagtgcctccagtgtactagccactgtttcaggttcaaagaataaattagtacaaacacacacatacacacatacatacactacacagaaaaagaaaaggtccttaccctcaaggaacttaccagtgaaggaagataggagataaataaaatcagtgaattatttattaaaaggcaggaaartatggcacaaagaatacgcaatgctggggcggaagtgaggtttaaaaatgtaaataagacggtaaaaaaaaaaagacgagtgattggaaaagctatggaatttacttgagttttaatcaagaggcagga

SEQ ID NO: 906536 - DNA, 585 bp, Homo sapiens
atcaatgggggtcctaacaagaaacacaggagacaaatgaattgyttaagagattgagagatataacaagagcaaaggatctgaatagatatttctccaaaacagaaaaatgaatagtcaataattacataaaaggatattcagtattattagccatcagaagactgcaaagccaaacctcaatgagataccactgcgtacctatttagaggattataagaaaacaaaaagacagctaataactgttgccaaggacatggaaaattaggatcttcacatattgctgatgggaatgtaaaatggtgcagtcactttgtgaaacagtctggtagtttctcaaaagattaaacatagagtgtcatataacccagtaattatggtcatagatatgtactcagcaaataaacatagaggttcatgtgaaaccttgtacacagattttcatacattattcatgatggtcaaaaattggaaatgattgaactgttcatcaattaattgataaataaaatgtggtatagccccaaaatattattcagcaataaatagaaataaaatactgatatatgctacaacatagatgaa

SEQ ID NO: 906537 - DNA, 561 bp, Homo sapiens; identical to SEQ ID NO: 905482

SEQ ID NO: 906538 - DNA, 629 bp, Homo sapiens
ggaagaaaatttccttttctagcttcaattctagtaggtagaaccttttgaatgttacccatttcctagttcatatttttctctttgttcttctgtgtgatcttgtacctcctgaatttaaatatcactgcatagacccccacccatcacctacagttgtagctaaaatcaagaaaggatttagggatcagttgtaatagccctggtgatttaggaactgccaaactttccattgtttctaagaggaaaaattgctttaaacgagcataatttagctataaggaagagctttagattaaggtatgtatggtactgctccacagtgatggctaatatatttaccacttgtaatttttttttaaattttaataggtagaaatgataaacctgaaattttaaaatcatagatataaatgtaaaatttatcatttgtgttctaatatagtcctcaatgtatttttgtattggtgatacctggtcaaaagagtttaatagacttcaatttcaacataagctaaaattataatgctttcatcaataacaaaactggcataatttaaatattattttaattaaaagttaaacgtatgatgtctggaataagtaaaraaatataattgctataccat

SEQ ID NO: 906539 - DNA, 656 bp, Homo sapiens
aacagtgggttccttcccttgtctgacagtgaaacctatggctcacttcagccctctctcacctagtcacgtggggtyactggagcatgattgcagttgtcttcacagtagtctccttaacatgctacagtgggatgccatccactgctcagtatcatcagaacatgttgtctctgtgtcctcacttccaatgtctgcttatttttatcctcctcactggttttcaaaggcctccttatccacttgccaatctcagccaataagctccttctctctggccacagagttagagggctgcctttcttccttttccataattcaactcacttgtcagacccagctcaagctcctctatctgaatttctatgtagggaggctgttgactaacgggccatcggggctgcctcattactctgttgtctggaacatacccatctttgcaaggaattgcacaatgtattaacggcttctgaaaataaggcttaccatgcctcttggaaaactaggataaaatttatctgaaataaaatgaccaatgcaagcttaaaaaagaaacccacataaactaaactttttggaaacaaaacagaagtttttggcctgaataacttcctcaaatttactccagttaagggcttatttatagagacaaccca

SEQ ID NO: 906540 - DNA, 500 bp, Homo sapiens
aagaaaaaaaaaatttaccctagaatagtgtatccagcaaaaatatcctttaagcttgaaggagaaataaagactttcccagacaaacaaaagctgagagattttrtcaacaccagacctgtcctacaaaaaatgctaaatggtacttcaatcagaaagaaaaggacgttaggccaggcgcggtggctcatgcccgtaattccaacactttgggaggacgaggtgggtggatcacgatgtcaggcgtttgagaccagcctgaccaacatgatgaaacctcatctctactaaaaatacaaaaattagcagacgtggtggcatgcgcctgtagtcccagctactcaggaggctgacgcaggagaattgcttgaacccaggaggcggaggttgcagtgagccgagatcgtgccattgcactccaacctgggtgacagagcaagactccatctcaaaaaaaaaaaaagaaaaagaaaaagaaaaggacgttaatgagcaataag

SEQ ID NO: 906541 - DNA, 500 bp, Homo sapiens
aagaaaaaaaaaatttaccctagaatagtgtatccagcaaaaatatcctttaagcttgaaggagaaataaagactttcccagacaaacaaaagctgagagattttatcaacaccagacctgtcctacaaaaaatgctaaatggtacttcaatcagaaagaaaaggacgttaggccaggcgcggtggctcatgcccgtaattccaacactttgggaggacgaggtgggtggatcacgatgtcaggcgtttgagaccagcctgaccaacatgatgaaacctcatctctactaaaaatacaaaaattagcagacgtggtggcatgcgcctgtagtcccagctactcaggaggctgacgcaggagaattgcttgaacccaggaggcggaggttgcagtgagccgagatygtgccattgcactccaacctgggtgacagagcaagactccatctcaaaaaaaaaaaaagaaaaagaaaaagaaaaggacgttaatgagcaataag

SEQ ID NO: 906542 - DNA, 622 bp, Homo sapiens
ataaaaagctaataatataatagacattttcatcttatgataagatattaaaaatatatatatttcatacctaattttatacctaataacataatagatctttttgtatcaacacagcagtgctacatcattctttttagtggctacttaaaattctattgtatgtttgtgtcataatttaattaacacaaccctagtgatggacatttacagtaagttttgtttgtggtataaaaaataccacatagaatgtttcttgtggacatgtctctttgtatttgtttaagtatatttttaggataattttcttgagaggaattgccaggtttgataatattatgacattatcatgatgtctatgataatatcacagatactatcatatctatgataataaaggcacaaaaatacatttgtgtattatcttagatatgtcaaattgtgtcagtttacattccctccagcattgcttgaatgtgcctttctctgtacacttattttaatatttgtgcaattcccacttycatagttccagtttttcctttttaattaaccagttagctagtatgacagaagattaaaataaaaattatattatttgggagcaagatggcccaataga

SEQ ID NO: 906543 - DNA, 530 bp, Homo sapiens
actaatgcctcaggtgacagtcatttgtcttggctgaggatcctaaaagggagctcccacttagctccagttcctcttggctgctctctcagagcagtcctgccagcacagggaaaaagaactcaaaataatsattttcaataagtccaatgagatgtagaaaacacaaataaaccacaaaatataattaggaaaataattcattaaaaaattagtttagtttaaatattatattccataaaaaaaggaccaaacagataccctatagctgaaaagtatgaagacagaagtgaaaaattcaatacagggcttcaacagcagactcaatcatacagaaaaagaattgatgaacatgatgacaggtaatttgaaattacccacctagaggaacaacaagaaaaagactgaaaaagcatgatgaaagtatgaggaacctatgggacaataccaagtgtacaaaaatatgaattaggaattcccagagaagacagacagagtaagaggacaaaaactaatataaagaaatacta

SEQ ID NO: 906544 - DNA, 611 bp, Homo sapiens
atatagcatgttaattgctgatgcctgccttttccatagccatcacctctaattaatcaatctgctctatagaattgacctcctcaataagtctcaaatccattcactcctttctttctgctgtgtgaccaccatagtctaaacctcttcatttcttttccagactctgcagcaatctcctaactcgtctctctgccttcagcattacaatcttgctcaaatgcatatccggccatgtcacacctatgcttaaaatccttcaacaacagacacatactggggttctggaacatggggatctgagcaaagtgcccttctcagcactcccagaatgatctacttgcttctccagcatctggcaggttctgagatctgtgagtaagaccttgggttctataaagttcttcacacagagctggtgtggaattccctccctttagggctagacagtcaacagcagaccagaggtgatagccaggacctgtagatgtagatatgcaggtgaaaggacttgtcartcaggggtttgtggatcccaactttgcctccatttcctcaaagttaacatcaaccttgtataagtatgtcagatcttgcagacccttccaaag

SEQ ID NO: 906545 - DNA, 654 bp, Homo sapiens
tttcttcagaatgaataaatagcaatgaagttactggttgagaatattgaggtttttaagaatctcgttacctatcagcaaattacactctaacttkcaggtttaacatgtcagaagagaagtatttggggcctcttttaattttataatttggtatttcagtaacttaatagaaaatacatgtgatacctttgctctaacctgcatctcatctattgtgatatattattttcctattatctattcttagtttaagtaactctcagattcttaccacattttgtgcaatgactggaagaatctcgttcaacttcccttggaaaattgttcaacagtgctataaaagtgaaattgcataattttgtgaaaattaattattcaaagagttatgccaattcttactgaataactaaaatttagtttcaagcaagtgttcagatcccattttatttcctttaatggaaaaacccatttgttcctctctcccaagtgcctgtctgataaaaatagcaaataacttctacatttttctctcactagactgtttgaataataataataaaagctaccctttattgactgtctactttatgccagaacctatgttaggcaatttatatatctctaactcacacagtaaacttgcaaggtatt

SEQ ID NO: 906546 - DNA, 636 bp, Homo sapiens
aaccatatcaatatctttattaaaatmgctgaatcaggccattactagtaattactaatcctgtaagatgatataatatgaaagtagaaaaaaatgcaaaattcccggacccttcttttttttttttttccagacagggtcttgctctgtcacccaggctggggtgcagtggtgtgatcacagctcaccgcaggcttgaactcctgggctcgtgtaatcctcctgcctcagcctcctaaatagctgggggacctacaggcacatgccaccatgctcggctaattttttaaagtaattttttgtagagatagggtctcaatgtagcccagattggtcttgaagtcctggactcaagcgaccctcctgccttggactctcaaactgctggaattacaggtgtgagccaccatgctcagccagcacactgggcccttcttactaatcctcagctacaatgcaaaattcttggttcttctctcctttcactttagagcttcagagaacatgcttcggttctttgagctcaccgatttaattctgtgttgaaataatgatgtttatctgcaacatagctctgaatttgtaattgaaatctctggtgctatagcctccttatagccctgtccctagcttgat

SEQ ID NO: 906547 - DNA, 636 bp, Homo sapiens
aaccatatcaatatctttattaaaatagctgaatcaggccattactagtaattactaatcctgtaagatgatataatatgaaagtagaaaaaaatgcaaaattcccrgacccttcttttttttttttttccagacagggtcttgctctgtcacccaggctggggtgcagtggtgtgatcacagctcaccgcaggcttgaactcctgggctcgtgtaatcctcctgcctcagcctcctaaatagctgggggacctacaggcacatgccaccatgctcggctaattttttaaagtaattttttgtagagatagggtctcaatgtagcccagattggtcttgaagtcctggactcaagcgaccctcctgccttggactctcaaactgctggaattacaggtgtgagccaccatgctcagccagcacactgggcccttcttactaatcctcagctacaatgcaaaattcttggttcttctctcctttcactttagagcttcagagaacatgcttcggttctttgagctcaccgatttaattctgtgttgaaataatgatgtttatctgcaacatagctctgaatttgtaattgaaatctctggtgctatagcctccttatagccctgtccctagcttgat

SEQ ID NO: 906548 - DNA, 620 bp, Homo sapiens
  misc_feature 483: n = A,T,C or G
ggctcaatgccagggctcagtkccatactgttctttcctctctaccgtgctacctttctatgccaaatgatctggaatatataaaggaaaatgacattgttcttgcttatagtcttttgaggggaaaggtgtgcaacagttgactcttcagggtgaaaacactaaatgctaagctgaggtcaaggggaactctagggaaccctgaggaatggcccagcacacctagacctcatagcctccatagccccttccctgctgatccttttcatactggcctggccagtcctaatttctctctgaaatagagtagccttcacagttgtcctgggttggtcattttgacctcatatttaggggtttggggtaatttctctaggaagtttctccctatatgcagcatgaccaataagtgtagaggtcaccagcaagcaaattgctcaaaagaagtatcacaaactgtcctgtaccaaatgctctacttcntgaagatggagaccctttgggcgcctggctggttctcaccaacttggaaggatcatgtgttgctgcctctgttgggtgctgccatttataatcttgaactgaacccagcacatcatggctactttctcccagctgtg

SEQ ID NO: 906549 - DNA, 656 bp, Homo sapiens
tgaaaaggcagttaagagtttaaataatttcttggagatggggaaataatatttcatggtattacataagcattagcttctctctctggaggagtcccttcccacaaacactgttgtatcatttctttcagatcctgagactccagcaggatgtcttatcaacagcagcagtgcaagcagccctgccagccacctcctgtgtgccccacgccaaagtgcccagagccatgtccacccccgaagtgccctgagccctgcccatcaccaaagtgtccacagccctgcccacctcagcagtgccagcagaaatatcctcctgtgacaccttccccaccctgccagccaaagtgtccacccaagagcaagtaacagcttcaggattcatcaggagcatgagaggataaggataattggctcacctcgttccacagctccacttgcatcttctcaccaaagccttccatggatgcacagggagcttctttctccttaacctgtggcctgcctgtgatgatctgtgacagcaaaagattccctttctgaggctgccatactgccactgtccaggtggagctaagaaaaggaagtcctcagctgtgccagctcccagagcttcagmagaaagagcagcagctctctccctgggaaccatcaga

SEQ ID NO: 906550 - DNA, 616 bp, Homo sapiens
ctggacaaaatcacctgatgggaatcaattgctaacaagtcaagaggagaatatgaataaatatttttttttaaaatgttcaaagcaaaaaggaactgaaacaaaaattctgtcaaaggtatcagggcctctcctgtctcacagtcaaagccaaggcctccacgacttggtccccagctcctcccatcatgtctctgaccctctctctgaaccctggcttccccatccaccaattctctccagccacagcagctgaatttgctcctaggacagacctggatagcatgttcccgcctcagggcaattgatggattttttaaaagataaaatcatgacacttgcacaaatataaagtgatcgtgtgtcaaagactacttaagtcattaatgaaggaaggaaccaggaaaatgttaaaaccaattctgcagagcatcctaaaagcagacacatacaaagacaaccaggcacactgatctgaatctgtcaacaggggaattggtccaccagcaaaacmcatttgcttctccgtggactagaatcattggttttgccatcagttttctagaagttagagttgaaaactagtttgaagaccatgacaggcacagtccactac

SEQ ID NO: 906551 - DNA, 575 bp, Homo sapiens
catggtggcacatgcctctagtcccagcaacttagaggctgaggttagaggattgcttgagcctggggctggggggctggcattcggaactgcagtgagccaagatggtggcactgcactccagcctgggccacagagcaagaccttgtcttaaaaaaaaaaaaagtgctgggcacggtggcttacgcctgtaatcccagcactttgggaggccgaggcaggcgaatcacctgaggtccggagttcgagaccagcctgaccaacatggagaaatccgtctctactaaaaatacaaaattaaccgggtgtggtggtgcatgcctataatcccatctactccggaggctgaggcaggcgaatggcttgaacccgggaggcggaggttgctgtgagccaagatcgcgccattgcactccagcctgggcaacaagagcgaaactccgtctcaaaaaaaaaaaaagtgcaaggtgcaggactcctcacrgatttccatatcaatgaccactctcccagctcatttagtatggctttctacgtatttttctacccaaataaataaaagcctcaattctcaa

SEQ ID NO: 906552 - DNA, 586 bp, Homo sapiens
gggcctggtgggaactgtttgggtcctgggggtgaatccctccgggcttggtgctgtctttgccatagtgagttcttgtcatttaaaagtatgtggtacctctgctacccccactcttcctctttctctctcttactcctgctttcaccatgtgatgtgcctgttcctgcttcaccttcaggcaaaagtcaaacctccttgaggcctccccagaagcctagcaatgtcagcaccatgctacacagccaattaagcctcttttctatatgaaatacctagtctctaatttttttttgtagcagtgcaagaacagcctaatacaaatgttttctacttttgaaagtataagtttttaacctcttttcaaaatttattcaatctttactattttgatggtgttataagtgaaattgttcttatattaatttttggactatttgttgctaaggaataaaaataaagttgttttttaaatatttaccctgcaaacttactaagttcatttattagtgctaataacatttttgcatataaatttcataygattttctatgtagaagatcacattatctgtaaatagaaagag

SEQ ID NO: 906553 - DNA, 578 bp, Homo sapiens
cagaaataagaccacacacctacagtcaactgattttttataacgttgacaaaaacaagcaatggggaaaggatcctctatttaataaatgttgctgtgtgaactggctagccatatacagaaaattgaaactgaaccccttccttataccatatacaaaaattaactctagatggattaaagacttaaatctaaaacccaaaattagaagaaaatctaggcaataccattcaggacataggcatgggcaaagatttgatgaggaaaatgccaaaagtaattgcaacaaaagcaaaaattgacaaattggatctaattaaactaaagagcttctgcacagcaaaagaaactatcatcagactgaacagacaacttacataatgggagaaaatttctgcaatctatccatctgacaaaggtctaatatccagagtctacaaggaacttaaataaatttataaaaaacaaagcaaaacaaaaccacacacaaccccattaaaaagtgggcaaagggcatggacagacactgctcaaaagaagacattcacrccaacaaacatatgaaaaaagctcaacat

SEQ ID NO: 906554 - DNA, 321 bp, Homo sapiens
cctggattgcattctgttttcacttgacaataacgcctctcggaaagagcaaataacctccacatgcagggtctttgtcttatctctcagaggtatttgtctccccactgcctcacatacactcagctctcaagatatttgaccccaagagaattggccagatagagatgtgaggacgtgtgagttgaagcccaatgttattactctctggcacataaagggccacaatgtctgagtaayactggaatcagaagacatgaataaacagaggtcaaggtggtggtttaatcccaacgacatgtaaacaaactcacttttaaa

SEQ ID NO: 906555 - DNA, 651 bp, Homo sapiens
aatataaaggaaaacatgcaatctacacagaaaaagyttaataattactttctaggatgtcagtcagtaattttgagtgcccatttttgaaataacaactgacatttctaaagggagaaaaagtaaaataaagactttataaactagcaagagattcctaggcttaatttagatagccaacattgtattatcctgaagtttatttttgtgtttctacttactttctcttcctccatttagattaatgcagtcagcatttcactttactcttaccataataagcaaggaaaaacattggagtggtccctgagaagcaattctacagaaaactaatacaaagaatttatacatcattccatctataaatttgggagtatccaaattctgacaagtctctattttgtgtgaacaactgtggattaaggtatgtcatccatatcttacatagattattccttattttggatttatcatcccacgtttgcttttcattaatatttgataactaagcacttactatgggagaaatcggtggaaataaacaaatgaagaattagtcttcccttgtcatcttactgcacctgcactagtagaagatctattttctctgctatagatagatatgacagtaaaaatacatgaaaactaagt

SEQ ID NO: 906556 - DNA, 602 bp, Homo sapiens
aataaaattatacttctctgagcactgattcctaggaactaataatatatttttctactcaaaagtgttcatttaacctaattttctcatttgtattttttaaattttagattsaggggaaatatgtacagggttgctatatgggtatattgagcgacagtgaggtttgggatacagatggtcctgtcaccagggtgatgagcacagcagccaacagcagcttttcatcccatgctcccccttcctccctccatcaccctatctagtagtccctagtgtatattgtttctatctttatgtgtatgtgttttcaatgtttagctcccacttatgagaatatgcagtatttggttttctgttcttgcattaatgcacttagaataatggcatccagctgcatccatgttgctgcaaaggacatgatttcattcctttttatggctgtgtagtattccatggtgaatatgcaccatattctctttatccaatccacaattgttgggcacctatgttgattccatgtctttgctattgtgaatagctgcaatgaaaacacgagtgcatgtgtgtttttgatagaatgagttatttcctttggatat

SEQ ID NO: 906557 - DNA, 596 bp, Homo sapiens
aatgcccttcattgtcttttttgatctttgttggtttaaagtctgttttatcagaaactaggattgcaactcctgcttttttatgctttccatttgcctggtaaatcttcgtccatgcctttattttgagcctatgtgtgtctttgtatatgagatgggtctcctgaatacagcacattgatgggtcttaactctttatccaatttgccagtctgtgtcttttaattggggcatttagcttgtttacagttaaggttaatattgttatgtgtgaatttgtttctgtcattatgatgctagctggttattttgcccattagttggcgtagtttcttcacagtgttgatggtcttcacattttggtttgtttttgcagtggctggtactggtttttcctttcaatatttagtgctttcttcaggagctcttgtaaggcaggcctggagtgacaaaatccctcagcatttgtttgtctgtaaaggattttattctttcttcacttatgaagcttartttagctgggtatgaaattctggttgaaaattattttcttaagaatgttgaacattggcctccactctcttctggcttgtagg

SEQ ID NO: 906558 - DNA, 558 bp, Homo sapiens
gagtttaagagtggtggcctgcagataggccatgtagcttcatctttcatcttagaattctctagcctaaaaattctgtttgaattttagtggctcataagataatgtctaaacacctgagtttgatctccactggtcttatggctgggcttacatgttcagtcttacttcctgtcactcttgctgtcacattccaaatctcagacattgttcaactaccacagttctctgactataacttgcttcttccagcccctctgctttttcctctgccaaaaagaaaaaatgctcttctcttactcagaaaataaatatttaaactacatgcctcattatatacatattcttctttggaagagtatcctgcttatggactatcctagcaggctatacatttttctatttagttcccatcatattgtactgctayacaattatctaattatttgaatgcattctgtaagagttcatgactccacaaaggtgggaaccataatcttcactaatttcagttgttgagtatacaagacctgtgtatagcacatagcagttactaaa

SEQ ID NO: 906559 - DNA, 586 bp, Homo sapiens
tccttttgaacattgttgtttagaaatgtgttacttaatttccaaattttggggagtttttaagaatttttcttttattgatctttagtttgattctatgtgatcagggaacacattccgtttgattttgtttttactttcttgagacttggttcatggtactggacatgatcaatctggatgaatgttctatgtgcacttgaagaaagtttgcattctattaagtggaacattctagaaatatcaattaggttaatttggttaatagtgttattcaggtcttccatatctttacctgttttctctctacttgttctgttgtttactgagagaggatctttgaaggttcaactttaattgtgaatgcgtctattttcacttttagtttgctcaggttttgcttcacgtatttggaagatctgttgttaaatgcacataaattttttatgctttcttgatgactcatcccctttgtcatggttttttttttgcmatgtcactttttatccatatttcttcttctaaagtctactttttctgatattaatataggcattccagctttcttttaattcatgtttatata

SEQ ID NO: 906560 - DNA, 609 bp, Homo sapiens
caaagacagaagtcaaaaggttagaagtgatttatttatttttgctatgctttttttttttttaagttccagaatacatgtgcagaacctgtagatttgttacataggtatacatgagccatggtggtttgctgcacctatctacccataacctaggttttaagccccacatgcattagctatttgtcctgatgctgtctcttccctcacccccccaccccatgacaggtcgccatatgtgttgttgccctccctgtgtccatgtgttctcattgctcaactaccacttatgagtgagaacatgcagtgtttggttttctgttcctgtgttaatttgctgaagatgatggtttccagattcatctgtgtccccacaaaggacatgatctcattcctttttgtacctgcatagtattccatggtgtatatggactacattttctttatccagtctatcattgatgggcattgggttggttccatgtctttgctatcgtgaatagtgctgcaatgaacataygtgtgcatgtatctttatagtagaatgacttatattttggtatatacccagtaatgggattgctggatcaagtggtgtttctggttctg

SEQ ID NO: 906561 - DNA, 636 bp, Homo sapiens
gtttctggttctggatccttgaggaatagccacactgtcttccacaatggttgaactaatttatagtcccaccaacagtgtaaaagcgttcctgtttctccacagmctcaccagcgtctgttgtttcttgacattttaataatcaccattctgactggcatgagatggtatctcattgtggttttggtttgcatttctctaatgatcagtgatgttgagctatttttcatatatttgttggccacataaatgtcttcttttgaaaagtgtctgttcatatcctttgcccactttttgacagagttgtttttttcttgtaatttgtttaagttggttataaattctggatattagacctttgtcagatgggtagactgcaaaaattttctcccattctgtaggttgcctgttagctctgatgatagtttcttttgctgtgcagaagctctttagtttaattagatcccatttgtcaattttagcttttgttgcaattgcttttggtgatttcgtcataaaatctttgcccatgcctatgtcctgaatggtattgcctaggttttcctctagggtttttatgatttggggagtgatttattttaaaatagagcatacattcacccattctctggttca

SEQ ID NO: 906562 - DNA, 636 bp, Homo sapiens
gtttctggttctggatccttgaggaatagccacactgtcttccacaatggttgaactaatttatagtcccaccaacagtgtaaaagcgttcctgtttctccacagcctcaccagygtctgttgtttcttgacattttaataatcaccattctgactggcatgagatggtatctcattgtggttttggtttgcatttctctaatgatcagtgatgttgagctatttttcatatatttgttggccacataaatgtcttcttttgaaaagtgtctgttcatatcctttgcccactttttgacagagttgtttttttcttgtaatttgtttaagttggttataaattctggatattagacctttgtcagatgggtagactgcaaaaattttctcccattctgtaggttgcctgttagctctgatgatagtttcttttgctgtgcagaagctctttagtttaattagatcccatttgtcaattttagcttttgttgcaattgcttttggtgatttcgtcataaaatctttgcccatgcctatgtcctgaatggtattgcctaggttttcctctagggtttttatgatttggggagtgatttattttaaaatagagcatacattcacccattctctggttca

SEQ ID NO: 906563 - DNA, 663 bp, Homo sapiens
tgatcacaaatgaaggaacttgtaaattatctgatgatggacagtttgacagatcaataagtgagccagtcttccatagaaaccaagcttattctgaaatctctggattttcmtatcagccagccttctgccataatgctctcttctcttggctgctcaagaaattttgtggggagagtagtgtgataaaagttgtatttgaagaatattaatctgttgtcactcattttagattggagggagaaaaacatagtgctctggaggcttagcatttcttttcattgcattttatgcagttctttctgaagacaaaaagaataataaatccttagactgtgccaggcataaatctaagtgctacacacacacacacacacacacacacacacacacaatttaatctttacaataaccttataaagcagacactgttgttagccctattttgtagatgagcaaactgagctacagaaaaagccaaagtcacatagctaacaaagagtaaaaccaggagagtaaatagcagtagctgggtttaataaatgtggaatggatgtgtgggtgaaagcgttgaggagttaacagaatgaattctgataagagactgtgataagagttagaaaagtgagaagaaattacacatttaggttaaggacaacatca

SEQ ID NO: 906564 - DNA, 663 bp, Homo sapiens
tgatcacaaatgaaggaacttgtaaattatctgatgatggacagtttgacagatcaataagtgagccagtcttccatagaaaccaagcttattctgaaatctctggattttcctatcagccagccttctgccataatgctctcttctcttggctgctcaagaaattttgtggggagagtagtgtgataaaagttgtatttgaagaatattaatctgttgtcactcattttagattggagggagaaaaacatagtgctctggaggcttagcatttcttttcattgcattttatgcagttctttctgaagacaaaaagaataataaatccttagactgtgccaggcataaatctaagtgctacacacacacacacacacacacacacacacacacaatttaatctttacaataaccttataaagcagacactgttgttagccctattttgtagatgagcaaactgagctacagaaaaagccaaagtcacatagctaacaaagagtaaaaccaggagagtaaatagcagtagctgggtttaataaatgtggaatgratgtgtgggtgaaagcgttgaggagttaacagaatgaattctgataagagactgtgataagagttagaaaagtgagaagaaattacacatttaggttaaggacaacatca

SEQ ID NO: 906565 - DNA, 561 bp, Homo sapiens
aactgtgaggtgagagccaggaggtgaaaaaggacaagactggagaaaatgaccttttctcacaaatttcttaacaactgtttcataaacataataaaactggcattacatttttcttatctctcaatgagtcaataaaataacatactaaatatctattttgctcagctttctattattttaaaatattttcttttgaagtccaagtgtaggtagaaatttaaaatttttctttataattaactaatcaatatttgaaagacttgccgtggctgttctcctactgaggcacactgttgtaaaacagtgattgaacttgaattgtacatggttttccttattctctcaaataattttccttcagttgaaataattacatgttcaagactctgatgttgtatagaagctgtgaaatgagaataagttggttcaattttttgtattcttgggcttgaaagatagatgacaactggaataatcattacagaagagtgactgttgtggtagggaaaatgtaagaaatttaaagaaagagaaayagtatgagaattaaaagaataa

SEQ ID NO: 906566 - DNA, 567 bp, Homo sapiens
gtgcagaaacacctatttttgattttgaaacaagacgatgacatttggaatgtgaaagcaggaagacagctgaaggaaagaaaagaggcattaatattcttatcatacaggtgggagtcaagagatacattcatatttgatgagtaagaaaatgaagttgcaaatatattcataaagtgacaaaaccaatagacaagctgaaaattgagtagatggggtgagagaagtgaagagggggttaaacgaaccagaccaacatcaatcacagcagaatatatctaaaattttaaaattacgaaagagcaatacaaaaaacacccaactaactacctttgttcttctgaggggtgggcctagaagcagaaaggagtaaggtagggagttgctgcattttatttctattttacttcttttgtcttcattttaagccaaatgcatgaaaaattaaacaaattcagcaagtggagataattcaggttccatggggtcacgggtatatctgggttgraggcaaggtggaggctgtgagagctgcccagtgctactggctgaagatgagggaaggga

SEQ ID NO: 906567 - DNA, 623 bp, Homo sapiens
gttcgtagggttaatagatgagaatatatatcggatgtgaatgttcaatgaagactgttagacagtatgtactaaatttaatttactcttgtttttatttacttattcctccagtaaacacttttgagctcctgctgtgggccagttaccagaacagatgttgagggagcaaactcttgagcatgattcttgccctcctggaatcagggtataaaacatgaaatgattgcacaaacagaaataaagttttaactgggcaaagtgcagtgaaatggaagagtgctatgctatggagttgggagaagttggcctcatcagagaggcccagaaaaatttcccagaagtgatgtctgagatgaaatctgaaacagaagcagttttatgtagaaaaacaaggaaggaagagagaacaaagaacacacatgatttatatcaagggcagcaggcaggtaaggggactgagacaatgctggtgtttttggtgtccaaaaatggtggaagatgagctttaggcaggaagcgttgccatataagtcatggtatggagttctcttgttattttctaagttctgagatctgtctgaagttctttaactggkcagtaaagatacctgagcagatat

SEQ ID NO: 906568 - DNA, 578 bp, Homo sapiens
aaagaaaaataaacttctctgttatttaagccggtgtcacctgggscttttcttttatatgcagccaagccttctgatcctgatctagatgacagagtcttatgaaggtagacaaggaaaggttggagatgttttttaatctctgtgtttttctattctgatcagaagagaaaagaaaattcaaaagcagcttggatcaaaaaaccatatctcattgacaaaggagacagagagtgaggggaataccagagagctaattatgagtgctcagccgacagcaatgcctgtgacactcctgatctgaaacccaagtgaccagacagattgaagcagactgaaggggcaagttttcatatcaggttgtgctgtagcactcttggaaaacttaagtatagctggtataagcagagccagaaagtctctgcctaaaagaaaagatgagaaacaagctgtaaattggtgtaagaagtgaatacagggaacacttggagtgactgatgatgactgagttttgtgagcatatctgtacataatctttttccaaatttatttcattttatatattttaatatattcaa

SEQ ID NO: 906569 - DNA, 646 bp, Homo sapiens
gaaaaaataactgtggtccctgtgaagtttgaaagtagtatagaaatttgggaaccccaaaagggaaacttatccccctaaatacatgggataaccatcaaggggttgatatgctccagtaagttttaggcagaaaaagagggtttctagtcatgttggggagaaggaacagtttcttcctatttttgtatgttggatgtctctaggattttggacaatcacttcattatcctatgtctcattttgtcttaagtataagaggaagatgataatttttatttcaaagaactaaattctatggaaaatttttatcatagaactaaattctatgataaattttatttcatgattaaatatgtatatagtgctcagcacagtgaatagcacactcagaaatattagttattgttgtggttgttactgatgcaacaaagaaccttggggttttagtattttgaatttaggattcaggtacacagttattatccatgagttctgcctagaggtaacataatattggccttgtggtcagctaagggaaaagctggatacagatgtgaggatgagagcctgaatacaagcaattcagragaatggagaaggtaagtgctagaaagatgttatgagagaaagctcacctatccaa

SEQ ID NO: 906570 - DNA, 574 bp, Homo sapiens
atttgcaatttatccatctgacaaagggctaatatccagaatctacaaagaacttaaatttacaagaaaaaacaaacaaccccatcaaaaagtgggcaaagtacatgaaygcacacttctcaaaagaagaagtgcaggcaacagacgtatgaaaaaatgctcatcatcactggtcatcagagaaatgcaaatcgaaaccacaatgagataccatttcatgccagttaaaatggcaatcattaaaaagtcaggaaacaacagatgctggagaggatgtgcagaaatacgaacacctttacactgttggtgggagtgtaaattagttcacgcattgtggaagacagtgtggtgattcctcaaggatctagaactagaaataccatttgacccagcaatcctattactgggtatatacccaaaggattataaatcatgctgctatccagacacatgcacgcatatgtttactgcagcactattcacaatagcaaagtcttggaaccaacccaaatatccatcaataatagactggataaagaaaatgtggcacagatataccatggaatattatgca

SEQ ID NO: 906571 - DNA, 597 bp, Homo sapiens
cactgaaaaatcttatttttgtttattgtagctataggcaataaaataaggctatatatgttctagaaaaaagtcaattaaggagttagagatactatatgtatttttattgaaaaaatttaaaaatattcttaaagttcaaaaataaaaattgagaatttctataagttgaaaattaattaaaagtatagatacaggaaagaaagcttgttccctaaatccttagagtttagaacaaaatgttgattttaggacaaataaaaataagctcttttttctactatagactacaatgtaaaaggctcattatctctttatgtagtataaaataaatagaacatcctaatatgctcaagaggatttgtgagagagttggacattttggaccaatgtaaagattacttagccaacatttctgaatgttgcaatgaacactacacaatagctcaagttttcctcagaatcatagttgtcagcagtataaagacctttatatattgttagttcaaattyctcattttaaacttgaagaaatttagtctttaagatgtgcataaagttcgtcacactgtgaaagacagccagcatttcaacaaa

SEQ ID NO: 906572 - DNA, 641 bp, Homo sapiens
tgtggtgaagttttggttgcagyattgtttgtgttattaaaaatccataaacaactaagtattcagccagagaaaaatattgaaataatttatgttatatccatgcaatggaatactgcagaggagagagcttaaaactgagcaatacatgagaatattaaaaagtatacaaacatacttttaggaaaaaagcattttgggggcagtctatagcatgaatgatactgtgttaaaaatagttatatatttacatccatttgcttgtatagtcatagtaaaattctcaaagcatgtatgagaaactggtgtttaccattgaaagtagaatgtatgtggagtgagtacttttccatttcactttatgtaccctctttgaattttaaaacatgggcatatattgcttttacaacttaaaaaaagttatttttaaaaatagtcaataaaaaattcctttgttccctttactgccatatattagtttttttaaaaaattagtccttcttgcaaatgtaatcctaagccttgatgtaatatttttgagtaattgagccaactatcatctttagttaaaacaggacgtgtatcaactcacggccaaagctctaatttgctcccagggagcacagaccaaaatgactaag

SEQ ID NO: 906573 - DNA, 677 bp, Homo sapiens
tatttagatttgacatagttgactctstgtgtgtgtgtgtgtatgaaaatatgcacatatatatggatatagatatatgcttgatatataaaaatacacacatatatttgttttctagaaattttcaaattcatcacacaaagttctacactgaattattttaaaatattttcttgtcatatcgctttcactggtcttactattatttgttccaactttttttcacagttttttgactctgagaaatttaattaaactttctaagcctcagttttcttatttataaattgtgacagataaaacctaaggtgtgagttttctttggttgtgtgtcaaattaccacaaacttggtggtttaagacaacctgctcttattatctcaccatttccattagtacagagtctgggcacagcttaactgaatccactgttcagggtctcaccaggccacagccaaggtgttgaccagggttggcatctcatctgaggttcaagatggtcttctaagctcatgtcattggtagcagagttcagttccttgcagttgaaggactgaggtggttggcttctagagacttctctcctcaccccaatttccagccatgtggcagtctccacaaaatggaactttccttttccattttggtaagaagctgattcttgcctcttaccacca

SEQ ID NO: 906574 - DNA, 438 bp, Homo sapiens
caaaacaacattctttaacacccccaaaagattaagctaatcaagaaggcaccacagaaaggtgaagtccaacttaaataaataaaaaagcrtaatacaagatatgaaaggaaaattcttctgtgaaatagcataaatgaaaaacaatcacattaggtaatcatgactcactcagagaaatgcaaaatgcactggaaagtctcagcaatagaatcgaacaagaaagaacttcagagctcaaagacaaggcttttgaattaacataatccatgaaagacaaagaaaaaagattattaaaaaaaaaacgaagcatccaagaaatttgagactatgttaaacatccaaacctaagaataactggtgttcctgaagaagggaaatctaaaagtttggaaaacatatctgagggaataatggaggaaaacttccccggccttg

SEQ ID NO: 906575 - DNA, 596 bp, Homo sapiens
ttaaaaaaagatataaatacataaaagaaataaggtagatcttatatatatatatatwatatatataatcatatatataatatatataatcttaaaaagaaaaatatgtatttttaaataattggcaaacagactgtatattttcaaggtgtgcaatgttgtgatttgatatacatattccttttgtttgttttttggaaatggagtctcgctctgtcacccaggctggatggagtgcagtggcacaatcttggataactgcaacctttgctgcctgggttcaagtgattctcctgcctcagcctcctgagtagctgggattacaggcgcatgccaccacacccggctagaattttaaaaagttaaattctgaactcaaaagaatagaactaagtacacctgatcatgcctgtaatcccagtgctttggaaggtcaatgcatgacaatggcttccagttcaggaatttgagaccaaactgggcaacataaggagacattgtctcaatagaatataaaataaaataaaataaataaaataaaatgcccagtgtggtattgtctgcccatagttcctgctactcaggaggctgggaca

SEQ ID NO: 906576 - DNA, 595 bp, Homo sapiens
tgtagtggtatctgtcaaaataagtggctagttgatctcygagggatggtgctctatcagtgcttacggttgatctttgtggcatcgtgtggcagtggcagtgacggtagtagctagatgatcctttttgagcgagattttgacactatttggttcatgcatgcttcatttctgctatgataccagagtgcttatcctgagcatatggaaaacttttttaaaaagagcttaaggtttaaacctctcttttaattgtagcaagacgtaaccttgagaattttgttctactctcctgccttaagaactcctgtccaaaaaccccatgggtgatgtgaaccatcttttgtgaaccattccaagaagacatagtttccttttaccagttgtccattcacatgaaatttctactttttttaaacaaagaatttgggcaagtaagcattttattctaagaaaagatttaaaatcaagtattaatttagaatcaaatatgtcattggcctgataaagtttatatgtctagaaatttttctaaaccttattagaaattaatgtcagtgccactcagagtttgtgaacactgctctgtgtacat

SEQ ID NO: 906577 - DNA, 646 bp, Homo sapiens
aatctttatgaaagtgtacgatgctyaggacatgatgataccctttttcctccctggacaactgaagtaaagtgaagtaaaacaagacacgacaaatatgttcaccagatacagaatgacctgggctctctataacatgctctcctatcacttccagtaactctaatttctatctattccaaagtacttagagctcacctaaagtattattctgtgacatgccttcggctctttttacaagttttctctgactaaaatttgcatccctccccaactacctccccattcttaactggaaaagtcttacaaatcttgcaagagccagttcaagtacttccttttctgtgaaccctgcctctcacctaaaaaaaatagaattacttacttcctcttttactccaccatagcacttatagatgcctctactaatgaaactctgtttcatagtcttttgatgtatcagtttccccggctggtctgcgagtttgttgaaggtaaatactatgtcttatttacctctgcactgctagcacatagaatagaacccaataactagtaagagattaatactgaactaatgactgaataaaatatagtatgttacaaatgactcatgtgtgagtcactgtttcatgtgacagaaaac

SEQ ID NO: 906578 - DNA, 530 bp, Homo sapiens
  misc_feature 1, 2, 3, 4, 5, 6, 7, 8, 9, 10, 11, 12, 13, 14, 15, 16, 17,18, 19, 20, 21, 22, 23, 24, 25, 26, 27, 28, 29, 30, 31,32, 33, 34, 35, 36, 37, 38, 39: n = A,T,C or G
nnnnnnnnnnnnnnnnnnnnnnnnnnnnnnnnnnnnnnntgtgccaaatcatgtgccccctcagatgaagggagagggctgctaaacagaccttaaaacgtatctaactttaaaaaaaagaaaagaaaactaactaatatgtttattgggcacttaaaaaaatgtgccaagcactgtaattagtaagcattttacctataggattgcttttcatccttacatcatccccaatagttaggtattattctttatagatgataactttgagaattaaagagttaagtaacttcccccaaggtctcactgccaatgagtggaggtattgagacctaaacctaggcggtctaagtcccacttgactgttaaactgtgcttctgacagcaatgtcacagccttctctttgtcttytattatttgtcttctattattattattattattattattattattattattattattatttgtgacagagtctcactccatcacccagactggagtgcagtggtgcaatcttggctaactg

SEQ ID NO: 906579 - DNA, 591 bp, Homo sapiens
cccagagggaataacatctgtatttttaagaccagctttgcaccacacctgcatatcaattcccctttctgacttctgcctctaaaccaaagccaaatgtttggctacggatttggtttccagggttcggctgagtatgaaaggcagcagctccaagacttcactggtcccaccaaaaaattgtttaagtgatgttaattgagtcctgggaaagtttaaaaaattgaaatccttagaggaaatggagatgaagggaaagaaagggagaagaagaaaaagagaaggcaatgagaaatgactgataaaaacagaagttaaatcaaatgatgatattaatttaaaaaatttaaactaaaatcatttaaaaattaaaatatttaaaaaatcattttagtttaatttcacatacttccattaattcgtttctggcttgtatctgattttattgcaaaactagaaaattactactaaatgttctaacatcaactggaggataggaaatttgaggagggtaagaaatctcagattggagtttatgttagttggtttatcactataagcttctgmggacatttgccatgatatcacatg

SEQ ID NO: 906580 - DNA, 591 bp, Homo sapiens
cccagagggaataacatctgtatttttaagaccagctttgcaccacacctgcatatcaattcccctttctgacttctgcctctaaaccaaagccaaatgtttggctacggatttggtttccagggttcggctgagtatgaaaggcagcagctccaagacttcactggtcccaccaaaaaattgtttaagtgatgttaattgagtcctgggaaagtttaaaaaattgaaatccttagaggaaatggagatgaagggaaagaaagggagaagaagaaaaagagaaggcaatgagaaatgactgataaaaacagaagttaaatcaaatgatgatattaatttaaaaaatttaaactaaaatcatttaaaaattaaaatatttaaaaaatcattttagtttaatttcacatacttccattaattcgtttctggcttgtatctgattttattgcaaaactagaaaattactactaaatgttctaacatcaactggaggataggaaatttgaggagggtaagaaatctcagattggagtttatgttagttggtttatcactataagcttctgakgacatttgccatgatatcacatg

SEQ ID NO: 906581 - DNA, 604 bp, Homo sapiens
aaataatgagttaggccctgtttttgagcgaatgtgtcacattaaggagaaagcaattatacttaaagagagcaaaggtttgcatggtgaaaagcagcaaaatatgaagttggaaaggcatgttgactaaaatttggtggatcaagaaagcaaggagtataagtttggtttgctattaagacaataagagagccattgttagcacttgagcaaaaaaaaaagcataaaaatatacttataaattataaaatataaagattgataaaaatagatttatgtttaaattatgttcaatgacaataacagtctggattagactagtaataagttatattagtttaatagattaaagtaacaaagaagagagagaagcaaagatgacctaaagttatagagtagaagactattcagtttcttgaaaaataattattaactttggcagtgtactacatgtgtgagtttatattccactcatagataatgctkatagaggaaatgtattgctgaattcttaattagaatttggaatttaacctgtctcctcttatgttacatagctttgtaaatgaattggccattcttatcagaaatgccaacaacttac

SEQ ID NO: 906582 - DNA, 675 bp, Homo sapiens
taagatggaaaacaagactttatcattgaatttaaggaaacaggttattgatgactttgataaggactgtttcctggaagtgayatgaataagagattgattagagtatagcatggggaaagagaattggagagtgcagattataactcatttaagaaattttactataaatgaacacaaagaaactggtcagtggctggctggaaaggtagaggtcaagatgatttgcttgtgattatgacgaaagaaataaaatgtttctctatgaagaatttaaatgattcagcagcagaattgaggatgtgagagagattaggaaatatgctgaaataacgttcttgagtaggtacaaggcactgagcctagaggacaaggagcaggatttgccttggatgggagcatgaagagttcatccagagtaaacaggagaaagcaaggagataggtaaagattcaggtaggctggtagatgtggcagtgggaacttgagcaattcccttctgattcttattttctcagtgaaatagcgagcaagatcaccagcagtgagttagtagagtggaggtattaaaaattttgaaatttgaagctacaggagaaggtataagttagacatttagaaaagtaggagagagaatggactagggaagtgcagtaggattatttggcagtgcca

SEQ ID NO: 906583 - DNA, 549 bp, Homo sapiens
atatatttaggatagttagctcttcttgttgcattgattcctttaccattatgtaatgcccttctttgtcttttttgatctttgttggtttaagrtctgttttatcagagactcggattgcaacccctgctttttttctgctttccatttgcttggtaaatattcctctatccctttattttgagcctatgtgtgtctttgcacgtgagatgggtctcctgaatacaggtgggtattgactctttatccaatttgccagtctgtgtcttttaactggggcatttagctcatttacatttaaggttaatattatgtgtgaatttgatcctgtcattatgatgttagctgtttattttgcccattagttgatgcagtttcttcatagtgtcgatggtctttacaatttggtatgtttttgcagtggctggtaccggttgttcctttccatgtttagtgcttccttcaggatctcttgtaaggcaggcctggtggtgacaaaatctctcagcatttgcttctctgtaaaggattttatttctccttcacttg

SEQ ID NO: 906584 - DNA, 676 bp, Homo sapiens
cacagtggttcatgcctgtaatcccagcactttgggagttcgaggccagcggatcacgaggtcaggagatcgagaccatcctggctaacacggtgaaaccccgtctctactaaaaatacaaaaaattagctgggcgtgttggccggtgcctgtagtcccagctactcaggaggctgaggcaggagaatggcgtgaacccgggaggcggagcttgcagtgagtctagctcgtgccactgcactccagcctgggtgacagagcgagactccgtctcaaaagaaaaaaaaattatgcttttataattccatcattccgtctacatttatcagatggctttctcctgaaacaagacctttcccagtatgggcttatggattctaactttatcctccagtatcataattgttgatattctcccagatttggccggtggaagcccctacatgttggacttcatgttcttttgacatgtccccatcattctttgaagatatccttgcaatatggaacacataatttctcttcatcttttagcacacaaaataatcttggactttccttgccccagccctggaatcagcaatttctccaagaagctttttggtcattttatcagagaayggtatttagaacccacaacctgggtactaagtgtgttaattcctattacagtgtc

SEQ ID NO: 906585 - DNA, 644 bp, Homo sapiens
acaatgacctgtgattctgttttgaccaaacatttaaagccatttaatatatttgatmaacgttctcaaaatccaattctaaatgaagtcttattgctggggcttatcaaagctataaaactaatccctagctgggcacagtgactcatgcctgtaatcccagcacttctgggaggtcgaggcgggcagatcacgaggtcaggagtttgagacgagcctggccaagagaccagcctggccgatatggtgaaaccccatctctactaaaaatacaaaaattagccgggtgtgctggcatgcacctgtaatcccggctactcaggatgctgaggcaggagaatagcttgaacccgggaggcagaggttgcagtgagccaagatcgtgccactgcactccagcctgggtgatggagagagactctgtctcaataaataaacaaataaaccccacaaggttgtagaatctttttacagctttcagtcaaactaaaggcactccagtgtcaccaccttcagcctaataatcacatatactggaaaagacatcggttaaaggcctttctttggcccccttgaaagagtcttatcaggtgctgttacctaatctttgtgctgagttatagggttttgactcctgggtacac

SEQ ID NO: 906586 - DNA, 658 bp, Homo sapiens
aattaaaagctgtgaaagcagcattgtgtccattgtaaatccttctcactaagagggctttaccagggaattctcaaagatggggagagggcaaagctgtgacagccaccacctcgacttagagagtccaggaaggaactttaatggaaaaatatttctatctaatatggaaacaaggaagttgcatgacttcactctgtctctgggttgagactagtggggaaagaaagaacaatgtcagtggaaggagagataaggaggagagcatatggcacaagccaggagaaagaaaattgcattaacaaaaacaccaacctgcacccttgtttagttctttctcactgtttcaaacagaaacctgtggattctggtcagttgcccacaggcaaagtatccgttctgtgacctgtgttgaggtcacagtgttcactcatctagattttagctccagtaataaactgttagcatgtgacataaacagatcacataaagatgtacatctgtcgctgggcaggaggctgtcccatagtgctatgtccacagtgaggaaagttcacaagaggatacaagtgagccygatacaagccctgcagtctggaagcaggctttctgttttacctctgcagcactcccacctacctgaaactctgtcccagta

SEQ ID NO: 906587 - DNA, 646 bp, Homo sapiens
tgtgtgtatatgctagaacatatttttcccctccacagatatgtgggtggctaattggaacctatcatgggcataagtggttaaggtttatgtggaaaggagtaactgtttatgagatttaggaaggaacatatttcgtataaactattttctaaaacatttacaatctcaccaagagatagagagctgaatagcaactgggggaagaaattgtgcaaagagaatctaaatgccccacctcttccttcccctcattatgaagcttctaggtctgcagagaacttagccaccagcattggatcgcgggtgtgccaggggctctcagaggaagctggtgttttctcctctttttaaaagtagaagacacagaggcccagggaatgaagttaattttctagaatgcatgggctttggtggctctcatgagattgactcagccctggctcagtgatcctcagaaaaaagtgaaaatacaggttgagtatccctaatccaagcatctaaaatctgaaatgcttcaaaatccagaactttttgaatgccaaaatgatgctcaaaggaaatgctcrttggagcattttggatttcagatttctggattatagatgctcaattggtaagtataatgcaaatattccaaaataaa

SEQ ID NO: 906588 - DNA, 557 bp, Homo sapiens
tagggaagtgcaaattaaaatgacaatgagataccactacacacttattagaatggtcaaactccgaaacactgacaacgccaaatactggtgaggatgtggagcaacaagaactctcattgattgctaataggaatgcaaaatgatacaactgctttggaagacagttttgtggtttcttacaaaactaaaatactattaccatatgatccagcaatagtgcttcttggtatttatccagattagctgaaaacttatgtcctcacagaacctacacaccaatgtttatagaagctttatttataactgccagtaattaaaagaaatcaagacgtccttcaacaagtaagtgaatagtgtggtacattctaacaatgaaatattattcaatgctgaaataaaatgagctatcaagccatacacacacaaaaaatggaataaagtaaaatgcatattacaaagtaaagaaatcaatctgacttcaattacatgacattytggaaaaagcaaaactatacagacagtaaaaaattagtagttaccagggactaggggtt

SEQ ID NO: 906589 - DNA, 653 bp, Homo sapiens
ataaaccctactacattgtggtgtattaktcttctgatgtgctattggatttggttcactactattttgttgagaattttttgcatttatgttcattagggatattagcccataggtttcttttttttttccttgcatccttgtctgatttggaatcagggtaatgctgacctcataaaataagttaaggagaattccctcctatttaacttttgggaataatttggggaggactagtattagtttttctccgtaagtttggtagaatttactagtgaatccatctggtcctgggcttttctttgttggagacttttaattgccagttcattcttactacttgtgataaatttattcaagttttctatcacttcctgattcaatcttggcaggttgtatgtttccaggtatttatccatttcctatgttttccagtttgttgtcatgtaattgttcagaatagtatctgctgatctttcttatttctgtggtatcagttgtcatgttgcttttttcatttctaatttcctatattttatcttctctcttattttcttgattaggcagtttctctgactcttgagtcagatgcctgtgcagcttcatgaagaagcctgttcagcttcctcagcaggtcatcagtgtcaacgagc

SEQ ID NO: 906590 - DNA, 493 bp, Homo sapiens
aaataatcttgaaaggcaataacaaagtatgagtactcttactgcttgatatcaaaacttactacaaaaaaaaaaraaaaacccggtaatcaagacagtacagggctggcataaggatagacatgtatatcaatagaatggaattgagttgatagattaaacccatacatctatggccaactgattattaacaaggttgccaagacaattcaatgaaggaaagaatagtcttcaacaaatgatgctggacactgtatagccacttgccaaaaagaaagaagtagaaccctacctcacatcatatacaaaaatcagctaaaaatggatcaaagatctaaacataggagctaaaactataacacttgtagaagaaaatgcaggagaaaatctttataaccttggattggacaatggattcttagatttggcgctaaaagcacaagtgacaaaacaaacaaaaaatagacaaactggacttcatcaaaattaaaac

SEQ ID NO: 906591 - DNA, 661 bp, Homo sapiens
cgccagcagggcctactaggaagcctagacttcccctttctcgaagctgtaatgaagcacccaatctcccatctcctctcctaytgagatattccagccagaaaaggcccagtaaggagcatggacttccacacaatgccacctccaccaacagtaatgaggtgcccctttccctcctcaatgggatggtcagaggaagcctagtggagagttgggatttccaccactgcccagcagtcatgaggtcacctccatcccccacaacccagagaggtatccatgtaagcttagcgaggagctggaattcctatctctacctggcagtaacaaggagaagcaccccactcaggtgtcaatggaggctgagtgtgaaatctgtatgtttaccccaacctggcaaaagtgagaggatgcctccctcttcttctgccatataaatattaaacctaaaattcaaaatttaaataagatccagagactacccaaatgccaaactttcaataaaaaattcattcattataccaagaaccaggaagacatcaaatggaatgaaaaacaggtaatcaatagatgccaacaccaaaattatatatcagaaatatcagacaaagatttttgaacagccatcataaaagtgctttaacaagtaattagggacaag

SEQ ID NO: 906592 - DNA, 552 bp, Homo sapiens
gtgtgttccttctctgcagattttgctgagagttttaatcataaagcgatgctgaattttgtcagatgctttttctgtgtctattgagataatcatgtgatttttgtttttaattctgtttatgtggtgtatcacatttattgacttgtgtatgttaaaccatccctgcatccctggtatgaaacccacttgatcatggtggtttatctttttaatatgctgttggattcagtttgctagtattttgttaaggattttttaatctatgttcatcagggatattggcctgtagttttcttttttggtcatgtccttccctgattttggtagtagggttatactggcttcacagaatgatttacggaggattccctctttctctgtcttttggaatggtgtcagtagattgataccaattcttctctgaatatctgatagaattcaactgtggatccatctggcccttgactttttcttgtcagaaatttttaaattatttcaatctygctacttgttattgatctcttcagagattctgtatcttcctggtta

SEQ ID NO: 906593 - DNA, 532 bp, Homo sapiens
aatgcaaatcaataacacaatgagatactatctcatgccagttagaatggtgatcattaaaaagtcaggaaacaacagatgatggagaggatgtggagaaasagaaatgcttttacactattggtgggagtgtaaattggttcaaacattgtggaagacagtattgtgattcctcaaggatctagaactacaaataccatttgacccagcaatcccattactgggtatatacccaaaagattataaaccattctactctaaagacacgtgcacatgcatgtttattgtggcactgttcacaacagcaaagacttggaactgacccaaatgcccatcaatgatagactagataaagaaaatgtgacacatatacaccatggaatactatgcatccataaaaaaggatgaattcatgtcctttgcagggacatggatgaagctggaaaccatcattctcagcaaactaacacaagaacagaaaacaaaacaccgcatgttctcataagtgcgagctggacaatgagaacacatg

SEQ ID NO: 906594 - DNA, 694 bp, Homo sapiens
cagctgtcaatgacttttggttattktgataagttaatgcatggaataattttacaaactagaaggaattaaacaagtatgattgttattaacaagttaggaaaagaaaattacagacgtttgtattttctcaccctttgaagatcatgtctacatgaatgataaaactacagcaagtcaataacatctccctgtcttgtaaccaccacaagtattagcaatattaactcatacagatattttgtgtatcataatttcatagatattagaaactttattggcagttgggtacagagatgactgtaatttctcttggcatttgagcaaaataatgaattatttgtgttgatgcatgataaccaaagatagactcttcactattaaattgttattagtgttactattattatttttttgagatgaagtctcactctgttgcccaggctggagtgcagcagtgcgatcttggcccgctgcaacctctgcctcccaggtttaagtgattctcatgccttagtctcccgactagctaggatttcagacttgtgccaccatgcctggctaatttttgtagttttgatagagatgaggttttgacatttgcccaggctggtctggacctcctggcctcaagtgatcctcctgcctcagcctcccggtgtgctgggattacaggcatgagccaccgtgcctg

SEQ ID NO: 906595 - DNA, 668 bp, Homo sapiens
ggaatctctagaaacttcttgacagcaagtttgctgtcaagggatttatagaaagcrtaaatgagagtaatcaaatgacaataataatataataagtataaaatgagaatagtagtagtaattatataattatataatattatataattatatataatattctataatacaaataataaatatatttattaaccataaactgagaataataataaataatgataactaaaaagtcatctagggaggagattaattatttacggaatcccaaagaaggctttgtagcagcatatttgatccaagacttgaatgctaaataggatttaacatgtagaaatgaagcaggagaggaaagaatagaaatgttcttttttttatttgtacacatttaagggttgaaagtgcaattttgttacatggatatttaatttagtggtgcagcctgggcttttagtgtaactgtcactccaacagtgtgtattgtagccattgaataatttcttattcttcacctccttcccaccctgccaccctttcgaatctccagtgtctattattccacactgtatgtccatgtgtatacattgttcagctcccacttctaagtgagaacatgcggtatttgtcttcgtgtttctgagttattccacttaaggtaatggcctgca

SEQ ID NO: 906596 - DNA, 600 bp, Homo sapiens
agggtacaacatatatgacaacaagtatgcaaaatgatgtcaaggataaaagtaggggttatagaggcagaaagcctggctctgtcactcactagctgtgtgaccttggatraactacttaaacttcctatgcttctgtttccttatcagtaaaatggagataataataatgccttttttatagaaatattataagaataaaatgaacaaattaatgcaaaattattaggactatggcatataaaaagcacttaataactggtagctattgactattatgtctattaatgtgttgtttatatgggtccagttaagaagagaagttgagtatttggggaagatcaggagtacagcgtgaaagaatcatgggtggaaaagtgaaagacattgtaaagagatacacagaaaaataagaagaaaaaatattttttaaaaagatggtagagaaaatgataaatagggggcaactcttctgaattatcactagagtacagtagaaccttgatcatggggttagggctatcaacccctccccatagctgaaaatccacatatagcttttgagtgcccccaaattaaactactaatagactactgttg

SEQ ID NO: 906597 - DNA, 626 bp, Homo sapiens
gccactataccaagcttcttaccaatgatcaggatttctcaactccctgaactcggttcttgtgctgaatactgatggagtargtagtttatttcattaatgccccccatcaatgtgcttatggaataacatgtcaaagtaaaattaagaaggaaacttaagtcagtaatatcttctgtcaaaacctgaacacattaattacatttactttcctattgcttgaacctgacttactttcctattccataaactttttcaaaatgtaaaaaccaagaccattttgtttttgttgttgctgacattgtagttattaggagtttagaaaatattttagatatggggcttctttgccaaaacattattctgattctaagtgcccgtaagttggaagacaaagtaagactgtttctctaagacattattactgatgcatgcagattttatagtttttggggggaacaaaaatatttacaaaaaatagtttaaggcatttttgtaaatcttaaacatctctaatttagtctaacctgcgaatagcagaaagggggcaagctggcaaacatgctgacttgaattcacttccactactagagctttgtcctggccttagatgcctggtgtcaatg

SEQ ID NO: 906598 - DNA, 580 bp, Homo sapiens
ctccctgcctcccattcctccacatcagctactgttcccccctgcctgcctccctgcctcccatkcctccacatcatttaatcttcatgcagccctgtgcacttgatgctatcattactcccattttacagaggacaaaaccgaggaatggaaaggttgggcattttgcccaggatgtacagaaaagaggtggctgtggaatttgagtccaggttttcctgactccggttcctgctgatactaatttcctggtgctgctgtaacaaaagagcataaactgggtggctaaaacaacagaaatttattctcacacagttctagaggccagaaattcaatgtcaagatgccagcaaggttgccttctagaggctctgaaggacaatctgttccatgcctctctcccagtctctggtggctccggcagtccttggcttgtgtctgcatcactccaatctctccctccatcttcacatgactttcctctccatatgtctgtcattggatttaggactcacccgaatccaggatgatttggatatttgtcattggatttaggatatttgtcattggatttaggact

SEQ ID NO: 906599 - DNA, 543 bp, Homo sapiens
cactgcaacctccacctcccgggttcaagcaattctcttgtctcagcctcctgagtagctgggactgcaggtgcacaccaccacacycagctaatatttgtatttttagtagagacagggtttcaccatattggtgaggctcatctcgaactcctgacctcaggtgatccacccactttggcctcccaaagtgctgggattacaggtgtgaaccaccatagccagccctgttaaagttttaaatgtgcattcctttgaccattatatcacttctaggactttatatacagaaacgcttgcactagggtgcaaagatctgtgtgtaaggacttcactgtaacagtgaaaactgaaattaacccaaatgcccatcaagagtaggtggtgaatggttgaatacacacatatatccgtataaccaaatattctgcaaactttcaaaggaatgtagtactctatatagatttcctgacatggaaagatatccataatgtttcttaagtagaaaataagtgatttgcaaagtcatcagtataatattct

SEQ ID NO: 906600 - DNA, 666 bp, Homo sapiens
tatatcaaatacctgttcagctgtaaataaggccctctgtaagtcactgacaaaaagattatattctcttgttgccgatgtataattcctattgtttaaaatgtgcagctctccaacatccatactttgtgacctgtagccatttaagttgtgtatttaatacatacacacgtacaataaggacatggcacattacaaaaagtcacaattggaggtatttttgttttcaaaggtatttttcctccaaagaagagacatacacatggagctctaatggattctgtattacgtagaaaatccctttggttgcaagtaacggaaatctcacaatcagtagcttaaataaataagatttgtttttctcccataaggtgattagagataggcagttgcaagttttggttcaacagctcaatgatgtgaggacgggcatctctaaaattttggtcttcctgtcataaatgaaagatggatttttaagctccagtttttccatctattttcatggaagaagtgggacagaggcagctcctcctggtattygtccctttcatcaacaaattcaacgcatttccagcagccacccacttatttccacttatgcccaattgcccagaattatgcacctggatacctctagctacggaaagttgaggaagttggccc

SEQ ID NO: 906601 - DNA, 543 bp, Homo sapiens
attatagcttcagaaggagaggcagactttggttcaaaagaaacccagacatccttcatagctcagctgaaatccccmctcctcagagaagcctgtcctgattaccttaaagagccccagtcgctctccaccaggtaaccctgcttcgtccactctgttcctggcacttcttgccagctggagttatcctgttttggcttcagtatacattctctctccaacttgcctgtaccatctgtaagagcagggatcttgtttatcctgttcaccacaacatcccagtacccagaaaagtgtctggcgcatagtaggagctccataagtatttgctgacttgaggaatgaattgataattgaacgccttcctccccacagcagctgcaggcattaaaaggccatgaagagccagtcttaaagagacctggcaattcatttaggggttcctgctgggaaaagaagttgcagaaagttgagttcattatctttttgccttgggcttttacctcactcaacatttttcattccatgactcaatctgcagac

SEQ ID NO: 906602 - DNA, 647 bp, Homo sapiens
acacacacacgcaccccacacacacacacagactttatatatatgtaatttaccaagtctaggctacaagaggaaactggcaaaaawtcactaattgaaatggagcttggccaagacatccatatctaatcccccttttctgattccaaatcagggagagtacatgctttgtgttttctggtaaaatacagacctatgtaacaatcagcatattttctcagaccagagcaagtaactcccaacaatgagtgtttgtcagtcctaactggtttctctacgtgggtggtgaaaaaataccttactacagtcattaattctttctttcaaaagaaccatgtgtcttgagaagttctgctccatcacagggcaatatcccattttaaatacagtgtttaccgatgtttgtccatgaatgacgtcaacaaaaatgtttaaatctcaccaggaaaggagggcttagttgccagactttgggagacagagttagttgatctttgcgctctcaaaggctctgttactcaattaagtgaccaatcattaactccaaagtatttaagcctaataatacaacaaaagagagaacaatgggtagtatctttaacattaatcatggtcacctttggtttagctgtttaggtcctttccta

SEQ ID NO: 906603 - DNA, 223 bp, Homo sapiens
ttttcaatagggcggtgccctgaaatgctccagtttctgactttttttattcccatagaattatatcagttctccataggaggagatgcttacactttctatttgtgtaagcatactgggagagcaagcctggttgggtgctggtgaggcacactgagtgtatggagtgcccaatggccagttatgggargtacgtaggtgaggtggctcaagcagtctatga

SEQ ID NO: 906604 - DNA, 593 bp, Homo sapiens
gtagagtggcatacaattttaatcrcttcttgcacatcaagagttacatgttcagggaacatgtatcagcctcttctggctacctctcagacttacctggtgtcctgacactgatataatccaaaatttaaaaaaattaatagaatgtgatggaggagggcttttttatctaaagatactatgatggcttatggctttgagtaccatatttaatttgggagtactgattaatgtacctccagtttattaagaattgaagactgtttttctcttctgcaatggtaacattgattactactcttcttgttcttaggtaaatacattgcacacatctttacaatgattttatgacagcagtgatcaatctctgaaatgccagtttgaaaattaggaaacaatatttcaaaactatatttttcaagaaaaaagtgatagtgagaaatcagattattttaaccttacctgttaattctataacaatagttttcaattctggctgtgcattaaatttaacctttactctttacaggatctgggattttaaaaaattatagatgtctgcttttaagatttataaacatgacacttctaca

SEQ ID NO: 906605 - DNA, 613 bp, Homo sapiens
aaataaactaaaaaccaaaaaatactgtacctagcagagctagcctttaaatatgaaggataaatttaaaaaaaaactttccggaacaamataaaattttattaaaaattttcacattaaagaaaagcccaagaactgatgactacactgctgaattctaacaatcactcaaagaagaactaatataaattcaactctaacttttcaagaaaattgaaaaggagggaatcttttcaactcattttatgaggccaacattttcctgataccaaaaccaaagacgcaacaaaaatagaaaactaaacatcaacatcactgatgaacacagatgaaaatcttgcacaaaatacttgcacactgaattcaacaacacatttaaaagatcattcaccatgataaagtgtaaaacatcccatagatgagtgatcaatacacatgaaagaaaatgtgatacattgaattagtagtcaaaaaaaaaattcaaataataatctcagtagatgctaacaacggatttgagaaaattaaacatccttttataattaaaaaacgctaaaaaactgggtatagaaggaacatatctcaaaataatgaaggtcatatatgacaagcc

SEQ ID NO: 906606 - DNA, 574 bp, Homo sapiens
gaatcttgggaaacagactaaagcagtgttaagagggaaatttatagcactaaatgtccacatcagaaagctggaaagatctcaaattgacaccttaacatcacaattaaaagagctagagatgcaagagcaaattaacccaaaagctagcagaagaccagaaagatctaagatcagagaagaagtgaaggagataaagacaaacaaaaaaacctgcaaaaaatcaataaatccaggggctggttttttgaaaaaattaacaaaatagatatacgactagctagactaataaagaagaagagagagaagaatcaaatagacacaataaaaatgataaaagggatatcaccactgaccccacagaaatacaaactaccatcagagaatactataaatacctctatgcaaataaactagaaaaactagaaaaaaaatggataaattcctggatgcatacaccctaccaagactaaatcaggaagaagctgaatctctgaatagacaaataacaatctctgaaattgagrcagtaattaataacctaccaacaaaaagaagccctggaccagatgaa

SEQ ID NO: 906607 - DNA, 632 bp, Homo sapiens
tacgggctagcagttctataactagctaatatacatatatatgttagggttgaakaacaagaaaatatgtaatagataatgagagctaagtttctggagaaagaaattacaagtgagcagagggatgagtctagaatgaacctggtgcttttggattgatgttgcaggtttcagtgtgaacttatttatatatacatatagagagacgcaaaaatcaatatagactatctcttcatacatgtatgagtatacatatatgtgtatatttcctaactttgtcagttgtgtcatgccagaagcaatgagcatatctaggatgcatatgtcagcttctaaagaccttagttttttaataaaagatccagaaatccttagagaagtggttgatccagagctggatcaaggacaaaacaaaacatgcctcactgaagaagttgtcaattaaaaacaaaacaaacaaacaaacaaaaaataggtgcatgaagaaagaatgtcagtactcactcagaagaactcctaagggccaaaactggaacaacttgaacaacaaaatacataattatagtgttgaattataaaccaccccccaaataaaacaatactcctgagtccatacttatgtaagttaatga

SEQ ID NO: 906608 - DNA, 632 bp, Homo sapiens
tacgggctagcagttctataactagctaatatacatatatatgttagggttgaataacaagaaaataygtaatagataatgagagctaagtttctggagaaagaaattacaagtgagcagagggatgagtctagaatgaacctggtgcttttggattgatgttgcaggtttcagtgtgaacttatttatatatacatatagagagacgcaaaaatcaatatagactatctcttcatacatgtatgagtatacatatatgtgtatatttcctaactttgtcagttgtgtcatgccagaagcaatgagcatatctaggatgcatatgtcagcttctaaagaccttagttttttaataaaagatccagaaatccttagagaagtggttgatccagagctggatcaaggacaaaacaaaacatgcctcactgaagaagttgtcaattaaaaacaaaacaaacaaacaaacaaaaaataggtgcatgaagaaagaatgtcagtactcactcagaagaactcctaagggccaaaactggaacaacttgaacaacaaaatacataattatagtgttgaattataaaccaccccccaaataaaacaatactcctgagtccatacttatgtaagttaatga

SEQ ID NO: 906609 - DNA, 621 bp, Homo sapiens
ttcctgaattttttgtttatttttatttttattttttctgtaagctgtctatttccttaaatatttctcccttcacttcttgtatcatttttcggatttccttgcactgggcttcacctttctctggactccctgatcagcttaataactaacctcttgaattctttttcaggtaaatcagggatttcttcttggtttggatctattgctggtgaactactgtgattttgtgggggtgttaaagagccttgttttgtcatattaccagggttggttttctgattcctcctcatttcgctaggctctctcagaggaaaggtctagggctgaaggctgttgttcagattattttgttccgtgaggtgttcccccttttcctatggatgtgatttcctgtgagccaaactgcagtgattgttgtctctcttctgggtctagctacccagcaagtccacccagctctgggctggtactggggattgtctgcacagtcctgtgatgtgaaccaactatggatctttcagccatggataccarcgcctgttcccgtggaggtggcaggggttgcaaatggactccatgagggttcttagctttgatggtttaatgctgtattcctgt

SEQ ID NO: 906610 - DNA, 616 bp, Homo sapiens
  misc_feature 1, 2, 3, 4, 5, 6, 7, 8, 9, 10, 11, 12, 13, 14, 15, 16, 17,18, 19, 20: n = A,T,C or G
nnnnnnnnnnnnnnnnnnnnagaaatcactgtgcattaccttcttcttcraatcggacagatccccaatttgagccacctctgaattaaggtgtggttaaatctgagaatgagtgtgtgagtgtgtgtgagagagtgtctgtgtgtatacgttgtgtacatatacacacaaacacacagtttgtgtacatatatataaacatatatgtacatatatatgtaatatatatgcttgtgtacatgtatatgtaactatttcttataaaatgctattgaaaatgagcaataattgatttgagcaattttttttataacttaatgtagccttacataatctctatgctaagtttgatatttcacagtcaaaatcaaatgtacaaaattaaagagcaaaacaaatagcaattacataagaaatgacttagcagctgtcagcttatgcaagaaatggcagtgcaccaattaccttggcatccatgaagctgttactatggctgttgttgcctctgtctctgctgaggttaacagcaatcataagacacttttttggttcatttactcaggctgttgattaacacagattcaatgccaggacagtgttacaatcaactgaactg

SEQ ID NO: 906611 - DNA, 671 bp, Homo sapiens
atgtaatgcccttctttgtctcttttgatctttgttggtttaaagtctgttttatcagagactasggttgcaacccctggtttcattttttttgtttgtttgttttgctttccatttgtttggtaaatattcctccatccctttattttgagcctatgtgtgtctttgcacataagatgggtcttctgaatacagcacactgatggatctcaactctttatccaatttgccagtctgtgtcttttaactggggcatttagcctatttacatttaaggttaatattgttatgtgtgaatttgatcctgtctttatgatgctagctggttattttgcccattacttcatgcactttcttcatagcatcgatggtctttacaatttggtattttttgcagtggctggtacaaggttttcctttccatatttagtacttccttcaggaactcttggaaggcaggcctggtggtgataaaatctctcatcttgtctgtaaagaattttatttctcctttgcttatgaagcttagtttggctggatatgaaattctgggttgaaaattcttttctttaagaatgttgaatattggcccccactctctttctggcttataagctttctgcagagagatccactcttagtctgatgggcttccctttgtgggtaacccg

SEQ ID NO: 906612 - DNA, 671 bp, Homo sapiens
atgtaatgcccttctttgtctcttttgatctttgttggtttaaagtctgttttatcagagactacgrttgcaacccctggtttcattttttttgtttgtttgttttgctttccatttgtttggtaaatattcctccatccctttattttgagcctatgtgtgtctttgcacataagatgggtcttctgaatacagcacactgatggatctcaactctttatccaatttgccagtctgtgtcttttaactggggcatttagcctatttacatttaaggttaatattgttatgtgtgaatttgatcctgtctttatgatgctagctggttattttgcccattacttcatgcactttcttcatagcatcgatggtctttacaatttggtattttttgcagtggctggtacaaggttttcctttccatatttagtacttccttcaggaactcttggaaggcaggcctggtggtgataaaatctctcatcttgtctgtaaagaattttatttctcctttgcttatgaagcttagtttggctggatatgaaattctgggttgaaaattcttttctttaagaatgttgaatattggcccccactctctttctggcttataagctttctgcagagagatccactcttagtctgatgggcttccctttgtgggtaacccg

SEQ ID NO: 906613 - DNA, 622 bp, Homo sapiens
ctttagctgcagacacacctgagtttgagttccatctccttgactttctagctgttactttgtcctttctaagtctcagtttcctcattagtaggatgaggctcatgatatctatcttacatggttgttgtgaagattaaaagagacattgctgcagcaaaacactttcttcctagcacagtgcctggcacccactcactgtcaaatgttggctattattacagctcagggattggagaagggggcagagttaaagaaaattactagacagaaaacatcaagtctgcataaattgttttgtatttcctgctcatgattaagcaattaaaataggatttgagtcattaaacctattaagaggttacagatcactaaaaacaatttctttttttagtaattggctgggacaaattatgcctccactgaattcagctccagatactacagggtgttggtgttaagtttgggaggcttctgcaattttgaagatattttcttagyttcttcgatttttccaaaggtgaatttgaaaaaataaggccagatttctatatagaaacagagataacatcttaaaggaataaagctgtataaatttatgaataatccttataaaccttga

SEQ ID NO: 906614 - DNA, 555 bp, Homo sapiens
ctcccaggtaacacccactgtccccagcctgacctttcccttcagcccatcttcctcaaagcactgcactccygatcaataatgtgagctctatcatcagggcctcctggctaggtaagtggctaggtgttccctctaaaaatataattcagtgtaaatgttaactttattctcctttcctgaaatatttacattttaagttaatgtcttagatatataacactttagcttccaaaaagccatctactatataggctaattgaagaagatatgttttcttaagcagtgcaacttgctaggagcagattttaaatcagatcacacaggcatgtgctgaagtttgtcagggtctctgctgggtgttttttagcaaggtatatggagtgtgtgatgtgttgtttacctgtctgcacagggttcatattgactatgtgataccaaacgtagcattccataatcctagaaaagcattttaatgagggtaataatttcagagccaggcgccaatgcctgaacttccaaagacctacaatgaccacttctgcatcctataaa

SEQ ID NO: 906615 - DNA, 585 bp, Homo sapiens
ctaaaatatcctgagcaatggtggcattattgttattattattattttgagacagggtctcactttctcacctaggctggagtacagtggcatgatatcagctcactacagcctcgatctcccagtctcaagcgatcctcctgcctcagccacccaagtagctgggactacaggcatgtgccaccatgactggctaattgtatttttcatagagatggtgtttcatcatgttgcttgggctggtctcaaactcctaagctcaagtgatcctcctgcctcggcctcctaaagtgctgggattacaggtgcctggccagtggtagcattatcatggaagcatacggcttctcaaggaagctcgtaagataaagtcagcatccatctctaaactctggcctgttaatttttaaaaaacatgtattttctagttattccttaggttgttcactgaactgcacatagagaagcagagctgaggcccttggagactttggggccttccactaataactgggaacatgacaatgcctgatgaaaccagrttccaaagtgacccaaagaaaattaaagcctgagagagctttt

SEQ ID NO: 906616 - DNA, 647 bp, Homo sapiens
acagaaggggttttgccgtgctgcccaggctgatccctaacccctgggctcaagcaatccacccaccttagcctcccaatgtgctgggattacaggtgtaagccaccrtgcctggcaataatttttcttttatatcaagtttcttcttcattttaaaaaaatttaaggtctatttttacttccaggaattttaattgattgttttctctataaaatgcattttacatttatgttacacttatctcttcatttcttgagtaattcagcacacattattaaaattcttttcacattatggtgtcattttccttttctggtgaaatgtttctctctttaggcaaggatattttttgttttggtttgattttcctaacctctcagcttcacatttttcttgtgtgtattgaaatgtgttgtgaagcttcatgatgagcagatactccttttgaggcggtttagaaccaggtcatgagctggtggctttagatcttaatcctttttccatacttggaccatggcctgacctggttcttaggttctggtgctgctgggttttcctgccactgcagacaaattgtttactttcaggcagagccttggatagctgcagatttttaagggccctctttataaaaatattatctatt

SEQ ID NO: 906617 - DNA, 631 bp, Homo sapiens
tcttggtactatagtagtaaatgagacaaaatccctgttctcatrtagctctcattctcatgggagagaaaaaaatagtaaattaatttacaaatatgtaaaatatcagggagagttgcactttccacagagaaatgtaaaatgagttgttctattaagcattaacagtggggcttccttcagttggtgataatgaaggcttctgttaggagctaacatttaaattgggctctgaaggccaaggggaagccagttatgcagtattgagggtgtaggtattacagcagaaaaaagagccaatgcaagaaccttcaggctgaaagtattcagcttgtagcaggaaaagaaaggccagtgtggttacaacattgtaggcaagagggatatagtaagagatgagcttgggaagatcatcacaggtcagattatataggatcacagtaagaaattaattctgggcattaagagaagctgttgagggcttaactgggaatgtggcagcatagagctagtgttaaatccatggcttctggagccagcctacctgagttcagatcccagctctactgtattctagctatgtgttatggaaaagctatttaacttctctgcacctcaatttcctccttgc

SEQ ID NO: 906618 - DNA, 669 bp, Homo sapiens
cagggccaacttcctcaactttccgtagctagaggtatccaggtgcataattctgggcaattgggcataagtggaaataagtgggtggctgctggaaatgcgttgaatttgttgatgaaagggacraataccaggaggagctgcctctgtcccacttcttccatgaaaatagatggaaaaactggagcttaaaaatccatctttcatttatgacaggaagaccaaaattttagagatgcccgtcctcacatcattgagctgttgaaccaaaacttgcaactgcctatctctaatcaccttatgggagaaaaacaaatcttatttatttaagctactgattgtgagatttccgttacttgcaaccaaagggattttctacgtaatacagaatccattagagctccatgtgtatgtctcttctttggaggaaaaatacctttgaaaacaaaaatacctccaattgtgactttttgtaatgtgccatgtccttattgtacgtgtgtatgtattaaatacacaacttaaatggctacaggtcacaaagtatggatgttggagagctgcacattttaaacaataggaattatacatcggcaacaagagaatataatctttttgtcagtgacttacagagggccttatttacagctgaacaggtatttgatataa

SEQ ID NO: 906619 - DNA, 618 bp, Homo sapiens
caatgccactgtagactttaaataaatgttttcttaaagtgtgagagcgagagttgggaagaaaccagaaatctttctaagttagcattaatttatataatgtttacatattcatgtatataatatacaagtgtatatgcgttactcttaataccttagatcttaagtgtatcatattttaatattgtaaatgggatatttgcatctaataatatagattctttcattcacatttatctaatcaaattgcccccaaaacgttttcagctgtcacctaattgggatagtagaggatcacctgtatttggaatagccttttgatctaatggagaagtctttaattcgccccaattttatagaaagtgcatgtcaagaagtattttaataatatatattgtcatcttgaatcattgcttccataccttcattctcgtttcttgcttgagctttttttgttgttgagacagtctcgctctgtcatccaggctggagtgcggtgacatgatctyggctcagtgcaacgtccgcctcctgggtcaagtgattctcctgcctcagcctcctgagtagctgggattacaggcgtgtgccaccatgcccggctaatttttgtatttt

SEQ ID NO: 906620 - DNA, 623 bp, Homo sapiens
  misc_feature 510: n = A,T,C or G
aaatgcaaatctttggttcaatgacaaaatctatacatataaagaaaaataaactagaaaaaatattataaggatagtctagacataagagtttctatcaatataagaaaaagacatatctcaatagaaaaacaagtacacaaacaagcaatttgtaaaagaagaaatataacaccatcagtaattaaaatgcatattaaagcaataataagatacccaggatggctggattgtggtaaataagcaataacaaatcatgacacatttttggagggaaatttgtatatatttcaaaagtcaaattgtacataacttttgacccagaaactctatttctagaaattcatcaccagggaaatagagacagggaaaaatgtgtgggcagcagcgggtggtataagagtccgcacaggaaaccagataagcctgggtctgaatctcagcccagtgactttctaagcctggccttctcataagtataacaaaataattaatcacrcctcttagagntgtgtgggaattaaatgaagcaagtgcttgagtgcttaacaaaacacctgacatattataagtactctaaattttcactactatcatgtcattactattaaggtctatctata

SEQ ID NO: 906621 - DNA, 527 bp, Homo sapiens
aaaatgcttccagtttctttgctaaaacataacaagagtcacctttgctccagttcccaacaagtttctcatctccatctggacgacttcagcytagatcttattgtttatatcactatcagcatttgtgtcaaagccattcaacaagtctctaggaagttccaagcttttccacattttcctgtcttcttctgagccctccaaactgttccaacctctgcctgttactcagttccaaagatgcttccacattttcaggtatctttacagcaacaccccactctactggtaccaatttactgtattaatccatttttatgctgctgataaaaacatactcgaggctgggtgatttacaaaagaaagagatttaatggactggtagtttcacatggctggggaggcctcacaatcatggtggaaggcaagaaggagcaagtcacatcttatgcagacatcagcaggcaaaaaaagagcttgtgcaaggaaagtcccattttaaaaccatcagatcttgggagactcat

SEQ ID NO: 906622 - DNA, 667 bp, Homo sapiens
aaaaaggaaacaacccatgtgaaacatttctttatgtgcttgcaaaacaaagaaaacatttcaatttatatactggtatatttgaatttctcttgcctttaaaaaattcctacttcattttaagtaccatccgactctaaagtgtcattaaataagtatgaattctgttgcagttacacacgtttaatggccaatacaatgtcttttatgggatgcattatttagtaatcttacattaagacaataacttcaatcattatgccttcaaatagcaataagcatggtaatggctttgctgagctgcttcctggctctatcattgtgttttccctttaatattagagcactgtttttatttttatcccaagagtgtgttccatcccctacccccaattcctgttttctgagagtggaagcacctttgcagtagggaataaaacatcaaagtccatctaataggtaaaattctgctccaacccagtgtcaagattaatgaagcactgataatgttagctttttttttttaatcaatgtttgtkttaagcaagtctattctatcctcccaggaggaagaagtgcctcgtagtcactctgcagaattcgcagtagtccaacattctgtcaagtatgggttttgacaaacttagagagcttgaaggaactcatt

SEQ ID NO: 906623 - DNA, 672 bp, Homo sapiens
ggagagggaaagcccagtcttaggaagacccccactcccaatgtgggtgggcaccattcaatcagctgccagtacagctaagaaagcaggcagaagaaggtggaagaagctgacttactgagtcttctggctttcatcattctctcatgctggatgcttcttgccttcgaacatcagactccaagttctttggcccctggactcttggactacaccagtggtttgagagggtctcttggccttcagccactgactgaaagctacactgttagcttccctacttttgaggttttgggttttgaactgagacactgctggctccctgctcctcagcttgcagacagcctatcatgggactttgtgagtcaattctccttaataaactccttttcatatatacatatatcctattagttctttccctctagagaaccctgactaatacagggatgcatggtcaaggtcaacagatgggctatatcagagtctggaccagctaccaagcattctcttattctgggccccacacaaaacttayagaccaatcaaatggactgtggagtgttgaatcaagtatgaactggctgagtgtattagttttctcttgcttcataacaaactaccatgaatttagcaactttcaatacccactgaaatcaaggcattggctgg

SEQ ID NO: 906624 - DNA, 522 bp, Homo sapiens
tttgtattgttttttgctaaagagttatctggtaaaatccaacaataaattattgctttcatttacaggaactaagaatacactagatagagaaaaatgttacaggtagtagcatacacagtactcctcaaactactaagttttctacccctttctgaactcagatcgcatctggaaataatagcttatatgataatttgtctttcatctagatacaatttctttattcaaatataattttatatattttgatgaatatgtaagaatataataatggaaagaatatttagaaaagtgtaaaggatacactttaaatacatggcattgaatttctttgaagggtgtagtgatgagattgagaataatagattaaagaaatgcgcatctaatgttatggttatatctccttgataatgatattatgtcatcagttggaaggtacttttgattgaaatctttctagttggaacctatgaatactcactgaaaraagaatatgcttttcaattcaatatgctattt

SEQ ID NO: 906625 - DNA, 546 bp, Homo sapiens
tgacttcctaaaagatacagctcctttgtaaattttttttttctttgagacagagttttgctcttgttgcccaggatggagtgcaatggcacaatctcagctcactgcaacctctgcctcccaggttcaagcaattctcctgcctcagcctcctgagtagctgggactacaggcatgcaccaccatgcccggctaattttttgtatttttagtagagatggtgtttctccatgttggtcagtctggtctcgaactcctgacctcaggtgatccacccgccttggcctcccaaagtgctgggattacaggtgtgagccaccacgcccagcctttcctttgtaaaattttgctgctgttctgacacctactcgtgtcacgttatttacttcctatggttcgtggttcatgtctgaactgaaaaactaagaactataacctaaaaccaataaaaaattcaattatattttgggatgaattccagtgatatctttaatactarcttacccatttaagaagtgtagaaatctctaagaaaaatgttcccaa

SEQ ID NO: 906626 - DNA, 370 bp, Homo sapiens
tatttactataaagaaaataatgtcatcattcgaactattgctaaatttttyacaagattacaagtacattataattaacaaaaaatttgagaaatcctttataaaaatataaaatttttttaaaaatgtacaggttgcattagtaattaacatttatggataattacttgaaacataatttatatttgacaaatcatggtgctgtaactcagagacacacatttttgggaaggaaaacaaaacataagaaaatatcataaatatcatctggaatgcagagccccctcagctccgccactagctaataatacctgctttccttaagtacctctcagattccctccagttctcagaattcactgctagcaa

SEQ ID NO: 906627 - DNA, 626 bp, Homo sapiens
tttagagcagtgagcttgtcctattccctggagtcccttcctgaacattaaatcctcatgtcctgagacacgtttttacttattaaatattacattttaagctatataaatcaaktactcttaaaatgccatccctgggcttctctccttactcttgccgggactgctagctaatcattatagtttctttactgagtggtctctctcctttctaatcaggcctagcacattcccacctggattgtgttgaaatctaatgctagttatcaaggtcttgaggcagggaagtgatcacatttgccctgatgagagaggcctctacaccaagagcctgacaaagccctagctctcactagggttgggtggaaaatcatgatccccacaaactcttaaggttcaagatattcagcagagacaggtgctttcatcgcatctatctagatatccagtctagatgtcccttcccatatccgaggttctcagaagttataacaatggccctactttctcattatctctctgcagagcatcaatacatctaacaaaaaattcagctcatcattccttgaaggcattgatctcccaaatctttaaaaatcctgaatcattgcaacctcaatggcaga

SEQ ID NO: 906628 - DNA, 628 bp, Homo sapiens
aacactggccttgtaaaaagaatttgaaagtattccctccttttcaattttttggaagggtttgaraatgattagtattagctctactttaaatgtttgggttatctcttgcacccactgttgcatgtgacctgcctgttcccagtttgccttccgccatgagtaaaatctccctgcaggtttcaccagaaactgagcaaatgttgatgccatgcttgtacagcctacagaaccaagacccaattaaacctcttttctttataaattacccagcctcagatatttctctatagcaacacaaagaacaggctaacacagaaaattggtactgagaattggggcattgcttataagatacctaacagtgtgaaagcagctttggaactgggtacatgagcagaggtttgaaaagtttggagggctccaaagaagatagaaaaatgaacagaaaacttgaaatttcttacagactggttaaatgattgtgaccaaaatgctgatagtgataggcacagtgaagtccagggctgatgaagtctcagactgaaatgagaaacttattgggaattagagcaaaagtcacctggttttgtcttagcaaaggaacttggctgcactctggtttatg

SEQ ID NO: 906629 - DNA, 454 bp, Homo sapiens
catgagatctgttggtattataagggggartttccctacacaaactcctctcctctttgcctgctgccatccatataaaatgtgacttgccctcccttgccttccaccatgattgtgaggattcccccatctatgtgaaactataggtccaattaaacctctttctcttgcaaattacccagtctcggtatgtctttatcagcagaataaaaatgaactaatacagtaaattggtaccagtacagtgggatgctgctgaaaaaaataccccaaaatgtggaagcggctttggaactggttaataggcagaggttagaacagtttggagggatcagaagaagacaggaaaatgtgggaaagtttgtaattccctagagacttgttcaatggctttgaccaaaatgttgataatgatatggacaatgaaattgagactgaggtggtctcagtggag

SEQ ID NO: 906630 - DNA, 583 bp, Homo sapiens
agcatcgttctgataccaaaacctggcagaacacatggtctaatatccagaacttataatgaacttataaaygaacaagcaagaatcaaacaaccccgttaaaaaatgggcaaaggacatgaacagacacttttcaaaaggagacatacacatagccaagaaggatatgaaaaaatgctcaatatcactaatcatcagagaaatgcaaatgaaaaccacaatgagataccatcttacacaagccagaaaggctattattaaaaagtaaaaattaaaaaaaaaatgtttgtgaggttacagagaaaagggaacacttatacactgctgatgggaatttaagttcaaccactgtggaatgtggtttggagatttctcaatgaacataaaacagaactaccatttgattcagcaatcacattactggctatatgaagggatataaattgttccatcataaagacatatgcacatgtatgttcatcacagaacttttcacaatagcaaagacatggaatcaacctacatgcctgtcaacagtggaatggataaagaaaatgtggtgcaaaaacaccatggactatta

SEQ ID NO: 906631 - DNA, 318 bp, Homo sapiens
tgtggtcctcacagtcagatatgaggtaataggtggaaaatacttccctgtgataaggcagtgatgcctgagccacccacttctggtaagaaagctgttcctaaagaatagcaaatggtactcatgttttgggggactctatgctacttagaagcgagtggctaaagttgcacggtgactaattcaagaacaaacagaagaaaaggacaaacagaaaaataaacagaaagaggcatgcccttagcctcawtcaggtagttctaagaaagtgattaggatggtttggagaccaccagccccataccttatccagtcacc

SEQ ID NO: 906632 - DNA, 655 bp, Homo sapiens
ccacgtttgcaatctgacaataattgcatacagttacttgcatgcaaatagcagtagtctttgaaataccattcgatgaaaagacatrcaaaagaatatatgataccaacacaaatttaacatgtgttaaataagaaaaattttgatgcagataaaagcacaaatctaaacaggcttttcttgagagtatggtgggggtggggaggggtacagaataagaaatatttattactattatgcacctaaaaggtttcagttaggtgtatatagtattttttacaaaacatgtttttaagggttccatacctatatatttataccgtagagttgtatccatgtcacatacattctttccattagcgatctgaacactgagatatgtgaattatttcatagtggttcatgttccagcatgtctcattacgcaggtacagttttacagtaagaatctactgctactcataaagctctgtgatttttagatgtttaaatttcatttggataggcaaatctaaagatctgtatcagtcttattttctagagtcacaattataatgcactgtatttcctctttgtgtctaaaaggcttaccgtcctgtaatacctgtatgtctgcctgggtcaatgactgagctgctgtccttggagctgaata

SEQ ID NO: 906633 - DNA, 665 bp, Homo sapiens
tttaaaatctgttgtctccatatcttgatggcttttgggagcatttcacacaaggatataaaatgcggttttcttaaatgaaatgttttgtagctagaataaaatcatttttacaagtacagcattcttggaaagaatttaacacccaaaaaggggaaaatgtaatgaaaaatctcaaggttggaaatacagccttactctctctagagctggaggacaggtttgtggttgaggacttctctgtccgatgtctacattcaggttctgacttcgtatcttgaaaaaggatttcctccctgtctttttcagtgtctcataaatgctactctggattgttgtaaatattagtgagatgggaggatttacagaagaaaagcaagtcaaaaatatttcctttttgatgtaaaaaaaaaaaagccctatttcgcactaacattttattttacaagtattttaatcttatattttggtattggaaaaatttgtctattttttcattttgaagattaaatgttgcttacattttaaaagcatgggtgaagtgtacaacaaaccaataatgataaaaaatmcttctctttttctccctgtttccctttttcccttggccacagccaaatgctaattgctgctttaattacagagatgtgtaaatgtattcagat

SEQ ID NO: 906634 - DNA, 672 bp, Homo sapiens
ctagtgtagacaaaggaggtttttattccactgctactccaatggctcaagagagaccaggcatcacacaggctggcagagaatgctgcattaaagtgacctttatgractagaggacatgaggttcctggtacccacaagatcctcctactcccagtgctagcagctacagagaccagaatagagatgacatccgctcttctggaagggcctctgacagttcagttcagaatgaggatggaataaagcagatctgggaggcttactctaggctgtgtcaccccctccatcccttgcacagtgatccctgctaggctccctctggtggtgcatagactggttctgtggaatgcttgagaaggactagcagtgcatgaagagataggtgttcccccagtgggaacctcttggtgatatcaaagatacactttcaggcaaacatccagcaagaggctgactctcagtagaatttgccacctgtcattttaaccatatactactttatgactattctcagcattttattcagaaggaaaatgaagacagcagaatgtatgccattctcaatttgatgacactagctatttattgagaacattccacatggcaaagtggggcttaggcaccttagatatgtgcaggttttgcactctcacagcacccctatgagct

SEQ ID NO: 906635 - DNA, 669 bp, Homo sapiens
tagactaggaaaagtgggtgatattttcaagaaaatagagccctacctaacagagcagaaataaactttattgccctggatatataaaagtcctcatctattccaattaatattctcagaatatttgttctgctttaactagtaagagtagaagaaacgtgctttatattaacaaaataagcacattgaaataaatttgctaattcattttcgctggctgagataggttaaaaaatcagaaaaaaaaattggaggctgggcgtggtggctcacacctgtaatcccagcactttgggaggccaaggcgggcggatcatgaggtcaggagatcaagaccatcctggctaacacggtgaaaccccgtctctactaaaaatacaaaaaaattagctaggtgtggtggcgggtgactgtagtcccagctacttgggaagctgtggcaggagaatggtgtgaacccgggaggcacagcttgcagtgagccaagatagcaccactgcactccagcctgggtgacagagtgagactccatctcaaaaaaaaaaaaaaaaaaattggaaaaatatttctatctttctgtattctttatattctcttcagtgttcacaattttacaaagaaaaaatttttwaaaaaatttatagaagtcaattaatgtgtcaaaaactt

SEQ ID NO: 906636 - DNA, 634 bp, Homo sapiens
aagtcttgaaaaagccatatgctttcaagcacactactcttctctaatctttctgtttaccaaygtctttgtcactttccttacattaaagacgttaacttgtgactcctaatacttcctgggtgactctttgtcatgtacctcttctcagtcctgtacctctggatgtcaaatgacttttactttcattcagcctcaaattctgttcccatatttataccatagagatttatatgctccccaaaatgccttaacttggaatatttcattcctctactgtcacctctgatttttctgattcacatttttatgtatctacatattagcaatgctttcactttaccaagacacccaatccattaatcatattactttttaataaatatcaatagcctcattccatcttcatgtttcttcttgcccaggttatatttcatgctcaaatattacaattgtgcccttgaaaaatacttaaatcccttatctcccttttctcctttatacccaagtaaaaaacaatcctagatgagaccaaatatcctcctttttcgttgctacatgaaagcatctacacatttctaaaggaaatcatacaactgactgagcagtttcacttgaaatctttgatgaaaaa

SEQ ID NO: 906637 - DNA, 596 bp, Homo sapiens
acctttccccttaggttaattactgacttataaggtagcatctaagggcagtgaactccacttcttctgccttatttgggaacgatcttaaatttttctagaggtgttggagcagctataaaatttcttctcttctacccttctaagctgactctagaacataataaatgtatctataggattcctaaccttggatgttctcccagaaacagtatcctagggattttagtgctatactcagaaaaattaaatcaaactatgtgttctctatttggttgtctttctacaccctcacttgcctcagagaggaaaggggaaataaagagaagaatcgttatttcctcattaccagccaagagaaaaatgcttcagcttcttcttactgaggcttggagtatggattcttggcactgtatatctttctggatatagacttagctcttcctgagaatccttaccaggattcgactccacttccagggtcccttccccatcagatatgtaagcatgtggtgtgtctgaagagtgtatgcatacacatgcacacatttgtacctcattytacactgaggcaccaaaagacaactgccaggatg

SEQ ID NO: 906638 - DNA, 627 bp, Homo sapiens
caagtacactgatttcatctgtacwagatacatgaatgtattaaattatcacaggtatccacaaactatgtatgtctattattcatcaattaaaaaaaatgaaaaaacggaaaataaactaaagatgtataagaactttatggagaaaaattcaaatgctgaaagacattaaagaaaatctaaatatagtcatacactacaaactgcatataccatggtggtcccataaaattatgatggagctaaaaaattcctatcacatagtgacatcttacctatcccaacatcatagtacaattactttatttttaaagataaatttagtatagcctaagtgtacagtgtttataaagtctacagtagtgcacagtgagtcctaggccttcacattcactcatcactcgctcactgactcacccagagcaatttccagtcctgcaagtcccattcatggtaagtaccttattatacacatgtaccctttttttggccttttataccattttttactgtaccttttctatgtttctatatgtttagacagacaaatagttatcactgtgttacaactgcccacaagaattcaatacaggcacatgctgtacaggtttgtagcctaggagcaat

SEQ ID NO: 906639 - DNA, 611 bp, Homo sapiens
agtcacttatgttcttggaatagttgacacagttataagttaaatctaatttttttccatagaaayattacctcaaacgtagcacacaatggatactcaacaaatcttaggatctactctattattttctgtgctgttgtggaaatgaccacaaaaataccacctatatttaactataaattatatattagtaacttccctatgtatttcacaaagttgttattgagatcaaatgagatcaaggatgaaaagcgtatgataaactgaatcatactactaatatataaatgcaaagtattaatatggcattatacttaactgatgttctcaattttcttacaaatgtagcactaaatttagagctagatagatctttaaagatccttgtatccaagcttccaatttgaagttgatgacactgaggttttaggatgcaaaggtgacttctcaggccaaacagatggtcagtataaaagctgagactagaccccaagggccctaacttagacctcagtgctccattccctacactgtgctgccaataattctttccttgttttgctacaacaaataagaagtaaaagagacaccttaattagggtcttggaatt

SEQ ID NO: 906640 - DNA, 599 bp, Homo sapiens
gggtcattgtaaggagagcaatctatttccaaccaactctttaaggggaagtgcttacaagatgacatttggagtagtcagtgagaagactgagactgagatgacagcaatgtggtggtagaaatatgagcaagaagtcaggttactgtgctctgccccaggttttgtctatcgtcaccttggaattgttgctaggagtgagatgattctgtgatatctcaatttccaatcatttatttaccagaggccatctggtgtgcatgttaagaggtgtagtaaggctgggtgtggtgtctcatgcctgtaatcccagcactttgggaggccaaggtgagaggattgcttgagcccaggagttcaagatcaccctgggtagcatagcaagatcctggtctctacaaaacaataaaaaattagctgggtgtggtggtgcacgcctgtagtcccagctacttgggaggctaaggtgggagaatcacttgagcccaggaggtcaaggctgcagagagccaagaatacaccattgcactccagcctgggtgacagagcaaaatcttgtttcttaaaaaaaaaaaagargagccagagtgaatcttggg

SEQ ID NO: 906641 - DNA, 515 bp, Homo sapiens
cttgcatcaacatggatgccatttcatggctaaaagaaggtgagaagcatctaaacctttataatgtctgttcataggaacaccacataaaatcagtaatttaatactttttaaaaagttttgaggccaggtgcagtggctcatgcctggaatccaagcattttgggaggctgagaagggcagatcacaaggtcaggagataagaccatcctggtcaacatggtgaaaccccatctctactaaaaatacaaaaaaaaattagccaggtgtggtggcgcacgcctgtagtcccagctacttgggaggctgaggcaggagaattgcttgaacctgggaggtggaggctgcagtgagccgagatcgtgccactgcactccagcctggcaacgcagtgagactcygtctcaaaaaaaaaaaaaaaattgagaagccttatcatatctattagtgtgctttactgttcatggatagggtggcatttgaatcagtccttaaaagatggagatgcataaagg

SEQ ID NO: 906642 - DNA, 635 bp, Homo sapiens
ctcggcaactttatttcaaaaagtagraaaaagcatactttagaaattgtagactctgggccagtttacttttgtctgccagtttttattaattttagaaattgctagtcactaagagccagaacagattcactaacaatttataacagactaccatttgtaaagtatgttatgtctagtgaaaactatataccaaatatttcagaaaggtattgtatatgattgcattatgaatgaattagaaaaatatgggcaggatgacagtattgctaagtggattttagctgactggttataaatacccaaggaatatcagttaaggtcatctttcaaataggtcctattttaatttttagaaaacattgacttggaggaaagcataccaaatgagttcatgaaatttacaagctgattggaatagctggagctacatcaaatagcagaaaatcacttctagacttgctaaataggttgaaaggtctgttagaaaccaacacaaagtcaatgtgaagatctagttttgatgggaattctggtgaaagcagcctgaagatttcagatgattacaaattggagttaatgaattaagccctattttttttaggtaataaataatgcccccttctccaaagatg

SEQ ID NO: 906643 - DNA, 643 bp, Homo sapiens
accatgcgtgatccactttcaatttcttaacaaacatctggccttgccggcagaataaaagttgggtttccaatatttcagtactttctgtatttcttcagatggaaactctttcctcttccgagastaaaactaatgtaacaatgactttttgacgcaactgcaacatgtatccacccaagctccatttctccttttctatttgtggatcctccctttgtcaggttgatttatgaggccaattgactcatgccagcttcttcccatcttttttcctttgcttataagttgaaactttttcctacgtcttatgactttaaagaacttgcccataagtaatctcacttaattctcaaatagactctacactgaaggcattattcaatccttttttacaaataaagaaaataaatttcagaggtgagacagggtctcacgaagatttctgaaatatttacatcttctgacagccactcttaccttctttccactttgtgttattttctcctattaatgaatcaaaatgttgactcattcattcattcattcttcaggtacttattatctattagaagcctggcattgaatcagccacagggttgtatgtacttggtctctgtgctctgctgtccattgctcaggc

SEQ ID NO: 906644 - DNA, 526 bp, Homo sapiens
gcaggaaaactgcttcatatatctctattctttgcaatggtaattatttccctgtagctaagtttattacaagaaaggaagacgtattcagatacatatttatttggctgtctgtcagtaggggaagaaggtaaatctgtatgaatgatgatttagtctaactttcatatctgctttcaaattttaattgaacctgaatctaactgtcctccctcacctcctccatccttcccttcaactgaaagcttgaggataataaatataactctctttgtactccaaagagataatttcaaattcatggagaaaatgggttaaatggcaggtcagcatggaagagattagtacatggctaataccctatgatggtgggactcagatccagaccagatgtatttctataagtaattgtgtagaaaaargtctcagagacgttttaatagttgggttcatttatggcaatttaattattctctaggttggcctggttaatctaggagcaaatctcttatatggttcaatctag

SEQ ID NO: 906645 - DNA, 591 bp, Homo sapiens
tgattttatattaatatttccttcattattctttatcaaatatctattgcagatatatataattttaacattattggaatatctaaacttgtcacaacatagtgatacataataataaaatgtgcatttattattcattgctttacattaaaaacttctgcaacttctagtataattttggcatgtaaaaaggtttcactattattttattcaatcattaatacttagaaacatgtaaaaaaaagtgttgtggaaaacaaagaataactcatgatctcattattcccaataatttttaagaattccaatttcttgttcccaaatactaaaggttaatattagttggaaattagaaacactaggcctgtagcagttctagaattttgtttgtgaccttgtcatgttctttaaggtaaaacataactcaaagccgttgctagtcaaacaaggccagaggctgctgtgcacagtgaccataggtgattctttctgctctctagttgtraggctgtgagtgtacaagttggtttccagtttaattctgctttaagatatttccttcagttacctttgtgtgggacccctctttac

SEQ ID NO: 906646 - DNA, 612 bp, Homo sapiens
tcacccaatggatattcttgacatacatagttgctttttgtgtttaaaaaatcaattttattcaacttgaatgttttttaaataaatgtacacagaattgtatacaacaggccatccatcatccattctttactattggttcttatgctttaattcttggttttggaatttttctacagccctttctgcctcctaaataatcctttcttagccagtttttgcctattgcctaaacatcaggaggcaagtttacccaaaagtcacaaaactttggaattaggtaagcttttcaagttgaaagacggtcttcctcctctattcccagtctttcctgaccttccagttattacacacatgggaagcagatctaccctgtatgttcttagatagaataaatgaatgaagtgaacagaaaccataaatatttacagagttcctactgtgtggcacacatacacactggaccctggagcctccagggtagatgaggtccrtggggtttgaagcctcaaaaaactcaacgtgaagacagaacggagcaccatcttgcaatttttgttgttttgtaagtacaagagtataattactagaattaagaaaaagaggtatgaa

SEQ ID NO: 906647 - DNA, 601 bp, Homo sapiens
tcacatgaggggttatggcttcaacttacgccttttgggtggatacaatttttcagtccrtagcagaaccaaccctgccaacaccctgatttcagacttctaaccttcagaattgtacgacaataactttctgttatttaagacacctagtgtattatggcagcactagcaaactaatagagttatttgtacacagatgtagttgcttttttaaattattaagtaatctattatagtcattttctttttcaaacattaaaacttttcactcagtaattttcaacctttttctcaacattgaaaggctgtgtattacttaacctttaggagcttcacgttttctctaaaagtaaattcagattgtttcacttccacgcttaaaatcctctagtggcttccaattgcagcctaacatcaatataagatttcaaggccttagcataatccataaatactttatgatctggatattgcctatatctctaaactcaaatcctttttcttgcctctttttcttttcccttcagtgatactgcccagacaatccaagttcattctgttctccagaccttggcacatgactttctcttatagtttggca

SEQ ID NO: 906648 - DNA, 656 bp, Homo sapiens
atgaagtctaataatttgtctctagttcaaagcattttttacctgaaggcttaactcatctaggaataatccttattttattttcaaaatcctattactcaattaaaacaggaatgatctggtcatttttcaagcattatgttgattggactcattactcaatgattttcttctacagtgattgattaaactgagaactatgcggtatgtgacttcccatgagaactatgtggtatgtgacttcccaaggtcttggagctatcagagctgggcttgaacccacaatttttttgattcccccataataaagttcagggcatccttaagtagaggggcagaaatgcttttgtttgattggttacattgtttgacagtggttctgtgggcatttggaagagaacctaaagacaaatctgattaaagtttcaggatcatttgctgtagtggagaacgagttttaatctttgatgaacttctcctcttatctactttactgtttctcaaaacatatgtacatccacctccaatcctactcctctsttcccatgccaattctctgttgaaatgaccagaatgatggtacttgggctgattctggggctaacagacatcccctttttctggtccttcagcatttctgatatcttggcagacat

SEQ ID NO: 906649 - DNA, 673 bp, Homo sapiens
cactttagttaaaaattagaattgacarccgggtgcagtggctcatgcctgtaatcccagcactttgggaggccaaggtgggtggatcacttgagctcaggagttcgaggccagcctgggcaacatggcaaaaccccatctctactaaaaatacaaaaattagctgggcatggtgtcaggtgcctataattccagctacttgtgaggccaaggcaccagaattgcttgaacttcccgggaagggacactgtcttaaaaaaaaaaaaaaaaaaagaattgactagatagaaaggaaaagccaaattaacaaaggtataagcaagatataagtttgttttatatcacatgaaagcagtctggatagaggcagtccggggctggtgtagtagctcagcggtcatcatcaaaggccccaattccttttttcttactgctcctccattcgtagcatgttccaactgtagggttggaattctaggcagcacaaagtgggaaggattcataaggatatgtctgtactcccagaaagaatcttcctggaagtcccacacaaatccacttgaatctcattggccagaatttcaagacaaagaaagtcttggaaatgtagagtagctgtttattcccggcagcagggagaatacaaatcagtgtagagtggacacagggaggc

SEQ ID NO: 906650 - DNA, 604 bp, Homo sapiens
tctaaaaatcatataaaacattgacatatgaatgtgcattttaaggaaaaaagtggtcataatatatttctaatgcctctgaggaaggtactggcacttaaagttggttttaaatattttatagtggccaggcgcggtggctcatgcctgtaatcccagcactttgggaggccaaggcaggcggctcacaaggtcaggagattgagactatactggctaacacggcgaaaccctggctctactaaaaaaaaaatacaaaaaattagccagtcgtggtggcaggcgcctgtagtcccagctactcgggaggctgagatgggagaatgccgtgaacccgggaggcagagcttgcagtgagccgagatcttgccactgcactccaggccgggcgacagagcgagactctgtctcaaaaaaaaaaaaaaaattatagtgacccactacagctattggaataatctttgtcaatctatatgtrattgattgaggttgagtttgaaaaatttcaggtagttcatggcacatgtatttcaacaccatttttccaagtcattggatacctaccgtgcattttctgtattttcagcagtaatattggctcagc

SEQ ID NO: 906651 - DNA, 362 bp, Homo sapiens
gttgagatggttaatattgagtatcaacttaattggattgaaagatgcaaagtattgttcctggacatgtctgtgaaggtgttgccaaaggagattcacatttgaatcagtggactgggaaaagtgactcaatctcaatctgggtgggcacaactaatcagctgccagcttgactggccagcttggccagaataaaagcaggcagaacaacgtggaaaaactaaactggcttagtcttttggcctacatctttmttctgtgctggatgcttcctgccttctaacattgggctccatgttcttcagctttgggactcttggacctttgaccttggacctttgaccacagactgaaggctgtac

SEQ ID NO: 906652 - DNA, 367 bp, Homo sapiens
ttatacagttgagatggttaatattgagtatcacttaattggattgaaagatgcaagtattgttcctggacatgtctgtgaaggtgttgccaaggagattcacatttgaatcagtggactgggaaaagtgactcatctcatctgggtgggcacactaatcagctgccagcttgactggccagcttggccagaataaaagcaggcagaacacgtggaaaaactaaactggcttagtcttttggcctacatctttmttctgtgctggatgcttcctgccttctaacattgggctccatgttcttcagctttgggactcttggacctttgaccttggacctttgaccacagactgaaggctgtactgttg

SEQ ID NO: 906653 - DNA, 619 bp, Homo sapiens
gtgtcacggcactccagcctgagtgacaaagcgagaccctgtcttgggggggcgggggggggagaaaaaaacaattaggccgtcccaaataattsaaattatatattttcttagggcgttggggaatcttatatgtggcattatttaattagagctctgaaacaatagaatggaaagaacaatagatcgaacactcctacattcctggaaatacatgggagtctaaactagcttattcatctcttatgggaaacattgcagtggtttctaggcagctgccatgaacttttaacgctttctggctggcaagaagccccctccacctactgtactgaaacaaagacctagggccatattgtacttctaaagctgttaggaaacatgaggctaaacaggtgtaagtgttgcttgttttctgaatgcactcagaagcccagtgctcccctgtgccaagggtgggagactatttattggtatggaaaagtacagaggaaagaaaaagagatgaggattccgaatcaggtagttgtgtagccacctctggtatatattatcacagttctcagagagatgccctactgacctctattcttgtcctcactttataacttgttcaaga

SEQ ID NO: 906654 - DNA, 567 bp, Homo sapiens
gacccagactgtggaatgcaactaacacattttcyggctggcttcaggccaaatcctatctcttgctcttctcatgtatactagagtgtgcctttcacaggatagttctaaatcatcaaagcaggtggacacttgagcagtgactggtgtgttcaggaacacctcacattctttctatctttataagacagaagtagatttggtggagtgttgtataaaacaaatgatgtggtctctctgttagaaaattctgaatttgccagaaggttaaaaatgttattttgcttcaccgtggtcattgagaaattagtatcgatctctccatttgagaacttcaagaaccctagtgaagtcacaaaatctggttcaatccctagttgatgcagttttaacatttggggatgaagagccaagctgaaacattggaaggcagaatttcctattgtgaagtcaagttatctcaggttttgcaagtcaagatggaactactagggttggggtaggcctcgtgtctgtgggtagctcctattggtagaaaataaagtccattgcaccagccttagcctg

SEQ ID NO: 906655 - DNA, 678 bp, Homo sapiens
gaaggtctggtccagatcatattgcagttagatgaaggccccacttgacagaaaggcttcatctaaagtgggagttgtgagtccttctgtgttattctagacgaggttcagttccccttggaattctgtttggaaagcaacatacttaataggttgcagtcaccacacaatatgtcaaagtgggaataagggtaagtgagcatgtctttaaaagttgtagaaccagacccagataaagaaagattaaattaaattaacatatagcataaaaaggtataggcaccagaaggaaactaaatacaagaatgatgttgctgtcacaaatctagattcacagaattgtagagctaaacagacctttgggtatcaaattgcccatcttcttcattttgcagaagattgccagctcaagagaggaagttacatgcccaaggccacacagctggttaattgcaggactgagactagaattcctagtttggtattcttttttactacaaactgtcactatttttaaaaaataattctcttgaggcatattttacatatcctaattcacccaagtatacaattcaataattttttttttgtaaatttaccaagttgtgcagycatcaactttcaagcagttttagaacattcccatcaccccagtatgattttttatgtcattaactg

SEQ ID NO: 906656 - DNA, 606 bp, Homo sapiens
cccagggaatgaaagaaaatatttgcaaattacatatctgataaggagttaatatctagaacatagaggtaactcctacaacacacacacacacacacacamacacacaaatacaaaaatgggcaaagaatttgaatagaaatttcttcagatagatatacaaatggccaataaacacatgaaaaaacacatcactgatcattagggaaatggaaatcaaagccacagtgacatgccacctgatatgattcagctgtgtccccacccaagtctcatcttgaattgtaactcccacaattcccatgtgtcatgagaggaacccaatgggaggtgattgaattatgggggcaggtctttcctgtcctgttcttgtgatagtgaatcagtctcaagagatctgaaaatgggagtttccctgcacaagttctctctttacctgctgccatccatgtaagatgtgacttgctcctccttgccttctgccatgattgtgaggcctccccagccacgtggaactgttagtccattataactctttttctttcagtcttggttgtgtctttatcagcagtgtgaaagcagactaatatactgcctcatgaccat

SEQ ID NO: 906657 - DNA, 608 bp, Homo sapiens
tgttctggatagcacagaaaattgtagagttgcatgactgctaatcagatagtttttttttgtttgtttgttttttgtttttttttttttttttttttcagagattgccagtggggctttggaaraataagctacacaagtatgtgttacatgagggtgaggccaggctggtagatttccttcaaaatctgagcgcacaccaacgtgttgcacatttctcagcttagcaaagaagcgtgccaaagttaatagaatggaccctttgttggctctcaaaggctacaatggttggcactttaaacataccacgaagccattgcatttgagacggcacccaggagaagcagtcttcgaccgggaacatgcctcttccataattactgccctagaaattcaagtcatcccctatagagaataattttaaaattccaacattattcctgacttcaaggaaacagggaggttgaaagtgctcgaggccaacagtcatcaatgtttagtacaacttaataaaatcatgacctgctttgatatagcacttggcatatcctttcattaaatctcacactcagggttcttcattcttcctaggggtagaaaatttttag

SEQ ID NO: 906658 - DNA, 570 bp, Homo sapiens
caaacaaaagctgagggatgttatcaacaccaggcctgtcatacaagaaatgctaaagggagtttttcagtcccaaggaaaggatattaatgaccaataagaaatcatcacaaggtgtaaaasttactggtaatagtaagtacacaaacagaaaatattataacagtgtaattgtagtgtgtaaattactcatatattgagtagaaagagtagaaaataaacctatcagcaataactacaacaacttttcaagaaatagtataagatacaaactgaaattttaaaaagttaaaaagtaaagagatgaagtttttattttcctctttgcttatttttagtttgtcagtttttagttttgtcagtttttgcaatcagtgttaagctgtcatcagttaaatgtaatgggttacaagatgttctttgcaagcctcatgataacctcaaatcaaaacaagtagaacagatatacagacaaacaataaaaagcaagaaattaaaacataccaccaccgaaaatatgcattcttctccttagcacatggattattatcagggatagaccatatttta

SEQ ID NO: 906659 - DNA, 597 bp, Homo sapiens
catgtttagctgtgtcagactcmgttggttcccagagagcttcagacaggggacataaaaaaaggcgacagtttcagaagccactaaaattttatacttggctttgtgaccaggattaacgccttttagcaaaaccccctaagaaatgctggttgcttgctctgcgcccatcacaaccatgaaaactccccaacacgtcagccttcctcataaacagtaagtgtattgtaaaaccgtttacagctgttgtaaaaatattttgactattttacccaaccacctcagtaagacacctgatactagttaaaggaaaaaaaaaaaagagagtttccccttttcaatcaaaccttccaaaactgagggtgggtggagaagaggaaagttccttttctattaaagtcatatgttgctctgcctaagcagcacatctgttataaggtctcatcaaaaaaaagtgtcttttcttctctggtctttatttccagtagcaacgataagcttccagcttctgttttccatctgagagaggtcaaacattttattgggatggagtccaagctactgtctgtcaaaaggaatagagaagccaaaccattc

SEQ ID NO: 906660 - DNA, 597 bp, Homo sapiens
catgtttagctgtgtcagactccrttggttcccagagagcttcagacaggggacataaaaaaaggcgacagtttcagaagccactaaaattttatacttggctttgtgaccaggattaacgccttttagcaaaaccccctaagaaatgctggttgcttgctctgcgcccatcacaaccatgaaaactccccaacacgtcagccttcctcataaacagtaagtgtattgtaaaaccgtttacagctgttgtaaaaatattttgactattttacccaaccacctcagtaagacacctgatactagttaaaggaaaaaaaaaaaagagagtttccccttttcaatcaaaccttccaaaactgagggtgggtggagaagaggaaagttccttttctattaaagtcatatgttgctctgcctaagcagcacatctgttataaggtctcatcaaaaaaaagtgtcttttcttctctggtctttatttccagtagcaacgataagcttccagcttctgttttccatctgagagaggtcaaacattttattgggatggagtccaagctactgtctgtcaaaaggaatagagaagccaaaccattc

SEQ ID NO: 906661 - DNA, 600 bp, Homo sapiens
tacaatgtggcaaataaactgaagcgatcaaaacaggagacaggaagaccagtaaggaggctaatgctgtaatttaaagaagaaaaattgtgagacataaacgaagaaaataatactgggaataagaaaagagaaaagagtcaaaaggtaagtaaaacagaattgttaagattttattgcacattaaccacagagataaaagagaccccaggttttaacaatgtgtgagcgtaagggtatgggttaactgagacagtgaataaaggaggaaaagcatattagatgagcatgagctcagtttggaacacatccaaattacctatggaacagtcaaggagaaatgtctaataggagactaatcgctcctccctctctcttctctctgtctgtctctttctcataaatatatatatacatatatatatatatatatacatatatatacatatacatattcatatatatatatgaagagtcattgcagtrtggtccctgaaatcatacagttagaaacattattacttaaagtggaaaaaaatctaatcccaaatgtacagtaggagtagtcagaaagatgagaagaaagccaagagaatatga

SEQ ID NO: 906662 - DNA, 508 bp, Homo sapiens
aattggtaactagaataaccagtttagagaagaatgtaaatgacctgatggagctgaaaaacacagcgtgagaacttcgtgaagcatacatgagtattagtagccaaatcgatcaaggggaataaaggatatgagagattaaaaatcaacttaatgaaataaagcgagaaaaaagaatgaaaaggaatgaaaaaggcctgcaggaaatccaggactatgtgaaaagaccaaatctacacttgattggtgtacctgaaagtgacagggagaatggatccaagctggaaaactctttaggatattatccaggagaacttcccaacctagcaagacaggccaacattcaaatttaggaaatacagagaacaccacaaagatactcctcgagcagagcaaccccaagacacataatygtcagatacaacagggttgaaatgagggaaaaaatgttaagggcagccagagagaaaggtcatgttatccacaaagggaagctcatcagactaac

SEQ ID NO: 906663 - DNA, 572 bp, Homo sapiens
acatagcaagaccctgcctctacaaaaaatattttaaattaagccagcatggtggcatatgcctgtagtcccagctactcaggaggctgaggcaggaggatcacttcagcccatgagtttgaggctgtagtgagctatgattgcacggccacactccatcctgggtgacagagtaaaaccctgtctcaaaaaaataaaaataaaaagagttaacatgacaatgagatggtaaggtagagtcagctaaatgccagataagtgagaaaaggaaggatgcagatcgtgaactgagcccagagagacttcatctggacttgtcagggaaaagccaatggtctctaagccagaggtctactcagagcccttagtgctcacttctagggatagtctctagtgcagtattggggtatttatctataggaaaagatcaaagtggtattagattgtttatttaaaaaaatgatcagcccaactaaccctgtgtattcatttagggttcttctgtttataagtgatatatatataaaaaaaaaaaaamaaaaaaaacaataacctctaaaccagcttaagca

SEQ ID NO: 906664 - DNA, 620 bp, Homo sapiens
acatccagaaagagactgcaactaatatttgcttatcggagacattcttgagctataaactggtgggaacattaattgggtgagttgctggaggctgaatatgtatcagagtgagagggaaagacccatgagagccatagtcttagggggatcccatacttttataagctttccctctagcaaccccaccgtattctcacagtgaggatcctagaaagatccccccctgtggctctggcaagggaaggggaagaatgatcattatgaaacaagcccagagcatcctccatagcaaaggcccactgctcaggagaaggggttttgctggagcacaatactgaaactttatgccagcggaagaaaaggatttttttctccatctttcctaaatcacacaagggagaaaatactcacaaagtcgactggggacagagcctcaagaaaacagatttgcaataatgtagtcagggaaaggtgcaagaggagggggaaagatatactactggaagagtatcagaagccttcytgaagtccacagcaccaagacacaggtcctgtaaaagactcagacttaatggaaagatggtagaatgctcttcctactccaacaccttaccacc

SEQ ID NO: 906665 - DNA, 597 bp, Homo sapiens
attccctatttcacagagaagaaaactcttccggccttccatgccctggaggtcccygtgatccagcccctgcctccctctctggccccatcctctgcctcctctgctttcactcactggcctgctccctcttccccagcacatacctgctgtgtaatatgtgagtgaatgagccagagacaggcagagagagagcctgtggaggagggaacagccgaagtacggaatgaggcagataaacacaggaagacagagaccaggggaagtggaaacagatggcagagaggccagggaattctctcgtgatttggggaaccccactttctccagggtcccaccccttgtctttgttagaattgggcctgggacaggctgctagtggggttggggctgatggaggtgtgggagccgggagctgggttcaggactgagttctggaccaggctggagatgggccggggtaggaactgggaattcgtcccttcccaggagttggctctcctgggctccgcatttttgtgattgggggtggggaggggggctgtctaggagggttggtgtttcccctttctctcacatcttttttgcttcctgctt

SEQ ID NO: 906666 - DNA, 592 bp, Homo sapiens
catgatgttcataaaagtatttttcatagtagccaaaaagtggaaaaaactcaaatgttcatcagctgatgcatgggtaaacaaaatgtgatatatttatacaayggcatattatttattcactcatggaaaatagaatggactgttgatacatgctacaacacagatgaacattgaaaacattacactaagtgaaagaagccagagacaaaagggcacatactgtgtgattccatttatatgaaatgtccagaataggcaagtaggtaagtggctgccagaggcttgtggatgggaacaggaatgaggaatggctgctaatggttacagggtttctttttggggtgagaaaaatgttctgaaatagataatagtgattcttgaacacaactttgtgaaaatactaaaaagccactgaactgtagactttaaaacagtaaattttttatagtataaatatatatcaataaaaataaaataagaattatatggcctaaaatgtcaatagtattgaaaactaagaaaccttgtctaggccaggctcagtggctcatgcctataatcctagcattttgggaggttaaggtgggca

SEQ ID NO: 906667 - DNA, 660 bp, Homo sapiens
atagactggataaagaaaatgtggtacatgggtgggcgtggtggctcctgcctgtaatcccagcactttgggaggccaaggtaggcagatcacctgaggtcaggagttcgagaccagcctgaccaacatggagaaaccccgtgtctactaaaaatacaaaattagccaggcatggtggtgggtgcctgtaatcccagctacttgggaggctgaggtaggagaatcacttgaacccaggaagtggacgttgcagtgagccgagatggcaccattgcaccccagcctgggcaacaagagcaaaactaagtcccccctgaaaaaaaaaatgaaaaaagaaaatgtggtacatatatgccatggaatactatgcagccataaagaggaatgagataatgtcctttgcagggacatggatgaaactggaagccatcatcctcagcgaactaacacaagaaaagaaaacaaaacaccgcatgttctcactcataagtgggagttgaataatgagagaacacattgacacagggaggggaacaacatacaccagsgcctgttggggggttgggacaaggggaggggacttagatgatgggtcaataggtgcagcaaaccaccaaggcacaactatgcctatgtaacaaacctgcacattctgcacgt

SEQ ID NO: 906668 - DNA, 587 bp, Homo sapiens
aacaaacaaaagtataaaataaaacagaaagtaatatcaagaccctaccctcaatctcatgctctgggtgtaactatccatgarcaaacaagtatatattctttcatacacctttctatgcctacagatatgtaatgtatatacacaatatatttaataaaagaataaaggagagttaacaatctccgataaatctggggataattttagaaataaggtaacagtctaatgtttattaaataagaaaaccctagatttttaatgtacataatgtatatgcataatatacatacatataatatgtatatatatatatgttaaatatgtatagcacatatgtttaaagatgcaatatgctaggcatgttgtttaccacttacttttatataatataataagaacataaaataatatttataatttggaaaccatgacagttttgaatatgtgttgcatggttagccctgatcccaggacacatgcaaactttgggaagtgcagaagcctatgtggcttactgttctcctaaaattacacactttatctttcacatccctttgaggcctccaactaaaacttgtcttaat

SEQ ID NO: 906669 - DNA, 295 bp, Homo sapiens
gtaaaaggtaattacacacaatgtttaatatctcrctgggtctcataggaaactgtaaacttctcccttctaagtaccagtccaaggtatcaatatatcttcgaatgctaatctggttttgaacggataaaacaaaatattgtttctctcaacctcttggaaatgaagtctttataagtcactgatacttctccaaactaagacagactttaacagtctttaagcatgtaacctcatatttgcaaggaggcttcacagaataacataaagaatgaattcagtatatgtggtttga

SEQ ID NO: 906670 - DNA, 600 bp, Homo sapiens
tttgtcacccatcccccaaccccaggcagcacatcattgagaaagatatcctccatttaggggtaaaaggggagtgaacacagcactttgccttgattcccagtactgttccaaccacagcattgggaatgcccccaaatccatagactccaggctggtacctgtgcgctaagcctccagactcaccctggtgccaggctggatccctgaagctcctggtttgagacctgcacagcagagttaatctctggtccacaccactgccaggctcattttagccacatcaggctcgaaacagttctcagtgacgacaggcttggaccagctggtcctggactttcggctgccccattgctaggccagtcctcgcaccacgccaacctcagctgccaccactggcccgacagtcacatggctttaaaccaggctggcctacattagtagacccaatcagcagatccaccgaagtggatccaagttccagaggtctgctcgcctgttgaatcagacacgaggccagagagcccgaggattccagcagcaagycagctaatgaaccatagcagatggcctgcccagagatgttgaagtgcattctca

SEQ ID NO: 906671 - DNA, 679 bp, Homo sapiens
attttagtgtgtgtgtgtgtgcrtgtgtgtgcatgaagtactgttctaatttggaatgtatagttcaacgcatcatagagtgaccatatattgtccaaactgcgacacttttgagagtgaaaagtgcatagggaataattataccagaaaaatagtcataaattgagatggttctgagaaaaccaggatgtctggtcaccctcaaagaagtgactggggctcattttaacagaactgacagactcctgaaggtaacctgcctgggaacctgcaacagagaaactggtcagcaggtgccccatatgtagccagattgtgagtcatcagtctgggagaaattgagttttcagtttggactttggtggtgtgttgtaatctgttccctagagatctgccaaactctaggttgaacacatggatccttagaaattatccatcttgaatcgtttggtataaaaatagatttcagaagtcccagggcagatattacaagatttctatgaaaaagaaataaagaatagaagtataaacgtacaggaatggtgaagcaaggaggataatggatgttagaaatactggcaaagagggcaaaaatgtgcagttagataatgattacatgaatataaatatggaatatttattaaataggaaaattaggccctaaaagaagtcttctgtc

SEQ ID NO: 906672 - DNA, 679 bp, Homo sapiens
attttagtgtgtgtgtgtgtgcatgtgtrtgcatgaagtactgttctaatttggaatgtatagttcaacgcatcatagagtgaccatatattgtccaaactgcgacacttttgagagtgaaaagtgcatagggaataattataccagaaaaatagtcataaattgagatggttctgagaaaaccaggatgtctggtcaccctcaaagaagtgactggggctcattttaacagaactgacagactcctgaaggtaacctgcctgggaacctgcaacagagaaactggtcagcaggtgccccatatgtagccagattgtgagtcatcagtctgggagaaattgagttttcagtttggactttggtggtgtgttgtaatctgttccctagagatctgccaaactctaggttgaacacatggatccttagaaattatccatcttgaatcgtttggtataaaaatagatttcagaagtcccagggcagatattacaagatttctatgaaaaagaaataaagaatagaagtataaacgtacaggaatggtgaagcaaggaggataatggatgttagaaatactggcaaagagggcaaaaatgtgcagttagataatgattacatgaatataaatatggaatatttattaaataggaaaattaggccctaaaagaagtcttctgtc

SEQ ID NO: 906673 - DNA, 646 bp, Homo sapiens
attgtcccaggcagagggacacagaggaataaaatgccctgataaatgcaaggaactgcaagtggtttgctattactagggcatgccatacaaaatggatagtagggggagcaaaaatggaagagagaagggggacacagtctaagaacattcttgaaagctggactaagaagcatggattttgcccacaggaaatgggaagccacagatggtcaggctgacttttaggaaaatgactctgcctgcaagatgagggaaattttaaaacagaataaaaatggagacagggagattaaaaggctactgtagcatttgttgaaaagataatgagctctgaactagagaaatggaatgggtgttgagaggagtagacagatatgagaaacatttagaaagtaaaatcagcagggcttgggcttaattggatataggattagtccgggaagaagggacagttcaaatcaaaatgtctggccaactccttcaatttaaaaaaactgaaagtcatttaatctagtggaaaaactcaattgactctttgttatggtggtcaaaaaaaaaaaagattagttaactggaatcttcatattttacyaagtagttggcatgagtctagctatcacttatctaccccagaagccagtgg

SEQ ID NO: 906674 - DNA, 607 bp, Homo sapiens
ttaactaaaaagaagattatggccaaggaattacaaaatacagaggtcattaatattttgctaaattatcttygttagggataatgttcattaaagaccccattctatttctttatttgagaaactggtgaccagagggctcaaattacagagaatgctgcatattataatgtagaaagcagatctattcttagtgctaaaatagtgcttaaattacttcattaaacactatggaacaaaaaaaaaatccacatactgtaatcattttcaaatattcactttcctgccaatagctatattttgccaggttgtggagacaaagcaagttggcaagatgatgagaaacctgtaactggcagtacaaaaatctttctgctgccaatttcatgggcaggtgcctgagatttgataagataggagcggaaaatttgttgcgatgactctgaattttatagaaagccacttcctgctattttaatgttcgtggttccaaatctatgttggccaaatttttcaggtagatatgctatttaattggacccaccaccataccacaactctccaaatttgagaaataaatataataattaaacaggtgtaagatcta

SEQ ID NO: 906675 - DNA, 599 bp, Homo sapiens
aagattatagagcagagactttgtcaaacaacaaaaggtttgcacgatccactccasagagcaattaggcacctccatgtctgggtagacagaggccatccaagtgatccttccaagaatgaagaataaaagtcactgtcaaaggtgatttttggtctccatctgagtgagaagtgtctggaaacttttaaaacaatgctttaggttttgtttgtttgtttttcgtgtttttttgtttttttgtttgtttgtttttgagacggagtcttgctctgttgctcagcaggttagagtgcagtggcacaatcttggctcactgtaaacttcgcctcctgggttcaagcctttctcctgcctcagcctcccaagtagctgggattacaggcatgagcaccacacttggctaatttttgcaaaaaatagccctttctttaaaaaaaaatcctctttcccataaagagaaagtggaaaataaaacatactggaaaacattaaagaagatttaaaagaatggagatatattcaatattcatgtattggaggactcaatattgtaaatttgtcattctccaagattaataaatccaaagcaatctcaa

SEQ ID NO: 906676 - DNA, 600 bp, Homo sapiens
gcttctgtttcaggttccttacctatttcattgtgagaattaaactgcttagaawagcatctaagtcagttagggctgcttaaccaattaccatagattggatggcttaaacaagaaactttttgtttggtttttttaatggttctagagactagatgggccattagagatcagggtgccagcatggtttggttctcggcgagggtcctcttccttgttgtgtctccacatggcctttccatggtgcatgcacgaagtgaaaaagatacttgcttctcctctcttttttttgtaagggcagtaatcccatcatgggcaccccatctttatgactcatctgaccctaatttcctcccaaagaccccacctataaataccatcacattggaggttagtgtttctacataaatttggaagtggaggacacaaacattcagtccacagcaaacggtacgttcagcatatagtagattctcagtgatagctactaatattactattattccaaaggagtttgttgcttttatctggagagaatctaaaatataaacaagtttaggaggtgccaccttaaaacaaagtttcacaagtatgttattg

SEQ ID NO: 906677 - DNA, 576 bp, Homo sapiens; identical to SEQ ID NO: 906148

SEQ ID NO: 906678 - DNA, 579 bp, Homo sapiens
ctccattcttgggaaaacttatacataaattaatacaatgagaaacgtagtcccaactttcctagaattctcaggaatgacatcatcttttcttaattggccctagcttctgtgccaataagaataaaaggaaatttaggtcgttttatgacagcaagattagaaaagagcgaatgggaattgtacttagttaattagcatttaatcctttatattttggggggcttttcgtttgtttgttttgtttttttgagacagagactcacttttgttgcccaggctggaatgcaatggagtgatctcagctcactgcaacctccgcctcccgggttcaagcagttctcttgcctcagcctcccagatagctgggattataggtgcctgtcaccacacccggctaatttttgtatttttagtagagatggagtttcgccatgttggcgaggctggtctgaaactcctgacctcaggtgatccgcccatctcagcctccccaaagtgytgggattacaggcgtgagccactgtacccagccaatcctttgtttagttttgagttttccacctgaaaatagaccca

SEQ ID NO: 906679 - DNA, 631 bp, Homo sapiens
tcccttgtttaaaatgaacaaaactctgcaatgccaagagagtaattagatagatccaggcttcagtgattacaaaagctggataaaatctgccaatgccatttatatctgaatctgggcaagccaaaaggcagtagctcttggaaaagtcttcgcaaactcaaacttcagctattgttttgtgttatggacaccaccacctaagtatcaaaaaactctaggaatgtgaggaatatgtctaagaaataaagtaaggcatatcacgagaaagaggtatgcaataacacataatagaaatagtggtgtcatgtattttttttctcatagcactttcacatatattctcttctttagtcctcacgtcatgccaatagggtaggacagagaggacacatatttcctgtattttagagacaagaaagctcagaagactgagcttctttctatgaaaaaagagtttcttagaaagggggcacatttcagggctaaagaggtaagtggctgagctagccttaattggaggtcattttgacaataatgatgatgaagaggaggcaaatgatgatagctgtcatttactgaggtctatttaccaagcactatgctcartatacaccttaactccgtgtga

SEQ ID NO: 906680 - DNA, 607 bp, Homo sapiens
agggctcagaagaagaccgaaaaatgtaggaaagtttggaacttcctagagacttgttaaatgattttgacaaatatactgataatgatatggacaataaaatctaggctgaggtggtctcagatgaagatgagaaacttgttgggaactggagaaaaggtgactcttgttatgttttagcaaagactctggtggcattttgcttctgccctggagatgtgtggaattttgaacttgagagggatgatttagggtatctgatggaagaaatttctaagcagcaaagcattcaagaggtgacttgggagctgttaaaggcattccgtttttcaagggaggcagagcataaaagttcagaaaatttgcagtctgacaatgccatagaaaagaaaaacccattttctgaggagaaattcaagccagctgcagaaatttgcataagtaacaagaagccaaatgttaatccccaggacaatggttaaaatgcctccagggcatgtctaaggtcttcacagcagcccctcccatcacaggcttggaggcctaggaggaaaatayggttttgtgggccaggctcagggtccctgtgctgtgtgcaatctacaga

SEQ ID NO: 906681 - DNA, 660 bp, Homo sapiens
ttaccaagataagcaatattytggatcacaaaacaagttgcagtacatttaaatggatccaagtcatgcaaaatgtgttttctgatcttaatggaattgaaatggaaatcaataaaagaaagtctctggaaaattcccaaatatttgaaaaccaaataacacttggatcaaaaataaatcagaataaaaaaatggaaaatattttaaactgaatgaaaatacaatatatcataatttaggaacttcccctaagcagacataaggtaaaatttatatactaaacgcctatattagaaaagaaggaaggtcaaattaaaggcatcagcttcattttatgaaactattatagaagaataggagcaaattctgccaaagccaataacatgaaaatatgaaatacatagggatgaatatgacaaaagttgttaaaggcctgtattctgaaaatagaaaagtattgttgagataaatcaaagaagaccagaataaatggagatagaccttggtctttgaacaaaagaggcactattattaagatatcagttctctcccattaatctatggatttaatgttacaccaataaaaatataatcagccttttttcttaaaaggaaagaaattgacaatctgagtttcaaagtcatatggaagtgcaaaga

SEQ ID NO: 906682 - DNA, 617 bp, Homo sapiens
tttcagaggaagcagattttgctgagtgtgcaatggtgaacagaatgctcatttatgaactgtaagctgggagaaaaggtggaatatcggaggtatatggaggttagagttatggaaattataaaagaatgaaaactaacttgcaattctggagcttttcaggtgactgacataaatgggagcaaaggacataatgagattaattcttatggattgaaggcagtcagtattggtgagacggtgagtgtcaatattggggtaagtatgtctggactacttggcaaccccttgccatggagggaaattggaaaagtagtaactcattcaagcacctgtggcccttttattgaccactattgataggtttgaggtgattggagaaagctgagtctttctctatgcacaattcacccactcaaactcctccctcaatgcagcaatgtaggcccagagggacgtgatggtggacttagtaccatgggctcactcttactccctcatgggggagatggtattttactctgaaagcatargtttctcctttgacacttgttggtgggggaaagcagatcagagaaagtgggtgttggagcatttttggatcccttatgatctct

SEQ ID NO: 906683 - DNA, 621 bp, Homo sapiens
attgaataatgtatgtttattgccctttcaaaattaaaactctagagatttatcacaaatattaaagctaaaaattgaaccaggtaattctcagaatttttatagaaaagtttatttttaaaattcaaaacagaaataattttgatttgagttaggtgccttatacaataaatcaagaaaataattatacctaggtgctattctcaatatttgaaaatatttttagtttattattggtagagagaatttatttacacgtaaatacttacagcaaatgtacaatagcatgttttctttctatgtttctagtggagtcaaagaaaaacaaaacataaacttttgaaaatgtattttatttctagctttagaattaatattgatatggcatggtggctcacatctgtaatccaggcaatttgaaaggctaaagtggaaggatcccttaagcccaggagttcgaggccaggctaggcaacctaagatcctgtttctmcaaaaaaaaaaaaaaaaaaaaaaaaaaaaaaattaaaaataaaaaaacaaaaaacagccaggttaggaggcacatgcctgtagacccaactactctgggggctgagagttgaggattgcttgagccca

SEQ ID NO: 906684 - DNA, 621 bp, Homo sapiens
attgaataatgtatgtttattgccctttcaaaattaaaactctagagatttatcacaaatattaaagctaaaaattgaaccaggtaattctcagaatttttatagaaaagtttatttttaaaattcaaaacagaaataattttgatttgagttaggtgccttatacaataaatcaagaaaataattatacctaggtgctattctcaatatttgaaaatatttttagtttattattggtagagagaatttatttacacgtaaatacttacagcaaatgtacaatagcatgttttctttctatgtttctagtggagtcaaagaaaaacaaaacataaacttttgaaaatgtattttatttctagctttagaattaatattgatatggcatggtggctcacatctgtaatccaggcaatttgaaaggctaaagtggaaggatcccttaagcccaggagttcgaggccaggctaggcaacctaagatcctgtttctacaaaaaaaaaaaaaaaaaaaaaaaaaaaaaaawtaaaaataaaaaaacaaaaaacagccaggttaggaggcacatgcctgtagacccaactactctgggggctgagagttgaggattgcttgagccca

SEQ ID NO: 906685 - DNA, 621 bp, Homo sapiens
attgaataatgtatgtttattgccctttcaaaattaaaactctagagatttatcacaaatattaaagctaaaaattgaaccaggtaattctcagaatttttatagaaaagtttatttttaaaattcaaaacagaaataattttgatttgagttaggtgccttatacaataaatcaagaaaataattatacctaggtgctattctcaatatttgaaaatatttttagtttattattggtagagagaatttatttacacgtaaatacttacagcaaatgtacaatagcatgttttctttctatgtttctagtggagtcaaagaaaaacaaaacataaacttttgaaaatgtattttatttctagctttagaattaatattgatatggcatggtggctcacatctgtaatccaggcaatttgaaaggctaaagtggaaggatcccttaagcccaggagttcgaggccaggctaggcaacctaagatcctgtttctacaaaaaaaaaaaaaaaaaaaaaaaaaaaaaaattwaaaataaaaaaacaaaaaacagccaggttaggaggcacatgcctgtagacccaactactctgggggctgagagttgaggattgcttgagccca

SEQ ID NO: 906686 - DNA, 661 bp, Homo sapiens
tatgaaaaaaatgatcactttttcctcacaaggatttgcaaagtggaaagagtaggattttaaaaactgtattttgtagcagagaaaactaaggtttagaaatttgaatgacttccttaacaaatatttattgagaacttgccatgtgctaagcacaatattaagcactgagcttactcggtattagtcggaattctccagagaaacagaaacaataggacactcgcacacaaacacacacacacacacacacacacacacacacacacacatggagctttattatgagaagttggcttatgcaattacggaggccaagacatcccatgatcagcagattgcaagctggggactcaggaaagccagtagggtaaatcagtccaacctgagacccaggggagctgatgatataaatcccagtccaaaagcaggaggagatgagatgagatgtcctaatttaagcactgaggcagaaaaacaggttgttaatcctttccttaaccttttgtcctgttcaggccctcaatggatctgataatgccaaccacactgggtaggaccagctactttactgagtccaccaactcaaatgctagtctcatccagaaacaccctcaagacacaccaraagtaatgcttactctgtgaaccctgtagctca

SEQ ID NO: 906687 - DNA, 550 bp, Homo sapiens
tttgttgttcagaaaattccttttattactgtttctaatttttatcattgtacttaaaaataatatttgatatcattttgctrttcttaaattggctgaggcttgttttgtgccctatcatgtaatctgtcctggagaatgttccatgtgtgcttgagaagaatgtgtattctgttgttgttgggtaaaatgtatgcatgtccgtttgatctacttggtctaaaatgttgtttaagttcagtatctccttattaatgtttccctactgaaagtgggatattgaaatatcttactagtatttaattgcaatctatctctctcttcaaatcttctaatatttgttttatatatttaagtattctgatattgagtgcatatatatttacaatggttgtatctgtttgatgaatagatcctttatcattatataatgccctcctatgtcttttttttaatgtttttggccctaaggtttattttttattatgttagtatagatgcccatgctcttttggcttctattttcttggaatatcttttttcatacctt

SEQ ID NO: 906688 - DNA, 565 bp, Homo sapiens
tttcagaattaactcaaaagtccacagtccaatgtctcatccagaacaaggcaagtcacttctgcctatgagcctataaaatcaaaagcaagttagttacatcttagatagaatgcgggtacaggccttgggtaaatacagccattcccaatgggagaaattggccaaaacaaagaggctacaggccccatgcaagtcctaaatcctgcagggaagtcatactacagctccaaaattatctcctttgactctgtgtctcacatccagatcacgctgatgcaagaagtgggttcccatggtcttgggcagctccatcccactatggctttgcaggatacagcctccctcctggctgctttcacaggctgccattgagtatacgcagcttttccagaagcacagtacaagctatcagtgcatctaccattctgggktctggagaatggttgccctcttctcacagctccactaggctgtgccccagtagggactctgtatagtggttctgaccccacatttcccttccggacttccctagcagaggttttccataagagcccttccc

SEQ ID NO: 906689 - DNA, 655 bp, Homo sapiens
ccaggtccctcccacaacacatggaaactcaagatgagattttggtggggacacagtgaaaccatatcactaagttaaatttttaagggttaagrccaatagcaatatctttcaccctccttaatacttaatagtaaaatgaaatgcaatttgtgccaaaaaatttcagaattaagttacttcatttataagctcatttagtgttttccaaacttcactatttgcatattactttacaatttttgacataaacattgctacctatactctaatttacttaatacagtagtttcctcttatcctgggatatgttccaagaccctcagtggatgcctgaaactcaggtagtactgaattctatagatactatgctttttctataaatacatacttataatacattttaatttataaaataggcacagtaagagattaacaataactaataataataaaataattataacaatataataaaggttacgtaactgtggtctctttctctctgtgtgtctcaaaatatcttattttactgtacttaaggttcctgtgatccaagagatgggtagaatctatagtgtggataccatggacaaagggagggttcacatcctgggtgggctaacactggccagcatgagatttcatcacacta

SEQ ID NO: 906690 - DNA, 621 bp, Homo sapiens
ggaaaagtttggagggctgagaagaagacaggaatatgagggaaactggttgaatggttgtgaacaaaatttattgagaactgkagcaaaggtcacacatgtgccttagcagagtttggttgcattgtgcccctactgcagggatctgtggaggtttgagcctcagagtgataatttagggtatctggtgaaagacatttataagcagtaaagcattcaagaagtgggctggctgcctctagaaacctatgctcagatataggagcaaataaatgacttaaagttggaatttatgtttaaaaggaaagcagagcataaatgtttagaaaatttgcaggctggctatgtggtagaaattaaaagcccatttttcaggagaagttaggcagggtgctgagaagccatttgctagagaaatttgtgtaactaaaaagaaggcaagggctgatagccaagacagtaggaaaaaggcctcaaaggcatttcagagaccttcaaggaagcccttaccacacaggccaggaggcctaggaggaaagaatgatttcatgggccatacccaggataccattgccctgtgcatccttggaacactgctctccatccggcctctctggctcc

SEQ ID NO: 906691 - DNA, 658 bp, Homo sapiens
aataatccagggagttggttattaagtcaataaaaatgttttaggggggaaaatattaagaaacttaaactccttataaatgttctgataaaatttaaaacgtggccttttttttaatgacagtaccttgaaagctgtttcttttccaacattaaatgtgagctgactaatatgagcttcctagcatgctctgcccaagttatccagcacaagagtgtttaggttaataaaggtcattttactacaaattaccctctgtagttgtagttgaatctttttatttttgagaagaaattatagtgaaaatatcattattatatttgtggtaagtataaaatttggtcttttttttcctgctgtactaactgttcataggtctgtagtgaacaaaataatatttactaaaacacaaattaatatttagaacagaaacaacttagactcactctggactcccataaaaattgattacttagacatttaaatatatttacttaatactgtaatattatatacatttcctaaagcaaattttaagacataatatttggaaaatctagtagaggttgtcaaagctacwtctgttggccaatagcagttgcttttataaaatcgtattatttcctgctcaaacacttcattaactacattatggccc

SEQ ID NO: 906692 - DNA, 590 bp, Homo sapiens
taactaagtagtcctctttgaaaatatttagatctatagactatcttgccgcttgraaaacattttatattgctaagtaggaactgtcttcttaattttcttataattctctttgcttgaattatccctaaaaattaaccatagattttcaaataagctcaaagaaaacatggatgttaatgctagattcatcatgtaataattattattatattaatagtaattcacctttgcattttttcatgtcttagtatttaacttctgtttcatgatcctgttcatcctaaagttagcacctttttcttgccatgtatttgccaggcgacatatttgatcggagcttccagaacccatctctctccaccacatcctcttttactgacactccgggatgctgctaatatcaatttgaggttttgcagagatgggggaagcctacattgtctgcatgttctgcccttgtctaggttgtatgattcttgagggtagtgactacatcctattcttttttctgtttcctgtagcacctagcagaaactctactgtatagaaggtattcagctagctgttcaatgactagatggacagat

SEQ ID NO: 906693 - DNA, 565 bp, Homo sapiens
ttcacacacaaaaatactaacctcaaatataaatgggctaaatgccccaattaaaagacacagaatggcaagctggataaaaactcaagaactatcagtgtgccrtattcaaggggccatctcacatgcaaagacacacatgggctcaaaataaaagaatagagaaaaatttaccaagccaacagaaagcagaaaaaagcaggggttgcaattccagttcctgatataacagactttaaaccaacaaatatcaaaaagacaaagaagagtgttacataatggtaaagggttcaattcaacaagggctgactatcctaaatatatatttacccaataaaggagcaaccgggtttataaaacaagctcttagagacctacaaagagacttagactccaacacagtaatagtgggagactttaacaccccactatcaacattagacatatcatagagacagaaaattaacaaagatattcaggacctgaactcagctctggatcaagtggacttgaaacagcccctcccatcacaggcctggaggcccagaagcaaaaagtggttttg

SEQ ID NO: 906694 - DNA, 575 bp, Homo sapiens
tttactataacatagaaattggcattttagttacctgtcttacctaaacataatcaatgacttgggggatagagagaagcgaaagtcaaggtgtcttataattgcatcccataagtcatgcttattcaagttcgtagttaatccaagctaaacaaatactcaagaagtgttaattatttgtaccacttttgttcccccttgtgttttttagtgtcttgaacataccaggtgctcatttattcaaccttcaaacagtcagtaagtactgctatatgcaagcatattgactaggaactagaaattgaggaaggacaatgacaccgccactgtcctcaacagacacaaaagactaatgaattgataacaggtaacttaaaaaatgaaaatatagagcatgaagtgatctgtagatatgcacaaagtgccattgggacagaaaaaggagtgactaatatctaggatggtggggaaatgacacgtgaaggaaacaattgagctgctyaaggcttgcttattaactttcaactatttaccttttgctaccttgaaaatattcagatttagaggcgcaggaa

SEQ ID NO: 906695 - DNA, 614 bp, Homo sapiens
tctaggtggtggcggcagtgtggcttgtggttctttttgagtgtacactggctgccttacttgcgagaatctagttctatcaagtgtcagttaaaggccgtttttgtctctgattgcataacagggtatgtttgagagagacatcgctgagagaaattcaaagctaccatgtgaagatcctttcctgaatatagtgtggctacctcagatcaggattctcaagcttggcagttttgacattttggactggattcttttttgatgtggggaaactacctgtgcactgaaggatgctttgcagcatctgaggatgacccactagatattagtagcacctttctcccatggtaacaaacaaaaatgtctccagacatttccacatgtcttctgtagggcaaaatcccactggctaaaagccagtgatggagtttgtactctttgaaataagaccactgactttttgtcttccacctaattacgctcagtaagataaggccttcttttgaggtagactttcaacatctatctctgattctttttgagaaaacaygttgcattttaatcttttagtgaccgattgtccccaaatgtaaaatagaaagttgagggaggca

SEQ ID NO: 906696 - DNA, 614 bp, Homo sapiens
tctaggtggtggcggcagtgtggcttgtggttctttttgagtgtacactggctgccttacttgcgagaatctagttctatcaagtgtcagttaaaggccgtttttgtctctgattgcataacagggtatgtttgagagagacatcgctgagagaaattcaaagctaccatgtgaagatcctttcctgaatatagtgtggctacctcagatcaggattctcaagcttggcagttttgacattttggactggattcttttttgatgtggggaaactacctgtgcactgaaggatgctttgcagcatctgaggatgacccactagatattagtagcacctttctcccatggtaacaaacaaaaatgtctccagacatttccacatgtcttctgtagggcaaaatcccactggctaaaagccagtgatggagtttgtactctttgaaataagaccactgactttttgtcttccacctaattacgctcagtaagataaggccttcttttgaggtagactttcaacatctatctctgattctttttgagaaaacacgttgcattttaatcttttagtgacygattgtccccaaatgtaaaatagaaagttgagggaggca

SEQ ID NO: 906697 - DNA, 457 bp, Homo sapiens
tctctgcccaactgggtccccaccctgttaccttctgaggagtctaaccctgagtactgctgggctttgcagatcctagagttgcgggttatgagtgtgtccagagaaccagagtatgtcatctggattcactcactcattcacacattcatttattcacactcaacaaatatttataccattattcatagggcagacagtgaacattaaaaatgtgaaacaataacatacagtccattcattgtcaaaggatactacagatcaaggaaagaggcaacttcaagaaagtatgattagtacattgaccagccaaatgtagaagcttctgtgtcagacttgacrgggtgagggaaagcttcctggacaagaagacatctaattggaatatggaaggatgcttagaatctagccaggtgtggggacttaaagggtaaagcaagtgctacccagaaaacgt

SEQ ID NO: 906698 - DNA, 616 bp, Homo sapiens
aatgtttactgtcaagatgagttttccaatttccattgtttcccctaaattgagtctctcacatagagtttagagctggtatgtctgctaggaaatagctatataataaaacatccatataatagcactataattcatccagttattcattccttccctgaaaaataggacctaaaatgcatcattgtgtgtaggtttcaattaaattcagaggacagttattgactgactactgcatgcaagctggctggactgagagtattgagatggataagaaactgtcccctctcaaggagcttaaaatctagaggaaagagaggtgtataaaatatataattgaaaatgtttgctgtaatttctaagagaacacacctggggatgtgaaaatggacagaagggaggatttagctctatcttggaggctgggatataagtcagggaaagcatttcagtggagattacgcttaaagtgggagtactgtatacatgaataagcagagcaggccaggtaagcaaagttgtggttggggaaagatgcattccagacagccaraatgttttgcctcattggaagattgtttttctcacccttagcaccctctgcttattcgtctct

SEQ ID NO: 906699 - DNA, 431 bp, Homo sapiens
tatctgagaaaatagtaaagtcacattatggtgtgaccacatgggagcagacaccaattacaatgctatgccccccagatctrtgtggtttttttgattctttatttctcagctttttatctgtgtgcagctgtctgttgttgttctttttcccgttttttctcagtagttttggtcccatatgctctttcattctcttaaggtacactgaggagaaacaagtggagaagttggcaatatagagagaaaattatgtaatacgcattcatctaattacataagcatatgtctctgtatctgtcatgtgaaggatacgatgtctggagaaagttttggtataagactgctcttaccaagtcttttggtattattgaaagtcatgttgccatatttatgatgtggaaatactgtttcactctgaaacaggtagt

SEQ ID NO: 906700 - DNA, 604 bp, Homo sapiens
aatactagccagttagctttaggaaatagaagcatccctcattcagaaagaggagaaagaaacctctttacaaatacttcaattgcccgacatgtgaatataccctttttgttcttctcttattgttgatgagaacaatagttatattaatctgtatagatgttgatatggtttgactctctgtacccacccaaatctcaccttgagttgtaataatccccacgtgtcaagagcaggaccaattggaggtaattgaatcgtggaggtggtttcccccatactgttctccttgtagtgaataggactcacgagatctgatggttttataaatgggaggtcccctgcacaagctctctttcttgctgccatgtaagacctctcttgcttccccttcatcttccgccacaattgtgaggcctccccagccatggggaactgtgagtccattaaaactctttcctttataaattacccagtcttgggtatgtctctattagcagtgtgagaccmgactaatactaatcctaggaaatcgtagaggtaggtggcaggccttgactgctaaaagatcatgtaacttaaaatgtgtaaatagagtgttttt

SEQ ID NO: 906701 - DNA, 624 bp, Homo sapiens
agtgacttattcaagtcactcaacaaacgttaggtctagaattagaaagtttcattgaatctttcaggggttcctgttgtttttcttatttttagcttataaagyaccaacataacgagtacttactaaagatcaaaagattttgataacttactaattaaattagtttcccctaagaattgaaaaagaaataaaagtcaggatttcaaacataattaggaagaccagaccactataagaaattatagtctgaaagtttatagtaaaagagaatatgatcattttcaataaatttttttgttatggtcctaatttggtcctaagagtaggtgctaagagtaggtccatgtctcttctaaaaatacaaaaattagtggagcgtggtggcacatgcctacgatcctggctactcaggaggctgaggcagaattgcttgaaactgggaggtggaggttgcagtgagttcagattgtgccactgcactccagtctgggtgatacagtgagactccatctcaaaaaaaaaaaaaaaaaaaaaaaaaaagataaccaaatctatttgtctgaagaaaagagagatgacattttacctttaccaagtcatgcaaaacagtcttaatcaatc

SEQ ID NO: 906702 - DNA, 608 bp, Homo sapiens
cagaaaaggatgtaattaaatcagagaaaaagatgaggatcaagaaggtaggaaacatgsaaaaatcatgacaagtagtttttgccattaagaaaaagatgaaactaattaattccacaaaacaagtcaagaataactcgtgaattagagggagcagaaatggagttgccatcttcaaaggcactcgttttcaggagatgtatacaatttttggaaaaacttgtatttgaaaagttaagtatgcattttgcaattttcagagagtgaaagaatagcaacaaaatacttataaactaggaaaggaaaaatcttgaataagaaaataatctataccaaaaaagccacatttaagtactatgtttattttgttaaattaatttaaattttaaaaatttatcttcactctatgcaataatatttgtgaaattttgactctggtgtgtaaattaacttgtttactgcattgaatcctttgtcatttttgtaatactttgattatctccatctaaatattcaaacatcacctcttaacataaccagtggtacactttccatgatttagatatggtggtctgactagcgttgaaacttgagagaagctagcctca

SEQ ID NO: 906703 - DNA, 652 bp, Homo sapiens
ataaagctacagtgctggcttcttcaaccatgatctctgcttggctctcatcacttgcctcatctgacttccctggacttgacttgcttcctggcaatgactcctggtctgctgaactcccacctgatctagctcttttttgatcagataaatatcaaagctatgttggcaattgttatctgaccactgaagccattttctcttctttctgggcactcgggtagaccataattctcagcttctcttgtggttagttttggccatgttaactgagttcaggccgaaagaacatgggtgcaagtggtgacgtgcaatacttccagacttggattgttgaaaaccttccattccatcttccgttttttttccctctccaattggctgcaaatagagaacaacttcaaagcaactttgagagccttgtatggaagatggcaactttgagagccttgtgttgaagatggcaaagccacaagatggaaagtgcttgggttcttggatcattgtatggaggggttctgcccaactaggatcacccaggctggattgtcatgtgagtgatagtaaaacaatttttgttgtcataagcccttgagtttgtggatgttcataagttatarctgtcagcattgcctcaactaatataacgggg

SEQ ID NO: 906704 - DNA, 635 bp, Homo sapiens
ataggctctagaaaatagaatctagaaaatagcctcaaagggcaaatataaaagttattggccttaaagagaaggtagagaaagagatagggtaaaaagttttcagaaggataataaaagagaacttcccaaagccagagaaagataccaatatccaagtacaagaaggttatagtacaccagccatatttaacccaaagaagactacctcaaggctcttaataatcaaattctcaaaggtcaaggataaagaaaagatcctaaaagcagcaagagaaaataaacaaataacatacaattgagctctaataattctgggagcagagttttcagtggaaaccttacaggccaggagagagttgcttgacatgtttaaagtgctgaaggaaaaaaactttcaccctagaatagtatatccattgaaaacatccttcaaatatgaaggagaaataaaaactttctcagacaaacaaaagctaagggatttcatcaataacagacctgtccttgaagaaatgctaaagggagtacttcaatcagaaagaaaaggacactgatgagcaataactaatsacttgaagataccaaactcactgataatagttaagtacacagaaaaacacagaatattatac

SEQ ID NO: 906705 - DNA, 231 bp, Homo sapiens
tcccaaagtgtcaactcatttaagcattaactcaaaagtccacagtccaaagtctcatccaagacaaagcaaatcccttccacctacragcctgtaaaatcaaaagcaagttagttacttcctagatacaatggggtacaggcattggataaaaacagtcattccaaatgggagaaattggccaaaaccaaggggttacaggccccatgcaagtccaaaatccagtaaggc

SEQ ID NO: 906706 - DNA, 570 bp, Homo sapiens
gattcccaatgtgcccatgytcttccgtcgcatgcatttttgtcagacggtctatggttttcaaaagtgaatctttcccttgcaggagaagttccggtaggacaaggctgtgctgacacgtggcctttcccagggcccttcgcaggagataaaaccctcattagggaacaacctttgcgccatgtgatgtggtgccaggaagggcacttctcagctgtgacgtcatgccgtcttatgtatgtttgtgttggctccctgtagaattcattccctttttagccgtttctttgtattctctatttatacttaagattgctttaaggcgaaggaaagatctgtcctggatatgccatgtggttttgactaaacaaagcatttttaaaagtcagtaaactaggagttagggtgagctctgaaagaaacttttgtgagtgctcagcgtgaactcagttataatttattcttttcttatttgttttgttttcaaaatagcacagacggcccacttgtgtttctttttcacttccactccaacagagatatgttgtttcccaacagctttttcttctt

SEQ ID NO: 906707 - DNA, 562 bp, Homo sapiens
tggaggctgtggtttggtgtttgatttgagcctgaaaccagacatttagtggtggaaaacatcactaaataggccacttcatttttgttgcccccaagtccagccatctgaagtctgttatgcagacccagccacaattattaactccatcctcagagatatatatatatatattttttttttaaaaaagcaaaatttattgaagcttctctcaaggggatttatgttcaaatcttgtatcattttggagctctcttctgaaacttccataagctctccatgttgtgctcatttttttttctcattctattatacctgtcaaactcagctccatcataagtagttgtgacagtcaaaaaacgaaatcaaaaaacgaaaaaaaagagacccttcaagattcaaagcatgaaagcctgagtctctcaggttatatctgcaagagccttgcagcagggcaatctttgtgttaaacaaccaaaactgtgacatgtaagtggggacagatgcctaactttaggatatrataaatgttcagcaatcctgctccaaatctgcagtgcat

SEQ ID NO: 906708 - DNA, 588 bp, Homo sapiens
aattattttctctctgagagtgtgtgaattgttctttcttgggaacatgagctcattgaaaatgagcataaatacttttggacamttccagtaaagagaagaaagttagaatgatcatcaatcccacatccacccccatgcaatttagagagaaaccaggtagagatggagagatgcctcctcatgttgcctacagaggccactcgtgctgcatggctccagtcagggtcccccgtctcactgggtctagtctccagcttctttgctggtacaggaactcagctttgtccaatcactcagacttagtgggacctggaagaactgactcacggcaaaaggcagatgcataagccaggaggccaacatagtaatttacaaaaaacaaaaataaataaaatataaataaataaatttggcaagaactataattatcaagctccatacagggaacctctttcctgatacctgaatacttttgaagcagaattagcaaccaaaatatgttatttggtgagcatagaaaaatcaaggcaagggcacatgaggagtctggagagtgtttactctggtcagcagttgtgactgaaa

SEQ ID NO: 906709 - DNA, 573 bp, Homo sapiens
atgtgcttttgggggtccctgaaccatgctgtataaagcacagctccctggtggagacaccctgcagagagacaatgaagagaagattcatctagaggaagaagccaggactgcacagagagagggagacacccacccaaaaatccagtggtgcagtcaaatcttagagctccaaaataatttcctttgactccatgtctcacatccaggtcatgttgatgcaagaggtgtgttcccatggtcttaggaagctctgccctgtggctttgcagggtatatatctccctcctggctgctttcatgggatggtgttgagtgtttgcagcttttccaggtgcatggtgcaagctgttggtggagctaccattctggggactgaaggatagtggccctcgtctcaaagctccactaggcagtgccccagtagggactctgtgtgggrgctgtgaccccacatttcctttctgtactgccctagcagaggttctccatgagggccccacccctgcagcaaacttctgccagggcatccaggtgtttccattcatcatctgaaatctgggtggaggttcc

SEQ ID NO: 906710 - DNA, 573 bp, Homo sapiens
atgtgcttttgggggtccctgaaccatgctgtataaagcacagctccctggtggagacaccctgcagagagacaatgaagagaagattcatctagaggaagaagccaggactgcacagagagagggagacacccacccaaaaatccagtggtgcagtcaaatcttagagctccaaaataatttcctttgactccatgtctcacatccaggtcatgttgatgcaagaggtgtgttcccatggtcttaggaagctctgccctgtggctttgcagggtatatatctccctcctggctgctttcatgggatggtgttgagtgtttgcagcttttccaggtgcatggtgcaagctgttggtggagctaccattctggggactgaaggatagtggccctcgtctcaaagctccactaggcagtgccccagtagggactctgtgtgggagctstgaccccacatttcctttctgtactgccctagcagaggttctccatgagggccccacccctgcagcaaacttctgccagggcatccaggtgtttccattcatcatctgaaatctgggtggaggttcc

SEQ ID NO: 906711 - DNA, 573 bp, Homo sapiens
atgtgcttttgggggtccctgaaccatgctgtataaagcacagctccctggtggagacaccctgcagagagacaatgaagagaagattcatctagaggaagaagccaggactgcacagagagagggagacacccacccaaaaatccagtggtgcagtcaaatcttagagctccaaaataatttcctttgactccatgtctcacatccaggtcatgttgatgcaagaggtgtgttcccatggtcttaggaagctctgccctgtggctttgcagggtatatatctccctcctggctgctttcatgggatggtgttgagtgtttgcagcttttccaggtgcatggtgcaagctgttggtggagctaccattctggggactgaaggatagtggccctcgtctcaaagctccactaggcagtgccccagtagggactctgtgtgggagctgtgaccccacatttcctttctgtactgccctagcagaggttctccatgagggccccacccytgcagcaaacttctgccagggcatccaggtgtttccattcatcatctgaaatctgggtggaggttcc

SEQ ID NO: 906712 - DNA, 670 bp, Homo sapiens
ttgagttcctcccctgaaaatggtttttccttttctaccacatggtcaggatgcaaatttttcaaacttttacactctgcttcccctttgaatataagttccagttttyaatcatttcttattcacgaatatgagaataggctgctagaagcagccaggctatgtctggaatcctttgctgcttagaaatttcttctgccagataccctaaatcattactcccaagttcaaagttccacagatccctagggcaggggcacaatgcctccaacctctttgtgaactcataacaaaagtgacctttgttccagttcccaataagttcctcatctccatctgaaacctcctcagcctgaactttgtcagtatcaatatcagcatttggtcacaacaatttaacaagtacctaggaggttccaaactttccctcatcttcctttcttcttctgagccctccaaactgttccaacctttgcctattacccagttccaaagctgtttccacattttcaggtatctttatagcaatgccctactcctggtaccaattttttgtattagtctgctctcatactgctaaaaagaaatacctgaagctgggtaatttataaagaaaagacgtttaattggctcatgattccataggctgatcaggaagcatggctgagga

SEQ ID NO: 906713 - DNA, 637 bp, Homo sapiens
tctggatttattattaacatttgcaactcccagaagctgatgatcatctggtgtattctcagtgcatcaaaaggctaaagaccaaaggtaggtgcaaagatgcaaagcatggcttctgacccaaaggagcttgtccattgtaaactctttaaaggcagagggctatatgttatgaggtaagtttatgagatacattaaaaagtgctagttagatatatctctatttaaacaataacttaagacaataagaaaggcactttcacaagattactaacacaaaattttctaggagtttaggggaggaagaaagcttttcaggctcagtaatagaggaaggctttacccagactgatatataaacaaagccttgaaaatgagtcgtgcgcagtggctcacgcctgtaatttcagcactttgggaggccaaggtgggtggatcacctgaggtcaggagtttgagaacagcctggccaacatggtgaaactctgtctctactaaaaagacaaaaattagcygagtgtggtggcaggtgcctgtaatcccagctactcgggaggctgaggcacgagaattgcttgaaccccggaggcagaggttgtagtgagccgagatcctgccactgcactgtagcctgggc

SEQ ID NO: 906714 - DNA, 647 bp, Homo sapiens
ttattttaaaaattattttcacaagttatgcttgtttcactggggagcaattccacagggctcctaatgtcaccattttggaagttgctaccttgccatgctctttttctgccgtagctgctaagctgctagaatttggatttcaggctgctttgagcaatcattatgcttatggagtagccttgcaagggactgaaagagagagacagagtcctgatgacattatgttagcctctggatctagctgtgcttggaatcagccctacagtgtggactttgcagttagataagccaataaattaatttccttctttgctagttggagttgagtttctctcacatataaccaagagttgtagctaatatcctgaatgtcaaacttttaatagtgtatgagtaaatgataagtactgtggaaagcttgttcaacaaaattggtatctaaggtcatttcatgtaatcatttaggtggctaatctcatccaaataatttatggcctcttggtgcttgatgaaatgtataaacatcatttatggtgattctaattgrtgttccccttaataaggatttttaatatattcctatatgtgtgtcaatatttgttaatatccaaagggtttgttgcaaggatgtctcaatgttaatt

SEQ ID NO: 906715 - DNA, 670 bp, Homo sapiens
aggaccgcttgagcccaggagtatgtgaggagtatgtgaccaggctggcaacatagcaagacatcatctctacaaaaaataaaaaaattagctaagcatggtggctcacacctgtagtcccagctacttgtgaggctcgggtgggaggatcacttaagcccaggagttggaggctgcagtaagccatgactgcaccactgcactccagcaggggcgacagagagtgaccttatctcttaaaaaaaaaaaaaaaaagacaaagaccagacacttctagatggcttgctgagcctgcaagctccagtctctgctgattgcttcattctcatctcactttctattttttggttactatgaccttcttttattttcttaaacatggcccttcccaccttagggcctttgtatatactgttccatctgcctggacccctcttttctctcattacccccaaggcccttgtcacctagtaacccttacttctccttcattcatgtctgcataaatgccactgctggacaggcatggtggctcatgcctgtaatcctackactttgggaggccaaggcgagaggatcacttaagcacaggagttcaagatcagcctgagcaatatagcgagaccccatctccacaaaaaaatatgccactgcctcaggagaaccttct

SEQ ID NO: 906716 - DNA, 643 bp, Homo sapiens
ttcttacacaccaataacagacaaacagagagccaaatcrtgagtgaatgcccattcataattgcttcaaagataataaaatacctaggaatccaacttacaagggatgtgaagggcctctttgaggagaactacaacccactgctcaaggaaataaaagaggacacaaacaaatggaagatcattcaatgctcatggataggaagaatcaatattgcgaaaatggccatactacccaacgtaatttatagattcaatgccatccccatcaagctaccaatgactttcttcacagaattggaaaaaaactactttaaagttcatatggaaccaaagaagagcccgcattgccaagtcaatcctaaaccaaaagaacaaagctggaggcatcaccacgctacctgacttcaaactatactacaaggctacagtaaccaaaacagcatggtactggtaccaaaacagagatgtagaccaatggaacagaacagagccctcagaaataataccacacatctacaaccatctgatctttgacaaacctgacaaaaacaagaaatggggaaaggattctctgtttaataaatggtgctgggaaaactagctagccatatgtagaaagctgaaaaaaaagaattatttc

SEQ ID NO: 906717 - DNA, 643 bp, Homo sapiens
ttcttacacaccaataacagacaaacagagagccaaatcatgagtgaatgcccattcayaattgcttcaaagataataaaatacctaggaatccaacttacaagggatgtgaagggcctctttgaggagaactacaacccactgctcaaggaaataaaagaggacacaaacaaatggaagatcattcaatgctcatggataggaagaatcaatattgcgaaaatggccatactacccaacgtaatttatagattcaatgccatccccatcaagctaccaatgactttcttcacagaattggaaaaaaactactttaaagttcatatggaaccaaagaagagcccgcattgccaagtcaatcctaaaccaaaagaacaaagctggaggcatcaccacgctacctgacttcaaactatactacaaggctacagtaaccaaaacagcatggtactggtaccaaaacagagatgtagaccaatggaacagaacagagccctcagaaataataccacacatctacaaccatctgatctttgacaaacctgacaaaaacaagaaatggggaaaggattctctgtttaataaatggtgctgggaaaactagctagccatatgtagaaagctgaaaaaaaagaattatttc

SEQ ID NO: 906718 - DNA, 632 bp, Homo sapiens
ttttaattctatttatgtaacaaatcatgttattgatttgtgtatgctgtactaaccttgcaccccaggaawaaagtctacttgatcatgatgaattaactttttgatgtgttactatatttagttttcttagttttttgtgaggatttttgcatctatgttcatcgggaatattgaccataagtttgttttttcactgtgtctatgccaaattttggtatcaggctgatgctggcttcatagaatgagttagggagaagcctctactcttcaatttcttggaatagtttcagtaggattggtaggaatttttcattgtatatcaggtagaatacaattgtgaattcatctgacccaggtctttttttgtttggtaagtgtttttgttactgattcaatttaaaaacttgtttttggtctgttaatgttttcactttctttttgtttcaatcttgagtgattgcatgtttccaggaatttatcaatttcttccaggttttctaatttgtgtgtgtaagtgtgttcataatagcttctaaggaccttttgaatttctgtggaattggttgtaatgtcatctttatcatttctgattgtgctcagttggattttctctttgtgttttctttgct

SEQ ID NO: 906719 - DNA, 650 bp, Homo sapiens
ggtttatgtaactaaatctgaagctctttgtataataacgtaatctgtgcatagaaatatagataatgcatacaaattacctgtagtaacatttttcagaagctctgtttgtatattatacatcacagtgagaagaactatttgagttagttgaaatttatattgttaatatatttaattatttgctattgaattagaatgtgtgctattagtaaaaaactttttgtataaaattccagtttgcttcttcattgaaaaacagaagcaaaagaaactgtttcctaatagaagcatggtttaacgtacttttgtattaaaattgtcataggattcatcatacactagattaagaggaaaagacaatggcaaggtaacactggagtgatttaatgggagtgatactttagctcactttaaaaaaaactcttttaagaaaagatgagagtacaaaaaataggagaatgtttaggattaaaaattgatttggatatcattagaaaagatgtgaaggacaaaaattcctgctctgggaggaagaaatgtgttcaaagtattaaaatctattttctaaaaagactcctcatgttgagggatgactmttttacttgtttggaagtacaagaattttacataaaatgtttattttgcct

SEQ ID NO: 906720 - DNA, 683 bp, Homo sapiens
tgttcccccattgtatctaggaaataactagcttgcttttgatattcaggctcataggcagaagggacttgccttgtctcagatgaaactttggactgtggacttttgggttaatgttgaaatgagttaaacctttgggggactgttgagaaggcatgattgattttcaaatgtaaggacatgagatttggaggggttgggatggaatgatatggtttggctgtgtccccacccaagtctcaacttgaattttttctctcagaattcccacgtgttgcaagagggacccagggggaggtaattgaatcatgggggccagtttttcccatgctattctcatgacagtaaataagtctcaggagatcgtatcagttaatcaggtgtttccacgttttcttcttcctcacttttctcttgccgcggccatgtaagaattgccttttgcctcctgccatgattctgaggcctccccagccatgtggaactataagtccaattaaacctctttttgttctcagttttggttatgtcttttttagcagcatgaaaaaaaactaatacaacctgtttctagattaaagtatattttgatggtaacttaacatttagcccagagttgatactgaygtcaatataaaatctgaagtagacatagaattatggtatactttggggtaagaagt

SEQ ID NO: 906721 - DNA, 619 bp, Homo sapiens
ggttctctagagggatagaagtaatggaatatctatctatctatctatctatctatctatctatctatatgtttattaagtattaactcacatgattacaaggtcccatgtattagttckttttcacactgctgataaagacatacccgaaactgagaactaaaagagatttaattggacttacagttccatatggctggggaggcctcagaatcatggtgggaagtgaaaggcacttcttacatggtggtggcaagagaaaaatgtggaagatgtgaaagcggaaacccctgataaacatatcagatcttgtgagacttattcactatcaggagcacagcatgagaaaaactggcccccatgattcaattacctcccccgatccctcccatgacacatgaaaattctgggaggtacaattcaaactgagatttgggtgaggacatagccaaaccatataatttcacccctggcccctccaaatctcatgtcctcacatttcaaaaccaactgtgccttcccaacagtcccccaaagtcttatctcatttcagcattagcccaaaagtccacagtccgtagtcttatctgagacaaggcaattgccttccacctatgag

SEQ ID NO: 906722 - DNA, 611 bp, Homo sapiens
tgggtgaacagggaaggtcccactgacgaagtgagatttaagcacaaacctcacacaaagctgccaaaaagagtgcaagggaggagcacatcaggaagagggcttcaagttaaaaaggcctgaggcagaagcaagtccggattgtgagaggaaccaggaggaagccagcctagctggaatctaggaagaagagtgccagatgacattagggaggttggctgaggccaaatcatgcaagatcttgtgagaaggaagtttggatcttttaaatgtgaataggaaaacactaaaggatgcagtattacagcctgaagaagctaccattagatctataagattttataagattttagaaggatgatctctccttcagtaggagggcattgaagagtcatggtctctattattttacttcaagccaaccccagcactggggttttctatcagacacagctccccaggatcatgaatcagaggcacatggattagtttttctgtactcatttttcaccgaaaatgtttctgctttctctttaccctttgaagatactacaaattttaattatggttaaggkagagcctaacaaaggcccatttgcccaactacctac

SEQ ID NO: 906723 - DNA, 551 bp, Homo sapiens
tatatatatatatgatggaatattacacagtcataaaaataaattaattaatgacattcacagcaacctkgatgaaattagagacttttattctaagtaaagtaactcaggaatggaaaaccaaacatcatatgttctcattcataagtgggagttaagctatgaggatgcaaaggcataagaatgacacagtggactttggggactcaggggaagggggtgagggataaaatactacaaattggatgcagtgtatactgcttgggtaatgggtgcacgaaaatctgacaaatcaccactaaagaacttactcatgtaaccaaacaccacctgttccccagtaacctatggaaattaaaaaaaaatatttcagtaagttgaagcaacttgtatacaatctcactgtgttctggtttctatagtttttattgggaagacaattaggattctatttgttgcatcattgaaggtaacacgtctcttttctctgaaattagtattttctctttttttctatttgtagcaattttttattatgtactatgatatag

SEQ ID NO: 906724 - DNA, 615 bp, Homo sapiens
tttccatatcaattaaaaatcagtgcctttgtttgcataactgtagaatgccacgttatacacgatgctggctcaagaaagattcaaataagcagatctgtttacaattacaaatgctaattaagggaaatagtcaaccctagataattcagtgatagactacagagtttggggattatttagacacttttatttttctcctctccctctaatggatgggctttccccatttgctacttactagtactctctcggacctgtagagaggcagaaagttgaggtccaacatcagttttgcaactccatagcagttctgatgaaagagtttggtaggaaacaatattgaataacatataatagtataaataatgtctggaaattttcgaggaattctaatggtctttgatacttccaagccttttaactcaaagaatgaaaaatgagctatcactgttattaaatatgcataagttcaagctttccaaatttttaagtgtctaatcaccgtttaaacataagctgcttgtcttatatttttagagacattcagacagtccayggcccatgcttcactttagaaaattgaatgaatgtcactgtaacaggacatgtcca

SEQ ID NO: 906725 - DNA, 573 bp, Homo sapiens
gtctatcaaaataagaaggaaccagaaaaaaacaattctggtaataygacaaaacaaggttttttcacacccccaagagatcatatcagcttaccagcaatggatccaaactaagacaaaatctctgaattgccagaaaaagtattcagaaggttgattattaagctaatcaaggaggcaccagagaaaggtgaagtccaacttaaagaaatcaaaaacatgatacaggatatgaaaggaaaattcttcagtgaaatagattgcacaaataaaaaacaatcacaacttctggaaactgaacacacacttacagaaatgcaaaatacactggaaagtctcagcaataaaatcaaacaagcagaagcaaggccttaacagctcaaagacaagtctttcaaattaaccctacccatcaaagacaaagcaaaataatttttaaaaataaacaaagcctccaaaaatttgggactacgttatatgtccaaaactaagaataattggtgttcccaaggaaaaagagaaatctaaaatttggaaaacatatttgagggaataatcaagaaaaacttccct

SEQ ID NO: 906726 - DNA, 573 bp, Homo sapiens
gtctatcaaaataagaaggaaccagaaaaaaacaattctggtaatatgacaaaacaaggttttttcacacccccaagagatcatatcagcttaccagcaatggatccaaactaagacaaaatctctgaattgccagaaaaagtattcagaaggttgattattaagctaatcaaggaggcaccagagaaaggtgaagtccaacttaaagaaatcaaaaacatgatacaggatatgaaaggaaaattcttcagtgaaatagattgcacaaataaaaaacaatcacaacttctggaaactgaacacacacttacagaaatgcaaaatacactggaaagtctcagcaataaaatcaaacaagcagaagcaaggccttaacagctcaaagacaagtctttcaaattaaccctacccatcaaagacaaagcaaaataatttttaaaaataaacaaagcctccaaaaatttgggactaygttatatgtccaaaactaagaataattggtgttcccaaggaaaaagagaaatctaaaatttggaaaacatatttgagggaataatcaagaaaaacttccct

SEQ ID NO: 906727 - DNA, 554 bp, Homo sapiens
actatgttttttatttgtgttgtttatctttggagctttaatcaaaagtccctttgatgagaaaataaaccatctgtgaaaattagatctrtttaaacgtctggaaatcaggcaagatttgaagctattcactaaccatggcttgctttataatttatttgactttgccatcactttggtaattggaaactatttttctacccagatacaataatccaggaaagaaagaaatccctccaggctggggtaaagcaggataacactccgaagaggaagtaccaggattttctggatattgtcctttctgccaaggtaaatcttctaaatttctaagcctgctcaagtgaccagttaattatgtaagtaggtgggtaagtgggaatgggatggggagacaagaataaaaccgattgactaaatttaactgtactttgaattgatgagcagcttcatgcaatttgagacaaagagagaattctgcaactgtgtcgctagaggagggttagtaaagactaaacgaacgatttgacaagatttgaggattgtcatatgga

SEQ ID NO: 906728 - DNA, 691 bp, Homo sapiens
atacttatcatttttttgtggtaaggacatttaaaatctaccctcttagcaatkttcaagtatacaaattgttagtaactccaatcacatattgtacaatgcatctcctaaacttatgcctcctgtctgactgaaattttgtatcctttgactaacatccctgtaatcccccattctcccacagcccctggtaaccactgttctactctctgcttctttgagtttaatgttttagatttccacatgtgagatcatgtggaatttgtctttctgtgcctggcttatttcacttagcataatgtcatccaaattcatctctgttgtcataaatgacaagatatttgtcttttctatggctaattgttagtccattgtttatatatataccatgttttctttatccatttatccagtgatggacacttaagttgatttctatatctgggctattgtgaataatgctgcaatgaacatgggaatgtagatgtctcttcaatgcactgatttcatttcgtttggttgtatatccagaagtggaattgctgcatcatatggtagttctatttttaattttttgaggaaactccgtacaattttccatatggctgtactaatttacattccaaccaaaagtgtataagggttctgttttctccacatcctcaccaacatttgtctttttggtaataac

SEQ ID NO: 906729 - DNA, 630 bp, Homo sapiens
aatgaaaatgatcatttttgacagttatcctccagatttatttatcctaatttattgattgtaagcatcttctaactataaaaagaactccccaaattttacaagtttaatgttgaaaaagttagtggatcttctacagtgtaatagttgtactttgtattagttgaaaggtcacatccaaatttagtattaaaaaaaataactttgcaaaactttgacccctcccacacataaaaaatacaatcacttagagtgtgcagcccatagattgggaactactgaaatggagcacagatctacaggccacacatactattttgttcgtgtgttagagcagcaagtttttgagaatattattggttgtgcccacagttattgcttcatcacaagctgatcaagagaagttatgtttctttctactgaagcaggagcctagggagaccagctttttagaacctaaccatgaactttcaaagcatatcattatacttttgattagcaacacaatagwactgccattcagcttctgccagagattataaacccactcagctgcccaatttctatcaaagcttacttgtgagaaatagtgtttattgaagattgcctgtaagatatacttgcctttag

SEQ ID NO: 906730 - DNA, 584 bp, Homo sapiens
gcatttgtgagttgatattgcaaacaaatatttactttgaaagttttatttttcctttataaagtaatggatcttctggtagaagacattccagaatattaattataatttatgcattatacgttacttcttaaattttaaacgatttttgtgaaaataggaaatgctgtatcaacaaagcaatctttatcaaaatctatttttcttagtatattgttctaccttcaagtcttcttttgtcaaatgcctgctatttatatatctattaagtattttagggactttagttttaatctttagttgaaggctttttaaaaatctgagtattaaaaaaagtggtttagtatttttcattcatatcacttatagtaagtttttaaagcatttttacatgccttgaaagagaattctcttaattaagtcactaattagaaataaacaactttaataaacagaatmaagctaattaaatcataaggaagaaaatatttcttacaaacaagaattaaaatgttaaaatgcattggactaaaattaacaaaaacatgcaacttctacatggagaaaactttagatattgctgt

SEQ ID NO: 906731 - DNA, 604 bp, Homo sapiens
acaattcccagaactgaaggttcctcccctttttagaccatataggggaacttcctgatgttgccatggcatttgtaaactgtcatggtgctggtgggagtgtcttttarcatgctagtgtattataattagcctataatgagcagtgaggacaaacagaggtcacatcattgccatcttggttttggtgggatttggctggcttctttaatgcaaactgttttatcagcaaggtctttatgacatgtaccttgtgccaacctcctatctcatcctgtgacttagaatgcctcacctcctaggaatgcagcccagccagtctcagcctcattttacccagctcctgttcaagatggagtcgctctggttcaaatgcctgtgacacatccacctattcactcaccaatctgtctattcgccaggttactagggtgctgtttaccgggcgctagaactgctcaaaactcagaaggcaaagatattgtctcttcccttcaccctgccttctccaaagcagaaaccacaagcccctgacaggctgttataagatgaagagtctacgtcagtggttcctcaactgtgctgcagattagaatcacctggg

SEQ ID NO: 906732 - DNA, 680 bp, Homo sapiens
tagatagtggtatcagaaagaaaaagaaaacaaagtatgaagatagaaagaaacaaatgtcttgggggaactatttcagatagagtaaagggaaagaaagataggaaataagaagaaatagcacttctgtctttttccaactttataaccaggaattaagcctctaaacacagcttccttcttttttcatcttacaggtcctcatgataataccccaactagacctttaacttccttcttttcgtacaagatctcctgctcactaagatggcacacaacagagataattgcttattttcaaggtttcagtgttttctcataaacattataatatggcatatatattattttatatattacataatattaatataatatataatattagtatataatgataaatatgtattatatgtaataaataatatataaactgtatttgatataataaatatatataataaatatataaaatataaactattcaatgtaaataagatgccatatataatgatattttatatattattaatatattgtgattttaaaaagggttttctttttttcttcaacttttattttgaattcagggatatatgagtatgtttcttacaaaggtatcttgctacccaggtagtaagcayaggactcagcagttagtttctggacccttttctctc

SEQ ID NO: 906733 - DNA, 592 bp, Homo sapiens
tgacagccagactgaggttggaggcatgggycttttgcatcctttgcagcaggcttcctcctcttgtcttgtacctggcttgttgaaaaaaagtttgtgatttttccttcatttatttcacaaaaatttattgagtgcctaccagagaccagacaccactaaatatgagaatacaatgacaagtaaaatgcccactctatcctcatggggctagcacaggagacacatactcgtcaaataaaaaaggccaactcaaagtggcatttacatttattagcttatttaattgtcacaagtaaccctaaaagtgagtagtggtgtcgtctcctgtctaccaatgaggaagtgaataaagaaaggtgaaataccttgcccaagttcacgcagtttgcacatgacagagctgaagtttcaaccctgcaggcatttgttcctgctcttaatcactacacaatgctgccttaaaataattacacaacaaaattataaacattgataatcactttgaaaaacagtacataagagcacatgacagggaaaccttatgtagtcagtgaggggagagggtgcagtcagagaaataccctggaag

SEQ ID NO: 906734 - DNA, 617 bp, Homo sapiens
ctccatcaagtagcacagccaaagtctcttgtcccaggattatgtatagaaaacagttccctctagctaaaaagagagaatttatcaaaatatgttatcaacaaaagtgaccacagagcatttcacaatccaatataaatggtaagcaggagaactgagtatctcacaggaaaggtattctgccgtccgtgctctgcctctggggcatccactatggacatgtggtctgcaaccctggggatgaaggcagcagacacatagtgccctgacactgtccccatcctaagccatcacctgacgtcctggggatgtgtactcattcacttttccaagaagtgggggtggccttggccacatgtgccactctaccactcttccctctcccatctggagatgttgtaagcctctgggctatttcaattcaatctgttcaattctcccttatttgtcagttcctatgtgcctggcaatgtactagtctttttataaacatggcctcayggaatccccttataagctcaatagagtcaataacaccgttcccattttgcaggtgaaatcgagcctcggagaagctaactaacttgcccacattggctatggttcacactagatct

SEQ ID NO: 906735 - DNA, 617 bp, Homo sapiens
ctccatcaagtagcacagccaaagtctcttgtcccaggattatgtatagaaaacagttccctctagctaaaaagagagaatttatcaaaatatgttatcaacaaaagtgaccacagagcatttcacaatccaatataaatggtaagcaggagaactgagtatctcacaggaaaggtattctgccgtccgtgctctgcctctggggcatccactatggacatgtggtctgcaaccctggggatgaaggcagcagacacatagtgccctgacactgtccccatcctaagccatcacctgacgtcctggggatgtgtactcattcacttttccaagaagtgggggtggccttggccacatgtgccactctaccactcttccctctcccatctggagatgttgtaagcctctgggctatttcaattcaatctgttcaattctcccttatttgtcagttcctatgtgcctggcaatgtactagtctttttataaacatggcctcatkgaatccccttataagctcaatagagtcaataacaccgttcccattttgcaggtgaaatcgagcctcggagaagctaactaacttgcccacattggctatggttcacactagatct

SEQ ID NO: 906736 - DNA, 536 bp, Homo sapiens
atgctaggctctgggaatacaatgatagccaaatattcatatgtcttttacccttagagctgtcatagtttagtagaagggataactatgataaaataatcactcatataaatgaaaaactataactttgtttagggtaggataatttaatctaatcactgaagttaggaaatgctaaaagccaatgagtaaacataagagttaacataattataacccagctcaacaacgaaacagagcaacatgctttttgtgaacataaaactttcaaaatacaaatattcagtgccacaaccaagacattaagaacaaaaatactcttaaaacacatccaatagttgtagtcagtaatttgtaaacatgttgtacagtagtacctatattatttcaaagcatctgtatttattttattttacttttctgagcctcattgacaatggtaactatatattactgcatcttattcattttctctaagagatcaaatgcyttcctatcaatgattccaaaaggacacatgtagataattcattcaa

SEQ ID NO: 906737 - DNA, 602 bp, Homo sapiens
gctttaacattctgaggccaaggatggagctgtgtctgatttataaagtttcagacgcagtagaacaattgmcatgagaaactagtcttcctctgaggctggtgaagctgcagatcagcacacactcagacttggtacagagaaacagaccattctcccattagcctttggtatacttcagtcacctggggtagagtgatttctgtgatttctaaaccttctgtcctactcatcttacaggccatgtccatcctcagaactcatgctttcctttattgtagcttctgttctacgactcctctaatacatttttcttaggagcttcattgagatataatttatatcccataacattcacatttgaaatgtggcatccagtgttttttattgtagtcacagacttatgcaactatcacatcgaattttagaatattttcaccgccctctgaaaaaaactaaataacaattagcagtagctccccgtttcttttctctgccaaaccactagcaactattaatctattttctgtctttagccatttggcattccgaacatttaatacaaatacgatcatttaatatgtggtcatttgttagtttgt

SEQ ID NO: 906738 - DNA, 616 bp, Homo sapiens
gcattgaggatgaaacagcataggcaaaggcttagaggcatgaaggtggaggacaagggatcctgccaggttagcatggtttgggtactgtgggaataatgagcagtcatggagaaaaaagcaggaaagtcagacaagccaaattatgaatatcttatatatcatgctaaagaattatatttttattccataggcacaggaagatagagctctctagtatcatctgaaccttcttacatgacttatatcattcattttgtcaggctttgagcaactgcatgctgtataccatgttgaggtccttggtaatgtaacagaatcctggggaaaggagacctggttctgaatcccagatctatcacttactgaaatctgaggtcatcactcttaaatctctaaccttcaatttctccatccatagaatgggaccaataataagttttgcattgccttcttcatagaattgttatgaggaatcactcaaaaagtgtgcaagaaattacccatgctggaccaaattctgtaggtgggaaatgggatgaaggagagargataaatgcaggactagagagggtaaactagtgtgttggagaggcaggaaatacaggatggagca

SEQ ID NO: 906739 - DNA, 491 bp, Homo sapiens
gcctgtttcttcaccctgggtctatgagtaatttcaataagcagagcccggtgctctgtttataccaatgtacatatggtataaacaggaaaaaatctttgtttataaagacagtaaattttagaggwgtatttgttaccacagcatattctgattgacatgccttcctgaataactttcctatggaaattctctatccacttacactgacctagaacctgacatatgtctgccttgccttccagcacagaaattctattaaggtagggatatcgtttgattcactgctatacctgtacacctaaaacagccttgcacataataaatacttgtgaaatatatgtcaagtaaaaatatggcctaacatcaagaaagatgtgctaaattagacatatcaaaacaaaacatagtctttaaaacaacatgcaagaatattgccagattttattttcttctgattgtttgttcaaagcagcaaagtttgattgtat

SEQ ID NO: 906740 - DNA, 540 bp, Homo sapiens
tggagtcaataacagatatctagaaaatcttcaaatatttaaaaatttaaaaaattctaatgtgctaatgagtgaaaaggaaagtcgcaagraaatattaatattaaaataagtgaactgaatgaaagaaaggtaacaacatttgtgtgaagcaacaaaagtagagcttagaggaaactttataacattaaatgcttacattaggaaagaaaaacttatcaaagtaatgatctaagaatttttcacatgaaaatttgagtgaggaaaaaattaaacacaaagcaagtatttataagggaataacaaaaataacataaatcaataaattcaaaatgactaatagagaaaaccaattcgtataaaacatggatctttgtaaagctcactaaaattggtaaactattgaaaagaccatctaacagcaaccaaacagagagtatacagacataaattatcaacattgggaatgaaagaggagcgtaactgtagattttaaagattgcctaagtataataaccaatttttatattaaaaattaag

SEQ ID NO: 906741 - DNA, 665 bp, Homo sapiens
ttgtaactaaaaggtagtttaagattaccatattgattgtgaaccaaagaacgtaatcaacttgcccataggtacacatttaggatgggacagagataggaataaacccaagttttcttttggtctaggtataagaacaaaaatgtatcaagcatcctttatgagtgaggtattttacatttgctttctacctaaatcggccaatctgacaaacttatctgttggtgtgatatgctaaggagtggagaacttagactaaaaattttatgactactcttaagtaactttctagctttcatatacttttcttattaactgatatttgagtaatttagacaacaactgaattacatttctgtacttgaggcaatttaaatttttctggatcatataactccttaacagggttttttttttttttaaagaattcattcctgaatcttagtgacaataaaacccatgtctattttcatggcatgaattaagaggttaggggaattctattcactgtgcaaagaactgagcactttcaaaaagttgccaattttttttttaatgaaaagaccgttttcaatttaaatggaataggaaagctaaaccatgagataygagatgtggcaatcagtttaagttttgtgttggcagttttctatctcttttgtacc

SEQ ID NO: 906742 - DNA, 583 bp, Homo sapiens
ttctttcagaggacaatcaggcctctgcaagcyatgagaagcaaattgtatgaggagctaaccagaatcccatcctttgagctttgaggccaccttagtgacaaggcttactttaatgaattaaaatataaaattataacaattgtgcaaatgcattaacaaaaagaaaagtgataactctgacttctgaataatctcatactttcataagagacactcaatgtttgggggttagaagttacaagcttattaactatctttaggattgattgagaaagtcttacaaatctgcttaaaatgcataaaaaataagcaaaatgcacaatattgcaaatatttttcatggtaattctgtaataaactctaatctaggcaatgaaacactttttgttttctttccctgaaacaatttctagtagaccaaagaaatgagatagacagcaacataataatagtgggggcttcaatgctccactgacagcactagacaggtcatcaagacagaaagtcaacaaagaaacaatggatttaggcaaggcatggtggctcacacctgtaatcccagcattttgggaggctgagg

SEQ ID NO: 906743 - DNA, 607 bp, Homo sapiens
gcagtatatctattttgttaattttttcaaaacaccagctcctggattcattgatttttttttttggagggctttttttgtatgtgtgttcccatctccttcaattctgctctgatcttagttatttcttgtcttctgctagcttttgtgctagtttgctcttgcctctttaggtcatttaattgtgatgttggcgtcttgatttgagatctttctagctttctgatgtggacatttagtgctataaatttccttcttaacaccgctttagctgtgtcccagagcttctggtacgttgtctctttgttctcattggtttcaaagaacgtcttgatttctgctctaatttcattgtttacccaggggtcattcaggagtaggttgttcaatttccatggaattgtgtggtcttgagtgagtttcttaatcctgagttctaatttgattgcaccatgatctgagaaactgtttgttgtgatttcatttcttttgcatttkctgagaagtgttttagttccatttatgtggttgattttagaataagtgccatgtggcacagagaagagtgtatattctgttgatttggggtggagagttctgtagatgt

SEQ ID NO: 906744 - DNA, 637 bp, Homo sapiens
aaacccataaaaaaccacgttcccctgaaagartctgtaagaacaaatgtaaattatttcttcctctaagaatgctaataaagaaaatttttctgatttgcagtcatcaattagaaaatatatctgataactgttataaatccatctcattcaaatgttaagcaatatatacattcctgactttttccttgccaaaaaaaaaataagctgaaggtattctagaagtcagtatcttctaggaaaactgttaactataaaaagaagaagcatgcacacttcttccatgagctgcctctaggccctaggtgggacagggatcatgatgtctttggactcctcacctgatacttaggtcatagctcccgcttaggagaaagttttcctcctcacacaggaagagggcccggacactcccagcatggcctcggaattcaacgggtatcgctttcacttgtatgatgtccagaagatggatctttcgattagatgacacagctatcagatctcccccggaatagtggatgactcggttttgatcccacctgagtgccaggggaaaaggattatccatgaaagaagagtcagtgtccctcctgggactgacttagccccatgacttttgcctacagcagtggtg

SEQ ID NO: 906745 - DNA, 599 bp, Homo sapiens
ttacccatcatgatttcttcttttcactcatattttatttgacagcaaaatatatccactttttmtggataaattaacatccacattatgtcatttatcttattagcattgttcaatgtcccagtgttgggaaagaattacaaagcagacactatcttctaataaataaatacaaattaatttttaaaatatattaaaacagttttttgcatagaatgcgttccatgacactaggcagtttcttgtgttggatttgttgtctataaactgctctttttaagaccacacctatgaaagaatcaaaatgatttcggtaaaaatgtttgcattttggcgtaagagatgtactgagcagcatgaaatctgtagataaaatgttttgaacccttctcttccaccatagttaaaagtggagatcctgtcaacacggttacttcaagtttaggtccatgatgattgtattccctgggaagctcagaaaaggatcttctttgaatggtgccaatgacacactactcccagtgggcccagtttgacctggagtcccaggcagaatccccatccctgcaactcaacatgatgcagggagcaaagggctg

SEQ ID NO: 906746 - DNA, 618 bp, Homo sapiens
gatattacttttagaggctcattaaatacaaagctgccacattagaaagaaaaatacatcaaaagatcatgactaatgttcggttcccagtgrgtgctagcccaaaaacttatgatatctcctgaattaacattttgtatcacaataatgcaatgtcccaaaggaaactagctatcacgcagggtgataaatgcattactaagttactacaataagaatcttcatcttcactgatgtattttcaaaaatggatttcaatttcctgttaacattgtgcttcaaaagcatatcatgtcaccaaacaaaatcagcaaacattaatacttgatatttattattttgccattacaaagactcacatatagcctcaaattttgtactgttgccttacaaaatgcaattgtataatttgttcacaaggcctaagatagcgctgtttaaaaaaatattcatggttcaattcagaaagctgaatgacagttcaattcattcaataaaagtttggtcacttacagtgagcctgattctatagctaatttttaacaactggaatggattagtactttatttaatataatactgttaaaggaattaatacagctgaaaagacaggttatt

SEQ ID NO: 906747 - DNA, 629 bp, Homo sapiens
catagaagccactaagaatcaactttttaatttctaaaataaaaattcttattgtgaagacgtattagtctgttctcatgctgctaataaagacatatcagagactggataatttatawaggaaagaggtttattgactcacagttccacatggagagggaggcctcacaatcatggttgaaggcaaatgaagagcaaagtcgtgtcttacatggcagcaggcaagagagagcttgtgcagaggagctcccctttataaaaccatgagatctcataagacttattcactatcatgagaacagcatgggaaagacctgcccccatgattcaattatctcccactgggcccctcccacaacaagtgggaattatgggagctacaattcaagacgatatttgggtggggacacagtcgaaccttaccattctgcccctggccccttttaaatctcatgtcctcacatttcaaaaccaatcatgccttcccaacagtcccccaaagtcttaactcatttcagcattaactcaaaagtccacagttcaaagtcttatctgagacaaggcaagtcacttccatctatgagcctgtaaaatcaaaaacaagttagttacttcccagatacaatggg

SEQ ID NO: 906748 - DNA, 654 bp, Homo sapiens
ataacaactagaaacaattgtgaaatctgtgaaaatgctttttgatgtgttgattcatatcacagaatggaacctgtgttttgattcaccagattggaaacacttttttgtagaatctccgtagggtcacttttcagcccaatgaggtctttatggaaaacctgaatatccaacgattaaaactagaaacaagatatctgtgaaaatgctttgtgataagtgtattcatctcacagaatggaacaggagttttgattggtcaggttggaaacactcgttttgtagaatctacaaaaggacatttctgagcccagtaaagcctgtcctgaaaaaccgaatatcccacaataaaaattagaaacaaactgtctgtgaaaatgctttgtgatctgtggattcatctcacagaatggaaccagtgttttaattcaacagtttggaaccactactttgtagaatctacaacgtgacatttctgaacttatttaagcctagagtgaaaacctgaatatcccatattaaaaaatagatacaarctatttttgaagattacttgtgttgtactgatttttctcaaagaatggaaactgtgttttgattcaccaggttgaaaacactcttttggtagaatgtacaaagggacatttctgaccc

SEQ ID NO: 906749 - DNA, 566 bp, Homo sapiens
cggacaaggaggcagccttgtcctcaataatggattaaggagaatcattaattaatgattaattaatcctctgtaatgacagagtccatggccaggagcaacaaacatggccaagggcagaaggagaccaatttcatctccatcagattcaacaataacaggcaatgcctggagatacacagggtaagacatatcagcaagagccagtgaaggccacaggatggcctgaagaccagaagggtttccgccccaccgccgtgagaagacacaggcttccccctcctctagcctccatcttaaaaaaaaaaaaacaaaggaagccggcttgatggccaacgcttgtcatcctagctactcaggaggccgagttgggaggatcgcttgagcccaggagttcaagaccagcgtgggcaatattgcaagaccccatctcaaaaaaatttaaaaagttgraaaaaatcaaaggaggagagtggatggagaaaactttcaagactgagcatttatcaaagagaacctgagtttacctaaaaaacaatttggttgtttttcttttttaactttta

SEQ ID NO: 906750 - DNA, 590 bp, Homo sapiens
ttccatggggcattccagaaccattcccccgtggatatcgagagacagttacactatcaaacatcctagacaggccattctctctaaaggataactgatcaggataaaggcagtctgacagaatatggttctatcatttcagttacttgcagaacagtaacacctcccgttattaccaacaaacacccaaagactcagggctgcccatactcagcaggcagtagcaaaaccctaactgccataggaacagaacacagtcctgctcaccaggccacatcctgctggggagtctattacatccccaaactcaggatgccctccacttgtgacatccaccaaaccccacacccaccccatcccagtcctgtgctaagtggaatggtctttataggctgggctagtcctgtcccatttctgccaagagcataatatcctgttgttgatctcaattaggaaaactcaatttgaaatgggatccctaggtatagttaccaaactcactctttattaaatactttctgataccaaaatatctggtcttatacctaccaytcctgttacaatcatgcagctgcctgaagcacagccag

SEQ ID NO: 906751 - DNA, 662 bp, Homo sapiens
aaagcatttcgcgatcttcaacaatttgtaagtgtaaaggggtcctatgacttaaaagattgaaaaaccctgttctacctgaagtctgaacactttgtcatctttacacaagaattcagatgtacagaaaggtcatgggaggtatattggggtgggagcccttcatctgaagggcatcagcctgctctggctctccataggacaaatcccatagctaactgatggtttggcaaagtaagatcacaaatattcaggactccaccttcacatgcccagacacctctggaatacacttcatctgcaaaaaggatcaagctttgactaccgtggatactgtgagttcatccaaatgaacaaataagtgaaatcaacaaaaatctccccctctcgacgacaaaagtcaggagatgccaaagtatatctgtaggataacctccaactagctccgggaaagcttctgcccagtggtgacagcagcctacatgggggtgaggctaacaggtcagatgctcgaacaaacaaaacatttcagacctagtagcacacrgagactccagactgctcagggcatgccagttacagtagactcatcaggcttggtgaaaggctggctcctcagccctgagcttttgttgtatattttaattcaggaactgagtcac

SEQ ID NO: 906752 - DNA, 593 bp, Homo sapiens
caagggaccctcctactcgagttattccgggtacataatgatgccaaatatgaataacgacccatacatgtcaaatggatctctttctccacccatcccgagaacagtaagtaacatgctgatgttgcaaattatgttcagaagtgcaaattgatttgtattttggcagaatgtttatttttccaaactcattggtaatgctttcattatatataactagtcgttgctaaataagagctgttatgaggaatggccaccttaaaacagtgctacctttgatgtcttgcctttgaaattttagcttttggcttattgattaaaataaatatgtaacagatcataagttataaaatcaagtgaagttacatcaacaaatccctgattttatgagtattgtgcattctatgctgatgagaggaaaaaattgatttactttttcagctaagtaaggactgtatagcttttaatgcccacaagctttctagaatcagagctactttagctcatttggagctgaatgtttgttatgttactttggcttttcaaatggtgtcttrttttattgtatcggccaatgtttccttaggatcggt

SEQ ID NO: 906753 - DNA, 582 bp, Homo sapiens
atttataattcctctcactccctcacctgcatgatgggtgaggaaccaagcgcccccrgcgctgcctcagtacatacagactctcactgtctctctgaaagaactgccccatgacttggggagtctccctggtttcagtcaccccgtccactaccttctacccaaagtgatttttttttctttttttgagacagagtctcactctgtcgcccaggtgggagtgcaatggcatgatctcgactcattgcaacctccgcctctcgggttcaagcgattcttgtgcctcagcctcctgagtagctgcgattataggcacgcaacaccatgcccggctaattttttgtatttttagtagagacagggtttctccatgttgcccaggctggtcttgaactcctgagctcaggcaatccacctgcctcggcctcccaaagtgctaggattacaggcgtgagccactgtgcccggtcccaaagtgatttttttttaaatacaaatctggtcattgcctattcctgcctaaaatactctctaatgaaagatccagaagggtaaacattaaactcttacctgtagggaatg

SEQ ID NO: 906754 - DNA, 576 bp, Homo sapiens
aatgaatggtgctgagataactggctagccatatgcagaaaattgaaactaaatccttcctttataccatctacaaaaatgaacttaggatggtttaaagacttaaatgtaaaacccaaagctataaaacctctgaaagacaacccataccatagcattctgggcatagaaatgggtaaagacttcatgacaaagacaccaaaagcaattgcaatgaaagcaaaaaatgacaaatgagaactaattaaactaaagagcttttgcacagcaacggaaactatcaacagagtaaacatttgacccagaaatcccattactgggtatacccagaggagtttttcatatagaatgatacaaaatgtttgcaaactatgcatctgacaaatatatctagcatctataaggaaattaaacaaatttacaagaaaaaaatgaacaaccccattaaaaastgggcaaagggcatgaacagacacttttcaaaagaagacatacatctggccaaccagcatatgaaataaaaaaagctcaatatcactgattattagagaaatgtaaatgaagaccacaatgaga

SEQ ID NO: 906755 - DNA, 623 bp, Homo sapiens
tttcttggggattttaagatgctctgaactactttatactccctctaattctacctagttgccatttatcttaatctgactttgttgatttttcttggtatttcactactcaagtgaagctttcaagactggctcagaccacttgatttcttggaaatttgttgtaatcagcagtaatcatgaaacttgccactttatatatcaaagacttaaatcttcccaacactaattcctaaatccctctctctctgcattctcccctggtgtatctcaattagtattgctatgagaatatcacttcctccagttcttactttcatcaggacccaaaatgaatttaaatagacttctccaaaaaaagaaaatggcagtgacgcaagtctgttacagttcacttctgcaggtgtttctcagaagtctgtgcaaattctattcattttactgcatcagtttcttattctggtgccctcaccacaggtctgacagtaactcttttgacgactactgtcttagtctgtttgtgccacttgccataacagcatwcctgagactagataatttataaataacagaaatttgtttctcaattctggaccctgggaagtccaagatcaaggtgctgg

SEQ ID NO: 906756 - DNA, 630 bp, Homo sapiens
ggaggatgggtgggaagatggaaatctctcatttttttgtctttatgaacctgggaccaaaaaaaaaacgaggaactttacctataaattagattgtgttgtgattcataaaccatgctaattttataatttaaaacattggaattagttatgattttaaaaatttttaaatagaactcaaaaagaaatgttttcctcatatgattgatgttttaagtgtggccattgtttccaagcaaaaatgacatttattcaattgtattaaatgagatttcttagtaggctatttttacttgattctatgtcagtaacatgtgaaataagcattagaggtgtgattaaattattggagagaaaatagttatgtgaatatttgttttcttggacacatttgaattactatatttttcccaagcacactttgaagtacattttaaaaaataatttaacatcagggttgcactacctctctatcttgtaattccatgttacattggagctttttaaacacttatttgactctctcttctsgaaactctttcttcagttgtttttcatcttattattctctcttgttcctccttattccaagggtcactctatcattggctctttggctgattcatatat

SEQ ID NO: 906757 - DNA, 622 bp, Homo sapiens
aaaaacttgttccatagtttgacaccawcctaagctaacttgatcgtcctgtatagttcacatcagcataattgttcagctcaaacccaactcttctttactgattttcaaacacatcatgcttatgcttgaactccaggttttcattcacacactttgtgtgtcctaattttctttcccccttacttgtctaaatactccctttgtctatttagcactgccattataacattgatcctattttatcctaattaatgtatatatttttatctctctaataatggttcatacaatgtcatgcctgaaacatcattattcattgtctctgatccctctggattctacaaagcccagaagaagagatgctttcccctatctttactcattttatagcctttagcataagactagaaaaataagtattctgcattttagtgtgttttgtttccatgtcaaacgaatgtatcccctttcaagttgtgtattcagaaataattcacttcatgaatagctgaagtccgcaagattaaatggttgtttttatggaattgcctccattaatttcccaataaatcatttataatcttgtatgcctattaaacatgatagtctcaatcttagt

SEQ ID NO: 906758 - DNA, 562 bp, Homo sapiens
aaaccaaggcagtctggctcagagtgtgtgcacccaactactactacacactgccacttttcagacaggaccatggatggttgaatagagacatactcatygcagccacagggaggggcctgaggaagccccagaggctaaagtagcctgggtatgttctaggaatgttgcctaggtaggaatactgtgcatcccagcaaagacctggttgggtgacttaagcttcatccacaagtatctgaagagtattatggatcctcactgaataaataccttgctgctgcatctcacctaggatcactggacagatagttggctgagccgcttgctcacatgtcagtgctggcagttgagtctgagattagagggtggtatgttaaactgctggtgctttttttgtccactgtagccgatcacatcaggcatgcccctcccatatgtagtcccatgggcttctcagcatgcctcaatgcacctgctccagaatgtgttttcccgtctcttggtgatgccttccaagtccctcaaagtcaattttgcatgtgccacccatctatgcatt

SEQ ID NO: 906759 - DNA, 622 bp, Homo sapiens
aactcaaattcccttatggaatttttcttaagcagtcagaaattgaatgctttaaatctygaggagatgtttgtctgttggtaagtgctccagctgatgggacctacttcaagttgcagtatcctgttatgccttctgaggccagcaacctaatcagccgggggcagctgcccattcccttagccagggtcctggtggtctgaaaggactggggccaagtcatgagacagtgcctccagaggacaaggtgggaatggcagaagccaggaaatttagtgactcccaatctggaagactccatagaggcaaactgcccaggtgaggccagaaattacaagagcttcgctcagctggagtctttgggcagggagcagactttctcaggaagagaagcatcctcatgttcatccctaagctggggacagtggggacagagggcaggtgtagtagctccaccttctgaaataaaaatggatgtttgatggttaccagggctttcctcagctacgtatgaggtggtcagagactctagacccaagaccagaatgataaagacctgcagggcttttgcttctgtcctctcaccctccccctggtccctagagacacctgcagtgaaatc

SEQ ID NO: 906760 - DNA, 581 bp, Homo sapiens
ggaactacatctccagaattctctacatagttctgggttagctgggccacaaccaacaattgtgtgagattaggaaggtgaacgtgaagtaggagccgtattcactttacactcacaaggttggtgcagcacacaaggcattggtgcttggtacctgctgttactgttctgctggcttgcctggttaggatgagacagcagctgggtctgtagctcctccagattctgctgggccaatgtcttctgcttcactgattcctgggctagacacacttcagctacatgaggaaaagtacctatttctcccaccaatgccactctatggaggcttggggacagtgagaaactggtgtaggttttaacctgtctttgcaggttccagttttgctgcccccagttcatgtccatctttctttcctcattgcctgcctttctgatttcagattccagcctgaaacacagaaacaatagctgtacataaacatttaaccagctcccacaattgtataaggtccaatctgtataatayatcctcattttatataaaccctaatgtttcttctgctcttatcaaatcttta

SEQ ID NO: 906761 - DNA, 597 bp, Homo sapiens
ccaaagtgctgggactacaggcrtgagccacctttcttcttttaaagactgaatgttatttgaatgttattccattgtatgtatataccaccttttctttatccattcatgcatcagtaggcgtttgcgttatttccatttcttggctattgtgagtaatgctgcaatgaacatgggtatacacacaccttttcaagatcctgctttcaattcttttggatatatagccagaagtggaattgctgggtcatacggtaattttgacggaccaccatactattttccatagcagctgcaccattttacattaccaccaacagtgcacaagggttctaatttttccatgtccttgccaactgttacttttttttagtggccatcctaattggtgtgaggtgatatctaatgtagttctgatttgcatttctctagtgattagtgatgttgaacatcttttcatgtttgttggccatttgtatatcttctttgaagaaagtctattcaagttctttgcccattttaaaattgggtaatgtggtttttgctgttgttgggttgtagaagttctttttatattctggatgttaaacctatata

SEQ ID NO: 906762 - DNA, 599 bp, Homo sapiens
tcttcaaatctgtccatttttgtttcatatacattggtgatctgatgataaacatgtatatatttataattgatatatcttattgatggatggacattaatcactacataatgtcctgtgggcccagcccccgccgatcagtctgctccagcttctgtatgacagtggcttcctcatcaggctcctttcctggcctatggctggcccctccccagtagggccatcatgtccccaggtaacatccacgtggccccctgggcagcacatatcattcctcagttgctctcactagaagccaatacttcaggccccacttcctaaggtctggaaaattatggcagcctaataaaacaagctgataaatttaagactggtattatttctctcccagttgtttgagaatattcagcagggaaagtatttgggtctgtagttggctctgtaggaaagcttttgatgttagattcaagttatttaatcaatatgggatatttgtattttttttccttttgtgtggattcggtgtcttgacaaatatagacagttgtgtctccaccaacrcaatcaatacatagactcctctcatcatcccatacatt

SEQ ID NO: 906763 - DNA, 589 bp, Homo sapiens
tatgtttggggtgtttgtcctcttcaaatctcatgttgaaatgtaaccgtcactgttagaggtgagacctggtgggaggtgatttgatcatgggggtggatccttcacaaatggcttascaccatttcttggtgatgttctctcccagttagttcacatgagaactggttgtttaaaagaatctgagacctcccccttctctcttttgcgccctctcttcaccatgtgatgtgctggctccccttcactttgtgccatgattgaaagcttcctgaggccttcacaagaagctgatgctggcaccatgcttcctgtacagcctgcagaaacgtgagccaaatcaaagcctgttttctttataaattacctagtctcaggtatttctttatagcagcacaagaatggactaacacagagtctgtgggaaataggactcaaaaaattggtggcagggtgaagtgtcacccaaatactggccatcaggcaggaatatggtcagggggagtaggctgctcttattttctcactcaaagttcccacagcctactttcagctctcgggaatgggtgagaacaaaacatttttgtgg

SEQ ID NO: 906764 - DNA, 621 bp, Homo sapiens; identical to SEQ ID NO: 903526

SEQ ID NO: 906765 - DNA, 654 bp, Homo sapiens
tcaaaaagaatttggggaaaaacaaaaaggaaataattatagaaactacaaacagcataaaagtcgtcatgtccaaagtgcaggtttcagattctgagaatcccattaaatccagggaaaagctcactgagttccacattctttgattcccggaaaactcttgatcctgctggcgtaatttaccaggcgccctgcctgccccttccctccagccctgccagtctctggccatgtgatctcccaggccagctcaggccactttgccatctcagtccatctttcacctttcacaagtcaactccaactctcccaaaatgatagcttattttctgtgtttacccctagactcactaagctctctccccctagtcacatccccccttccatctgaaaggaaataggttcactgtcttgaggagcaaaacatccttagttacccaagagtgaactttgagactttcagcttcacctactaaggagtcttcacaaaataggacccttcctccaacacacataccaacaaatgaaccaatgggcttccgaaagtctacattatgtataataattcctttatacrttaaccttccgatcccttcaaaagagttatttttcttgttgctgaccaagaagaaatgccgggagaaaacgcagagg

SEQ ID NO: 906766 - DNA, 586 bp, Homo sapiens
ctcacagcatttaagttttgtaggctccttttactatttgtcattattaacacattaacacattcctatacattaaaacacgttttgtagataccagttttgatggctttatratattccagttttgtggttgtgtgattatttaatgattaatttctttgttggacaggtgcattgcttcaatcattcaacatcataaacaatgttgtgatacatatctttatacataaattgttgctatttttgtaattatttccttatgatatatccccagaagtttataagcattcttaaattagtattttattaaaggacaaaatatgctatcttagcagaaagaagaaagaaatatccaaagagctaattaattaaattaactcagatttcaataatggaaagcatagaaaaacatatccagggactaatagggcttactttttagtgcaggttttagaaatattgttaaagtacttttatggtaatctggaaataaatgtgcagatttttaaaggtaaaaaacttacagctcattgaccgcaatgtttacctctgcagaaggcctaggactagagatggtcatcaagag

SEQ ID NO: 906767 - DNA, 524 bp, Homo sapiens
gaccaccagatgtctgtaaatgtcacttgaggaagccctgatctataatacatattgagaaaggagaattgaggcagcatttgggttaattaaaattacactgaagtgaaatagctaagctaagagaagccactcaccactgtcctgtcttcatgcatatacttctttctgcatattattattattattatttgaaacagaatctcactcagggtagagtgcagtggcacagtctcggctcactgcaacctctgcctcctgggttcaagcgattctcgtgcctcagcctcctgagtagcatggattacaggcacctgccaccataactggctaatttttgtatttttagtagaaacagggtttcaccatgttggctaggctggtctggagcttctaacttcaagtgttctgcccacctcagtctcccagcgtgatgggattataggtgtgggccaccatgcyggtcccatgtatttctgtctgagtagatgctcagtgccatttcctagcactgaccttggact

SEQ ID NO: 906768 - DNA, 610 bp, Homo sapiens
aaacagagggccataccattgcaatatrgtatatcaggaaataccagaaggtgtgatatcaactgtcttagtccattggggctgctctaacaaaaataccaaagagtaggtggcttaaataataaacattaatttctcacaattctggattcagggtaatccaagatcaaggtgccaacagattcaacatctattgagtgagggctttttccagattgagagacagcatctttccactgtgtccttacatggaagaagttatatgagagctcattggggcctcttttacaagagcactaatccaattcatgaggactctacggtcttgacctaatcacctcccaaaagcgtcacctcctaaaagcctcacctcctaataccatcaccttgggggttaggattcaacatatgaagttgggaagacacagtcagacatagtaccaactgtacgtagaaccacaaaacgaatgcagagtaaggagctgcattggtaatagcatctgccttacaacagccaccaggagggcttagcgctttcaaccaccaaatactggctgtgtgcttgtgtcagacattctgtcagggccaggaagggcgcaaatcttaacca

SEQ ID NO: 906769 - DNA, 628 bp, Homo sapiens
tctgagctagtgtgttgagtgggtccctatcccaagagtgggccagccttttgtgccaacactttcgtatgttctgatacttttctattcattgtcaagaatgtaatatctttcatggttttttttttttaaccttgacttttagttttggcagttgaggggtgggaaacatcaaagaaaaccaaccactaatactgataatgaaagtgaaagtcgaaggatatgaagggtcttagccacaaaataactctacaaatttgttagccctgtacttatagaaaaccattaaagacacaaaggatatttaagtatatcggttatattttactgtgttttatggggaaattatgtgctgcagtggaatttgtaactttgaaaactctcctaggtcctagaaaacacagctcacaaatgtcaagaatgtactaaatttacaaaatatctctgccactaccaaaaccacaaaagtatgcttaatcttgtaagtattgagtaataaaattttctaaacattcctactcagtttattgagtaatttgcattctcttgaaacactatttcatcctgctaggacaaatgcaaaagctaataaraaattaactctattatgttgcatcaaatacccaat

SEQ ID NO: 906770 - DNA, 647 bp, Homo sapiens; identical to SEQ ID NO: 900226

SEQ ID NO: 906771 - DNA, 603 bp, Homo sapiens
ttgctttccagactggaaagaaattctcayatgaagaatgttagtaccgtgcccccacccctgccacatcatagcaagccaatggacatttaccaccccgctcccccgactaacagaaacctcattggaagaaaagtgaaggctttccattctctgttacaaccttaagaacctgagactgttctgcaagaggaacaagaagacataatgttttttcttccttaaataacagacaacaccaagctcagagaaggctaagctgtacaggtggagattgtctacgaccatttgaggttttagacactgagagattaaaagtcaacaccatgcttctttttctgtcagtcctgactattgggcttcagagttaactatttatttcttcaatgagaggcccttatggagaagccacatttgcagaaagaatttatgacatttctgtaccattgggttaaatcagagagatgttctctagttaactgaccgaagcctgccatctcatgtcattttcacttttagatttcctggaacctctttctttcattaaaaaaagaacaaattcctatagtttattgtttatatacattatggaaaaatcagaaa

SEQ ID NO: 906772 - DNA, 628 bp, Homo sapiens
tgagtggatgaaggaaagagttgtcagaaattaactcagacaagtttggggaaatcaggtactgkagaaacctttaatttaaataagatggtaagtaattggaggatctgaagcaatggaggggcatgatctgacttacatttcagcagggtgactgactgctccatcacgaaggtggtaagggtagaagcaggggaaaaaatgagcagaatataacataagcctgggtgcaagagattaatggggagtagacttgagagattctagaggtggcagtgagaatttgtttctgaatatattttaaagttagagccaataaaatttgctgatgtgttaaatacataaggcaaaagagaagtagaggagttaaggagagtccccaagggttttatactgagcatctggaagagttgctactaaccaagacagcaagagaagcaggtttggaagaaggagcagaaatttgtttttggacatgttacatttgagatgcgtattagacatccatgcagaaattttaagtagatagttgtgtttatatgtataggatcccagaatagataagtttggaagtcatgaggatatatacatacatagtaagaaatgccatgatagtacacatagagga

SEQ ID NO: 906773 - DNA, 607 bp, Homo sapiens
gcacacctaacaaaatagctaaaatttaggaggctgacagttccaagtrtttgtgacaatgacaaggaagtggaaatcttacactttgctgacaagagtgtaaaaaggtttaaattcattggaaaactgtttagcagtatctgctaattgggacactcaatacgctttgattaagcaatttcattgctttctatttacttaatagaaatgtgtacatatatatattctccaaaagaaaaatagaagaaggctcctaacagcattatttttaatgaagcaaaaactgaaaacaaccgaagtggccatcagtaataaaatgaataaataaactgtggtatagtcatagcatacaatactacacagcaagaagaaacactattatttcatgcaacaatatgaaactcacaacccagatgttcttcagtaataaaatgaataaataaactgtggtatggtcatatcatacaatactacacaagaagtagaagcactaactactactgcatgcaacaatatgaaactcactatcataatgttgagcaaaagaagccaagcacaatagaatgcatacacattataccacattattccatttttcaaataccag

SEQ ID NO: 906774 - DNA, 589 bp, Homo sapiens
aggcatccaaataggaagaaaggaagtcaaactatccctgtttgccaatgacatgattctatatctagaaaaccccatagtctaagcacaaaagctccttaagataacaaaaaaaaaaactttagcaaaatttcatgatacaaaattaatgtgcagaaatcactagtattgttataaaccaacgacagccaagacgaaagtcaaatcaggaaggcagtctcattcacaattgctaaaaaaaggataaaatacccaggaatacagctaaccatggaggtgaaagatttctacaagtagaactacaaagcactgctcaaagaaatcagagatgatacaaacaaatggaaaaacattccatgctcatggatagaaagaaccaatgtcattaaactggccatactgatcaaagcaatttacagattcaatgctattcctgtcaaaccacctatgacatttttcacagaactagaagaataaactattaaaagtttgtataaagtttaaaaaaaaaaaaaagtytgaatagcccaggcaatcctaggcaaaaaaaaaaaaaaaaaaacaaagcaggaagcatcatgccactaaa

SEQ ID NO: 906775 - DNA, 660 bp, Homo sapiens
agttataattacagaagctaaatattgtatatattaatatgtcaaatcctcacaataaccctgcaaggcaggtatcattcatacagatttacagatgagggaactgaagcacaaagagattaatttgtccaaagtcacacaaccaggaaataatgctggctacatttattgagcacctactttgagctggcaatgttctaaatgctttagttgccttaactaattattcatcttcatgaaaaccttgatccttataacactgtaaagatactcattttttggttgagaaactgaagcagagagatcaagtaacatgctctatgtcatccatctaggaaatgctgaagtgaaattcaaacacaggcaacctagctccagagtctacactcagtaggctatactgtctctctaaatattaaaacttagattcaaactcagatctagctcaaagacatgacttttaaaaatgaatttcctcattgtttaaactataccatatatctcttttagtagagcaaagtctatcagaggagcaaaacacaacttataagcaaagtaaatatatytcagtgaaaatatatgtagaaatacaaatgattgtttagagatgtgaacaatgataataatccatcaaatatacacataaacacatgctcattc

SEQ ID NO: 906776 - DNA, 622 bp, Homo sapiens
cttccttctggacctgaggaattatgaagtaamaaatgttcatgagtctccaactaagataaatcttgtgaaacctgggaatatattaaaaaccattgaattgtatacattaagtgggtaaattatatggtacatatattatatctcaattaagctgaatcttttcattgagataaatcttaattttttctgcatacccattgctagtacaatgcccagaatagagcagctcaatatatttatgctgaaataaacagaaaaggataaaataaatggggcagggcaggaaagagagctcttctttacctttcttctagatcccttccttcctccaggaaagatgttttatctcacttaatgtttacaagaattctgtgaagtgatgcagaggaaccccttcttttagatgccagtcatggctagtatgtggctccttggaatgtccagttcattctccacttgtgtgaatgaaaatgcagagatatatttgtcaaagccatttaaacctcttaataaagtccgtattagacatctgaccaaggcttttatgaattaataatcaccatttgatcaatcatacttcagttgcttttatttcagatgccaattattgtcacattat

SEQ ID NO: 906777 - DNA, 651 bp, Homo sapiens
attatgtctgagaaaataacagaaatactttaattaaaaatatcttaatgctagaaaatgctaatgatcatctgagccttcagggagtcataatcttttagctggtacaggccttgcctcaatattgatggctgctgaataatcagggtggtgtttgctaaaggttgtgatggctgtgacaatttcttaaaataagacaacaatgatgtttgcctcgtcaattgactgtttcttttacaaaagactcctctgtagcatgtgatgctgtttgatagcattttagttacagtagaacttcttttaaaaatagagtcaatcctctcaaaccctgctgcagttttatcaagttgatgtaatatcctaaattatttgttgtgatttcaaccatgttcacagcatcttcaccaagaataaattccatctcaagaaatcactttcttcgctcatccataagaagcaactccccatccatgaaagtttgatcatgagattgtggcgtttcagtcacatcttcaagctccacttctaattctagctctcttgctaattccaccacatatacagttactttcttcactgaagtctcaaaaycctcaaagtcatctataagcattggaatcaatttcttctaaaagcctattaatatagata

SEQ ID NO: 906778 - DNA, 590 bp, Homo sapiens
ttttgtaatttattgaattttcaaagtcaattttgttcagaccattttyttttttacaaagtagcttaaaggcacttagaaactgacagtattggatatttcatacgattttttagaattgcagtatctgccatttatctgaggactggtgattcaaaaactctgtttttggttaattttaattaaaaacatgtccactcaaaatactgctcaatacccaaatcattgcctaccttgtatatagttatttttcctaagggcaaaatagctaagaccataaattacgatggcaggcacatggtttgctgacagaactatataaaatactgttttcatcctcatgtcagctctggtacatgcctctttactttaattccttggggaatctgttgtaagttatagttttaaaaaacatccctaccccactagctctgtcagcttacctttttctgactgaccattttatttctctgaaagaacagatagaaactgagttatgtcttagctgaacttgtagtgccctaaatattaatagctgtgaaccagtttagtttaatttggatatttcccaatcttacacctgcgatatt

SEQ ID NO: 906779 - DNA, 587 bp, Homo sapiens
cagattttaaaaaaattgtttcattaatagattagtaaaaatttaatactgctgttcattgtagggcttagtaagccattactatgatagatctttatttttgttttctttaagtctgtactggacattgaagtctctctatggtctctggacttacgtcttggccttacagactgtcctgtttcacctttgcctcagtctttgcagtaatctccctcactgagaagtctggaacatgccacatgttcacagtgaggctgttaaaacttccagccccatccaaaacctagacttggaaaccattgtcgcattgctttctgagtccacagatagcaaatgtgacaagtcaaaaatgatgcctaatgttgagcaaggagtctttaaaaagccctactcatgtttctaattctcacacccatgtaattcacaggcatctgtccacaggtagtttgagaacctaactatattaaatttcaatattcagcaaatagctcataaccaatcatatctgaattagaaaagcatgtgtaaagaacaatagcaccaactagyactcatagcagattattccagctatgttataataa

SEQ ID NO: 906780 - DNA, 625 bp, Homo sapiens
tttcctagctctgggattccctggattcctttcccagttccaggcaccaacttctggccctcttccttatctaggtgacacattcaracactcctcagctcccctctcagctccacatttcatggggcaccttcagtccaagtgtgagggggtctcaaatatgactgtgctagcagcaattattataaacacgctacgtgctaccaccaccatctgcatgcttctttacaaaataccttttatgtctatgaaagcttggtcatcctcacaaatgaaggagacaggttcacagagttatagtcattcagctagaaatggacagagccaagactcaaaagaagactcacacccacatctggcatctcccagtgctctttccactaattcaagctacctccaataatagagcaatgatgaataaccaaccagcactgtctgttctttattattacataggttaaaccctcacctgttttcatcaaactgaactgaaaccttctcaagagttacccagttggttgagaaatctgtgggtcattgccaagtacggtcttaggatcaaggaaatgttaatttatgtcccaattgtttggagatcactggctacagttagtggagacataag

SEQ ID NO: 906781 - DNA, 571 bp, Homo sapiens
acatctagtaggagtataagatatctttcacctcctttcttacagattcccagaaaactcacatgtattctgtacattggtttgctgtagctgcmtaacaaactataacacccaaaacaacaggcattcattatcacacaaaactttggtctgaatgttgttaccactgtaatttctgccctattcagcaacttccagtgataagaaatgatcttgaacagtattacacaacacaagccacagtcatggtttctctaattagaactcttcccctaacaaagtaatttttaatgaaagagcctaagtttactagcaaggccgctaaaggataatttagtaaagtttctcaaaggaaaatactaattttgcatcatgtgacacaaaagggcctgtaagcaaatactttaggaataaagtttatagactatttctcctatgaagattcatagatcacaaatacatatttaggtctttgagaagtgttctagtgaagacatagggttatacatgcccagctgagtttgtagcactgccattcactacctagatagtgtcaaatttcttgattttc

SEQ ID NO: 906782 - DNA, 571 bp, Homo sapiens
acatctagtaggagtataagatatctttcacctcctttcttacagattcccagaaaactcacatgtattctgtacattggtttgctgtagctgcataacaaactataacacccaaaacaacaggcattcattatcacacaaaactttggtctgaatgttgttaccactgtaatttctgccctattcagcaacttccagtgataagaaatgatcttgaacagtattacacaacacaagccacagtcatggtttctctaattagaactcttcccctaacaaagtaatttttaatgaaagagcctaagtttactagcaaggccgctaaaggataatttagtaaagtttctcaaaggaaaatactaattttgcatcatgtgacacaaaagggcctgtaagcaaatactttaggaataaagtttatagactatttctcctatgaagattcatagatcacaaatacatatttargtctttgagaagtgttctagtgaagacatagggttatacatgcccagctgagtttgtagcactgccattcactacctagatagtgtcaaatttcttgattttc

SEQ ID NO: 906783 - DNA, 659 bp, Homo sapiens
cccacatagtaagtgataacatgtggtatttakttctctattcctgcattagtttgcttaggataatgatctccagctttatccatgttactgcaaatgtcgtgatcttattctttttaatgtttgtgtagtattccatggtgtatatgtaccatatgttctttaaccagtctaccattgatgggtatttgggttgattccatgtctttgctattgtgaatagtgctgcaataaacatacatttgcatatgtctttatggtaaaaatgaattatatccctttgggtatatattcaataatgggattgctgagttgaatggtaatgctaagttctttgaaaaatcaccacacggctttctacaatggctgaactaatttacacgcccaccagcagtgcataaacattctcttttctccacaaccttgccagtatctgttattttttggctttttaataattaccactctgactggtgtgagatagtgaggtagtcaaagtcattgtgattttgacttgcatttctctaatgattagtgatgctgagcatttttcataggcttgttggctgcatgtacatctctagaaaagtgtctgtttatgtcctgtgcccactttttaatggggttgtttgtttgtttcttgtatatttgtttaagtt

SEQ ID NO: 906784 - DNA, 663 bp, Homo sapiens
aaatttgactattctagatatctcacatgagtggaattatataatatttgtccttctgttggtttatttcactcaacttaatattttcaaggttcatccatgttgtagcatctatcaaaattccattcctttcgtggctgaatttttttaaatttaatttaatttgatttgatttgaagttccaggatatatgtgcaggacacacaggtttgttacttaggtaaccatagtggtttgctgcacctaccaacccatcacctaggtattaaggcccacatgcattagctatttatcctgatgctcttccttctcccacatccccaacaggctccagtgtgtgttgttcccctccctgtgtccatgtgttctcattgttcagctcccatttataagtgaaaacatgcagtgtttggttttctgttcgtgtgctagtttcctgaggataatggctttattccattgtatgtatatatcatattttgtttatccatgcatctcttgatggacacaggttgtttccaccttttggctgttgtaaatgcaaattgtagtayacaaatatctgtttgagtccttgctttcaattcttttggatatacccttagcagtgcaattgctgggtcatacggaagattttgaggacctgccacgctgttttccaca

SEQ ID NO: 906785 - DNA, 585 bp, Homo sapiens
ctaaatatgtatgcacccaacacaagagcacccagattcataaaacaagttcttagagacctacaaagagacttggactcccacacaataatagtgggagactttaacatcccactgttaatattagatagatcaatgagacagaaaattaacaaggatattcaggacttaaactcagctctggatcgagtggacctaatagatatctacagaactctccaccccaaaacaacaaaatatacattcatcttattgccacatggcacttactctaaaatcgactacataattgaaagtaaaacactcctcagcaaatgcaaaagaacaaaacaataacagtctctcagacctcagtacaatcaaattagaatttaggattaagaaactcactcaaaaccacacaactgcatggaaattgaacaacctgctcctgaatgactcttgggtaaataatgaaattaaagcagaaatcaagaagttatttgaaaccaatgagaacaaagamacaacataccagaatctctgggacacagctaaagcagtgttaagagggaagtttatagcactaaatgcccacatcagaca

SEQ ID NO: 906786 - DNA, 648 bp, Homo sapiens
cttgcagacctctgctttggataagcgcagaaccgtgggccctatagtttctgcccttcccctagttgtgtaaggcttttcacatgagagaaaaatctggggtggtatgtgggattttgtgcctgttcctaagggcagggtctcagtacctgcacacctgtggaaccaaagggggctttctctggtcaacttctctgtccccaaaatttctgataagtactaagtaaaggtccctgggaaagaactcatggatgagcacagatttcccttgtgtctgaggctcccagttactctcaactatcctactggccctcacttgatttttaagaattagaaattttcactaatttcttcttcttcactttttacatgtttaattttttttaattgtggtaaaatacacgatattacatttaccatgtgaaccgtttttaagtgcacacttcagtgacatccagtaccttcaaaccgttgtgcaaccatcaccaccacccatctccagtagtcttttcacctttcagactgaaactctgtacccattaaacactgactccctatgcccccatcacccatccccttgcaamcaccattctactttctgtctctatgaatttgagtcagagacacagaagagaaagccatgagatg

SEQ ID NO: 906787 - DNA, 587 bp, Homo sapiens
tatatatatatatatatatatatatatatatatatattttttttttttttttttttttttttttggatggagtctcgctctgttcccaggctggagtgtagtggcttgatctcagctcactgcaagctccgcctsccaggttcacaccattctcctgcctcagcctccccagtagctgggactacaggtgctcgccaccacgcccggctgattttttgtatttttagtagagacagggtttcaccgtgttagccaggatggtctctatctcctgaccttgtgatctgccctcctcagcctcccaaagtgctgggattacaggcgtgagccaccacgcccagccaattttgttatatttatcaatatttatagctgaatacatgcaattagggaatgatccccaaagagcagtatttcaaataaatttatcaatgtggacacaaaagtatgtaagtatgttcttaaagggaaacatgaaatgaaaaatgcaaatttccctttaagaaaagaagcacctttaaactaagagaaaattggggcaaaaacatttctgtccattatgtaatatgtgtaaattccttcttttg

SEQ ID NO: 906788 - DNA, 696 bp, Homo sapiens
aaaaaagaaaatttcaggccaatatccctgatgaacatcgatgtgaaaatcctcagtaaaatacyggcaaaccaaatccagcagcacatcaaaaagcttatctaccacgatcaagtcagcttcatctctgggatgtaagccttgtttaacatatgcaaatcaatgaatgtaatccatcacatgaacagaaacaatgacaaaaaccacatgattatctcaatagatgcagaaaaggccttcacgaaaattcaacaccccttcatgctaaaaagtctcaataaactaggtattgacggaatgtatctcaaaataataagagctatttatgacaaacccatagccaatatcatactgaatgggcaaaaactggaagcattccttttgaaaaccggcacaagacagggatgccctctttcatcactcctattcaacatagtattagaacttctggccagggaaatcaggcaagagaaagaaataaaaggtattcaaataggaaaaaaaggaagtcaaattgtctctgtttgcagatgacatgattgtatatttagaaaaccccatcgtctcagcccaaaatctccttaagctgataagcaacttcagtaaagtctcaggatacaaaatcgatgtgcaaaaaatcaaaagcattcctatacaccaacaacagacaaacagagagccaaatcaagagtagtc

SEQ ID NO: 906789 - DNA, 613 bp, Homo sapiens
taagtgtcatatatgacaaactcagtcaatagcatactgaatgggcaaaagctggaagcattctccttgagaaccagcacaaaacaaggatrtcctttctcatcactcctattcaacatagtatcagaagttctggctagggaaatcaggcaagagaaataaataaaacctatttggatacgaagagagggaatcaaattatctttatttgcagatgacttgattctacatccagaaaatcccattgtctcagcccaaaacttcttaagctgttaagcatgttcagcaaagtccaggatacaaaatcaatatgcaaaatcacttgcattcctatataccaaaaacagacaagccaagagccaaattatgattgaactcacattcacaatttctacaaaagaataaaatacctaggaatacagctaataacggaagtgaaggaccgtttcaatgagagctacaaatcactgctcaaagaaatcagaggggacatgacaaatgagaaacattccatgctcatgaataggaagaatcaatattgtgaaaatgaccatactgcccaaagtaatttacagattcaatgctattcccattaaactgtcatttatatttt

SEQ ID NO: 906790 - DNA, 612 bp, Homo sapiens
aagtgtcatatatgacaaactcagtcaatagcatactgaatgggcaaaagctggaagcattctccttgagaaccagcacaaaacaaggatgtcctttctcatcactcctattcaacatagtatcagaagttctggctagggaaatcaggcaagagaaataaataaaacctatttggatacgaagagagggaatcaaattatctttatttgcagatgacttgattctacatccagaaaatcccattgtctcagcccaaaacttcttaagctgttaagcatgttcagcaaagtccaggatacaaaatcaatatgcaaaatcacttgcattcctatataccaaaaacagacaagccaagagccaaattatgattgaactcacattcacaatttctacaaaagaataaaatacctaggaatacagctaataacggaagtgaaggaccgtttcaatgagagctacaaatcactgctcaaagaaatcagaggggacatgacaaatgagaaacattcyatgctcatgaataggaagaatcaatattgtgaaaatgaccatactgcccaaagtaatttacagattcaatgctattcccattaaactgtcatttatatttt

SEQ ID NO: 906791 - DNA, 566 bp, Homo sapiens
ttgactccagcatttatccactttctacacactatcttcctctttgcaaagttttaaattccagaaagtttagcagcctccttgctatctgatgctgattaattgggtggaatagagtctattttttaaatctcactcaaagtattcactgcaaagctgccgtgtgtaaataattgtgtgtgtgtaaaatagatgctttctgtaacttgtgagtaatgtattatgggtccaattgcattttaagaatcttttagcttatcctaaatcctcatggcacttttaatctagttttcattgtgtgtcagtaaataatcctggtgagcaagactaaagatcaagtgctagccctggctttgccatatatttgctttgtgtcctaggaaaagacatgtcaagcctctaaaacttagcttatttatctgtaaagtagagtaatacacataccctattcacctcacaggattgttgtatatgttgaatgagataatgaatatgaaaagcttaggaaaccacagtcatacatagaaatgtatcattgtaagwcaataggtgtttgccaggtccat

SEQ ID NO: 906792 - DNA, 636 bp, Homo sapiens
agataattgtggtttggaataaggtgttaacaacgggagataaacagtggccagattttatgtgaatcttccctttgatctgtggaccaatataacaagactggagagaacacacaatttcctccctggatatacatcatcactgttcatattttcttggagctcagtgtacacttctaatggcttcctttttataattgcagacaatgtacaataaaagggaaatttgattcacattcagtaagctctcagcttcttttgcttggattctgactgaccaatgagtgaaagaatctgaagaggagatttctgtacccagcagcgggtggaaatagatgaatgtgagcattctttctaattctgagattctgtgattctgtgatccttagtaactctggaaattgaatgttcaaagactgaaaagttatatatgatagtggcaccaattgtcacaataaattggaagcaaatactaatgatcatggatgtatttaaaatatttcacacctgtcytagcacagaccagtcagaacagatgccaactgtaaacagcaggcacagccatgcatcaggctgaatattagttgtgcttatgctcaggtacaaatcaaattatattttagctgacatggtctg

SEQ ID NO: 906793 - DNA, 613 bp, Homo sapiens
ttctatagtgctctagaatatgcctataattcacytttgctttcctttcagctttattaaggtacaactgacaaataaaattgtatatatttaaggtatacggtatacagtgtgatgttttactatacatatacattgtgaaatgattaccaaaatcatgctaaataacatctacatcatttcacgtggtttttgacgtgtgtatatatgagtggtaagaatacttaaaatctattttattagcaaatttcaagtccactttctttttaattaaaatgttatttcattctcctttgcacattcccattagtcatgtttatacattctcctccaagtttagctttgtagcatttagaaaatccaaagtcaaattaaaagcactgaaaaaagcttcaattttaagaatacataatacatattgttatcacaccatgtcacttgtccatcagaattaattatctctgaagcaataaaatgaggtgttgctgacttcttctgaagaatcaggtctgtaagcaagagacatatgctaaccagagagctcttttctctttatttttctaaaatttgtagtccaactgattacttctcctaagtgagcatcaaaactgca

SEQ ID NO: 906794 - DNA, 652 bp, Homo sapiens
gctgtgagtttgtcatatatgacctttattatgttgagtaatgcctcttctatgcctaatttgttgagagtttttgtcaggaggggatgttggcttttatctaatgcttttttctgcatctrttgagatgatcatatgatttttgttgttcattctactaaagtgatgtatcgtgttaattgatttgcatatattgacccatccttgcatccctgggataaatcccacttgatcatgttgtattatatatttgttgtgttgttggatttttgttagctagtgttttgttaaaaatttttgtgtctgtatttctcagagatgttggtctgtagtgttctttttttgttgtgtgcttgtctggttttgtatcagagtactgctggcctcgtagaataagttaggaagaattctctcttctttaattttttggaatagtttgagatgaattgatgctagttcttctttataaggttgatagaattgagcagtaaagccatgcagccctgggcttttctttaatgtttgatgggaatctttttattacatattcaatctgttccccattattggtctgttcagattttctgtttctatctggttcagtctttgtaggttgtatgtgtccaagaatttatctatttcctctaggttt

SEQ ID NO: 906795 - DNA, 579 bp, Homo sapiens
tagtttacagtgccaccaaccgtgtaaaagcattcctatttctccacatcctctccagcacctgttgtttcctgactttttaatgatcgccattctaactggtatgagatggtatctcattgtggttttgatttgcatttgtctgatggccagtgatgatgaatattttttcatgtgttttttggctgcataaatgtcttcttttaagaagtgtctctttgtatcctttgcccacttttcgatggggttttttgtttttttcttgtaaatttgtttgagttcattgtagattctgcaaaattcagcaacccttcatgctaaaaactctcaataaattaggtattgatgggatgtatctcaaaataataagagctacctatgacaaactcacagccaatatcatactgaatgggaaaaaactggaagcatttcctttgaaaactggcwcaagacaaggatgacctttctcaccactcctattcaacatagtggtggaagtgctggccagggcaattaggcaggagaaggaaataaagggtatccaattaggaaaagaggaagtcaaattgtccctgtttg

SEQ ID NO: 906796 - DNA, 588 bp, Homo sapiens
ctggccagggcaattaggcaagagaaaaaaataaggggtattcaaataggaagagaggaagtcaaattgtctatgtttgcagatgacatgattgtatatttcraaaaccccgtcatcgcagccccagaactcctttagctgataaacaactttggcaaagtctcaggatacaaaatcaatgtgcaaaaatcacaagcattcctatacattaggaatagacaaacagagagccaaatcatgagtgaactctcattcacaattgctacaaagagaataaaacacctaggaatacaatttacaagggcggtgaaggacctcctctaggagaactacaaaccactgcttaaggaaataagagaggacacaaacaaatgaaaataatttcacgctggtgtatagaaagaatcaatatttcaaaaatggccatactgcccaaagtgatttgtagatttaatgccattcccatgaaactatcattggctttctttgcagaatcagaaaaaacgaccttaaatttcatatggaaacaaaaatgagcctgtatagccaagacaatcctaagcaaaaagagcaaatctggaggcatca

SEQ ID NO: 906797 - DNA, 653 bp, Homo sapiens
agttttcatccatttactggatcccagtttgctttgatcttcttcaacgtgaatttgggctcacagaatcaaagactatgcttggtttaatgcttgcagtatgagttcttgaacaaataaaattaactattgtagtgtgtttctgaaaaaaaaaagggaaagcaagaaggtttaattggctcatgattctgcaggttgtacagaaagcatagcatcatctgcttctgaggaagcctcaggaagcttctcatcatggcagaaggcaaagggagagccgtaacatcacatggtgaaagcaggagcaagatactgagacgagaggtgctatacactttaaaatgactagctctcacaagaattcactcactattatgagagtaccaagggggaatactgctaaaccattcatgagaagtccacccccatgattaaatcacctctcaccaggtcccacctccaacactggggattacatttcaatataagatttggataggaacacacatacaaacaatatcaattataattgactgtagcccccctgttgtactatcacatactaggttttattcattctttctatttttttatacccattaactatccctacatcctccccaaccccctcctacmcttcccagcctctggtaaca

SEQ ID NO: 906798 - DNA, 635 bp, Homo sapiens
gaatatatgggcggagaggaaataatatttatctacttggatatagggaaaatttagttaaacgaaataatttgtaaagagcaaatgtagtttatacaattagagcatcaatatcagataaccctgacatagttttgaccatataaataaaacagtgcaatacagaggttatacatttaaacagaacaaactaaggaatgtaagatcaaaactgtcataacaggaaatgtaatcctttaaatgactcatttgagaacctaaataacattgaaaaactagatagccatgaaatgttactagatcttcaaaaagcatgaaaaattacactgctgtccacggtatttatatagtcaaaatatttttcaacctcatcatttacattggcttttgttttaaaagccaattttgttctaaaaaaataaaaagtaaaggaaaaaaagatccaaatatctgtcttattttcaaccaatctaaaatcataaaagtaaacgaattcacacatacaacaatctacaaaagtatttacaatattacggtcatggaaatacacacacacttccaaatgtgcagtgccaaatttcytgaagcctctcaaaagtatttttttcaatcgttatggcttcaaaaaaaatagt

SEQ ID NO: 906799 - DNA, 575 bp, Homo sapiens
acttggaaccaacccaaatgcccatmaataatatactggataaagaaaatgtggcacatatacaccatggaatactatgcagctataaaaaaggatgagctcatgttctttgcagggacatggatgaagctgcaaaccatcattctcagcaaaccaacacaggaacagaaaaccaaacaccgcatgttctcactcataagtgggagttgaacaatgagaacacgtggagacaaggaggggaacatcacacactggggcctgttggcaggcaaggggctaggggagggatagcattaggagaaaaacctaatgcagatgatggattgatgggtgcagcaaaccaccgtggcatgtgtgtacctatgtaacaaatctgcacgttctgtacatgtatcccagaacttaaagtataataataaaaaaagaagttgaaagaagcaggtagtggctgtgtaaagaagagagaaagaatttaagagaaaatagaggtgaaacatcaaggcagaatagacttgagatgtgaatatataagtatgtagaagactaagacttagaaaaacaccagaccccttata

SEQ ID NO: 906800 - DNA, 592 bp, Homo sapiens
tgctgtcttggatcataaataattatgccaacttttagaagggcagaatgtaaattgttcctctgcagrgatctctcccactattgataagttcagacttttctcatttaatcatttcttattgttatattggattctttacctttcaaatactaaatgaaaggtcattgaacacaatttcttaaccaaattgtatttggacaaattagaagcttatttattggttgctcatttaaactacttttctccagagacagctggaaggtctgctaagcttcggctgttgccttgggctagctgggaaagagacctatgtattcttacaatggagtgcattataggaagttgttgagcaaggaagggtcagacacaagaacttgcgtagtcttgaggcagtttctgaggtattctttgtattcccttggctctaatattggaataaaaattatatcccaaagtaatcacaactgactttctgtctactattttagtcagtctatgtttcctttcttcattactagggattgtgtagacatcttgaatttatttccaggccaccactttaattagtatcacattactgtaatataag

SEQ ID NO: 906801 - DNA, 568 bp, Homo sapiens
ttcctcattcttcaaagccagcttcatatctcttcctctctgatttctgctttcatcttttcctctcctctgactctgactctcctgcctctctcttataaagayccttgagattttattggactcacccacataatcctgaataatcttccaatatcaaaatacttcacttcattacatctgcaaagcctcttttttccatgtaaggtaatgtgttcacagatttcaggattgagatgtggatatctttggggtactattattctgtctaccatagatccttgcaggattcttataactcatgtaatgcctggctcatattaagtataaatgagaattatattgggttgggctaaaaattgttattcctagagctagaatttgcaaatattcccatttcacccccatactctcctactcctccaccctctcaagtctgactctctttttagagaagactttattgcacatttctcaaagatgcccacttccccgtacaaaggccaataaatggaaactgcccagttgcagaatatcattgacctgatccatttgcttaatctcatgc

SEQ ID NO: 906802 - DNA, 586 bp, Homo sapiens
agatggattaaatatttaaatggaagacttcaaactataataaaaatttaaatggaagacttcaaactataaaaatatttgaagaaaacctaggatataatttcttgtcaagggcctaggtaaaatatttttggataggtctccaaaagcaattgcaacaaaaacaaaaattggcatgtgggacataattaaattaaagaacttctgcaccataagagaaactatcaagagattacacagacaatgtatgccaagtatatacactgctgaattgacagacttttcaatgaatggtgcttggaaaactgtatatctgtatgcagaaaaatgaaactagacccctatctcttgccatatataaaaattaaataaaggaggattaaatatttaaatgtaatacctcaaccatgaaaatacaataagaaaatgttgaggaaacactctaggacagtgttctgggaaaatatttcttgagtaagacctcaaaaatacaggtaaccaaagcaaaaacggacaatgaaatagcatcaacctaaaaagctyctgtacagtgaagtaaacaaacaacaaagtgaagagacagccc

SEQ ID NO: 906803 - DNA, 573 bp, Homo sapiens
agccgaaagagagactatcgtggctaacttgtacctttagcggcttgacggcacagacaagatcaatctttccattgccaacactattttcaataattctaaaacagktgatatcaactgtgactatctttatgaaaatgcttttccccacaaatacgaacacatgattctaagaactacacttgatgctacaaggaagccagaactctgtacctagagaggaggagataaatttgtaatcggtattataagttggaaaaagaaaagaaatgtaacttgggaatgtgtaagagctgatgtctttatatctagtccacagccaagggcacaagttcctttattttgagtgtgccagaccacctgcagtaactcctcataacatcttaaactaaatcttctctttaaggtctagggccttctccaactcacttcctgaaaagcagtatgctcaggtaacaactccaacagcaccgactcacaaggggtcctagacactgatttaatgttggcctcaaaaagaaaacttctggaagcttttggggctaggtgaggtacttgagggtataattctct

SEQ ID NO: 906804 - DNA, 634 bp, Homo sapiens
ctagttaagaagaccagtctggtcaaggcagtgtgtgtgtgtgtgtgtgtgtgtgtgtgwgagagagagagagagagagacagacagacagacacacagacacacacaaacaggctgataggagcctaaaaacaggtttacaggccaggcgcggtggctcatgcctgtaatcccaacagtttgggaggctgaggtgggcggatcacctgagtttgggagtttgagaccagcctgaccaacatggagaaaccttgtctctactaaaaatacaaaattagctgggcatggtgacgcatgcctgtaatcccagttacgcctataatcccagttactcgggaggctgaggcagaattgcttgaacccgggaggcagaggttgcagtgagtggagatggcgccattgcactccagcctgggcaacaagagcaaaactccatctcaaaaaacaaacaaacaaacaaataaaacaggtttataaatctgtactgagtttggtaggtcatggggaattactaaaggttttgaacatgtgagtgtcaaaatcagagccgtactttagggagaataaaagagtaacagtgtatctaggaagaatgaaaacgaaaaggagactggaaaattgtcatggctgtcct

SEQ ID NO: 906805 - DNA, 573 bp, Homo sapiens
gcagaggcacttcaagcaatactcagcagatgtcagcaggtggctctggccctctggtcttcatgctgggacaaggcggtcataaaaacttttgctggttcaaccttcatctcaaatctctgcacaacrcaccaccaaaaacaaaaaaacaaagccccttacatgatgggtcatgttgggttttttttgtttgtttgtttgtttgtttgtttgtttgtttgagatggagttttgctctgtcgcccaggctggagtgcagtggcagtggcatgatctcggctcactgcaacctccgcctcctgggctcaagcagttctcctgcctcagcctcccgaatagctgggattacaggcacatgccactaaacctggctaatttttgtattttaatagagacggggttttaccatgttgtccaggctggtctcaaactcctgacctcaggtgatccacccgcctcagcctcccaaagggctgggattacaggcaagtcaccacacccggccaggtcatgttgtttttgaggaaagccatggatggggtgggagggaacatttacagatagggaatgttc

SEQ ID NO: 906806 - DNA, 573 bp, Homo sapiens
gcagaggcacttcaagcaatactcagcagatgtcagcaggtggctctggccctctggtcttcatgctgggacaaggcggtcataaaaacttttgctggttcaaccttcatctcaaatctctgcacaacacaccaccaaaaacaaaaaaacaaagccccttacatgatgggtcatgttgggttttttttgtttgtttgtttgtttgtttgtttgtttgtttgagatggagttttgctctgtcgcccaggctggagtgcagtggcagtggcatgatctcggctcactgcaacctccgcctcctgggctcaagcagttctcctgcctcagcctcccgaatagctgggattacaggcacatgccactaaacctggctaatttttgtattttaatagagacggggttttaccatgttgtccaggctggtctcaaactcctgacctcaggtgatccacccgcctcagcctcccaaagggctgggattacaggcragtcaccacacccggccaggtcatgttgtttttgaggaaagccatggatggggtgggagggaacatttacagatagggaatgttc

SEQ ID NO: 906807 - DNA, 553 bp, Homo sapiens
gtggaatgaaccagagctcacacttgtcccattgttaccctsatgcttctgagctccccttcttactcaccacggggattgcttaagagaacttgggtgtcctccagcttagttccacattctccaaccatctttctggtgaccctttgacccaggttcaagcccccatattgggcaccgcttgccgagaccagctcggtcagggagaccctaacccagtggcactagagaaattaaagacacacacacagaaatatagaggtgtggagtgggaaatcaggggtctcacagccttcagagctgagaaccttgaacagagatttacccatgtatttattgacagcaagacagtgatccagtgataagcattgtttctatagattatagattaactaaaagtattctttatgggaaacaaaggatgggccaaaataaagggatgggctttggctagttatctgcagcaggagcatgtccttaaggcacagatcactcatgctattgcttgtggtttaagaacaccttttgaggggggtggagtcaagatggctga

SEQ ID NO: 906808 - DNA, 747 bp, Homo sapiens
aatcatggtggaaggcaaagaggaagcaaggcaccttcttcacaggctgcaggaaggagaagtgtcgagcaaagcrggaagagccccttacaaaaccatcagatcttgtgaaaactcactcactatcatgagaacagcatgagggaaactgccccatgattcaattacctccacctggtctctcccttgacatgtagggattatagggattataattcaagatgagatttgggtggggacacaaagtctaaccatatcaccaatttagtatgccattgtactatattaatcaattttttaaaatcttttggattttgtttacctagttgatttcattgtggctatttttatttcatcataaagctgctatttatttcaagtaggccacaaaatttccttattttacagttttcaaagtgctttctcaaatgtgcattattcagatccctgtaagccaggtattatttttaccatttttagatgaagaccaatgttgtgaaagcaaataaataactggtcaaacctcctggggtagtgccaggatataaactaattgcaaaacttgtgctcttttgaccatataacaaacttctctgacagagcttggcaagctttgggtaaacatgggtgtgatgattactactcttgttgcttctgagggttgggcaaggatagaggtcaagtatgaattcatgcaaattttatctacaacatctacctcatggaggtctcaaacagcaatcaaaa

SEQ ID NO: 906809 - DNA, 600 bp, Homo sapiens
ctcagacctggtttacagatgattatgcgtgatatgcaggcatcacccaaaaatggacagctgtagtgctacgtccccgtcctggaacatccctgaaggacattagtgaaggaaaattacccggcgggcagaactacaaggaatacaactttttgctcacttttcttggaaggagaaatgtccagacatgggattacatcctgatgcacaggccgtagccagtgctttcatcagatggtcagggacttggagggaatgtgattggaaaactggtgataagcaaagttgggaaacagctatgtggatagatttctctgagtgaaaaatgttaagatatttcatctcacgtgaatgctcacaaagggtgaccttagtatagaaggatcttcataatcaagtggataggatgacctgttctgtggataccagtcagccttttttcccagtaactccatcatcatgcaatgggcttgtgaacaaagtggccatggcrgcagggatagaggttatgcacaggctcagcaacatggatttccactcaccaaggctgacctggctacagctgctgctgagtgcccaaactaccagcatcagagacca

SEQ ID NO: 906810 - DNA, 600 bp, Homo sapiens
ctcagacctggtttacagatgattatgcgtgatatgcaggcatcacccaaaaatggacagctgtagtgctacgtccccgtcctggaacatccctgaaggacattagtgaaggaaaattacccggcgggcagaactacaaggaatacaactttttgctcacttttcttggaaggagaaatgtccagacatgggattacatcctgatgcacaggccgtagccagtgctttcatcagatggtcagggacttggagggaatgtgattggaaaactggtgataagcaaagttgggaaacagctatgtggatagatttctctgagtgaaaaatgttaagatatttcatctcacgtgaatgctcacaaagggtgaccttagtatagaaggatcttcataatcaagtggataggatgacctgttctgtggataccagtcagccttttttcccagtaactccatcatcatgcaatgggcttgtgaacaaagtggccatggcagsagggatagaggttatgcacaggctcagcaacatggatttccactcaccaaggctgacctggctacagctgctgctgagtgcccaaactaccagcatcagagacca

SEQ ID NO: 906811 - DNA, 648 bp, Homo sapiens
caaaaagaacaaacctggaaacatcacattgcctgacttcaaattataccagaagcctaaagtaatgaaaacagcacggtattgaagtggctacgttgtcttgggtaaatacccagggtttgttttctcgtgtcgagaaaatttaggacgaggagtttaggaatggaggtttaataggcaaaagaaagagaaagaaagagaagggaaaacagctttctttgtctagtgagaaagagcggacttcctagaggaaaaggccagctgtcagtggatgtgctggattttgtagtcctgcttgaggaggtggtgtctgatttacataaggctcacagattgtttcaatcaagtatgacgtttacatggtgcacagggaaggctggttgtcctaccctaatcatattatgcaaataaacttcctccttggagggtgcaatcttgtctgctccttaccggacatgtggctgacaaagagaaaggaagatggagccgccatgttgaacatgattggcacaactgctggcgtctgtgtctgcagctcaattttacaggctgttctttgttagaaaatgatttacagctgtttttcattaaaaggaaacccttacagaggacttcygtaccctcattatctgcctaagtaatttcttc

SEQ ID NO: 906812 - DNA, 591 bp, Homo sapiens
agaggctcatagatgccacctctctcctattagcatacatcacatcaacaatctctagcaatgctccaatctcttagctcttttacatgaaaacacrtaggcatttggaaaccagagagacaaaagatcagcgtcttggaatggaattggcaaaatggacaaagcagaattcaccagtgcttttaagagtgatctgtaaacagaagaaactacaactgtatttggcttctaagagatggaaaaatagcccaggaagggagagactagaaaggttgagggcaggtgatggtttagaggccacagggagatgagcaattatgatttatttgacctggacacagctatcagcaaaggaaaacctgatatcacacatgcactttgtctgaaactcaacaagccagccactctcctccctagaagtcccactggaaacaactacaagcagtgtgtcttcacagatggctcccaaagcacacctctggctcagttactgttagtcattttagtgagtagtttgggatttgctttatgtgcatgaacaaaagaggtttttttttttaattttttttcagttttgcaaaagctaaacct

SEQ ID NO: 906813 - DNA, 591 bp, Homo sapiens
agaggctcatagatgccacctctctcctattagcatacatcacatcaacaatctctagcaatgctccaatctcttagctcttttacatgaaaacacgtrggcatttggaaaccagagagacaaaagatcagcgtcttggaatggaattggcaaaatggacaaagcagaattcaccagtgcttttaagagtgatctgtaaacagaagaaactacaactgtatttggcttctaagagatggaaaaatagcccaggaagggagagactagaaaggttgagggcaggtgatggtttagaggccacagggagatgagcaattatgatttatttgacctggacacagctatcagcaaaggaaaacctgatatcacacatgcactttgtctgaaactcaacaagccagccactctcctccctagaagtcccactggaaacaactacaagcagtgtgtcttcacagatggctcccaaagcacacctctggctcagttactgttagtcattttagtgagtagtttgggatttgctttatgtgcatgaacaaaagaggtttttttttttaattttttttcagttttgcaaaagctaaacct

SEQ ID NO: 906814 - DNA, 603 bp, Homo sapiens
aaaagaagtaaataacatgtaaaagttcttcaattcatccagcaatagacttctcaatggaaaccatagaaatcattagaaagcaggagcatattttcaaagtactgaaagacaaaaaaactgccatccaagaatcctgtatgctgcagagctatccttcaagttgagagaattaagcaccaccagacttgtcttacaagaaggactaaaaggaatttttctgtctaaaaagaagaaatgccaatgtacagaaagaaaacatttgaaggtataaatcccactggtaaaattaagtatacaactgtaaaacactctaattctctaactgtgctgtatatttcactcaaaactctagtataaaggttaaaagacaaatgtatcaaagctaataattgctacagtaacctactaagagatgggcaatactaaaatatgtaaattgagacaaagaaatgtcaaaatgggttagatgaagttaaattgtagagttttaatttttagttttttcgttgtttctattctatttttgtgatstaaggtaagtcaccaccttttaaaaataacttgttttatctgtatgatgtgttttgtaaacctcatggt

SEQ ID NO: 906815 - DNA, 550 bp, Homo sapiens
ggtggagccaagatggccgaataggaacagctctggtctacagctcccagcctgagcgacacagaggatgggtgatttctgcatttccatctgaggtactgggytcatctcactagggagtgccagacagtgggtgcaggacagtgggtgcagcgcaccattcatgagccaaagcaggctgaggcattgcctcacttgggaagcacaaggggtcagggatttgcctttcctagccaaagaaaggggtgacagacagcacctggaatatcgggtcactcccaccctaatactgcacttttccaacaggcttgaaaaacgggacaccaggagattatatcctgcacatggctcagagggtcctacgcccatggagtgtcactgattgctagcacagcagtctgagatcaaactgcaaggccgcagtgaggctgggggaggggtgcctgccattgcccaggcttgattagggaaacaaagcagccaggaagctcgaactgggtggagcccaccacagctcaaagaggcctgcctgcctctgtaggctccacct

SEQ ID NO: 906816 - DNA, 634 bp, Homo sapiens
aaaaatgaaatatactgataaaaagaagtttgaaaatcactaaaccggatcacctccttggccttttcacattctctaattcagtggatgaatacagaatagaatccccaccttcaaagagaatgcaatattcttgagaagataataagcaaaatatggtgagatacagcacacgacagttgtgctagctctctccttacatcagctctgcccctttgtcacagagttatctgtgaacatagttgccttgaataaaacctatatttccccatctcccttgtatcttggtgtggccacatgaccaagttctggccaatggggttgcagataggagtggcaggtgtgtgcatatatgtctgtggaggcacacacatacatagttctcagtaagtgtagttaaagagaagaaattagtcttcttctgcccttctgtcctttctgctggttagaatacagacctcatggctggagctatagcagccactttggaccatgagttagaagtatgtgttgaggatggcaaagcaataaaatagaagttgacccctgatgatagcggaccagctacctggaygttcacattagtgagaaatcagtatccatctgatttaaaccactgttattcagggacttc

SEQ ID NO: 906817 - DNA, 653 bp, Homo sapiens; identical to SEQ ID NO: 903932

SEQ ID NO: 906818 - DNA, 612 bp, Homo sapiens
tgcttgacctaagtactctttgcctactctaagtcacgaagacttacttccgtgttttattctagaagttttaacattttggctttcatatttaggtttgtctattcaccaataacagagtttcagaacataagatgcaaaaattgatggaactgaaggtagaaaaaaagaaattaattttaatgagatatttcaatacccctttctccataatcggtagaacaaataagcagaaaatcagtaagaacgcagaagatttgaacaacactttcaaccaacttgatctaattgatatttgtagtatggtccacacagcaacctcagagtaaactctttttcaaatgtacacagaacgtttgctaggagttatcatattctgggcatttaaaaaatttaatgaatttaaaggtaagttatctggccagagtggaattttattagaacccagtagtataaacatctctggaaaacacaaaaatatttgaattgtaaatacaaatttctaataacacacargtcaaaaaagaaatcaaaagaaaagttagaaagtgtttttaattgaaataaatgaaaatgaaaacacaacacgtaaaaatttgtgggatgccatta

SEQ ID NO: 906819 - DNA, 669 bp, Homo sapiens
tttaattagtgacatctggtattatctcgaaagctcacaaaggtgtttaccttgatcacacactatcatctcttcatggactaatatacttctctttgtcaaaacmaatatgggatccaattatcatgaaccaggtaagtgcattacaatttttaagtggcttctaaccctcatagatgattctgatccagggaaccttaaaattaataaactgtgaaaggtgtatctttggtccttgttggatgaaaatgaacattaataccctgctgatgagtcattaacacatctcaacagtaagaaataaaacaatactgttgctttcactaggagagacacagttaattaagttggtagtgagggtcagaatgctggaacctgggcttatgaggaaccacaaacctgagaagtctattaaacaataatatttccatcagctataataaaacttttaaaaaatgataaccaaaatagcaaagtgggagtttacagggtaaacaggggaaatagcagctcagaatgtcagcccagacatgtctgccttcccagtacacactgtgaaaacataattcccaactcattagggagcaaagggatgagtggagagaaatgctaattatacattagctcagttagctaaattcagatagggtaatatcacatggactgatg

SEQ ID NO: 906820 - DNA, 634 bp, Homo sapiens
aagtaacttataaattcaattctatcctcatcaagctaccattgactttcttcacataattagaaaaaactattttacattttctatggaaccaaaaaagagcgcttatagccaaaacaatccaaagcaaaaagaacaaagctggaggcatcatgctacctgacttcaaactatactacaaggctgcataaaccaaaacagcattgtactggtaccacaacagatatatagatgaatggaacagaacagaggcctcagaaataataccacacatctacaaccatctgatctttgtttgacaaatctcacaaaaacaagaaatggggaaaggattccctatttaataaatggtattgggaaaactggctagccataggcagaaaactgaaactggaccgcttccttacacattatacaaaattaactcaaaatagattaaagacttaaacgtaagacctaaaaccataaaatccctggaagaaaacctagtcaataccattcaggacatagrcatgggcaaagccttcacgactaaaacacaaaaagcaatggcaacaaaagccaaaattgacaaatgggatctaattaaatttaagagcttctgcacggcaaaagaaactatcattggagtgaa

SEQ ID NO: 906821 - DNA, 647 bp, Homo sapiens
ctgctaacatactttggtgctgcatgaattggatatgttccctaatggtaagagaacatgatcttcacttttctgatttagaataaagataaagacattaacttkgagatgatgtatttacttttcctctccatcctaagaaagggtcattccagaagttcgttcatatttattcattatatgaataaaatttttcctcttcaagaatccagaacttatgactcatatttgggaaaatgcactgtggaaggagaatataatcaagaaataggtaaggctaaagtttcctgaaaaaaaaaattgatgaagattagccaagaaaagctttagaacaggaagcacttagaagagactaccattgatttcattatggggagtggggagaaagatatggttagaaagtatgtggggagatgcccaggattggactccttgtaagtaactcaattcttattgtgatttccttttggaaactgtaaatatactatttaacataaagccttaatttcgctccttttttgtttggttatcatcttaaattacaccaatgcttcaaaaaagaaaagcacctatatatacctgcatatatagagagatggtcttgcggaggctaaagaaatgaggtggtaaagagttgggatgacctg

SEQ ID NO: 906822 - DNA, 658 bp, Homo sapiens
tttacatactgagtcatgtagaggaactctgaaccttaaagagtagaaaggatgaaaggttaaaaaacaaaaaagtctttgaatccaacttttcaaaaaacacagagttgaagaaaaatgatgaattgaaatcaaaagattgttgccataacaatggttggtattaattaacagtataaataaatctggagaaaccacagacaaagtgaatagtgttttgcacaggcaacgtcatacataacttaccactttgtccatgagcttccaagtcttctccacggtcctgcgatctgcggcagcttgcttagggggtccaactgcatcctgaatagcatcaataatacccaaaattcgaccttttcggggatttcctcctcgaccaccagggtttatgccattcattgagtttgccatctggaattttagttctttaaaaggcagatttaaaaaaagaaaagttagttggttttgaaaatatttacccaccagaaaactagagactaacttgtaccactgcatcttcctccatcrattagagcaaaaccaaaagttccggattcatctttatcaataagcttgtgaatttacactctcaatctttacacacagtagttttaagagcagtgatcctagatttgcttttacaatactaagagtt

SEQ ID NO: 906823 - DNA, 599 bp, Homo sapiens
caaattataaaaccacaaaaccttctgatatgaattctattatccttcctgcccctaaaggtgtatatcttatatgtgatctgggtggtaaaaagagattgtctgccctcatgtcttaattctcctagacgtccttgacactgtcgtgtacgcagagaccatgaatagcttagttttaatatatttgtttttctcacttatgcctgattggagcaattgagaaaaattacattcataaatcttcttgccaagataattaattatgcacgaaatacttcaagctgcttctgattttcattaatgaggcagattatctgcaaaataagatgctgctggagctgaatagaaaggtcagctgcttatcattaaatgtaaaacaagagtgcatttttatatctgaaaaacaatgatgaaagaacatgctataattatctttatgaggctatcacatcccacttaagataggaaagtatgtgtttttcgtttactgttttcctgcaattgatgtgaatcctaagtccccatcatgctggtcacctaatttyttttccaaaggagaattagctgaactattttagttcaaaagcattaggccacag

SEQ ID NO: 906824 - DNA, 617 bp, Homo sapiens
ttttttgtgtttaatttattcctaagtattttgtattactgatgcaataatttttctaaatttcagtttctaatggtgcattgctattgtataacaatacatttagcttttgtaaattaatctcatatccttygaccattctaaatttatttactgattgtagaggcatttttatagataggttttcaacactcataagtaggtcatctgcgaatcatcccaattttaatttctactttccaatctatgtaattttaatttattttttcttgtcctcttttattggctagatcctccagttacaatagtaaatataagtaattaaacagacgtacatgttttgttccagatcttcaggggaaggaattcagttctttatcatcaagtttgatggtatctttgtacattttgaagacatgtttagtaggttaaagaagttatcttctcttttaaatttttggagctctttttttaattaggttggtgtaaaaatagttaaaagtaatggcagaaattgcaattacttttacacgaacttaatataaatgtatactgaattatgttttctttttgcatcttttgagatgaacctatggctttgcttttttagtacattg

SEQ ID NO: 906825 - DNA, 678 bp, Homo sapiens
atgtttttgcagtggttggtactggtttttcctttccatatttagtgcttccttcaggagctcttgcaaggcaggcctgatggtgacaaaataccttggcatttccttgaaggaytttatttctccttcatttatgcagcttagtttggctggatattaaattctaggttgaaaattcttttctttaagaatgttgagaattgccccccactcttttctggcttgtagtgtttctgctgagagatctgctgttagtctgatgggctaccctttgtaggtgacctgacctttcttcctggctgctcttaattttttccttcacttccaccttggagaatctgacgattatgtgtcttggagctgatcttcttatggagtgtcttagtggtgttctctgaatttcctgaatttgaatgtcagcctgtctggctaggttggggacgttctcctggataatatcctgaagtgtgttttccaacttggttccattctaccccccactttcaggtacaccaatcaatcatagctttggtcttttcacatagtcccatatttcttggaggttttgttcgtttattttcattctttgttttgttttgttttctaatcttgtctgcatgccttatttcggcaaggtagtcatcaatctctgatatcctttctcctgtttgattggtt

SEQ ID NO: 906826 - DNA, 609 bp, Homo sapiens
atgccttatttcggcaaggtagtcatcaatctctgatatcctttctcctgtttgattggtttggctattgatacttgtgtatgcttcccraagtcctcttgctatttttcagctccatcaggtcatttctgttcctctctaaactggttattcaagttagcatttcctgtaaccttttatcaaggttcttagcttccttgcattgggttagaacatccttctttagctcagagtttgttagtacccatcttctgaagcttacttcaattcatctatctcattctccatccagttttgcacccttgctggagaggagttgcaatcatttggaggagaagagacattctggcttttggaattttcagcattttggggctggtttttcttcatttttgtggatttatctacctttgatctttgaggctgatgacctttggatggggttttttggggggctcttttttgttgatgttgctgttgttgttgctttctgtttgttagtttttcttctagtagtcaggcccctcttctgcaggtctgctgcagtttgctggaggtccactccagaccatgttcacctgggtatcaccagtggaggctgcagaacag

SEQ ID NO: 906827 - DNA, 686 bp, Homo sapiens
aaatgtgcctgaattcccaggagataagcagccctttgccaaaggcaaaattataaaatattgaaaagatacttctcaggctagtaaaagatgggaaggaggttcctcgccccccatcctgtttcactagcacacgaggagacactgtacagaaccgataatagtagactgaacccagcttacaagaacgccagttcattttgcttgacttacaataaagccagctctatcttggtaaattccctaaatacagtatggtatctaggacccaatataaagttatcatattctttaaaaatattttagaacgggaaggattatattattctgtaatatttattattattgctctaagtaagtgtgttgtgttttgttttgaatacttttaaaatacaggtttatctagtgtaattttaatagctcccatagtagaaaattgagaatttttggactgtagggaaggcagagaggcttttgatgttccacaatgctttagagcacaggtttggggtcaggcaaagaatggaacacatttaagctgtgatacttatgctgcaatgagtataggccagttacttaacccttcccagcctcagttttcctrtcctttttgaaggataataaaacctacttaaaaagtttcctgtgaagattagttcatacagttcaggagaatttctcatcct

SEQ ID NO: 906828 - DNA, 630 bp, Homo sapiens
gaagtcatgctccagtgatataaataaacatgttaaattaacagatattatgaatacatgtcttgattttgtaaaaagctctgcataatgactcaaaggcataatgcttgcaaacagctggaaagcaaggttgtcttgccctttctgaaatactctggggaataagagattttgcaatgaaagaagaacacatatatttaataaatttcttttttaattggtgtggaattgcaggataggcaggcaaaaggttgagaaaacacatggaaaaactgattatacatatcagccaattatgacctcaattaacatactcagaagggcccgttttttcttgtcccagagatcaaataaggaacatcttgggggtaaagtcattaaaagactttagcaagcagtttttaattatacatcatttgtacatctgtgaataattacctggtagttgctacctggtgacagtgattgacagaaaggtaccaatgattccaggctaaagatacatctttaatatgagcaaaggatacaataacttcgcagcatgaagrcagtgacagcaaggagctctccagcactcacagttgaaaggcaaagttgcctggcctcccagtatttgaggtgccagttgcc

SEQ ID NO: 906829 - DNA, 654 bp, Homo sapiens
aatcctattttactttattctaatcgtcatagccaggaagagacattcaagtgttagggaagagacaaagaaaatcttctccaaggaaagtttttctatccacttaagcaaaaagaagctggcagcttcctctaaaacaataaaattattattaaacaaaagtagtatgtaaactcctcaattattaataaacaaaaatagtacataaaccttccacatattattaactccaataatattaactactaaagacaaaaggctaaataaaaatagtatcaatgatataacaaattattaatgatggcaactattccatatgccatcctttcctgacttgaaactctttaaaatgtttcttaacacctttaatgagatgattagaaacttttcttttgcaaataatacacatattaagacattttcccctgagcctagtcctgtctctagatattgaagagttttcagatgtttcgattctggagttgttcatacatctctcccatccttcattcctattttacttccaacctccttgggttttgcctctgtcagtttgctttacacagctgtctccttgactcataagttactggaattaagtaycaatgtgttttaagattttcttttatatatcctaagatcatgtaaaatttc

SEQ ID NO: 906830 - DNA, 609 bp, Homo sapiens
gaatcttcaaaagaacactatcatttagttactattatgctttctcactttgacagataaagaagcttcagtaaacagaggttaagcaatttccccaaggccataaagctgatgagtggcacacagyatggatgcaaattcaggtaatcttactcgaggtaccacaaattacacttcttgcagcataaattatcatattttatcctcacaacaatcctataatgatagattttttagtgttttcttggacgaccgtagtcataatttcataagaatgttttttgtactccaagcttatcaggtgagcctttgataatcctattctttgccagaaggctcttatgcttacagctgcttagaggtaaatgtcatgaccaagctggccaatcaaattctgtttagggataactgggaatcagggacacttgtatttaaggacaagtcaaaacctgagagctttggctgaaagctctcacaggaatagaaaaagcagagaaaacaggtctggaacaagaaagaatgagagatgttaacagaaaagctgagatgagagaaagaatcctatgtgttttcaatggatttattggtgctcattataatttttgagag

SEQ ID NO: 906831 - DNA, 619 bp, Homo sapiens
tatatgagtgtacttttataatgccttcaaaagacatttgattgtgacatagcactcaaagtgacaggggttgctctctcaagttttgtctaaatgactggtacaactaatcaaggattttcatttttaatgggtataatcaattgtagatgtcttcagctgatgccaaggacttattggcaagtcacactgcactatgagcttcaggtctggtatttcctttatatatcaaaatgcttgagatgtacacgaagaaacagagtcgttgaacagttttcctaagatcattcagcaagtgatttcacttcaggtttaagtttctgaattgactctacttaaattattgtactcttaatctgtacaaaatattgctttacataagccctaatgctcagcccaaataaataatgagcactaaagttttgacggtatcacaaataaattattgtttcataatgattaaaattttaaattgaaattcaaaaactatgtagagacagggactgtttctctgtagtgtttaaattctcaagtcatcaaccttggttataattatattatsttttaatcattgacaattgaagaattttttttatgataagatgtacctcttacctcc

SEQ ID NO: 906832 - DNA, 603 bp, Homo sapiens
cagctccaactttaaaacactatcatatcctaccgtattttctacccatgattcccattctgaggcaatatcacgtctcctgtggaaattacagcagtctctggcctagagcactcataggccttatgcagtcctctccacccaaaagctagaaggaattttttttccgaatataaatcaggtagttcatgtcccttctctggtcaataccttccaatggaaacacaaacccctaccctggctcacaaggccctgagtgatcagacacaaacccacttctccaagtgtatcttctttcacttcatgtttgactaattcccttctagcctcatgggcttaagcacatcccacaggtccctatccagaaatactcttctccctgttaacccctggctcacttggtccatgagtcagcttaaatgccacacctcagagaggattcttggaccactgtatctaaaaccacagcacactctctattcttttccctatattactttttcttcaattatctctccctcaacacaatgaataaatcrctctgggtatttttgtttacatttattaaaatgtaggtgttatattgcttcatttttatgaaaa

SEQ ID NO: 906833 - DNA, 480 bp, Homo sapiens
cactgcctttccccaggtctaattatgtcctaaatcccatcaatgccaccactgcactagccttctcatagccccctctcstccctgttcccatgctccaccctaatccaggccttcatagtctcttctctgaataattatgtggcagaccaattgcctgagatactaacttgtgttttttgtgctgccttttccctcctctattccatgaaaaaataagcaccctgtgcatccttggcttcaggtgaaggcttcctggcttttattgaagaaagcacagttagtgcttttgaggacaacaggaggagagggaaagactaaaagataaaagagtggaatactactcagcaacagaaaagaaatactaaacaacaaaatggtatgaactattgatttctataatacaggcaagtctcacatatacaatgttgggtaaaaggagcaggacgctatagagtgtatcctgcgtgattctattta

SEQ ID NO: 906834 - DNA, 618 bp, Homo sapiens
aaagaccactggatataatttcacttcctcttggattttttttgatggtctaamaatttaaatactgtacttcctgttatacaaagaacatggtctgctagaacggaaatgtttaattctcagaattcattgaaatccattgatgatcatatttgacatctactggtcatcctgagtgaagtttagccattcagagttcaaacgatgagtcttcatatacagatggttataaaaagactcacctctgcttaaggtaatcaagtttggcatggaaacatgagcaaaggtaattaaactcagaagatttgctaacattaaaaaatggcaatttcctggaacaaaaatgtgaaaagctaattccccccaccccctcatcacctgctcctctctctgcttttgccatagcaaagccctataaagaaactggccaccagggtcattatcagtctgagctgaaaatttgattaagctggcctcctagggttagtatgaaaaatgctacatttttgttcttggaccttaattcctctttccctcatttttgtcatgtttgcaaatttcatttgcatttaatttcctgtggtttgccaaagtccagactgagacttgagctgttgt

SEQ ID NO: 906835 - DNA, 686 bp, Homo sapiens
ttcctcaacttagctcacccacacagcaattaaactccacgtatttgaacaactcaaaaattccatgtgtgcaagaggctaagtgcataagaatcctagggcctagatgacaagaattactaaagaaacgtagcccactccttctcactcttttgcagttttgtatgttatatgtacattagtatgttacatgtacattaatttgcctgaagttgctgtgttggcttaatggaacaccattgccacctgctagccatattgagctattaaagtcctgcaattaaccaaattaagcgcaggttaacacaatcaggttttgctgtgctattgttttaaataacttttacgtatttaaatttagagtgcacagtgtgacacagcttgccatttaatgactcagcatgcatacagtaacctcagctaaccagcattaagtggaagtattatgtcttggcactgaagaatatagactgacatcaaaaataagagtttcaaggctcagttccaccatttgttagttatatgatctttgataagtcacttaacctgtctagactcacattatttaaaaaggtaaaaatagaataatagtagtgccttcttcatagggttgatataaccattaatgaaataagaaatttgaaatgcttacrtgataactaccatatggtcacaatcaatggatg

SEQ ID NO: 906836 - DNA, 538 bp, Homo sapiens
tgctaataatgtattattgtaatctgctgttttyttttttcatttaccatatacttacatctcttatctaggattccctgttctcaacctttagttcattatcaccctcctctcctcacaaaggagacttttgagaccactgccaatgaaattttgatactgcatttgtattgtttatctgtatatatctgtttatgtatttctgtgccttatacatggaaagtaacattttctttcatttctcccaataccccagagccaattttcacctccttgggggtgatgtcaactccattgagaacatgtatcttattccttttttcctgctacctggcagcatgagatgttatattaatcctgtctttttattttctgtacttttgatgctttgacatctagggacttgctgactctggaaagactgccctttccaaagttaggcaattcttagagattaaaaaaaaagactccccttccagcatccttttcatatgcctttaataggcaaatcaaacaatctactacccacatcccaacc

SEQ ID NO: 906837 - DNA, 656 bp, Homo sapiens
ggcaagttgtacctaaagtgagagtaaaatatgaaggaaatcattcttcattttaaagtaatttcttttctttgggttgaaactttaacttaaaaatgaatagtttcctataagctttttgtattattagaggaagactaaaaatcaagcatttattatcctaagaaagaatatcaaataattaacagaaacatcatggaaaggcagaaagaatgcaagattaagagttgttagtcctggctgggcatgatggctcatgcctgtaatcccagcactttgggaggctgaggtgggcggatcacaaggtcaggagttcaagacaagcctggccaatatggtgaaaccccgtctctactaaaaatacaaaaattagctgtgcatggtggcatgtgcctgtagtcccagctactcgggaggctgaggcagaagaatcgcttgaacccgggaggcggaggttgcagtgagcagagatcacaccactgcactccagcctgggtaacagagcaagactccatctcagaaaaaaaaaaaaaaagttgatagtcctttagctattagctatgaacctcagacaaatcactgagcttttctgaatctgggttttcataagtctagatrgtatatgaagaacaccttccctatttaatactctctaa

SEQ ID NO: 906838 - DNA, 571 bp, Homo sapiens
tcttcctgcctttgctttgagttgtcccgcctttccagactgaaccaatgtacttctaaygcatattgattgacgtctcatgtctccctaaaatgtataaaaccaagctgtgccccgaacaccttgggcacatgttgtcaggacttcctgaggctgtgtcacaggtgcacatcctcaaccttggcaaaataaacttcctaaattaactggattttctgggaccactctgtgcttatctctctttaatcttccccctctcaactcattggcctaacatgtgttacttggtcaccgctagccacagggagactgggaaactgagtgttgagcttttttagcctctgtagtggtgagaagagagaagggatttgggaatttccttcgggtggccacttaacactgtctgcctcataattggccctccttttacaaaagaaaaactgagactcagaagagttcttattcgctccaaggatcaagctgctaagaagagcttgaatcaacatttctttgacttcaagttcacaaaattttcaataagcaattcttactgactgagggcattctataa

SEQ ID NO: 906839 - DNA, 562 bp, Homo sapiens
cttatatccctgtttaaaaggagcgtattcagatagcttgkgaataatgatgcctcaggatggtttaatggggaaaaaggaaacctgtaaagagccttatcttgagtgagtgtctcaagcatccaaaattatctccctgtcaccctgtgacccatcttcttcatgccaccttttaattttggtagcaattacagtgtatatggataatgcccattagcatattcatggtcatctcttcatatttattgtccgcacaactcattaatcttcatctactttgtgtgcttgacagctcaatctattttgcaatctctgggaagcagccatggccccccaaagcctttgttttcctgtaaataaactgtgttggggaccaggggacaatgatgcatcctgtggtgattgacaccagccacggctactaatcaggatgggacttcattgccagctgagtcgagtgcattatggggccattgttccaatgctgccagggcaagaacacacacagccagtcaccttcacaagatgggttgattgttcttcaagattagaccgagttgcc

SEQ ID NO: 906840 - DNA, 667 bp, Homo sapiens
atatcttacataacaataatacartgatcaaaactaggagattggcacaatgctactaacgtaactacatattatattcagtttttacatgggtaacctttacttatataaatttattctcttatttattagttgatgcttttgttgggggtagttttaacctattctgctgagttatcatgagatgccaacttttatatctacaatcacaaatggggagataaatagaagacttctttctggagaataaaggaaaatgtttttacatttttccaaaggaaaaaagacaccttgtcttcccttttgtgaactcaggtagtagagaagttctcttctttacattggctggtgctattcaagaagaataaaaatacaaatagaaggataaaaataccatctgcaccgaatataatctagtttgtaaaacagaatataatatataaaatgcacaataaatattttgtattatacaaaactgttgaaaagattttttttgggaaaaattaatgtgtctaaaatcaaccgatacaggcactgctcaagtcaggcaatgaggccaggttatttattttaagagaacttcacgaggggcttttgggaaagccaagttcccttggtgattcttggttggaatacctggaggagaaaactgttaacatcccaggac

SEQ ID NO: 906841 - DNA, 490 bp, Homo sapiens
acagttgtgaagagtaaatagacactagtagcttctagactttttccgaattctcatcacrtaaaatatctccttgtgaaattctggcttattgaggacaaagaagattctggaacacaaaccccaaacagcgcatcttcggaaacatgcctgttttcaacataagaagtaatccacgcttcaggggctagcacaaagccacagttccactttgagtccttcagaagtgacaaagaccaaatgtggcccagtatgtgaggcaaggcggaagtaggaatttcatgctgttttaaggttgcttagtgtactttaactgaaggtgtaataaaagcaaattctaataaatttgttgttaataatttcctatagtgatgttacctaggttttctatagcaatgaatgtttccttgtgttttcaatgtatcttgtgaaaaattccagaggaaagctctgctatcatgagcactgatatttcatcttaagaatccta

SEQ ID NO: 906842 - DNA, 601 bp, Homo sapiens
atcacccaactcactaaggtatcttaacctaccaccacttttttccaaattgaagccaaagcacagcatcttttatttactggctaacaatagatggtatgctattccatagactcctgctatcagagtctgcattcacagcaattatctttaccaacaatttcattttctgcattttcccttgtgtaatgtgctggcaattgtgtgtggttgggttctctatccaaatggctttcaagctgaacacacccctcaaattcacttaagcatctggacagcatgggaattatccattacttaggggaatctcacatgctgcatttctattagtgagatagcatgtccttcccaatcttagaaaaaaatgatttaaagtcgctatgcatatgagctcaaaacaaatagcattttgaattccacaaatatattaatgtatcctgaaatctttcagcttcttccagtgtagtcagagcagtgaaaattgaattaagagctctctaattgaggtatatttatttcacttagatatccatrtgtctcttccttttccattgtattctttttttttttttttttggctggcacaaaggatatgtatatg

SEQ ID NO: 906843 - DNA, 263 bp, Homo sapiens
aattttattaaagcaatttagaaaaactttagcttatgaaaaaggaaaacaccatactaagagtaaattaaccacttaagtaacasttttagtcttcagacttttctcagcattcttcttttttatttctacagtatcttaactcttattttgttaaaggacctaggtcttcattatgtaatttccagaaattttttgaaatttgaactaaaacttttctatagagtcttttatgaatatatataatatagatctatgcactg

SEQ ID NO: 906844 - DNA, 631 bp, Homo sapiens
tgcttcctagggaaccatctggtgctattagattgtttaggtctcaaggtgtgtgtgtacagtcagctccgattgaaggggaattgcatagwttctccagatggtgggttgcatgacttattctttaatgtgctaaaccccagttatcaacattagcccccaaagcacagggaagaagagaacatggtctttcattgagttctgcctttctccactgggatggccaaagtgagagtttgacacattgccttcctcgtctagaaaactggcatgcttttctttgtttaccctgggcttggcctgctcagccggtctgggctttctgggcaaacacaactcagggtgagtccctcatccctaaccttctgaatctggcagagtcacaaaccatgcccgccaccctgctcatgcctcaatcttctcagcccctccttgtgttgaacccttagtgctgccacttgcttgttcttgttccctgaccagatcatatgtccctgccacccagtcctctcctcacccgtctcctcttcaccttcatttggtccaccgtctataagcaggccaggttgtagcctccagagttcagaactgaggcctgggcatcagaagtctgctgttgtaggaaatctga

SEQ ID NO: 906845 - DNA, 628 bp, Homo sapiens
ttattgatagttaaggattaatattgccattttgttgactgttttctgactgtttgtagtccctttgttccttatgctgtcttgcattgtgatttgacaattttgtttggtagtgataatggtttgatttctttcactttatgtatctgctacaggtttctttttctttgtgatcaccatgaggcttacataaaacatcatataacagcctgttttaagctgacaacaacttaactttgttcacaaaaattctacactttcacttctcccccatttatgtttttgatatcacagtttacatatttttatattgtgtatccattaacaaattattgtagctcaaattattattacttttgtcttttaacttttatactacagttaaaagtgattagataccaccattacagtattacaatattcttaatttgactatatactcagtgttaccactgagttttatagttttatatatagtcttttttttaaaaaaaactatttttcttatgaggaccatctctakaatccacgaagtctctggatctgagggatggaaagttcttcctgctatgaatgagagtggactctttccatcacccccaactgaaaccacaaacacccagaattt

SEQ ID NO: 906846 - DNA, 485 bp, Homo sapiens
cacacttgcaaaatgacaagcagataccatagacttctgggaaaattcattaccacactatagcctgacaaaaagtcgcaggctttttaaggtcatatgtcacctaccaaggcaatcccagcacttattccccaaccacagggccaattgctttcaggggaaataaagtcaacatctccataatgatggtctagtgatatgctagttaataaagaagtaaaataagcaacagtaataaaaatagccaccatttgttaagtacttggcatatatgattgaacttttaacttacactatgcaattgatcttcataataattctatgaggcaagtattaaaatttttaccttatagataaaatcagtgstgagagaagtaacttttcccaagacataaacttttaagaggcatggctcatgaccccagaactgatatggcatttggcacagttaaccaatgggttgattatcagatggactgacaaac

SEQ ID NO: 906847 - DNA, 596 bp, Homo sapiens
actggaaaaaaaaatagtattcttagtgtagattgcaaaaggaaagaggatatgttagatgatttgcccaaaatttaaacaggattcgctttttaaattcaagcctttttgctttcattcagatctggtcaccagacttactttttccttaaggcatatatgaatcatcttgttctttcattcagaaatcaaaagttcaggcctagatcagtatttaccaaaactggtggaacactacctttccactgagagtgcattacctttttttgagtctttgaaaagaatgtcagctgaacatggtctggaagtggccaaaactctgtgggtggggagaaaggaagaaataacctatctcccatttaaaaacctaccacctattaaataaacggcagtcttgttctgtggagtattcatttgggttatctattctgatgaacaaatacaaattcttggtagggttttcttgcttctggataaaatgcttagtgttgctttttgttgttcaatcttargttttgtttcattttgtttttcagggtctcactctgtcaaccaggctagagtgcagtagcgcaatcatggttcgtggcagcctc

SEQ ID NO: 906848 - DNA, 597 bp, Homo sapiens
tttaaaaaggggagtttccctgcactatctctgttctcttctttgctgccatatgagacaggtctttcaccttccrccatgattgtgaggcctccccagctgtgtggaagtataagtccaataaatctctttcttttgtaaatttcctagtatcaagtatgtcttgatcagcagcatgaaaatggactaatagagtaaattggtaccagaagtaaggtgctgctaaaaagatacccaaaaatgtggaagcgactttggaactgggtaacaggcaaaggtcggaacagtgtggagggctcagaagaagacagaaaaatgtgggaaagtttggaacctcttagagacttgttgaatggttttgacaaaaatgctgataatgatattaacaataaagtccaggctaaggtggtctccgatagagatgagaaacatgtcgggaactggagcaaaggtgactcttgtgttggtttagcaaagagactggaggcattttgcccctgccctagagatttgtgaaactttgaacttgagagagatgatttagggtatctgatggaagaaatttctaaggagcaaagcattcaagagctgacttgg

SEQ ID NO: 906849 - DNA, 597 bp, Homo sapiens
tttaaaaaggggagtttccctgcactatctctgttctcttctttgctgccatatgagacaggtctttcaccttccgccatgattgtgaggcctccccasctgtgtggaagtataagtccaataaatctctttcttttgtaaatttcctagtatcaagtatgtcttgatcagcagcatgaaaatggactaatagagtaaattggtaccagaagtaaggtgctgctaaaaagatacccaaaaatgtggaagcgactttggaactgggtaacaggcaaaggtcggaacagtgtggagggctcagaagaagacagaaaaatgtgggaaagtttggaacctcttagagacttgttgaatggttttgacaaaaatgctgataatgatattaacaataaagtccaggctaaggtggtctccgatagagatgagaaacatgtcgggaactggagcaaaggtgactcttgtgttggtttagcaaagagactggaggcattttgcccctgccctagagatttgtgaaactttgaacttgagagagatgatttagggtatctgatggaagaaatttctaaggagcaaagcattcaagagctgacttgg

SEQ ID NO: 906850 - DNA, 545 bp, Homo sapiens
gaaaatgtggggttgaagcccccacacagagtccccactggagtgctgcctagtggagctatgagaagaggccactgttctccagaattgtagattccactgacagcttgcaccatgtgtctggaaaagctgcagtcacacaatgccagcctgtgaaagcagtctggagtggggctgtaccctgcaaagtcacagttgtgtgtgggagcccaagaccatgggagcccaccaccgagggagcccacctgttgcatcagcgttccctggatgtgaaacatagaaacatagagttgaaggagatcatttaaaaactttaaagttcaattacttccctataggattttggacttgcatgggccctgtggctcctttgttttggtaaatttctccaattaataatgggtgtatttacccaatgcctrtgcacccactgtatctaggaaataactaactaacttactttttgattttataggataataggtggaaggaactgtcttgtctcagatgagaatttggacttggacttttgggttaatgctgga

SEQ ID NO: 906851 - DNA, 606 bp, Homo sapiens
taggggagaagatacagttgattaaacraaatatagaatattgaagagccaaatacatccacctataccacactgtttcattagccaccagctcaccaaattctatttaaaaaggatttcgaggaattatagatttaagtaacataaatatcttcccacttaaatatttttcaaaatatggaaccattcagaagatatacaatacagttgataaagattttctatcatatctaaaagtaatgtatccatttggaaaaaccacctactgaaatgtagaataaaaataaaacttagcactggcttgtcaactatttgaatttattttatccaaaaaatactatgttatctcaatcatattctttgaaaatgtatgcaagtatatttcaaagtaagtccatacagacaacttgtatgggaaaagtagaaaaatagatatatgaaaagggaacaatgtattaataaatacaatactggtagcattgcaaaaactgaaaaacacatgacactcttctttgtatcatacaagtttgttattattcccagtcttgaaaatttcaattcaattctagtacttaatctttcacatgtctgaaaaagttgcactag

SEQ ID NO: 906852 - DNA, 601 bp, Homo sapiens
ttcattctctgcatctctaatagttttcttcagatgctataacaaattaccacaaacttaatgacttaaaacagtacaaatttattctcctacaattctggaggttgaaagtttaaaatcagttgcactgggctgaggtcaaggtgtcggcaggctggttccttctggaggcttggggagaatcgatttccttgccttcttcagtgtctagtggctgcctgtgttcctgggcttgtggccccttcctccatctacaaagcaacccactctcaagctttacttctgccttttcctttgactctgaatctcccccgcacccctttgataagaaccattttgattacattgggctcactcagataatccaggaaaaatcgtcccctcttaaaacccttaacttaatcacatctgcaaaatccttttcgctgtgtaagatagcatttgcaggttctgaggatcagatgtgaacttatttgggagctgctatgcaccctaaagcaacatctatggaatttattgacttcatctgagggtaagaggatagacattttctcctttgatttgacctgtggttktaagttgatgtatggccaaggcaact

SEQ ID NO: 906853 - DNA, 632 bp, Homo sapiens
gctgcatagtattccatggtatatgtgctacatttttttaatccagtctattattggtgggcawttgggttggttccaggtctttgctattgtgaatagtgctacaataaacatacatgtgcagtgtctttatagtagaatgatttataatcctttgggtttatgcagccaacaaacatatgaagaaaagctcatcatcactggtcattagagaaatgcaaatcaaaaccacaatgagataccatttcatgacagttagaatggtgatcattgaaaagtaggaaacaacagatgctggagaggatgtggagaaacagggacacttttacactattagtgggagtgtaaattagttcaaccattgtggaagacagtgtggcaattcttcaaggatctagaaccagaaataccatttgacccagcaatcccattactgggtatatacccaaaggatggtattattttttaaaaaaaatgtttgatacaattcagcagtgaagccatcagctcctaagcttttgtttggtgggagactgtttattattaactcgatttcttactcatgattggtctggtcagattttctatttcttcatgatttattcttgataggctgtacgtttctaggaatt

SEQ ID NO: 906854 - DNA, 652 bp, Homo sapiens
ttgaaagttatgtcattccagctgtcaaaggaggagtcttgggaaatcactaactttgcattctgggcctgatagtctgggatagtgatctgagccaaaatggcctggactggtgctgggggtgagccttgttggggaaaaggctaaagctacctaaaagtttgctcttttaaatcagggttgcctgatgaaccagggtcaagctgaggctgactttggtgggaagtttccctgcttgtcttacccttttaaatgcaggatctttaaaggcaatgactgggcatgtgcacagttattttctactacttacccagggtctgtcataatttatagttgattgataaacaattgttgaatgagttggaaaagcaaggaagaaggggagttgaagtaagtgacttaggcagagactaaacagcaattaggcctgaagcctgatacttagtcagctgaggtgcgcaagatcagcactttctaaattatgggatgctagatagacttctggtgatgcctgggtgcaatggcgcataaggaaataaaaatggcttccaatttctgtaggaaaaactcataaagacatctttcaggaactgagtcaatgaacatagttttaaaaatgtataccwgtgttgcttataaactgatatcaata

SEQ ID NO: 906855 - DNA, 655 bp, Homo sapiens
tgcccaaactcaattcagtgtgacaagggaacataacagctattaagcattcagatattctcaagacaamagagaagattctcttttatagcagtcttcacctttaaacagatctaccctcaagttagtgtattagaagatagctacaacggtatcaaatgtggacaactagttaggaggaacttaatatagatataattaatatagttataattaaacaaacatccaagtttatttaaacagaataaaacaataagaacagacaaaactataacagcattaggtaaagtatttcccaaagggctttagttaatagcctgtaagattcagtacatcaatatcaaaggaaatatataccttactcatttaatattttgcttggaagtcaaaagaaatgttttgagtatttgtttatcattaccagctgttctgtctaaaccctcaagagatagattataagaggaactgaaaacaaggactatggtgagtctcctaatattaattgatgactctcttaatattctattatacagataaattcttctaaacatcacattttagcctcttctaaggtttgtacacatctatatcatttatgaacccatatctagcaggatgtttctgtatcacagacctcaggttactgtggactaga

SEQ ID NO: 906856 - DNA, 565 bp, Homo sapiens
atagccattccgactggcatgagatggtgtctcattgtggtcttgatttgcatttctctaataatcagtgatattgagcttttttatgtatatttgttggctgcatgtatgtcttcttttgggaagagcctgttcatgtcctttgcccagttttttatgggttgtctgatttttttcttgtaaatttgtttaagttccttgtagactctggatattagacctttgtcagatgggcagattgcaaaacctttctcccattctgtaggttgtctgctcactctaatgatagtttcttttgctgtgcagaagctctttagtttaattagataccatttgtcaatttttgctttcattgcaattgcttttggtgttctcattatgaaatctatgtctgtgcctatgtcctgaatggtattgcctagattttcttctagggtttttatagtttygggttttacttttaagcctttaatctgtcttgagttaatttttgtatatggtataaggaaggggtctagtttcaattttctgcatatggctggccagttctcccaacaccatttat

SEQ ID NO: 906857 - DNA, 628 bp, Homo sapiens
aatcttgagtgtgctacactttctatgctggcacttgaccttcatggcttatggccattgacttttagctgctctgccctctgagatgttcaagattttgccctagctttgataatcaggtccttaggttattctccaccctccaggtcctttatccaggcttattcagatttttcagcccaatttcagtccttccaggtctttcctatagggttgattgttgtccctcatctttaggagcaccacaggagttgcagaattactcttccctaaccccttactcccagctctatatgactaccaatgaccatagtttgaaacagaatagacagaggtccaatcctttctattatcaggttcccaaattaaaagccattgtgaggcagttttccctctccatcataggatttattccagggagagatgatagaataaatcaccctggtactgtgtcttttctcttgtaatctaaattcttttgtccatctgcagctcagaggatcttttgtagagtcttggggcaggaagaaaacattttttttacttgtttgtccatttggaggctaaggatgtcacacttagctgcggactgtctcttctgcaatacrtgttcatccatttgggtgtc

SEQ ID NO: 906858 - DNA, 687 bp, Homo sapiens
gtgatcctttggaggagaagaagcgttctggtttttggaattttcagcctttttgcactgttttcttttttctttttttttttttttcatcttcatggatttatctacatttggtctttgatgttggtgtcctccagatggggtttttgtgtgggtgtcctttttgttgatgataatgatattgctttctgtttggtagttttccttctaatagtcagacccctctgctgcaggtttgctggagcttgctggaggaccctccagaccctttttgcctgggtatccccagcagaggctgcagaacagcaaagattgctgactgttccttcctctggaagctttgtcccagaggggcacctgccagatgccagccagaactctcccgtatgaggtgtctgtcaacccctgctgggatgtttctccctgtcaggaagcatgggggtcgggtacccacttgaggaggctgtctgtcccttagcagagctcaagcactgtgctgggggatccactgtcctcttcagagtcagcaggcaggagcatttaagtctgctgaagctgtgcccaccaccatcctttcscccagttgccctgtcccagggagatgggagttttacctataagcacctgactggggctgctgcctttctttcagggatggcctgcccagagaggaagaatctagagagg

SEQ ID NO: 906859 - DNA, 655 bp, Homo sapiens
actgacaaatagccacgacttttcaccccttagagaccacttcaaggactgtcctagttgtgtgacttggtcccctcacctgtctatctgtcatatttcatcccaacttttaaratagcagtgtggcatgttttcttgtgcagtaatctatgcaatatttgcaggattctgagttatttttctaaataaatatgactaggatgtgcagtatttttgagaatttgcaatatcccttaaggttcaaaaatatgtttctcaaagaggaaaagttcagcaatgtgcttcaaggcagaggataaaaacacaaaaaagattccaagctagatgttttcctgtttctcaaatatttaattttttatttttcatttaaaacagtaggtaagggccaggcatggtggctcacgcctataattccagcactttgggaggccaaggcaggtggatcacctgaggtcaggagttaaagaccagcctggtcaacatggtgaaaccctgtctctactaaaaatacaaaaattatccaggcttggtggcaagcacctgtaatcccagctactctggaggctgaggcaggagaatcgcttgaacctgggaggtggaggttgcagtgagccagatggctccattgcactccagcctgggcagcaagattgaa

SEQ ID NO: 906860 - DNA, 480 bp, Homo sapiens
tagcaaagaaaagtccctcttgtctgtttctcagtatcctcccctggggctttctgccctgcccaactactgacctatgtaattccaatggcatctatcatctctatctaggcactaggcactcacacctcacaaacacaaacatccacatatggaaagtgaggagcttggagcagagatttcctacaatgaacatttttataaaacaagaaccaggcaacttgccacattcatgttccttcaacttatagtaatgggtaactggatggggcaatttgaactagaatttaaagtaaaaaggaaacacaaacagcctccatttgtttatatattacaattttgaaaatgtttactgaatacccaaatgctatctactttgtgaggtatcacaaatgcttttacagagtcaacatgcatagagactcrgcaatatttcttgtatctaaggacttgggatggtgaaatctcctttgttgagga

SEQ ID NO: 906861 - DNA, 480 bp, Homo sapiens
tagcaaagaaaagtccctcttgtctgtttctcagtatcctcccctggggctttctgccctgcccaactactgacctatgtaattccaatggcatctatcatctctatctaggcactaggcactcacacctcacaaacacaaacatccacatatggaaagtgaggagcttggagcagagatttcctacaatgaacatttttataaaacaagaaccaggcaacttgccacattcatgttccttcaacttatagtaatgggtaactggatggggcaatttgaactagaatttaaagtaaaaaggaaacacaaacagcctccatttgtttatatattacaattttgaaaatgtttactgaatacccaaatgctatctactttgtgaggtatcacaaatgcttttacagagtcaacatgcatagagactcagcaatatttcttgtatctaargacttgggatggtgaaatctcctttgttgagga

SEQ ID NO: 906862 - DNA, 659 bp, Homo sapiens
aacagtgggttccttcccttgtctgacagtgaaacctatggctcacttcagccctctctcacctagtcacgtggggtyactggagcatgattgcagttgtcttcacagtagtctccttaacatgctacagtgggatgccatccactgctcagtatcatcagaacatgttgtctctgtgtcctcacttccaatgtctgcttatttttatcctcctcactggttttcaaaggcctccttatccacttgccaatctcagccaataagctccttctctctggccacagagttagagggctgcctttcttccttttccataattcaactcacttgtcagacccagctcaagctcctctatctgaatttctatgtagggaggctgttgactaacgggccatcggggctgcctcattactctgttgtctggaacatacccatctttgcaaggaattgcacaatgtattaacggcttctgaaaataaggcttaccatgcctcttggaaaactaggataaaatttatctgaaataaaatgaccaatgcaagcttaaaaaagaaacccacataaactaaactttttggaaacaaaacagaagtttttggcctgaataacttcctcaaatttactccagttaagggcttatttatagagacaacccaaca

SEQ ID NO: 906863 - DNA, 632 bp, Homo sapiens
acaaaagagctcaaaatgacatcttcttcttaagtctttgccaggacaattgaataaatcatattttgtaaggtgtttagcttaatasatctgtctggatttcaaatgtatgtaaaatgcttttttaaacaaaaggcactaccacattgatctttttttggcaatttgccttgaaaaatagatgcaaccagaattaccccttttattttaacaaacctttgaaaatgcacttaaaatttactttctgtaggcaaaaacatttgatagaaaagatgctaattatgccaatcacatggcaaatggaaactttttaataagcagctttctcttatagtcttaaagctacagtttatttcagaataagtcttaaatacaacccaaggtgagtagtttgagaaaatataaatgattgcttgtgttcacagattagattttctggccaaattccctagtttggcagttttagcccatggtaatatcaaatgagattccaggcaagcagagtgaactgcaaagaaaccctggctttctctcataacctaaccccccacattagaaaaaaatgactgtgaacaaatctgtcaaaaccaggaccttcactatagaataaccacccaagacccaaagcataa

SEQ ID NO: 906864 - DNA, 610 bp, Homo sapiens
cacccacatgcagaaatgagaaaggaccaatgcaagaactctggcaattcaaayggccagagtgtcttatgtcctccaagtgatcacactagttctccaacaagtttcttaacaaggctgagatggctgaaataacagaaatagaattcagactatgcataagaatgaagatcattgagattcagaattccaaaatgcaatctaaggaaattaagaatataataaaatgatacaggagccgacagacaaaatagctggtataaaaacagaaaacaaagaacaaaacaaaaagcactgaactgacatgatagagctgaaaaacacactccaagaatttcacaatgcaattacaaatattaacagcagaatagaccaagctgaggaaagaatctcagagcttgaagactggctctctgtaataagacagtcagacaaaaataaagaaaaaagaataaaaaggaagatacacaacctccaagatatacgagattatatgaagaagcaaaatctactaatcattggtatccctaaaagagatagggagaaagcaaacaaattgaaaaacatatttcaggacatcagccatgaaagcttccccaaaccttgctgg

SEQ ID NO: 906865 - DNA, 579 bp, Homo sapiens
ccagagtccacaggaatgagccccagagacctcccaacrcccccctcagagcaaggacaagaaaaccaattcctttgctatctcttcatctccttactgtttctcaatttcccaacttttgtaagttcctgtttttctttcaatgcagctacaaggtcacaagcttaaccctgtcactgtttgattaactgtgtttgttctgcttctgtaagcccacttgcctgcaccatgagtttcatgccattagactcccgccaccccaatcaaactagccagcccctttcaggagtatgtataaaagtcaagccctgtctttgttcagggctcagcttttggatgtgaatcttctgggccagtggccacttaaataaaatcctcctgtttcacccattggtctctctggtccttctgattcctgcaacattacaaattcacttgtaaggctacacatttatatttcactattattcaccatgattgtacaattttcataacaagactatttcagatttcaaaattatgagcctcatttcaagaaaaaatttaattgattatgtttaaaagcaaaagattcttcct

SEQ ID NO: 906866 - DNA, 602 bp, Homo sapiens
tagcaagtacacgggggcgggcagaggtagcgagtgaaccaagatacagtttttgaactctataatgaagttacattccaactttagaaatactttgaataataataagaacaatgtttagtacaatcatttctgaagagctggtacattatacacaaggctctaaaaagcacaattcctgttcttaagtaaaaagaaagaagtgtaagtaagcagtgaagagataagaatgtctcatcaaaccattaggcctggagaaaatgttaattttgcacacgactgggattttatctgctagattctgttaccattgaaatgttttgagggactcagcaggggcatggcaagcatgtctggtttaagagaaaaactgaacacattccttctccaagtcagtgaaccatggccagagtctcaacacctgcaccgagcaacagagcagaataatctcattttaaatgaaagtctgcattttctctggaggtcaaaactactttataaagagcaagactcatcactggccagtgagctgggagagtgggctmttcttttatgtctaaagtgattattttgtaaatgagttaaaacctgcattctaacag

SEQ ID NO: 906867 - DNA, 641 bp, Homo sapiens
agagaatcctctgggaatgaatgatcacacttcaggtcataagagataagatacacctctgtttactgtccaaactgaaagaaattatgcaccactcccttcaataaatacatctgctaagataaatgtaggcatgtgcttttaaacctatacatatgcaggacacatatgtaggtatatgaaaaataaaacaagctgggtgcagtggctcacgcctgtaatcccagcactttgggaggcagaagtgggcagataacctgaggtcaggagttcgaggctagcctggccaacatggcgaaacactgtctctactaaaaacacaaaaattagccagtcgtgatggtgggtgcctgtaatcccagctacttgggaggctgaggcataagaatcgcttgaacctgggaggcggaggctgcagtgagccgaaatcgcaccactgtactccagcctgggcgatagagcaagactccatcaaaaaaaaaaaaaaaagggggggggaaaaaaagaaaggaaagggaarggggatggggaaaggggaaaggaaaaggaaaagaagaaaaggaaaattatctgctaaaataaaggcaggtatagtttggtgctgtgctgatatgtacaagatacaggtataatcaagctgt

SEQ ID NO: 906868 - DNA, 656 bp, Homo sapiens
tgttcactgctttatccccagaatctagaaaagtgcctctcacaagatatgaacttaataaatgaatttttaaacatgtatccccaaaacaaaatatagaaaacattaagagtattccctaaagtagctcagagaaacaaaacacagtgacattgcaggtggccttccttaataaaataccttgcttacttccttttccatctggcagtagttgttttagggacaggactcaacaggcccagtgagaaggcacagcagcttttgcttagtccattctgttaattccagaatgatttgaaggcttagagaagaaatcacaaaaccaaaacatatgacctctgacacaatcatcttgtagtaaccatatttctgaaaaaaaactgccacaggcaatttaagagaagaccccgaactaagaggtgggctcagtcctcatcaggaaatatcaagaagtaccccttgccttctccttcaattcttttaaatcagataagtaagaacatttaagctgtgtttgtggaatcagttgaaaatggcttagmcagggaaattatttttttttcccctttctaaaatccttttggttttgctctgatttcacttcttctctcattctctgatgacactattcaatgactgattttatttctctaaaa

SEQ ID NO: 906869 - DNA, 626 bp, Homo sapiens
tcagtaaatgtgaaagaacagaaatcataataaacagtctctcagaccacagtgtaatcaaattagaactcaggattaagaaactcactcaaagttgcacaactccatggaaactgaamaacctgctcctgaacgactactggctacataatgacattaaggcagaaataaataagttctttgaaaccaatgagaacaaagacacaacataccagaatctgtgggacaaagctaaaacagtgtttagagggaaatttatagcactaaatgcccacaggagaacgcaagaaagatctaaaatcaacaccctaacatcaaaatttaaagaactagagaagcaagagcaaagaaattcaaaagctagcaggcggcaagaaataattaagatcagagcagaactgaaggagacagagacacaaaaccccttcaaaaaaatcaatgaatccaggagacggttttttgaaaagattaacaaaatagatagactgctagccagaataataagaaaagagagaagaatcaaatagacaaaataaaaaatgataaaggcgtatcaccacttattcccagtgtttctgctttcatgtcctcctcattggagagatttggaaacccattatgtggat

SEQ ID NO: 906870 - DNA, 579 bp, Homo sapiens
tcttcaaactaaaacgtaagatattttaaagggaatttattttgaatggcttaatactatgattctctaggtatgcttctttgttatatgctttttctgattttttaaaacttatttagttaccatctcccctttacatgtcttaagtcatttacatttcaaagcaacaaaatgttaaacataaaagtctattagatgaggaactgggggaggtgaaaataaagaaagtaaccaagaaacttacatatatgtggcactcctgccatcttgtgggttttctgtgttttccactgacttaatttattatttttgtttcagggagttttttgaaagagcatagaggtacatattgagaactaagctgtcaattacccaaacctatcatactcaccaaaagttaaaaaaaattaattagggagacaagttaagtacaaaatgcagcttaatctcaaatagttttgaaaaatatcaatatttgtgcttatgtctatatctatctatacctcyatctatagctatacctatacatacactgacatttattcctatggaatatgagacagatagtgagtgagaaag

SEQ ID NO: 906871 - DNA, 579 bp, Homo sapiens
tcttcaaactaaaacgtaagatattttaaagggaatttattttgaatggcttaatactatgattctctaggtatgcttctttgttatatgctttttctgattttttaaaacttatttagttaccatctcccctttacatgtcttaagtcatttacatttcaaagcaacaaaatgttaaacataaaagtctattagatgaggaactgggggaggtgaaaataaagaaagtaaccaagaaacttacatatatgtggcactcctgccatcttgtgggttttctgtgttttccactgacttaatttattatttttgtttcagggagttttttgaaagagcatagaggtacatattgagaactaagctgtcaattacccaaacctatcatactcaccaaaagttaaaaaaaattaattagggagacaagttaagtacaaaatgcagcttaatctcaaatagttttgaaaaatatcaatatttgtgcttatgtctatatctatctatacctccatctatagctatacctatacatacactgacatytattcctatggaatatgagacagatagtgagtgagaaag

SEQ ID NO: 906872 - DNA, 664 bp, Homo sapiens
gacttccaatactatattatataggagtgatgagtgatgctatccttgtcttgtgccagttttgcccactcagaatgatgttggctgtggttttgtcatagatgtcttttattattttgaggtatgtttcttcaatacccagtttattgagagtttttttaacatgaaggaatgttaaattttatcaaaagccttttctgcatttattgagataatcatgtggttttggtctttagttctctttatgtgaagaaacacatttattgacttacatatgttcaaccagccttgcatcccagggataaagcctacacgattatggtggattagctttttgatgtgctgctggattgtgtttgcaagtattttgttgagaattttgcatcaatgttcatcaaaaatattggcctgacattttctttttctgctgtgtttccggcagattgtggtattgggatgatgctggtgctggtctcatagaatgagttggagagaaatttttcctcctcaatgttttagaatagttttccrgtagaaatggtaccagctttttgtacatctggtagaatttggctttgactccatcagattctgggcttttttttttttttttttttttggttggtaggctttttattgctgattcaatttcagagctcattat

SEQ ID NO: 906873 - DNA, 664 bp, Homo sapiens
gacttccaatactatattatataggagtgatgagtgatgctatccttgtcttgtgccagttttgcccactcagaatgatgttggctgtggttttgtcatagatgtcttttattattttgaggtatgtttcttcaatacccagtttattgagagtttttttaacatgaaggaatgttaaattttatcaaaagccttttctgcatttattgagataatcatgtggttttggtctttagttctctttatgtgaagaaacacatttattgacttacatatgttcaaccagccttgcatcccagggataaagcctacacgattatggtggattagctttttgatgtgctgctggattgtgtttgcaagtattttgttgagaattttgcatcaatgttcatcaaaaatattggcctgacattttctttttctgctgtgtttccggcagattgtggtattgggatgatgctggtgctggtctcatagaatgagttggagagaaatttttcctcctcaatgttttagaatagttttccagtagaaatggtaccagctttttgtacrtctggtagaatttggctttgactccatcagattctgggcttttttttttttttttttttttggttggtaggctttttattgctgattcaatttcagagctcattat

SEQ ID NO: 906874 - DNA, 460 bp, Homo sapiens
acctgcacctcacaaatctctcaagaaatctttttttccacgtatctcttgcaattgaaagaacaaaagccatgctcacacattctcctgcatgaggaataactggtttatttggcttgtcagggcctttgaaagaagctgagtgcttaggaaggtaaataatgaacatatgttgcaaacctaaagtgtcttgataagtggatgcttttgttgactaatgctgtttcaaatgtgaagttgggtattcaaaactcatgaaatagtccagcaatgttgacttaaggagataaggtatatattctgctaacattaacagcagacttcatttattaagatttagtgagctataactagtgtaaaaaaatgaacattcatgttatatrtttatttcaactctttcaagtcaaagaagctaggtaatgtgtagattaaaaaatatgttttcagctcacgtgcccat

SEQ ID NO: 906875 - DNA, 562 bp, Homo sapiens
aagctaaagaaaaaatattctaacctatttgtgaagcaaattctatccatggcattctaaaagattgagaactttatgaaaatgmtaaattattatatataggtctacatatccaaattttaaatataagttaaatcaaattttagaaatatatacatttctactgtgtaacaaatgagttatagtattggggagccccaaaaccaaaatttctctgagtatactatttacatatactgtacattgttcaaaaatctcctgttaatttgatatccaagtgctttcaaacactgaaaaaaaaaagaacattctttttggaaacgaaaatttacagatgcagtgtcctccatagaggactattttatctctgcttagttcttgcctgtatccttcaaatcagtattaaatttagtagtgataagatctacattttagttttctatttcttccataagaaatttccacaaatttggaagattaaaaacacaaattttattactttacatttctgtatgtgagaactctgacatggctttccctgggctaagaccaagctgttgtc

SEQ ID NO: 906876 - DNA, 631 bp, Homo sapiens
acaccaaacaatgatggaaaaggatttaggttagtttgcatgtrtaaattaaggaaaagcctcagatattatctcctccatctactaagttatatatgttcaaagcagtatctttgtataataaaatccagaaaaaaaagacttaatcttaaaaacaaagcgcaaagtaaaacataaaaagcgtattggcctcctttgcctgaattgctcttttgtattgcttattttctgactcacataggattgattgttgatccctttctaggggaggaaaagaaagaggaatagtgtaacattataattatgttatatttcacagcttttgcttaaaatatcttgagttttacaaagttttattaatttcacaaaatgtattaagcagctactaagaataaagaacaggtaagataaaatacaatggtgacccttcagaaagctctctgtccagttaaaatagatattaattgtgtaggttcatcacataaatataaagtaccattttgataaatagtttgcagtgaagtaaacatctaagttactatgagaccatttgataaatagttccttttctctttttctcattagcatagctgcaagtcagcaggtagggaaagcaaagcactttcaaatg

SEQ ID NO: 906877 - DNA, 652 bp, Homo sapiens
gtagtttatgatgtaattcataactaaaacatatttatcctgtgttaaagcaaatataccttaaaatatgacacactaataataattaagaagctaaatgacaccatttattcttaattatattactttatatatatatatatatattcagcaatctgaccaatgtagtactttgctctgatactgttattttgtaatatttcacttttttcactgtatcatgatatggtctttcccacagatatgaaaatcaggttttcattttctacaacataaaagttaatttattcaataatcttaatcgattcttacatggtgttttcaaaaatgcagttgcattgagggaaaaaacccttttggactaaatataacatttcttgttgttgttgttgttgttgaattatgtatttaattgatttatctccaggcttctgcaagccttaattttgcctcaagaaggatgacttattgtgaggactaatttttcaaacttatttcactaaggttgcctttactacacaacacttaytattacacagagctagagttcaacaaaatacttctggtgaatcttttgtctagatatagtatataacaatttcttctttccagtatttctaaaaaatcttaaagatttaaaaattgtattgta

SEQ ID NO: 906878 - DNA, 673 bp, Homo sapiens
  misc_feature 655, 656, 657, 658, 659, 660, 661, 662, 663, 664, 665, 666,667, 668, 669, 670, 671, 672, 673: n = A,T,C or G
tattctaatacacagagaagtgaatatgccatttcaaaatgaatatttaataaaataaagaaactctactatatatcattcttggatcatttaaatttacttaaactttttgagcctcagayttttcatttatagaaaaagaaaacatttaacttaaaggagtgttataaatatcaggggaaaaatgtatatatatatgctgtttgtacatgtacacacacacacacgaatccaagtttataacttcttaacaaaaaaactactacattcttaaattataaactctgaattgctaaatgtattttcttttctaatcagcacctacttttgacttgaatctgaaattattttttgaccataagcccagtattaaatcccatctttttaacacataatacatattgaagccaagattcttctaacctccactctggatatcaattctaaaatgattattagtctacactagttactgctttacttttctgttccctacttgtaattacaaccttgtactgaataattatctaaataccaacccaactaatgagggaccagttaatctgtctagtacctatgaaactttattcttgagggactagagtttgtctttgttctgtagctacagccttggccccttctttaaagagagacnnnnnnnnnnnnnnnnnnn

SEQ ID NO: 906879 - DNA, 560 bp, Homo sapiens
gcttattccgcttgatattcatgaacatttcagctctccatgagagtcctaaaagtttttttttctattttaatgtcataatctccaaagttatcaraaccttgcattcaaacacctgttagagctctatagctgattatagagtcaccgtctaaagaggatcaaaacaaggcaataattgtccatagatgacaaaacatcttaggacagccacagtcaaaaacaattgacaaatatatttgttacttctgtggcacacaataatttaacataacaattataattattactgataacctatactaaattatatcagaattataagagttttgagtaattctggaacacctaacaataacatatttatacaagtactgtccaaagaaacccaaatgttacctttgcattagtgtactattgatgtcaaactcaactcttaacaaatccttatagacaaatctattcaattttaataagtttgaccataaggtatgattctcatacacctcctataatcttttctaattttctgttaaagaacagaacaatgctctaagaaa

SEQ ID NO: 906880 - DNA, 257 bp, Homo sapiens
agtcctggaattagaattttgaaaatgctggctgggcacagtggctcacgcctgtattcctagcacttcaggaggcygaggcgggaggatcacctgagctcaggagttcaaaaccagctcgggcaatacagtgagctcttgcctctaattttttaaaataaaattctaagtaaaattttaaaataaaatgttcaaagtaaaaaagttaaaaattaacaaaaagaattttgaaagtgcttatcagagaattctagtca

SEQ ID NO: 906881 - DNA, 651 bp, Homo sapiens
ttaaaggatataagggaagtatagaattatcaatttaaatccatctgctcctacagtgttcttacaaaataatatttgttatgtcatctcatgtctttcatagccattttagtgtactcagacgtaaattgtagtctggtgactttaaacatacttagaatcctgaagacatacagattgtcaaatttgggacaatagataaaaaatgaatatcatttgtcttagtccatttgaggggctataacaaactaccatgaactgggtggcttataaacaacagaaatttactcctcacagttctggaagctgagaagtccaagatcaaggtgctggcagattcaatgtctggtgaagacctgcttccaagttcagattggcccttctcgatgtgtcctcacaaagtggagggagacaaagcagcactctggggcctcttttatgagtactaaaaccatccatgaatagttctctagcctcatgacttaattaattcccacaggccctacctcctaataccaccatattagagattaggtgtcaacatatgaattttgtgaggacataaacacttaggctatagcaccattcaatatatgaggcaaaaagaaaagggaaaaacaartaagtcaaggccaaaagaattatcctgta

SEQ ID NO: 906882 - DNA, 649 bp, Homo sapiens
acttaattagtttagtatatttgaccatacacttttctatcacttaatgatatacatgtcattctctctacgtatatggttccacttttatcacaatagaacggtagggccagaaattggatactgtagagtggaaaaatttcaatgatttatgaagatgagaagaaactcactgtattagttttctgtggattacaagcaagtcacacattttgaatgtactcaaggaaaactatgctaaagagactgccagtgaaccactttagctcattctagttcacattctgctctccggtcccaatgtttcacaatcaaatgcaaaatatattcacctcatccccaaattcccaaaagtcttattttatttcagcatcagtacaaggttaaaaattcaatcgtctacatctggtccagttatatatagatgatgctcctggttgtaatttattaagtacagctcacggggtacaattcctctctattgtgaacctgtgaagtaaaacagccaaattggctaccaaaacacatccagcatacaattgtggaacaagaataggatrccaactacagacattgcaggtcaaaaggtaagaaatacaaggtaaaggaagggtcactggtccatgacaggtttgaaatacagctgtgc

SEQ ID NO: 906883 - DNA, 629 bp, Homo sapiens
tggctgtggccagcctcttcattaacccagcattcattgtttcaggccccaataattttacagagaccatataaataaaatcacatgttacaaargatttgggtatcacttatttatgcattatgatgttgtgtatatcaatagtttgtactttttgtcatttagtagtattctattgtaagcaaataccattttttgtttgtttgtttgtttttatttctcagttgaggtacatttgttttgcttccagtattggtatattaaaaataaatatggtataaatattctgatataggtttcttagtaagcttagtattttgtttcacttggagaggtatctaggagtgggattatagagtcatatcgcaagtgtatgcttgatgctctaagaagacttccaaattacttttcaaaataactgtaacattctgcatattcagtaatagtgcatgagaatttctgaactttgtgttcctatcaacacttctcattgtgaatttgtttgtttagacgttttaataggggtcttttgatacatttgtccagtttttcttttgggataccttatgacaaatgatgttgaacatctattcttgtacttatttgccatctgcatatcttatctgatg

SEQ ID NO: 906884 - DNA, 549 bp, Homo sapiens
caaagctggggaggccttacaattaagacagaaagcgattgaggagcaaagtcacgtcttacatgrtggcaggcaagagagcttgtggaggggaactctcctttatgaaaccatcagatttcgtaaggcttattcactatcaggagaacagcacaggaaagacccatcaccatgattcagttacctcccgtgtggtccctccatgacacgtgggaattacaggagctacaattcaagatgagatttgggttggggacacagccaaaccatatcactgcagagagccaatttctattttttccatgtattctatttttctcatatggttgggtttggaatagtaataaaaacaatatatatatctagatcataaaacatgctctatgtaaaattatttacagactcataagacatgcaaaacttttaactcacatacaaaagacacaaatatggtgattcagtgaccactataaatatatttatgtaagcatggttatgatagatacgtagacaaaataataaaaggtaaattggagtatacaaatcatt

SEQ ID NO: 906885 - DNA, 586 bp, Homo sapiens
tgatgggcttttctgctaatcaagcaagtgtagaataaaacatgaaggaaaaatactttacccataatactggcaaaaatgcaaatattgatattataaaggtgagaaatcattgttatgaaagtggaaattgggcagcaattccaattttaaattgtaattgacctttgatccagaaatatgacttccaagaatctaatctacagaaattccaaacatgtggccgggtgtggtggctcacgcctgtaatcccagcactttgggaggccgaggcgggcagatcacgaggtcacgagatcaagaccatcctggctaacacggtgaaaccccgtctctactaaaaatacagaaaaaaaaattagccgggagcagtggtgggcgcctgtagtcccagctactcgggaggctgaggcaggagaatggtgtgaacccgggaggtggagcttgcagtgagctgagattgcgccactgcactycagcctgggtgacagagtgagactccctctcaaaaaaaaaaaaaaaagaaaagaaattccaaacatgtggacaaagatccttgaagatacctgtattaggccattcttgc

SEQ ID NO: 906886 - DNA, 548 bp, Homo sapiens
tgaatttgttaagtttgcaatggcacatttttaggtaagttgtagagatctgctaggctgttttccactgtgctcccctactttcgtctttcaatctaccattctcattgctttttcacagttttacagttaagcttcttgaaaagtgtctgaattacctctgttgactgctggcaagtttttattgctggtaaagtcatgggatatttttcatggttccatccatagggcagatttttttttcttctttttttttgagacagagtctcgctctgttgcccaggctggagtgcagtggtgcgatttcggctcactgcaagctctgcctcccgggttcacaccattctcctgcctcagtgtccagagtagctgggactacaggcacccgccactacgcccggcgaattttttgtrttttttagtagagacggggtttcaccatgttagccaggatagtcttgatctcctgaccttgtgacccacatagggcagatttttgtcctcgctgtgcttgaactgtagatcctttggtttctctgaagacccct

SEQ ID NO: 906887 - DNA, 614 bp, Homo sapiens
gttccacatggctgaggaggtctcccaatcatgctggaagacaaggaggrgcaagtcacatcttacatgggtggcagcaggcaaagagagagcttgtgcgggggaactcccattattaaaaccatcagatctcattattcaccatcatgagaaaagcatgggaaagacctgcccctatgattcgactacatccattaagttcctcccatgacacatgggaattgtgggacttacaattcaagatgagatttgggtggggacacagccaaaccacatatcattccttccctggctcttcccaaatttcatgttctcacgtttcaaaaccaatcatgctttcctaactgttccctagagtcttaactcatttcagcattagctcaaaagtttacagtccaaagtcttatctgagacagcgcaggtcccttctgaccatgagcctgtaaaaccaaggtagtaaaagcaagctaattacttcctagatacaatggaagtataggtgttgggtaaatacagccatttcaaatgggagaaattggccaaaacaaaggggctataggccccatgtgagtccaaaatccagtggggcaatcaaatcttaaagctccaaaatg

SEQ ID NO: 906888 - DNA, 663 bp, Homo sapiens
gaaaaagaacagtagctatcatcaggtagtcctgtctgttaaataaaaggaacactgcttctaagttctagtgagtgtttgctgattttttgataatgcctagcttttcatattttgctcttactttgtttcttctgtttaaaaaaaaaaaaaaagtcaacggtctatgttcccaaggctactctttagccaaacggtgtctccctgtatacgggttctgctaccatttgcagagtgtcaagaaagccctcatttccataggccatcagaaaatatgacccttacttctatttgtatacataggtaaatatttctaaattgttccttccaactctgtacttgcaaattaatatttcagagaagaattataaatgaaagcaatgtgctgtcttcttcccttgcatgagctgtactcctgacatttcagaggaatggtaggattgcaggaagaagagaaaatagggcagacaatggaaaatcatgtcatccatgaatttatcatttcacacatttgcattggtgacagccatctttctatcacattgggtacctgcctagtatacttacttatacttattactttatgtaggaagaccaaggtgaaagaattgtttgtatggycctcaactttacaaagagaaatgaatggttaatgagaatcta

SEQ ID NO: 906889 - DNA, 493 bp, Homo sapiens
gattctctgtcctgttcttccctgatccattttctacttcctggccctaccataaactsaaaaacaaacctcacttttgccttccgctgctctgatttctctttgtctaccccaaactgggtataaagtaaaaaataagtcaatgcaacttgctgcacccattctacccaactccttaccgcaatggttgttgggacttcttcactgaaaaaccagattcacagccacaaagactgtcacgctggaaggttcttggaagccatctactagccccctttcccggggcccactttaaggaggaaagctctgacgcttacagaggagaactgacttccccaagtgcacacagatcatcaaggatatggatgggacttgcccagtttttctttcccatatttcagatcagctcattacatccctgttttgggaagaaatattagtcctgaacaaaactgtgcagctggaaattttgtcttccaatcccttcccctaa

SEQ ID NO: 906890 - DNA, 632 bp, Homo sapiens
ctcatagaaagttcacagttttctrtttccaaaattattgtctccaaacaaagaatgaaaacttctcccagcaggttttgtttggtgaaaaagggtttcagagactggcaaggaaaaaattccttctatttcaataagcaagttaaaagggaagatttttttttctttgctttctgttgaaactgagctgataaaagtcctgaaatgagaaaatcaagggggcagcagttataagccctgtctaatgatgtctctttttgcctcttcaagagtatgtttaagcttcttactggctgtttcagtgtactcgaggtgattggctatataatacactaaacctttcaatacttattttacaaaattattcagctctagcaggctagacaatttcataaggttggtctctaaaggagacttatctgcctataagatgaaacggtgtacatcctcaccaaaaattcttagcatttcaataagttctaaggacactcatgattaacagtaatatcaaggcaacataatgactgggttttcagaaatggccctgtaagttggcagtcccaaagccattcttcttgcagcaagacctttcacttaaaaagaaatttcacatttacacagacagttaacca

SEQ ID NO: 906891 - DNA, 689 bp, Homo sapiens
tctaacttctcagcccttgttcttgctgacagaagaattcaccccaatcagaagaagctgggatcccatctcaaagatgccactggtttaccctgtggtctcaagcaagacattcatactctgtggctctctttggtaagagccccctgaagctgtcacccccctccctggccactcacagaacaaatatgaaggtcaggcaggtggttcaatgaggccctacgtaggtatgtccaggggcgtctctgcttacctgaacccatgcacaggttttctttaacttaacaatgtaggatattcagatttacgccctcctccactcctttctgaatactccctccaacctctcaccctgagatgcactttacttcaccccaacttgcttaactctttttctcccgagaatattttccagacaccagggagatgaggaggatttcatgttagggagtgactggcaggtgggggagaggaaggttggagagggactgaggttgttgcccggtaatcctccctaaatcatgtatggcaggaggtagcagacaatcatttcctgtgactgagacaagatcaaaggattaagaggttttgggcaaagaasgcttggcatttggtcacgagaattacaaaagtcgatctactgaaaagaacagcttgctaggtgaacgtctgacaatacagcctgggat

SEQ ID NO: 906892 - DNA, 427 bp, Homo sapiens
gaagagctgtgtagcctccatcatccatagaggtggcaggaacaccatttgcacaagtcagaatgaggaaaggtaggagacttaggatgtgaggcttgagmgaaaaacagttgacaaagcagcagcaaaattctcctagtgtacacagcctattctcctgaggggagtcatataagtgcaaatataacatctatagctacaggaattttttgtttgtgctcttttaatatttattttatctatttgtcacaaacatgtaatgaatgttggtatgcatgtatctgcctcctccactggactctgagaaaccacacacccagaatcttgtacatggttggaactaaataaaccacactgttagaatgcatgccaatctttaaaatagactattgtaatgttaatttatacctacatacatgacttaatt

SEQ ID NO: 906893 - DNA, 639 bp, Homo sapiens
cattttgtcaacagtgatttggttaagtctgagattttagagcagttcaatagaattttgaaatctaaaatgtggtgttatttaactgcttagggcacattttaatacatcgatataattcagcactttatcactagttacaacaaccaatctgaaaaaaatatatatatataaatgccacagccacaaattctttagatgtttaagagaaaaaccacaaaaccccattttattaaaaaaaaaaacaactatgtcaaaagtggtttcaagaaacaagtgagatatatttagtaacagaaagtggtaaccaggagttagcaaccagtttataattaaaataccatgaggatgcaaagattagctgtgtttttatccagaagaacaagaaacaataaccctttgtcaagagccagtacacagtattgaaaaagaaattgtcccaagcgacaagattggaatgaaattatcatcaaatgattgggctgacttaaaaatagtcatagtcgtaaggtgttgatgattcaggattactacatggtagaaggtaggtgaatgaaaatgttttctatttgaactacccagcaatacttcagtattaccttttacctgmagtttaaggatatataagtgggatttgac

SEQ ID NO: 906894 - DNA, 531 bp, Homo sapiens
atgggtaaactgttgtaaactagtgaaactatccaacaataagaagaaagccatactctcatgccatttcatatggggaaatttatatcacaaatctttacagccttacatagataaggtatgtgtgtaaacatcttagacacttaatgtctttcacctctcctttcaaggaataatagcaacttcaattttttactgttttttcaaatcagaagaggtgagtttaatggattaaattcgtaagtatttttcagttcttaaacaccttatcaaaagaaatttttacatgcttattttgaagcatgcttacgatactggaagttttgttaagaatacttggatgaagtcagttcaaagacttttttttccctgaagttgttaatttttggacaatataaraaaaatctagtttgtcaccagctgtccaaaaattcgacaagtagctccctctcctggaggaaaaaagtgagttcctcttcaagctgttaaaacacttgtactcttaaaaatatattttttaatacatgaagc

SEQ ID NO: 906895 - DNA, 645 bp, Homo sapiens
ccccctcccccacaaaaaactraaaaaacagggagcccttctgcttctatccctacatttccacagtggtccacgaaggaggaaacttctacctccacttctgacctcctgaaagagtcatagaaagcatatcccactcttaatcccttggatcagggatggtcagtgggtgatccaagcaccgcattggctgggccatgccttactagaagtaagtttcctgtgctgaggtgcagagaaggttgagccttttatctctttatctgatcagtcaaaatgagcgcagaagcttgaggggtggtggatgtagccctaagatcctctttctggctgctgtctctgcaaaaggcaacccttcttcccctctatagagaggttgagtacttggaagtagattctactgtgcagatagattttaccccagcaagtgtgtctcagagtatgctgtcctcggctttcctgtagatttgaagtgagatgtgggaagcctctggtctaagccgcattatcaaacaaagttcaccaaaagccttacattcttggtgtaccctgttcttgtcagctgtctattttgtgtgtattctcttttggttatcatggtggaaaggaaaggcctgaggttttggctattgaatctctaacaga

SEQ ID NO: 906896 - DNA, 574 bp, Homo sapiens
cactccagcctgggtgacagagcaagaccttgtctcaaaaatatacaaacaaatactcaaggcctacagcatagtttgtgttgaatacatgcttgatgaatgaatgaatgaccccaaataacaatgcatatgtgaaaccagctgaggttattcacaaagctcccttgaaaataggaaaaactagggtgggcacagtggcttatacctgtaatcctaggactttgggaggccaaggcaagcagatcaccaagttcaagaccaacctggccaacatggcgaaactcagtctttactaaaagtacaaaaattagctgggcctggtgatgggcacttgtaatcccagctacttgggaggctgaggcatgagaattgcttgaatccagttggtggagtttgcagtgagcttagattgcacttctgcactccagcctgggcaacagagtgagactccgccaaaaaaaagaaagaaaagaaaaggcaagacaagaaaagaaaagaaaagaaaagaaaagaaaaaaraaagaaaaagaaaaagaaagaaagaaaaggaaggaaggaagaaagaaagaaaaag

SEQ ID NO: 906897 - DNA, 615 bp, Homo sapiens
atggatttatcttttctttcacacagtcaggctgccaattttccaaacttgtatgctctacttgctcttgaacactttgctgcttagaaatttcttgtgccagataccctaaatcatgtctctcaagytcaaagttccacaggtctctggggcagagacaaaatgctgccagtctctttgctaaagcataacaacattaaagcatagcaagagttacttttactccagtttccaacaaattccccatctccatctgagaccacctcagcctggacttcattgtccatgtcactgtaagcatcttggtcaaagacatttaacaagtctctaggaagttccaaacttttccacattttcttatcttcttctgagccctccaaactcttcacacctctgcctgttacccaattccaaagtcgcttccgcatttttgggtatctttatagcagcatcccactcctgctaacaatttactgtattagcccattttcacagtgttatgaagaaatatccaagactgggtaatttacaaagaaaggaggtttaattggctcacaattccacatggctggggaggccttaggaaagttagaatcactgtggaaggcacctctt

SEQ ID NO: 906898 - DNA, 509 bp, Homo sapiens
catttctagatacttgttatagcagcactccacttttcagcaccaatgtttgctttagcctatccaggctgctacaacaaattgccatagactgactgcctcaggagcaataaacatttctcacagttcttgaggcaggaagttcaagatcaggatggaggcggatttggcatcttataagggctcatttcacatttcacagacagacaactgtcttctcactgtgtattcacattgcagaaagggaaaagggctttaaacccattaatgagggcttggccctcatgacaaatcacctctcgaatccacctcctactaccaccaccttggaggttaagatttcagcatatgaattgaagagtgggcagggagggaacacaaatatttaatctatagcacctaataaaccacagtcaatctctttytgattgtcagatttgtttcctcccttgctctaggattaggacttcattatatttctcaacaagcttttctttttcatttgtgtt

SEQ ID NO: 906899 - DNA, 605 bp, Homo sapiens
actatgtacttttgatgaattgctccttctaatatcatgamatgaccttttttattcatggtaacagtctttggtctaaaatcttctttctctgatgttataaagacatttcagctttcttttgattggtgttagtgtgctatatcctttcctagctttttacttttaacctatttatatcattatatttaaatcaggtgttttgtaggcaacatgtagttagtaggttcttgttttctaaatctagtctacaaatttctgctattaattggttttttacaccatttatacttcaaagcagctttatttagatataatttgcataccatacaattcacccatttaaagtgtacaatttaatggtttttattatatttagagttgggcaaccatcaccacaatctaatttaaaaacatttctatcacctcgaaacactatgcccattagtagtcaatccctactccccctacccgcacctgagcactctaccaccactaatctacttcttatctctgtggatttgcctgttctggaaatttcttataaatgaaatcatacagtatgtggtctccgcataatttttttcaaagttcatctatgttgt

SEQ ID NO: 906900 - DNA, 642 bp, Homo sapiens
tttcactttaatttctatgttacccagctctgaagtcactactcaggcttatcatggtccacagacaagaaggggggcaaatgaccaggactggtcaagaatatatctccatttctttgggaccaatttctaaagatttattttgctcatttgattgggccatttcctcatatctttgtgtgcttttccctacattttttatgccttatgatatttagttgataatatgacatttgaaaaaacagctatctcatccgattttcacaaactggcctcttacaggtgaagggcttcaccaattatcccagctagagatttgggggactctctgaaaccttttctggggatgtgtcttctctgggcttgtgtgtgtaatttcccagtgaaaaagatttgcccgtttctttcaggagcctgtaatatcttgttccccctggtgtctctctgaagtactgcagtatctccaatgctgtaacaagctgtgacactcatttctgttctcagaggtcccaacctgacctgcaaaatatrccactgttctcatcagcattctgaatcaggcaagacggaaacctatttcttcagaagtcccccaaaacacaagaattttgaatgtgcattccactctcttctccaaaggag

SEQ ID NO: 906901 - DNA, 628 bp, Homo sapiens
ccattctccccatcactttcaggtacacctgtcaaacgtaggtttggtcttttcacatagtaccatatttcttggagactttgttcatttattttcattcttttttctctaatcttgtcttcatgctttatttcattaagttgatcttcaatctgtgatatcttttcttctacttgattgatttggctattgacacttgtgtatgcctcacaaagttctagggctgtgtttttcagctccatcaggtcatttatgttcttctctaaactggttattctattagcaattccactaaccttttatcagggttcttagcttccttgcaatgagttataaaatggtcctttaactcaaaggagtttgttattacctaccttctgaagcctactgctgtcaatttgtcaaactcattctccgatcagttttgtttccttgctggtgaggagttgtgatcccttggagaagaagagacattctagttttcagaattttcagcctttttgtgctggtttttcctcatcctcatggatttgtctacctttggkctttgctgttggtgacctttggatggagtttttgcatggtcatcctttttcttgatgttgatgctattgctttctgtttgtta

SEQ ID NO: 906902 - DNA, 652 bp, Homo sapiens
aattaaaagctgtgaaagcagcattgtgtccattgtaaatccttctcactaagagggctttaccagggaattctcaaagatggggagagggcaaagctgtgacagccaccacctcgacttagagagtccaggaaggaactttaatggaaaaatatttctatctaatatggaaacaaggaagttgcatgacttcactctgtctctgggttgagactagtggggaaagaaagaacaatgtcagtggaaggagagataaggaggagagcatatggcacaagccaggagaaagaaaattgcattaacaaaaacaccaacctgcacccttgtttagttctttctcactgtttcaaacagaaacctgtggattctggtcagttgcccacaggcaaagtatccgttctgtgacctgtgttgaggtcacagtgttcactcatctagattttagctccagtaataaactgttagcatgtgacataaacagatcacataaagatgtacatctgtcgctgggcaggaggctgtcccatagtgctatgtccacagtgaggaaagttcacaagaggatacaagtgagccygatacaagccctgcagtctggaagcaggctttctgttttacctctgcagcactcccacctacctgaaactctgtc

SEQ ID NO: 906903 - DNA, 541 bp, Homo sapiens
ggcttagctcagtgtcctagatcaagtctttcaatgagtcctccctcacagtcagctgtttcacctccatcagtgccagtgagatctagagcaagagattatagggaagcacggcaaacaagaaaaaaacttgccattgtgggtgcagctgagcttcgggaatcataggtggctgatgagctatgacagcagctggtaaagaggtgctgagcttaaccttgctgtcaggttctaagttgacattacttctttttgtatcaaatgccttgctctatataagggatgtgcatctgagaagttgtacatagaccaaacttctgtaaggttgaattttattttcccaatgaaggagttcttagttacatagacactttatcttcagggataaatattttttagtatgcagaggatcctcacacttccatcatcatgtattcatctaaacatatttgttgtgcaaagtgcctaatatacatctgtgaacaaggcagagtccctgccttcaycacagtctggtggaggagaagaaagattaacaggc

SEQ ID NO: 906904 - DNA, 638 bp, Homo sapiens
tatatatggagtggctggcggaagtatgatgggtggctgaattattagcgtgaaggctgttatggaactgagatgcaagagtactagaatgttcaccacattgaaactgataccaccaagaaagtacacactgtgagaggaaggaggcagtagctagatggtaaatactgaaagaatgagcgttgtgactccatgaatataaatgattaccaggaaaaaaaaaaaaaaaggtttagtggactgtgtagattgatggcctaaccttcaaagctggaacttttcagaggatggaaatctgaaattttgaaagcagcctgaggaacaaagaggacatttacctcacttcccagcccagtgctctgaattgtgctgtagagaaaacatgactgcttgagagtacagcagagaaagcaaggtcctctggggagaacccaatcttgtttagaagaagggaaggtttagaaaagatgttgaaaatataagtaattttgctactgactgactgatttcagagagaacagagaaaaaacygtaatcataattttccttgtagtttatctggtaaaaaaaaaatgtgtgtgtgtgtgtgtgtgtgtgtgtgtgtctttgtgtgtgtgtgtgtgtctatgttatagtta

SEQ ID NO: 906905 - DNA, 565 bp, Homo sapiens
ttattcaacaacaaaatcctgattaattttgaggtggttcttatagacatctgtgttttactacttgcaaaaattggttatttattttaactacacatatagttttttgtgttttagaaaatattgttttscagtattttataggaaaatttgttatatgaagtataaaaatgcctagtaaggttggacatggtagttcacacctgtaatcccagccctttggaaggccgagatgggtggatcacctgaggtcgggagtttgagaccagcttgaccaacatggagaaaccccgtctctactaaaaatacaaaattagccaagcatgatggtgcatgtgtgtaatcccagctactcaggaggctgaggcaggagaattgcttgaacccaggaggcggaggttgcagtgagccaagatcacaccattgcactccagcctgggcaacaagaacaaaactccatctcaaaaaaaaaaaaaaaaaagaaaaaaaacaggaaaaagaaaaaaaaacctagtaaggtgaaactaaatagaatggcttaagtaaatacatgtataagttggtg

SEQ ID NO: 906906 - DNA, 652 bp, Homo sapiens
attatatggaaagtttccaggctgcaaaagagaaaagagcaactcagaaggagcccagcytagcagtttccttaaattgaagacacaaagttgaaagtctgatgtgacttaaagcagcaagagtttgatggggaagaataccacagagaacagaaattctcaggagagctctggaggtctacagatattttgtccctcttaagtcatcatctgagtacttatcagtgcatgtgtatgaggacacttcccaaggctgaggacaaaaccattcaatagtaacaaagttaaacatctttggtgctgagtcaggactccatccggccagatggacaaccatgtaactcatagaaatttgggtactcaggtggtattgtctcagtagtggcacaaactatccccagtactctagtaacatctaatagactaaaagcaaacctaaaaggtgttgatgtatttcaaagtaacataactgcatgttagaacaaaatgcaagaatattttaaaaacacgaacatctctagcacccaacaaaataaaaacataaaaaccagaaaatacaactcataatgaagaaaaaaacataataaatagaaacagacctggaaatgagacagataaaataatttgtagacatgaacaatgaaagtgttat

SEQ ID NO: 906907 - DNA, 594 bp, Homo sapiens
atctcactggggagtgtcaggcagtgggtgcaggacagtgggtgcagcacactgaatgtgagccaaagcagggcgaggcatcacctcacccgggaagtgcaaggggtcaggcaatyccctttcctagtcaaagaaaggggtgagagatggcacctggaaaatcgggtcactcccaccctaatactgcacttttccaacggtcttagcaaatggcacaccaggagattatatccagtgcctggcgtggagggtccaaggcccacggaaccttgctcattgctagcacagcagtctgatatcaaactgcaaggtggcagcgaggctgggggaggggtgcctacgattgctgaggcttgagtaggtaaacaaagcggccctgaagctcgaacagggtggagcccaccacagttcaaggaggcctgcctgcctctgtagactccacctctgagggcagggcatagacaaacaaaaggcagcagaaaactctgcagacttaaatgtccctgtctgacagctttgaagagagtagtggttctcccagcacatggctggagatctgacaatggacaggctgcctcctcaagtgggtccctg

SEQ ID NO: 906908 - DNA, 538 bp, Homo sapiens
caaatggataactagaataaccaatgcagggaagtccttaaaggacctgatggagctgaaaaccatggcacgagaaatacatgacraatgcaaaagcctcagtagccaatttgctcaactggaagaaagggtatcagtgatggaagatcaaatgaatgaaatgaagtgagaagagaagtttagagaaaaaagaaaaagaacaaagcctccaagaaatatgggactatgtgaaaagaccaaatctacttctgattggtgtacctgaaagtgacagggagaatggaaccaagttggaaaacatactgcaggatattatccaggagaacttccccaatctaccaaggcaggccaatattcaaattcatgaaatacagagaacaccacaaagatactcctccagaggagcaactccaagacacttaattgtcagattcaccaaagttgaaatgaaggaaaaaatgttaagggcagccacagagaaaggtcaggttacccacaaagggaagcccattagactaacagcagatctcttggcaga

SEQ ID NO: 906909 - DNA, 551 bp, Homo sapiens
agtagcttaaacgagatttctgggagtgtctcggctttctgaatgcagttgcctttcatgagctcatgaaccttcttaagatattatgatcttttacccaggcaaggggaatttcctcagatatgattaaagagtgggcgggccatgtcctcagaagtcagaagacttaatattggaaacatgaactctcttggagccattcccaattttatttcagaggaattcccccttgcagaaccactcccacgatggaaggcagggatgaaggaagccttttgaaatgtatttattttttaatctgaaagttgaagagtttcccctccccccaccatggaaactactaaattaagagtctgggtaaacagtttgaagtctcctttttaggatgggtaaagtaaacaagtaaagagtactcaaaaattctcattaaaggtacacaaccatcctgagttattatttccaagggaacrttacctcagtcgtggatggaagcctcatgggtgacgagagatcagggcttttacttaaagaacgaggcagctttcattaag

SEQ ID NO: 906910 - DNA, 593 bp, Homo sapiens
agggcatctggggaagagccttcatgcagtggaaacaggtcctgtaaggtgctgaggatggggaatgctgggtaagtgtgagaaataagaggaaaaaagctacagtagaattatatgaagacaaaatgttctttctttggtaagtgcttgttggtgattgtgggtcttctgtaaggttgttgaaaagataatgagtgattgtggtaggtatgatctagcttgtgatctaagagaatcttagggctgctttgttgatgatggcacaaaagtggataagaaagaagcacattggactcattcaggtgatagataatggtggctcaagccactgaagaatgaggtggggaggattgctcagcatctcagcgtcttttgagtaggactagccaaattggccaatgtgctgatttggtatttgacagaaaaggaggaatacaagttgactccgggtttttgtcctgcccaaatagaaaaagggagttattctctagcaagctgggaagactgtgtggaaaagcacacytgggagtgcatcaggaatcaggtttgggaaagcttagtctgatatcccaggtggttgagaagacagtcgg

SEQ ID NO: 906911 - DNA, 591 bp, Homo sapiens
ttcaatttcagcagacctttcccaactgggtgtaccaacatctgactgtttagacatcattaaaatacattgcaccyaatatgtttacccacagtcatctctattacctgggcaggtcattcatcagcttgtcaatttaaatggatttctatatgtaagtgactccctaatgtgctgagaacttttgaggggaaattgtagtaccagcatattagaaaaatgcaaactatgcaaagtcttgtttgagggagcatccctattcaaatcaaatgagggacaatgatattttctgtccgaactcctatttctgttttaagctattgtcattattattactaacaacaataataaaagcatcataaggggtttatagacaaaacttctttaggtgaaaattgtgaaattaacattaatttcttggcctatggttgaactattgcattttaaatgtgtgtgtgtgtgtgtgtgtgttttccctgcatcctatccaaacatttctctcacataattaaatgtgttgatgacatcacagaaactgagccaatcttttggtttatatcactttcaggagattttaactctaattcgagt

SEQ ID NO: 906912 - DNA, 586 bp, Homo sapiens
ttcctattttgaatttcattgatttctgccctaatttttattatttattttcttctgcttattttgaattaaattatttttctctctttagtgtcctaaagttgaagctcagatattgattttggwtctttcttcttttaacatttcttgcagagcaattctgctcacaattaatttgttcagttttatttgtttgagaaggactttatttcaccattacctttgaagagattatctagattgtgatgttttctttcaatactttaaatatttcactgcatattcttactgcttgcattgtttctgacaagaagtccactgtaactgcaattcttctccttagccctctatagcagagatgcttgttgttttcttcttgttctgtctacatttcctctttgtctttggtatgttgcagtttgaatctgatatattgaggtatgagtttggttttgggtgaggggagattgatcctctttggtactctctgagcttcctggatcagtggtttggtttctgtcatgaattttgtcttggccattattatttgaaatatttcttttgccctgtactctctttcttcttc

SEQ ID NO: 906913 - DNA, 502 bp, Homo sapiens
tcctcgacaagagcaaccccaagacacataattgtcagattccccaaggttgaaatgaaggaaaaagtgttaagggcaaccagagagaaaggtcgaattacccacaaagggaagcccatcagactaacagcggatctcttggcagaaaccttacaagtcagaagagagtgggggccaatattcaacattcttaaagaaaagaattttcaacccagaatttcatatccagccaaattaagattcataagtgaaggacaaataaaatcctttacagacaagtaaatactgagagattttgtcatcaccaggcctgccctaaaagagctcctgaaggaagcactaaacatggaagaaaacaaccggtaccagccactgcaaaaacatgcygtattgtaaaggccagtgatgctatgaagaaactgcatcaattaatggtcaaaataaccagcgaacatcataatgataagatcaagttcacaaataaaaatattaacattaaatg

SEQ ID NO: 906914 - DNA, 502 bp, Homo sapiens
tcctcgacaagagcaaccccaagacacataattgtcagattccccaaggttgaaatgaaggaaaaagtgttaagggcaaccagagagaaaggtcgaattacccacaaagggaagcccatcagactaacagcggatctcttggcagaaaccttacaagtcagaagagagtgggggccaatattcaacattcttaaagaaaagaattttcaacccagaatttcatatccagccaaattaagattcataagtgaaggacaaataaaatcctttacagacaagtaaatactgagagattttgtcatcaccaggcctgccctaaaagagctcctgaaggaagcactaaacatggaagaaaacaaccggtaccagccactgcaaaaacatgccgtattgtaaaggccagtgatgctatgaagaaactgcatcaattaatggtcaaaataaccagcgaacatcataatgataagatcaarttcacaaataaaaatattaacattaaatg

SEQ ID NO: 906915 - DNA, 592 bp, Homo sapiens
catggaaggccctccatagtgaggtccccrctgactcctccagcctcactcctccaattcctgccctcactatcttgtaacacaacaagactcgtggcacagcacgtaagatgcagtttccagcctccatactttgcccagctatccccctcccctcctgggtaggaagttttcctgacaccccaccaagaccaccacaagtcaggatcttttctgggcattgtttgtttgttttgttttgttttgtatcagaatctccctctgtcacccaagttggagtgcagcggcatgatctcggctcactgcaacctctgtctcccaggtccaagtgattctcgtgcctcaacctcccaagtagcttggactacaggtgtgcaccaccatgcccagctaatttttgtatttttagtagagactaggtttcaccatgttgaccaggctggtctcaaactcctgacctcaagtgatccgtccaccttggcctcccaaagtgctgggattacagacgtgagccaccgcgcccccagccatttcttggcattcttaagataacctgtgcatcctccaccagggcactcatctggaaattaga

SEQ ID NO: 906916 - DNA, 613 bp, Homo sapiens
ataagtctcattaattactgacttggaaagtcaattctataatacataaagtcatagaaaygataggaagtcacttaatatttgcttttggaaggtgtttttttgtttttgttttttgagaccggagtcttcctctattgcccaggttggagtgcagtggcgcaatctcggctcactgcaacctccaccttctgggttccagcgattctcctgcttcagcctcctgagtagctgggactacaagcgttcaccaccatgcccagctagttttttttttgtatttttagtagagatggggtttcaccatattggccaggctggtctcgaactactgacctcatgatccacccacctcggcctcctaaagtgctgagattacaggtgtgggaaggtgtcttttaaattgtagtgcatatagttataactaacagctgtgaattcagagctgtaaaaataaagcaaagaaaccacattgtgtttgagtcagcaatctttaggtctctactaagttatcctaaatataatcctatgttagtccctaaacatacttagtccctatattctaaatataatcctacttcctaaagaaaatcatgctttcccctaattctct

SEQ ID NO: 906917 - DNA, 606 bp, Homo sapiens
accatatcattccaccccggcccctaccaaatctcatgtcctcatatttcaaaacaaatcatgccttcccaacagtcccccaaagtcttagctcatttcagcattaactcaaaagtccacagtccaaagtcttatctgtgacaaggcaagtcccttctacctgcgagcctgtaaaatcaaaacaaattagttacttcatagatacaatgggggtaaaaacattgggtaaatatagccattccaaatgggagcaattggccaaaataaaggggctaccggccccatgcaagtctgaaatgcagcaaggcagtcaaatcttaaagctccaaaatgatctcctttgactccatgtttgatatccaggtcatgctgatccaagagatgggttcccatggtcttgtgcagttctgtccctgtgacattgcagggtacatcctccctcctggctgctttcacttcctgggattgagtgtcagcagcktttccagtggatctaccattctgggttctggaggatgatggcccttttctcacagttccactagttgatgccccagtagggactctgtgtgggggctccaaccccacatttcccttctgcactga

SEQ ID NO: 906918 - DNA, 646 bp, Homo sapiens
aaaggtgctcatactaatttttcaatcatcaactcttatcacgaaacactactggaaaaaaaaaagagaagaaaataaataaaagaaagaaaaaatattttaaaattcactgagcagatattcctttctttgtttacaaagaagcagaaattttgccctcacctcactttaagtaaaatgaagggttaaaagaccatttaatcacatctaagattaatacaaatagttactctgaaggcactgaccactgcaatgcaactaaaaaatataacaatttaaatatattactatgctttaagaaacaaattttaatggtgaatacattttttaaaataccaagaagagtatgagcttaaatcagagttatagggtggttattagaaagccaaagtgaaagtctgtgcttctatatgaattctagtcctagaaaattagccttggaacctcagaaacacaagtgagtgaaaccttacacttctacagaggaatagagcaggatgttcaagtggtactgtattrattgttccttcctggaagaagccaacaaaatctttggagaaaagcatcccacaacagaggaaaccaatggctcaattacaacatctctagtcactgaacacattcactcttcataatgcctctctca

SEQ ID NO: 906919 - DNA, 657 bp, Homo sapiens
catgaaaaagtggccaggctgtttttaacatgggtccctgatcccatttctcctcactgggtggtcagcacctccatacctggtactccatccaacctccgcttgggtttttgggctggctgcatctctgcactggctttggagagtccccagggactagggactagtgctgacccccagcacagtgcagctgccccacagaagagtggccagactgttctccatgcaggtccctgtcctcacttctcctcctaggcaaaacctcctgacctgggacttcagcatgactaacacgcccctggttaatatttcaatcagaggcagcaagacatttctcaggggaggaaatcccagaatcaattgacaatgcttctgcctttgtagctgcacttgtaccaccctaactgcccttgggctgggaaagaacaaaaggcctagtcactatcctggcacccccatgcagcagccaccaaatggagaggaatccaactcctcttccctggaacccccaccccccaactcgtcaccaggcagggcaacaagctcaggaccacagaacagctgccccacccacggatgaacacmacaactggtagaggctctgagtttccctggagagaggctcccagaggcaataaacagcccctcagccactgc

SEQ ID NO: 906920 - DNA, 657 bp, Homo sapiens
catgaaaaagtggccaggctgtttttaacatgggtccctgatcccatttctcctcactgggtggtcagcacctccatacctggtactccatccaacctccgcttgggtttttgggctggctgcatctctgcactggctttggagagtccccagggactagggactagtgctgacccccagcacagtgcagctgccccacagaagagtggccagactgttctccatgcaggtccctgtcctcacttctcctcctaggcaaaacctcctgacctgggacttcagcatgactaacacgcccctggttaatatttcaatcagaggcagcaagacatttctcaggggaggaaatcccagaatcaattgacaatgcttctgcctttgtagctgcacttgtaccaccctaactgcccttgggctgggaaagaacaaaaggcctagtcactatcctggcacccccatgcagcagccaccaaatggagaggaatccaactcctcttccctggaacccccaccccccaactcgtcaccaggcagggcaacaagctcaggaccacagaacagctgccccacccacggatgaacacaacaactggtaraggctctgagtttccctggagagaggctcccagaggcaataaacagcccctcagccactgc

SEQ ID NO: 906921 - DNA, 651 bp, Homo sapiens
cttacagatggagcaatggtgagtgcacacttagacaagggaggggaaggggttcttatccctaacacatgtggcccctcctgctgtgtcattcccctattggctagggttagaccacacaggctaaatgaattctgattggctaaatttaaagagagtaatggggtgagtggtttggcaggaaaaattgttatgatagagcaggtaattggaatgagtcagggtagagcaggcaatcagaatgagtcagggtggagcaggtaatcaaaatgagtcaggctggagcaggtaatcgaaaaaggttgctttataagggagttaagtttaaaagtagaaggcaaaaaattgaacatactgacatattgatcctttgaaaagaaatttagaactcatatcaacattcccttgatgtagtactctcctccttttcctatggatgtggctttctatgagatgaactggagtaattgctatttctcttctgggtctacccacccagcaggtctacccagctctgagctggtattgggggttgtctgcacagggtcctatgaygtgaaccatctatgggtctctcagctgtggatgccagcacctgttccagtggaggtggcaggggggtgcaataaactctatgagagatcttagctt

SEQ ID NO: 906922 - DNA, 608 bp, Homo sapiens
aaatatcctcaagcagattctgtaaaagcaggatttcaagacasctctatcaaaaggaaagttgaactccgtgagttgagttcacacatccctaaatgtttctgagaatgcttctgtctagtttatatgtgaagatatttcactttccaccatgagcctctaagcgctccaaatgaacacttgcagagtatgcagaaagaatgtttccaatcttctctaccaaaggaaagattcaactctgtgagttgaatggacatatcacaaagaactgtctgagaatacttctgtctagcttttatgtgaagatatttccttttccaccgtaggcttcaaagcgctccaaatgaacacttgcagattctacaaaaagaatgcttctaaactgctgtatcaaagaaagcgttcaactctgtgagttgaatgcacacatcccaaagcactttctgagaatgcttctgtttagtttttatgtgaagatattttgctttccaccataagccttcaaagcgctccaaaggaacacttgcagactatgcacagagaatgcctcaaatctgctctatcaaaagaaaggttggactctgtgagttcaatggacacatcacaaa

SEQ ID NO: 906923 - DNA, 608 bp, Homo sapiens
aaatatcctcaagcagattctgtaaaagcaggatttcaagacacctctatcaaaaggaaagttgaactcygtgagttgagttcacacatccctaaatgtttctgagaatgcttctgtctagtttatatgtgaagatatttcactttccaccatgagcctctaagcgctccaaatgaacacttgcagagtatgcagaaagaatgtttccaatcttctctaccaaaggaaagattcaactctgtgagttgaatggacatatcacaaagaactgtctgagaatacttctgtctagcttttatgtgaagatatttccttttccaccgtaggcttcaaagcgctccaaatgaacacttgcagattctacaaaaagaatgcttctaaactgctgtatcaaagaaagcgttcaactctgtgagttgaatgcacacatcccaaagcactttctgagaatgcttctgtttagtttttatgtgaagatattttgctttccaccataagccttcaaagcgctccaaaggaacacttgcagactatgcacagagaatgcctcaaatctgctctatcaaaagaaaggttggactctgtgagttcaatggacacatcacaaa

SEQ ID NO: 906924 - DNA, 219 bp, Homo sapiens
cccgttggcaacgaattcctgaaagagctccaaatatcctcaagcagattctgtaaaagcaggatttcaagacacctctatcaaaaggaaagttgaactccgtgagttgagttcacacatccctaaatgtttctgagaatgcttctrtctagtttatatgtgaagatatttcactttccaccatgagcctctaagcgctccaaatgaacacttgcagag

SEQ ID NO: 906925 - DNA, 610 bp, Homo sapiens
gacctgggtaggccctcagtgtcaatcacaccactgtgatcatttctgtgggtgcaccacctgttctactcactattcaacagttttccttaaaacacattaagcttaaattgattcatttttaaaatatttattctgttttgttttttgtttttaaaacagggtctcgctctgctgcccaggctggaatgcagtggcatgatcacagcttgctgcagccttgacctcctgggctcaggtgatccttttgcctcagcctcctacaggtgcatgccaccatacctgggtaatttttttattttttgtacagatgggggtctccctatgttccttgaactagtcttgaactcctgggctcaagtgatcctctcacctcaacctcccaaagtgctgagtttacaggcatgagccaccacacccagcccgattcatttttaaacatgcattacgctgtaaatggaaaatcagcatcacttgccaagggacatttaagtaatacactgaaatgaacacgagcataatacagtctttaacatcgcctgtatgctacaggagtcatttccaaatgcctgcgkgcatgcagaccccactctgggtgtgtcgatgatta

SEQ ID NO: 906926 - DNA, 581 bp, Homo sapiens
gtgtttggttctggaggcactaccaaaaacaggagatacagtccctgcccacgagtagtcacagccatgtaggaaagcaagagatattaaatggcaagttataagggcaatgagtgggaaagttcaagtagaagggctgcagctgcaaaagaatgaaaatatgtttgattgtggcagtgacagtggttgggggttaggaataatttccaacagaccattttgttgacttcatgaagtcttgaattaaatttaaggaaaaaaaaatcagccagctctcggggtaggtagctaccgagactagatgaaccttgctcagttcctacacgaatgcaggtcagtggctcccactgactaaggctgcaacaggaattataagcatctagaggtatttaaaggatgtttatttgagtgtgggacaccacagaaccatccctctcttcttttgataacgaaattctgatttgagttaggggaaccacgcctcctgactctcagttcgtgagctttgggaggtctgyagtaacagctgtaaggtagatcatgtgacccaagacttgccagacttccaaatctccatggct

SEQ ID NO: 906927 - DNA, 553 bp, Homo sapiens
aatacagcccttccaacaccttgattttagcacttctgacctacagaactataagataaaaaatgtgtaatactttaagcttctaaatttgaggtaatttgttgtgagaacaataagaaacaaacacaggaatccctattgtctgtcttcaagttcactgattcttttcttttctttttttttttgaggtggagtctcactctgttgccccagctggagtgcagtggtgcgatctcagctcactgcaaactctgcctcccgggttcatgccattctcctgcctcagcctctcgagtagctgggactacaggcacctgccaccatgcctggctatttttttgtatttttagtagagacagggtttcactgtgttatccaggatggtctcgatcccctgacctcgtgatccgcttgcctcggcctcccaaagtgctgggattacaggcacgagcyacggcgcctggcccaagttcactgattcttttcctctgttccctctgtgttgttgagcccatccattgagttctaaatttgtttatttatcttcaattcc

SEQ ID NO: 906928 - DNA, 653 bp, Homo sapiens
ttcagaaggggctgcccatttggcagagttgtagaattgctagttcatctttagagttgctcatagactggagctgatcaagtaattacaaaaccagtcaaacaaggtctatatcctcttccttgaaaatagctagtgagaccaaagtagtcatctggtcaccatgctaggatcctctgcttccctctcacatggcatagtcagtgttctaggtctccactgtcttggagctgaggaacaatttgatttgatttggtaagtcatatccccgtagctttaacacagtgacttcctattcctcattctgaataggaaagagtttggggtgcagggtagttttacagctaagtggaaaccagaaagaagaaaacagacagtatagagttttctcagagtagaaaggagtcacgagaaaaagtaagggaagaggtatggatattacctcactccaacaaccaatacatactaccacatctctaacaaaaataaacctcaagcctgagggattccttttctctaattcctcattttcagcagaataaggaaagtagatacttcaggcataatatgcytaagtgtatcaacattagctggcctcagaatctggaaagaagctcagtaaatcagttttgatttacactatcctacagcct

SEQ ID NO: 906929 - DNA, 627 bp, Homo sapiens
agtgacttattcaagtcactcaacaaacgttaggtctagaattagaaagtttcattgaatctttcaggggttcctgttgtttttcttatttttagcttataaagyaccaacataacgagtacttactaaagatcaaaagattttgataacttactaattaaattagtttcccctaagaattgaaaaagaaataaaagtcaggatttcaaacataattaggaagaccagaccactataagaaattatagtctgaaagtttatagtaaaagagaatatgatcattttcaataaatttttttgttatggtcctaatttggtcctaagagtaggtgctaagagtaggtccatgtctcttctaaaaatacaaaaattagtggagcgtggtggcacatgcctacgatcctggctactcaggaggctgaggcagaattgcttgaaactgggaggtggaggttgcagtgagttcagattgtgccactgcactccagtctgggtgatacagtgagactccatctcaaaaaaaaaaaaaaaaaaaaaaaaaaggataaccaaatctatttgtctgaagaaaagagagatgacattttacctttaccaagtcatgcaaaacagtcttaatcaatccca

SEQ ID NO: 906930 - DNA, 592 bp, Homo sapiens
ctcagatggagatgaggatcttgttgggaactagaacaaagctgactcttgttttgttttagcaaagagactgtttgctttttgcccctaccctagagatttgtggaactttgaacttgagagagrttatttagggtatctggtggaagaaatttctaagcagcaaagcattcaagaggtgagctgagtgctgttaaaagcattccaggccaggcgcagtgactcttgcctgcaatcccagcactttgggaggccgaggcgggcagatcatgaggtcaggagttcaagaccagcctggccaagatggtgaaaccttgtctctgctaaaaatacaaaagttagccaggcatggtggcaggcacctgtagtcccagctacttgggactgagactgaggcagaagaatcgcttgaacctgggaggcagaggttgcagtaagccaagatcacgccactgcactccccagcctgggcaacagagcaagactccatttcaaaaaggaaaaaaaaagcactccattttaaaagggaaacagcataacagtttggaaaaattgcaggctaatgatgcagtagaaaagaaaaacccatttt

SEQ ID NO: 906931 - DNA, 566 bp, Homo sapiens
agctccagggccggggccctgtaatcccagcactttgggaggcygaggcaggcagatcatgaggtcaggagtttgagaccagcctgaccaacatagtgaaaccccatctctactaaaaatacaaaaaaaaaaaaaaattagccaggcatggtggcgggcacctgtaatcccagctacttgggagcttgaggcaaggagaattggttgaacctgggaggcagaggttgcagtgagctgagattgtgccattgcacctccagcacaggtgacagtgtgagactccgtctcaataaaaaaagaaaaaaaaaaaggaaaaaaaataagctccaggggaggaggaatcccatctaacttgctgatcactgtctctgcgctgagaacagagcttggcacacggtaactgcaaggaaactatgtatcaaatgctgtaatgaatgttaaaaaaacatttaattaatgttttaatgttttaatgaatgagttatatccaaaacatggaaccccaatgagaagtgtacattcacagtattttgaagaatttgagactgtagattattgtgtctcta

SEQ ID NO: 906932 - DNA, 560 bp, Homo sapiens
cccacgtagaggggaacaacacacattggggcctattgaaaggtggagggtgggaggggagaggggatcaggaaaaatagctaatggatactaggcttaatacctggawgatgaaatagtctgtataacaaagccttgtgacactagtttacctatacctatataacgaacctgcccatgagtccctgaacttaacataaagttttaaaaacagacacacacacacacacacacacacacacacacacacacacacacaaacctgacagtaatcctttctctcacagttctggagtccagaagttcaacctcagcttcactgcaccaaaatcagggtgtagccaggaccatgctccctccgaaggctctaggggagaatttgttcttccttcctccctctgccagggtgtgggcattccttggcttgtggccacatcactccaatctgcctcagaggctgcatggcctccccctcttctacacatcaatctccctctgtccctttcttgtaagcaggcacgtgatgtctcctagggcctgtgttagtttcctgaggctgc

SEQ ID NO: 906933 - DNA, 699 bp, Homo sapiens
cacagggcacagcatgtgttgttgataytaagtttgtggacagcaatggtacaatcccaaggacttgtataagtggcctctacctcattaaccatttccttgaacccagaccatcagggagctagtgagctgattcaagagaggaaagaacaattctccattcaagtcagacatccctcaaggggaacatgactattctgactcatttgagaaggggcaaagaaaaggatatgaggtggaaacactattatctgtaaagtttagctgatggaagaaaatggtgtcatttgcttaactttggaaaatgcagtgggtctctgggccctgagggtggtatgcaaaataagcccatctctccacctacagccttcccaaaaaacaggctgtaggcgtggctgctttttaagaagctggatgctaacttcagatggcacagaattcaagaccaaaactgcaataacttattagtcatattttccatcttcagttcctttgggggtaaaaataccacgaagaagataaaatggcttttctcacggtataggtcattgttgtgttttctgttcaaaaaaagcccacacaaccacattctctattataaaaagtagtacctctcatagtaaaagcctgctctacagttacagttttcgtttcagaattaacaatccattagctcaaattaatattggctgcatcaac

SEQ ID NO: 906934 - DNA, 655 bp, Homo sapiens
ttgttaaaatgactatactacacaaagcagtctacagattcaatgcaatctctatcaaaataccaataacattcttctgagaaatagaaaaaacaatgctaaaatttgtatggaactataaaagaccctaakagccaaagcaatccagtgcaaaaagaacaaagctgaagacatcacaatccttgacttcaaaatatgctataaagctttaataacctaaacaacacggtattggtattaaaacagacacatcaactaatagaccagaacagagagctcagaagtatatccatatttttaaagcctactgattttcaacagaggtatgaagagcataaattggggaaaggacactctcttcaataaatggggctgggaaaactggatatccatatgcagaagaataaaactagacacctctatctcaccatacacaaaaatcacctcaaaatggattaaagatttaaatgttaagatgtaaaactataaaactactagaagaaaacataggagaaatacatcaggacattggtctaggcaaagttttatggctaatacttcaaaagcacaggcagcagaaacaaaaatagacaaacaggactatattagactaaacagcttctgcacagcaaaggaaataataagaacgaagaaa

SEQ ID NO: 906935 - DNA, 624 bp, Homo sapiens
atgttcccatctcatccacaggagataagttccaaggccaccagtagatgcctgaaaccacagatagtactgaaccctatacagatgctcctcaagtttccatggagatacctcccaacaaaactatcatacgttgcaaatattataaattaaaaatgcattcaatacacctaacttaccaaacagcattgcctgcggatacactgacaaagggatgattcatgcaggatagagagggacattgtgaaatttcatcatgcttctcagaatggcacacaatttacaacatatgaattgtttacttctgttattttctatgtaatctttttggactgcaattgactgtgggtaactgaaaccacagaaagaagaaccatagacgaggggactactgtgtgttttttataaattgttttctttgaaagagattgtaaactccttgggagtgtcatctgtatcagtggctctcaaactttaatatacaaaagaattacccaaggactttattaaaatgcagaatttcargcttcaccctggggatatggtgattcattcgatttggcattgatccacggaatctgttttaaggagcaatcgaagtgataatccactgaccaccttttg

SEQ ID NO: 906936 - DNA, 538 bp, Homo sapiens
ctgcaaacactctctctttgcctattgccatccatgtaagatgtgacttgctcctccttgccttccaccatgattatgaggctcccccagcsacgtggaactgtaagtccattaaacctttttgttttgtaaattgcccagtctcaggtatgtctttatcagcagtatgaaaatggactaatacactaaattgatgccagtagagtggggcactgctgaaaagatacccaaaaatgtggaaaagactttggaactgggtaacaggcagaggttggaacagtttggaaggctctgaagaagactggaaaatgtgggaaagtttgaaacctctatagacttgttgaatgggtttgacaaaaatgctgacagtgatatgaacaataagatccagtctgaagtggtctcagatggagatgaggcgcttgttgggaggtggagcaaagatgactcttgttatgttttagcaaagagactagttgcattttgcccctgccctggagatttgtggaactttgaacttgagagagatgatttaagc

SEQ ID NO: 906937 - DNA, 646 bp, Homo sapiens
cttgaaacgagatttgagagagggcagcacattgtacaactccatgggcaccatgcacattgtagtccagataaacagagccccttggagrtatgtgaggcatgggatagactcagagaaacccaggaaataaccccttcaggcatctgacatgcaaagatgtggaagtgtcaaccaggaagtcatgttgggggaacagcaagtatttacagaaagtgactgtgtgtgtctgtgtaggagggtgactttgtataggagagataaaacctgtgagctaatcaaggagaagatcataaaagaccttcataaagagcatggcctttttcctgcaagcagtgaggagccattgaaggctttagcataaggacagtcagatgtacttccctagaatgcacatttccttctgctccagaacttctgcacaggaggctcctaaaagctctccccatcctccctgtacacgtagaatctgcctctgtctctctttctctctcctcctcctcctccatctcctcctcctcctcctctccctctctctcgctgtctcacacacacatacacacacactccttccttcctatctagtcagattccactccttgggatttcaggcccaccgtcactcctcagggaagcctgccctgaa

SEQ ID NO: 906938 - DNA, 702 bp, Homo sapiens
aataacatttttgagcacctactatgcatgtagagcatcttacataccttatctcacttagatttacagctrcaaggtgggtatgattctagcttgaattagtctaataaccatatacctcctaggggcagtgagatgattagatcaattctaaaactattaccatgctctctgagctcaccaagacaggcagttaatacaaggatacattaataccgaatccagcaaaagctcacatggccagcttccattatgttcctatttgtgattattctgtatcaagcacagaaatgtatgttcacacgaacaacaaagaaggggtttattagtgtggattacagggcctaagcctaccctctgaaactggttttggagtctttagcacgcttgtttgggacagttaaacatgtgccagctattctaaaacagtagcagtaatgtgatagagctgggtcataccgtgcttcccaaagtatgatcacttcatttcaacaacttcacactaacagcctgaactgggctgtgaagggaatatttagaccaaggaaactggaaaactgtatcaatcaggcttttccaccctccccaagagccagttgtcagatatctaccagcctaccaacgctagctctctaatcagaaaccatcacttagcaagttcccaaattatctgcagagcaatgaactcctcttcttcagaaa

SEQ ID NO: 906939 - DNA, 644 bp, Homo sapiens
cagccattgtgctaccatgagggaactagccatgataacaaaacttgcctggggaggggctacgcatcacagaaaatgatgccaaagtcctgctcaaactgtgcctgatgcctgcctgatctatggacttcttagttccatgtaatggattctctctatttttaaagccgtatcaggttgaatttttggagaaataaaacaaaaagcatcttgactaatttaaaaaatcttctttgggtattcaaccctcctaaactcacccccaaatccactgggagcatgtcaagatttttgtgagccgatttaggagatgcaaattcatttgccttaattggatctccaggaaatgacttctgccccctcttaaatcatttaaagctcaaagaggcatgagggccctccccaaggatgcaggtatcctcttgactgacagcctgtatgctctgcttccaggatccttccatctcctccctttactgagggagtctgctatgtgttagaggtgtccatcactggtcacactgggaagctgtggcagggaagctggagaaaaagcaagataggscccagaaagaacaccaactccagactcagggagactcaggccagaatcctagctcaacttcttccaagctcccaaagtc

SEQ ID NO: 906940 - DNA, 592 bp, Homo sapiens
acatcagtatttggaaatgtttcttcatttgccacaatatgatatcaaataaaatacatccacttaaaagttcagrtatggatacacccattgatttggaatgctagtgaatgtaaaggcttaggtcaacttctctctgcagttccaaggaggatgagaaatagcagccttgacctcccaccagcgggagtttccctccttcatccctggtcactggccacacaaggacctggcatctcccagtaaatgtgttcctctgcaacctgagccacaaacctctctctcttttatctctttcctctttctaccttcatatttggttggctatttttagttcttctgcagatatagttacactttaaatgacacacagcctttaattacttacatgttgacttgaagcaatgtctgttgctcaccttcttggaaatatcagaagacaagaacacttttacttcctcctccttctcccatccttctctctgtctacttaatctgtttatcatattctcatttttacaccatcaaggtttataatgctcccagaacatacctccttcaaggtaaatgggaatggtaacctttggcctct

SEQ ID NO: 906941 - DNA, 639 bp, Homo sapiens
ccacaagcagcgagcggcctcagctgtgggtcccgggccccttcacacagttgaagcccctcaggatgaagctggagcggcgcatgtgagaatcaggattgcttggccctgcactggatggagaatgaaggagagagactgtggcctgagctccgagtcccttgatagtctggactcgctgtaacaaaagctgatagtaataacaatctcagtttgttctaatccatacaggggaagtgctctgaaaattttcaggaccaagaagtaagtatttcaggcactttgcaaagtgttttcaaaataccaccaactttagtcttcacagaaaccctatgatatggggactttatcttcattttgcaggtacaaaaacagaggctcagagacatgaagtcattttgctcaaattctcacaagaagtagatgggatgtacaaaaactggtgatgatatactatttcctggtaaacactctctttctatgtgcaccctgcatcccatgcccataaaaatgctctgtatctcgtgctacacaaattcataatgtctagcagaactcagtgaaacataacttcagaaacattggtagatcrcccctcaccttctgaactagtggtcataactccactcctgactactc

SEQ ID NO: 906942 - DNA, 593 bp, Homo sapiens
catggccaagctcaatgttaaagggccttccccttgggtgaaagactgcagagtcacatggcagagagggtatgaataagggagtgatcatgaaccagagccaattcaccacagtggtctcaggtaggtcctgcaggtctagataccagatagacttctgataaaagggcaactgatatccattgttggcttttttgtttgtctttgtactgatctaccttggtcatttcaccaatccttaatgaaaatgcctgtttccttgtaatttgacaatgagcctcccctaaagtttacttttctgctttttttcaaatgtcagtgtcatttataacatatctgtgctacattggagtccactaaggatgaagaaagtcagcaccgggccctttagctgaaaggtgtagagatcagaaaagccttcatcttcacctctgcccctcatgctgcctccagtgagtgctgccctcaccaggtcctcccaagtgtgccattcattcatgtgtgtgttcattcaytcacccctttgttctgcaaccattttcagagcaccttctctgttataggcactgctctagaggctgaaagatatgaca

SEQ ID NO: 906943 - DNA, 532 bp, Homo sapiens
catcaggagcccatcctatacccatagtgtctgaacctttagtagtcctctcttctatacctgtataaatctaataatgtggaagctttttgcaaaactctaggtcatatgaaatttctttttatcataagaaatgtccaatttccatttacagccattcatacctcagagctatatgaggccaatatcccttttacttatgaaagcctgtcaaatatttggggtcagccacactgtcttcactaatttgtcttcattaaactaagtggctccaactatttcaaccactgctgttaagaaagattttatgactttttgccatcctgtgtgctctcccaatgactttagcttttcaaacttttctttcaatatgtgatgtgcccaacagaacaccataactcaaagttcaccctaaatagcatagaaatggcaaagccttctccttcacagtaggtcttattcatgttatggtggccctttcttatttctctgatcatttctcaagtgaygatatttattttcgatgatttgg

SEQ ID NO: 906944 - DNA, 532 bp, Homo sapiens
catcaggagcccatcctatacccatagtgtctgaacctttagtagtcctctcttctatacctgtataaatctaataatgtggaagctttttgcaaaactctaggtcatatgaaatttctttttatcataagaaatgtccaatttccatttacagccattcatacctcagagctatatgaggccaatatcccttttacttatgaaagcctgtcaaatatttggggtcagccacactgtcttcactaatttgtcttcattaaactaagtggctccaactatttcaaccactgctgttaagaaagattttatgactttttgccatcctgtgtgctctcccaatgactttagcttttcaaacttttctttcaatatgtgatgtgcccaacagaacaccataactcaaagttcaccctaaatagcatagaaatggcaaagccttctccttcacagtaggtcttattcatgttatggtggccctttcttatttctctgatcatttctcaagtgatgwtatttattttcgatgatttgg

SEQ ID NO: 906945 - DNA, 591 bp, Homo sapiens
accggcacaagacaaagatggcctctctcaccactcctattcaactagtattggaagttctggccagggtaatcaggcaacagaaagaaataaagcgtattcagataggaagcgaggaagtcaaattgtctctgtttgcagacgacatgattctatatttagaaaacccatcatctcaggccaaaagcttcttaagctgataagcaacttcagcaaagtctcaggatacaaaatcagtgtgaaaaactcacaagcattcctatatgccaacaagagacaagcagagagccaaatcatgaatgaactcccattcacaattgctacaaagggaacaaaatacatagcaatacaacttacaagggacatgaaagacgtcttcaaggagaactacaaaccactgctcaaggaaataagggagtacacaaataaatggaaaaacattccaccctcatggataggaagaatcaatatcatgaaaatggccatactgcccaaagyaatttatatattcaatactattcccatcaaactaccattgacattcttcagagaattagaaaaaactactttaaatttcatatggaaccaaaa

SEQ ID NO: 906946 - DNA, 637 bp, Homo sapiens
tctctacctctgcccctggaatgagaagttcgtgccatacagaggcagcacctctattgtcaggaataaggcctcctgccactgcatgtgaatatgttctgtgartgagaaataaatgtagattatatgaagcccctgagctgttggggctacttctgcctaatttatacctggacaaatatatgaggtagcccatattgacgtcaaaataaaaaagtcacctgtgttaataattacaaattcaaccagttcataaagtgataattgataaaatagaagctccaagggcagtctttcttcacaaaattaaccactattatgtttcaaaaaaatattttatgcaggcacaaatatacatatatacacacattatatatgtttggaaaatacatattttttgagaaaggaaatacatatttcttaaaatttttatgaatccaaaactccacacaccttggcattgtgctttttaaaataatcatgtatcttggctatatagttatatgtcattttttaaaaatgcattgcatagataaaacctagttaaccaagtagttgtgggagttttaggagaggagagcaatcatctttaataaaacctggtaaaataggtctttgggtgtagattttacttagt

SEQ ID NO: 906947 - DNA, 635 bp, Homo sapiens
tccttgcttgtaattcagagtattcagtcgtctgttgtgaaatgttttctgaacttgaaatctcaggattcctcatgcatagaaagaagtggcataaaaatatacacacctgatgtcactttaagaatggccagtgacatttatggtgttgttcttggaagataaacaaactaaaaagaatcagcttggaagatctcttggtttactctttgcatagcttattggtcaagattttgtttggctgcatgtcatctacacttgaactacagtggctaaccaaacaggttgaattttcagccttagccgggagtatggaggtaaggatccagtgtcactattcaataacatcatcaaagaaccaggacccttcttttatcttgttctgtcatctttaatatatggctttcattctcatgggtttaagctctacttctaggcatcatgtccaaatttcaggcgaaggacaaaaagcaataaacaaaaggcacatattagattactctgtctctttttagtaatgataataataatttaaaagctttctagaatcttacctgagagggttgcttttatacttctttggccataacttggtcacatgaccatacayacctacctgcaaggaagctggggta

SEQ ID NO: 906948 - DNA, 667 bp, Homo sapiens
caactgtgtggaacagcatttggtgggataaggtgaatggtagcaagtggaagaaagtgcagccatgagaatttatgagggatggaaatcactgagatgaggcagggactgaaaagtgacagagctgaggatttcaggtggagcacttctcagcaccagactactcacaaaataaaggatcagtgtgaaagaagactcctagaatgctggcttagaaaactggatggaaggaggtacccagaaccaatgtagggatggcaacatgaaaaatggatttacgtagaatcatgatttcataatggagcttagactttcgatgagtttgaggctctgaagtaacaatgaggtacagctacctggtaagtgattgtaggggagtttaatatgtatatgtaaaattcaggagacaaaaacaagttgaagataacaaagtgggagctttaaaaatgcagactgaagttgcagctgtacaaacaaatgaaaatgcccaggattcattcagttgcaagtgtgagaaagagatgacattggataaatagaaagaaatgtaatgattcacttgtctataagaagaagcctggacttggcctcagccgtgagcggctctgaggaacctcccacaaggtgagtgtattgaagtctgartccacaccttgctttcggctca

SEQ ID NO: 906949 - DNA, 656 bp, Homo sapiens
tatatcaagggagggaggaacctggtaggagatgattggatcctgggaacagyttccccatgctgttctcatgatataatgatttaaaagtgtgattctttctccttctcattctctctctctctctctctcaccaccatgtaagacgtgcctcttttccccttcatcttctgctgtgactgtaagtttcatgaggcctcaccagccatgcagaactgtgagtaaattaaatctcttttctttataaattaccaaatgtcagatagttctttatagcagtgaaaacaggaatgtaatgtaatacaggaaatcagtaccagaagtgggacattgctataaatgtacctaaaaatgtggaagcaacctttgaactgcgtaatgggcagaggttggaatagtctggagggctcagaagacaggaagatgggggaaagtttggaacttcctagagacttgttgaatgattttgaccaaaatgctgatagtgatgttgataatcaagtccaggctgaggtgctctcagatggagatgaggaacttattaggaattggagcaaaggtcactcttgctatgctttagcaaagagactggtggcattgtgcccctgctctagggacctggggaactttgaactcgagagagatgatttagggta

SEQ ID NO: 906950 - DNA, 371 bp, Homo sapiens
ttgctagcagtgaattctgagaatctggagggaatctgagaggtacttaaggaaagcaggtattattagctagtggcggagctgagggggctctgcattccagatgatatttatgatattttcttatgttttgttttccttcccaaaaatgtgtgtctctgagttacagcaccatgatttgtcaaatataaattatgtttcaagtaattatccataaatgttaattactaatgcaacctgtacatttttaaaaaaattttatatttttataaaggatttctcaaattttttgttaattataatgtacttgtaatcttgtraaaaatttagcaatagttcgaatgatgacattattttctttatagtaaata

SEQ ID NO: 906951 - DNA, 629 bp, Homo sapiens
acattcaaaatgtccagaatccaattcaaaattatgaaatgtatcaagaaataggaaagcatgatccattygcaagagaaaaaaataatcaatacagacaaaattctagatgacatatattggcattagaacataaagacctcaaaatattattttagctactcaccaggcaaaattcttcctcttctatcaaaatcaagttttcaggctgagcagaagattcagagaaaagaatttccacccaagcatattttgtgctgaaaggggaaaaaaactgtataacttcattgggcaaatcatccagttttcttacaataagacttaatgtcttgttgatagccacctactctctgaataccaagcagcaataggaacatttcaaaatttcgttttgcaacctgattttcacatagattcaatttcgcttaaaatccaaaaatctcattatattataaaaatgtttctccagagtcttacagatgcttgttccactgtatcatatgatggtaaatgtctgttatgtgggctaaattctgcagccattttttttttaatcatcaaagcactcagcaaaatgtggcttattttttcttgtatgtattcacgcatttcaactttcagctgaacac

SEQ ID NO: 906952 - DNA, 629 bp, Homo sapiens
acattcaaaatgtccagaatccaattcaaaattatgaaatgtatcaagaaataggaaagcatgatccattcgcaagagaaaaaaataatcaatacagacaaaattctagatgacatatattggcattagaacataaagacctcaaaatattattttagctactcaccaggcaaaattcttcctcttctatcaaaatcaagttttcaggctgagcagaagattcagagaaaagaatttccacccaagcatattttgtgctgaaaggggaaaaaaactgtataacttcattgggcaaatcatccagttttcttacaataagacttaatgtcttgttgatagccacctactctctgaataccaagcagcaataggaacatttcaaaatttcgttttgcaacctgattttcacatagattcaatttcgcttaaaatccaaaaatctcattatattataaaaatgtttctccagagtcttacagatgcttgttccactgtatcatatgatggtaaatgtctgttatgtgggctaaaytctgcagccattttttttttaatcatcaaagcactcagcaaaatgtggcttattttttcttgtatgtattcacgcatttcaactttcagctgaacac

SEQ ID NO: 906953 - DNA, 522 bp, Homo sapiens
tcccacctatgactgagaacatgtggtgtttggttttttgtccttgtggtagtttgctgagaatgatggtttccagcttcttmcatgtcccgacaaaggacatgaactcatcattttttatggctgcatagtattccacggtgtatatgtgccacatttccttaaccgagtttatcattgttggacatttggcttggttcccaagtctttgctattgtgaatagtgctgcagtaaacatatgtgtgcgtgtgtctttatagcagcatgatttataatcctttgggtatatacctagtaatgggatggctgggtcaaatggtatttctaggtctagatccctgaggaattgccacactgccttccataatggttgaactagtttacagtccccacaacagtgtaaaagtgttcctttttctccacatcctctccagcacctgttgtttcctgactttttaatgatcgccattctaactggtgtgagatggtatctcactgtggttttgatttgcatttctctg

SEQ ID NO: 906954 - DNA, 522 bp, Homo sapiens
tcccacctatgactgagaacatgtggtgtttggttttttgtccttgtggtagtttgctgagaatgatggtttccagcttcttacatgtccckacaaaggacatgaactcatcattttttatggctgcatagtattccacggtgtatatgtgccacatttccttaaccgagtttatcattgttggacatttggcttggttcccaagtctttgctattgtgaatagtgctgcagtaaacatatgtgtgcgtgtgtctttatagcagcatgatttataatcctttgggtatatacctagtaatgggatggctgggtcaaatggtatttctaggtctagatccctgaggaattgccacactgccttccataatggttgaactagtttacagtccccacaacagtgtaaaagtgttcctttttctccacatcctctccagcacctgttgtttcctgactttttaatgatcgccattctaactggtgtgagatggtatctcactgtggttttgatttgcatttctctg

SEQ ID NO: 906955 - DNA, 597 bp, Homo sapiens
tacagccattaagtaagacccacagactgcagctatgcattatcctgtagcaacaaagcaatgaaaatgacctcattttgcttatgaagatacaccctatgttggactctatgatagagggattgggttatttccctgctgtgcccccagatctctaatggcccatccagacatctatttggctgcagcaaaggttcaagctaaggcatagatgacatcttcaaaagtcaaaaagtcaggtgtgatctggattttcataggaaattatcttcaaataatactgtcattctctgttttaagcaaattcttactctgtgtccttctcaaaaggacttgaactggtttttattaagttccaccattaaaaaaatgaaaacagacataaaattataaagcccattgggaaaatttaggttggaggtgtagggtggaaaagactaaggaaattaaggagaaatatagcaaatgagtatgtagttacaagctgagcttctagtaaggcaaagcaataaggaatatgggatcattttcatagcttatatctgtgtatcaagcacacttgaaggaaattattkcatgatactcacatttgtcatt

SEQ ID NO: 906956 - DNA, 502 bp, Homo sapiens
ttataaatcttcaaagggttatatcagtctttagtttctcttaacgaaggaacagttgttgaccagggcagctaatgaaatagttctggaatagcccagtctttggttgcccactctgggcacctgaatcttaactccatcaaggccgtccagtctacacaattcaactttcttttttttatcccaagaaaaatctatccccattaattataggatatcagtcattcacttgaagtcaggagggaaaaagtactggtgagcttttctcttgccagtgggcaacatgtaacaggctttacattataaataacttaaccacatccatggggcctgatccgcttggaaaaaaaaatgtaacaggacagcactagacagagctgtgatatccttaaaytgataaaaagttctgcaacagtgtccttagggttagcctcccctaaaacctcaaatggaatttggaagtttcagaaccaaatccaaactctggagtctagcacatcag

SEQ ID NO: 906957 - DNA, 645 bp, Homo sapiens
catcttctaaagaaatatttaatctgggccatgtgtggtggctcatgaytgtaatcccagcactttgggaggctgaggtgggtggatcacgaggtcaagagattgagaccattcttgccaacaaggtgaaaccccgtctctactaaaaacacaaaaatgagctgggcatggtgccgtgtgcctgtagtcccagctacacaggaggctgagttgggaggatcacttgagcttaggagttggaggttgccgaaagctatgatcatgccactgcactccaggatggacgacagtgagaccctgtctctaaaacacaaacaaaactaacaaaaaaagtgtttaatccataagatgaccacatgtacagaagcctcctggcaatcttagcctgaagccatgaaggaaggcatagtgtgaaggcaagtgcaggctggcctatggcaggtgaggatcaggacaggatatggaatgaacatctgcatcaaagctttattgcttgaaacattcctatctgtaggtcagccttaaaatacaccatttcataaaatattatctttcccatattttgaggccatgcaatttttgatacctgagggaactgtattgtgttcttgatttgatgagatcagtagctttcttatcttattg

SEQ ID NO: 906958 - DNA, 643 bp, Homo sapiens
cactcaccaaaatttgtgcttttgaaaagtctgatctcatctaccctaaatgcttaacacttctcttgagttctccaaagaatttttgaaagttcttatattaataatatgtaataaaagagcaagataataaagaacaaaatacaggaccaagtgggtgggataggtaggggttgaggggcggggacataagcagatctgtataatggaactcagccaaaggtttccagcttgttctctgaacgttgtgtttgtatttagtcagacattattcccacaaggggaattgtttaacaattcatcagctctcttctcctctataattgaagacctctcaattgtatttcagtaaagtacagaatctgaggaagagaatccttaataggcaaacctagatcagtataaaagaaatgagcaaggtaaccggcacaattataagtgtgatttttatgaaacgagttctgtagtcctttgcttatattattaaaaaatgcctttgttttataaactttgtagttaaagtgtaaagataacagacatcttataagktctaaatatccatgaaaccatcacaacacctatattatacatgacaatattgcactcgtattacagaaaatggaatgaagaaataataaactga

SEQ ID NO: 906959 - DNA, 615 bp, Homo sapiens
catcttgcaatgcacatctttaagaacgttcaaaacacaaaatacccataaggtttcaaayttttaaaaacagtgtggcaattcctcagtgatctagaactagaaataccatttgacccagccatcccattactgggtatatacccaaaggattataaatcatgctataaagacacgtgcacacgtatgtttattgcggcactattcacaatagcaaagacttggaaccaacccaaatgtccaacaatgatagactggattaagaaaatgtggcacatatacaccatggaatactatgcagccataaaaaatgatgagttcatgtcctttgtagggacatggatgaaattggaaaccatcattctcatcaaactattgcaaggacaaaaaaccaaacaccgcatgttctcactcataggtaggaattgcacaatgagaacacatggacacagaaaggggaacatcacacactggggcctgttctggggtgggggaagggggagggatagcattagaagatataccaaatgttaaatgacaagttaatgggtgcagcacaccaacatggcgcatgtatatgtatgtaacaaacctgcatgttttgcacatgtaccc

SEQ ID NO: 906960 - DNA, 615 bp, Homo sapiens
catcttgcaatgcacatctttaagaacgttcaaaacacaaaatacccataaggtttcaaatttttaaaaacagtgtggcaattcctcagtgatctagaactagaaataccatttgacccagccatcccattactgggtatatacccaaaggattataaatcatgctataaagacacgtgcacacgtatgtttattgcggcactattcacaatagcaaagacttggaaccaacccaaatgtccaacaatgatagactggattaagaaaatgtggcacatatacaccatggaatactatgcagccataaaaaatgatgagttcatgtcctttgtagggacatggatgaaattggaaaccatcattctcatcaaactattgcaaggacaaaaaaccaaacaccgcatgttctcactcataggtaggaattgcacaatgagaacacatggacacagaaaggggaacatcacacactggggcctgttctggggtgggggaagggggagggatagcattagaagatataccaaatgttaaatgacaagttaatgggtgcagcacaccaacatggcrcatgtatatgtatgtaacaaacctgcatgttttgcacatgtaccc

SEQ ID NO: 906961 - DNA, 557 bp, Homo sapiens
atatcaccgggtggatgtacacccactgctatattgggagttacgtcatactctaccccctggatattyggatcaatatcaccgggtgggtgtacacctactgcaatattgaaagtaataccatgctgtctccctccctggacattaggaacaaaatcataggtgggtgtacacgcactgcggtattaggagtaatattattattaattattacttatttatgattaacattaatattaattaccaacatcaatagtgagaaataattgctaataaaaagttttcatattattaatattaatattaattattggtacctaatattattgttttctaattaataagatcagtatcaattgttaatatcagtcattactaataattaatattaataattttattgttatcattaatataactattcagtaataattatcattattatcagtattgattttaaatcactcattcaacaaaaactcaggctacatacaactacacaaagggcctaacattgtaagcccttcgggactgcttcaacctttcactgacacaat

SEQ ID NO: 906962 - DNA, 653 bp, Homo sapiens
tatttccttttccaccataggcctcaaagcgctccaaatatcaacttgcagatcctacaaaaagagtgtttcaaaacttctctgttaaaagaagggttcaactctgtgagttgaatgcacacatcacaaagaagtttctcagaatgcttctgtctagtttttatttgaggatatttccttttcagctattggtcacaaagcgccccaaatatccatttgcagttactacaaaagaatgtttccaaactgttcaatcaaaagaacagttcaacaatgagagatgaatgcacacatcacaaagacgtttctgagaatacttctttctagtttctatgtgaagatatttccttttccaccacaggcctcaaagtgcaccaagtaaataattgaagattgtttcaaaacttctcaatcaaaacaattgtttatctctgtgagatgaatacacacataacagagtttctcagaatacttctgtgtagtttttatatgaagatatttccttttcagatataggtctcaatgcactgcatatatccaattgcagttactacaaaaagagtgtttccaaactgctcaatcaaaagaatggttccactccaagatttsaatgcacacattacaaagaagtttctgagaatgcttcagtctag

SEQ ID NO: 906963 - DNA, 615 bp, Homo sapiens
tgatgtgtccattcaactcacagagttgaacctttcttttgacagagcagttttgaaacacactttttgtagcatctgcaagtggataattggagcgctttgaggccaacggtggaaaaggaaatatcttcacagaaaaattagacagaagcattctcagagatatttggagagctttgaggcctacggtggaaaagaaatatcttcacacataaacttgacagaagcattgtcagaaactccttttgggtgtgtggattcaactcacacagttgaacctttcttttgatagagcagttttgaaacaccctttttgtagaattagcaagtgcatatttggaggaatttgagggctacggtggaaaaggaaatatcttcacataagaactagacagaagcattctcagagatatttggagcactttgaggcctacggtggaaaaggaaatatgttcacatagaaactacacagtagcaatctcwgaaacatcttgtaatggttgcaatcaactcacacgtttgaaccttccttttgatagagcagttttgaaacactctttttgtaaaatgtgcaagtggatatttggaacgctttgagacctatggtggaaaagg

SEQ ID NO: 906964 - DNA, 590 bp, Homo sapiens
aactgctggcctagcaaaaataccctttcaaatggcaggtgaactaagaatacattcagacaaaygaaaatagagataatttgtcataagcatatccacacaaaagaaaatatgaatcagtattctttaggtagaataaataaacaattctagtggaagcttagagatggaagaaacagagggcaaaggaaatgataaatgtgtaaatcaatatcaatgtatattaagtataaaaacgattataactagatgtttttattatattgggcattgtggggttttaaatgtataaggtttaaatatatatatataagtaccaatgacactacataaattgtaaaagaaatgaaagaagtcaaagtgtactaagttccttgtattgtctaggatgtgataaaatactcattaatattagacttcagtaagttaggaatgcatgttggcatttatagagtaaggactaagagattaaagactgaataactaacacagctaaagaaaagaaagtcaaaataaacactgtataaaaaaaaggcaagaaatgaaaaaataaaacaagcagagcaaacagaacgcaaatggcaaaatga

SEQ ID NO: 906965 - DNA, 608 bp, Homo sapiens
aaggtatacacctcctttttctggcccctcaagtgctcaggataagggagccactgtcccccacatccagccccaccctgacatcctgcagaaactactggaaaacccactctargctctgaggtcaggcctaactccattttgcatcatgggcaagaaagccatggcgtgcaagagccagctcaaatgggctgatgagagttgattgtgtacatctcttctcaactcttaatgagtggctcaaaactagccatatgggaatatttacaccaagggaattggtgaacattacaaatcagggcttttccttttcccctggagaggtgattcttacacatttaccagcatgccactgttttgaagatataaactcttaccattctgagacaatgctctcatcagtgtgcaaacattttacactactttgaaaactaggaacatgtcagatggattcatatgctgcctttgggaacccaaacctttcaattgccttgctttaagtattacagctgtcatctttgaatttttcatttaccagtagaacctttaatctacctataaaatatgattcatataatgaatccaggtatttcacccagtactaaaat

SEQ ID NO: 906966 - DNA, 608 bp, Homo sapiens
aaggtatacacctcctttttctggcccctcaagtgctcaggataagggagccactgtcccccacatccagccccaccctgacatcctgcagaaactactggaaaacccactctaggctctgaggtcaggcctaactccattttgcatcatgggcaagaaagccatggcgtgcaagagccagctcaaatgggctgatgagagttgattgtgtacatctcttctcaactcttaatgagtggctcaaaactagccatatgggaatatttacaccaagggaattggtgaacattacaaatcagggcttttccttttcccctggagaggtgattcttacacatttaccagcatgccactgttttgaagatataaactcttaccattctgagacaatgctctcatcagtgtgcaaacattttacactactttgaaaactaggaacatgtcagatggattcatatgctgcctttgggaacccaaacctttcaattgccttgctttaagtattacagctgtcatctttgaatttttcatttaccagtagaacctttaatctayctataaaatatgattcatataatgaatccaggtatttcacccagtactaaaat

SEQ ID NO: 906967 - DNA, 679 bp, Homo sapiens
atacatttctgaattatttcaaagtgttctcttgaagtttattaaactcctttaaaacagctattctgagttttttgcctgagaggtcmtacatctccatcactttagggttggtctctggtgacttatttggtccatttggtgaggtgatatttccccaaatgttcttagtgcttgtgggtgtatggtaatgtctctgtattgaaggattcagtatttattccagtctttacagtctggatttctttgtgcccatctttcttcaaaagaccttctacaaattctaagtacactgttgtgttccctgcgtcaatggctcctgcagccatctcagcactggtggttattctaagcccaggttttccatgagtctcatgaggtctctgatgttggcatggctctccagcacagatgtacgtgggaaagactcaagaaaagtacccatactgtatgggaaagctggccaaggaaagctggccaaggactcaagcctgggagactgtcatggttgcccagataggcacacctcccagcaggtttctgcacaggtaggataggttccttactgcagcaagtggagctagagctgagactggacccctcaggatctgctgtggatggtggctggtaagcctgtcttgctggctcaaatgggtacacacctcccaccaggtcactg

SEQ ID NO: 906968 - DNA, 649 bp, Homo sapiens
tgcatttttaatccattcagccactctatgtcttttggttagagagtttagtgcacttatattcaatgttawtattgataagtaaggacttactctctccatttttgttatttgttttctgattgttttgtgtttttctcttccttccattctttctgcttgtcttccttttagtgaaggtgattttctctggtggtaagttttaatttctggctttttatttttttatgtatcagttgtaggttttattatttaaggtaaccacaaggcttgcaaataacatcttaaaacccattgttttaaattcttgacaacttaccacattgcacaaacaaactaacaacaggcaaagtgaaaactaataaaaaatccaccctttaacttcttgcttccacttttcaacttttttgttgcttctatttatatcttattatactatgccttgaagttgttgtagttgttatttttggtaggttcatatttcagtctttctgctcaaaacataagtaatttatataccacaattacaatgttataatattctgtatttgtctgtgtttactatacttactattactagtgagttttataccgtcaggtgatttcttattgctcattaatgtccattcagattgaagaacttgtttta

SEQ ID NO: 906969 - DNA, 579 bp, Homo sapiens
tctagattaaagaaaccaaaagacaggcagttatttcttatttaaatctttattaaaagaaaaaagatttaaaacaagtaacaacaaatttcattaaatattaaacattttaattatcaaagatatttagacaatacgtttctaacatttctgcacagcagaagcacactgattatagagctcagactgtcatgtgctcatgtgagtttatttttggcataaaagtatctaaagtcacatttaaacaaatgtgataatattttataaactgatagtaacttactgatgattgattctcaaagctttcacaaattatcattatatgattgacattctcttagggtgaatacttttctggactctttctgtaacaaacactgagtaaccaactgaattaatttccttaaaagttagtagtactggtaaaattatttaaaactgaattggaaattatgttcctgtttatagtagtacaatacaattaacataytgtaagtaaactgattttttcataccaaaagttagaaaatgaagtggcatatatagaacaggctttgatgaaaataaatgatcatttaa

SEQ ID NO: 906970 - DNA, 631 bp, Homo sapiens
cccacaaacagtctggctttttctctgctcagtatgacacatccacattgttatttgctctagtaaatgggctgctgtcagtaggaaatttcagtagaaaaaattggtttctcatgatatgtagaaagtcaattgtccaggatagtagcagaggtcagttacatgtagtcttattttctgacactcctcaacctaactggacctttcctccctcagtaaattactgtcaagcttacttcctacaccattaatttttgggttaatactatctagggagtcaatagggagcgaaaattaagttgttttacctgcactttttatatgttgaccatgtttctcctttttgccattgtcaaaactgcactacagccaatctcagatttttcttgctacttaagacatcagttaagtcaatagcagactttactgccctttccttcctgatgacaatgcaagagtgattgaatcacaagcccagactctccagtggcaaagggcagagwttattttaagctccaagcaggaacacaaaaacaagatgtttaaacaacttttttttttgcagtttctgattagggcatgaaagttcttgtgttcctggaccagactgatccacctcttatttgttacc

SEQ ID NO: 906971 - DNA, 605 bp, Homo sapiens
gttgtttaattttcatgtaattgtgtggttttgataaatttttttagtcttgatttctaattttattgcattatggtttgaaagtgtgtttggtatgatttcagttttttcctatttgctaaggattcttttatatctgattatttggtctattttacagtatgtgtcaggtgacgatgagaagaatgtatattctgttgttttgggatggagaattctgtagagatctatcagatccatttggtttaatgttgagttcaggtcctgagtatcattgctaattttctgtctctgcctaatgctgtcagtggattgttgatgtctccaccattattgtgtgggagtctaagtatcttcgtgagtctctaagaacttggtttatgaatctgggtgcttctgttttgggtacatatatatttaggatagttaggtcttcttgttgaattgcactctttaccattattgtcatgacctcttttgtcttttttgatctttgtggtttaaaatctgttttgtctgaaattaggattgcaartctggcttttatctgatttccatttgcttggaagattttcctccatgcctttactctgaatgtatggatg

SEQ ID NO: 906972 - DNA, 660 bp, Homo sapiens
tccaggataatctgcccatctcaaatccttaatgatgtctgaaaagtcaaagtaacgtatsacagggtccatgggattaggatgtggatatgtttgggaggaggttcttccatctaccattccaggactcattcagcctccccttcatgttgacattgcatctggggccatagtttttgacaatatactaagccccacattctgagaatgtaattttttctgggataattgctttagaggatgaggtttggcttcttttctcaatatggtaggtgtggcccaccagtgaaaataataactgcttgaaacttttcatcagtaaagtcatcagaaacccagcatatattttctgcagtcctgcaggaaccacaccagcctcaagaagagcgagccccagctgcaagccctggcaggacccctcactctgctaacactgtggagacccctcaccccaacccttaatgggaagtcagtatataattagtcacgttgggttgggcttttaattcaccaaagcagtagagtttgattcagactttaattcacttgggttttgttaacattacacttaaacttgcgaagggactaatgtatcgattttaattcttctgagagaatttcacagagggaggaactatattcaaatttggggcatcctcg

SEQ ID NO: 906973 - DNA, 547 bp, Homo sapiens
ttgtgcttctacacagatgggatagacgagcatagcattgaattacatctattattttaagttgagacattttaatatcaaagtatacatattatatgatattaataaactagaatcattgacagtaaaaaagaagagctacagtagagttagttatatactggagttagttatatatatataccagaattagttgtacacttggcatgttctgagatatataaaatatatgaaaatcaaattatgtaaatgaaaatgctgtcacaaaataagcccatgtaggcagaataaatttattaatttttcaaaagttgtaagacctctagttgatatcttttatttaccttatttgatagtaaagttatattgtgttggtattctctggaatgtttattggctcttttcaatttctaatttgtgtcagtaataacatttatgcataacaaaaatatgttatagactggtttgtaaatggaagaacactttggtatataacattgattactatatggtatccaaatkggatatatttaccttaatacggttt

SEQ ID NO: 906974 - DNA, 572 bp, Homo sapiens
ttttcattttattttacttcatttcttaaaarccatctaaagattcccaccacccttctggggtgagtcctttaactcccttttgcctttgccattttgcttttttggtaattgccctaatgtttaattaagcatcagtaagactcatgggggacagaaaatttgatgagacttctcaaacagtaatatcacgcaaggtgcccatgtaaaatgggcccttttaccctcaatatttaccatgacctggataatagacatattcagggggagaatatcccagtcatcataaatccagtcccacatggtttacatataaagcatatcagctgcttcatctggggtgctccactcagcattttatagggagagttgagcagttcccttctcagggcaaacagaccttatagtggcaattatccagtccactaggctgctcattctcttgggaataacctcttgtgcaattggatcacatatatccctcagggattgtttaatagtgagctgtgggtcctacatcaacccaatcatgctctttcattctgtagcatttgaagatactgtccatatct

SEQ ID NO: 906975 - DNA, 602 bp, Homo sapiens
ttaaggatgcatgtgctaccctcataaatctatttttcaaggtattggtgaaacatatgycttctggaccttcccagttgggatgagtaggtctaaagtgactaagcctctccaccatcccagtgtccctaagcctttcgattccttcctctacattaaaccaagggagatcaggcattttgagctcactcacagtgggtcatcttttgatccatattgtagctaaccaagcaaatgaactattaaaagatttgttaagtccctgagctacagtattaagtacagaatccctgctaagtgggtccatatcaattaattcaacctgatttaactttatgttccttccactattaccccacacccttaatatccatttccatacctgttctctagatttctgcttacataaatttgaaaactcaaacagttcttttagagtgtagtgcttctcctcatgagtcacactctgaccctcacctctaggggcctgccaaaacttgagtctagttataggtctagaagcaaacagtggtgttgggggtggattctgaagagaatcagcattgtcttgcatggcaactgcctcaagagaggccatctct

SEQ ID NO: 906976 - DNA, 612 bp, Homo sapiens
acaagctatcaactgacaatttcaaggcccatctgttacactggcataatgcccacttaaaatgtggtatgccaatttcattaatgtttaggttktgagtcaaaaccttaatcagtcaaaataggatactagaaaataaaacttttcagttgattgtcccttttcattctaggaataagaaataacctggcaatccaatacgcaaaagtaacttcttgaatctgctcaggatcattatgaagaccaacccaatccttgagccctggtgctaagaatagaccaaatgtacatcaaggtttggtccaaaaaggcatcataaaaaatgctgcatctaaagaatgtggacatttgacattttctcatcctatacatctcccaccctcccctcaaaattccaaatacacagatgctcgatatttttgtaataatagcatacgagtattcagtcataaagaaattaactaaagtccatcatttgttcatttactgagaacctactgtgtgcaagacactagtgtaggtgctgggatacaccataaatctgtggactcataatatttacattatagtttcaccgttggaatgaacttcataaatcttgtagcccaaata

SEQ ID NO: 906977 - DNA, 612 bp, Homo sapiens
acaagctatcaactgacaatttcaaggcccatctgttacactggcataatgcccacttaaaatgtggtatgccaatttcattaatgtttaggttgtgagtcaaaaccttaatcagtcaaaataggatactagaaaataaaacttttcagttgattgtcccttttcattctaggaataagaaataacctggcaatccaatacgcaaaagtaacttcttgaatctgctcaggatcattatgaagaccaacccaatccttgagccctggtgctaagaatagaccaaatgtacatcaaggtttggtccaaaaaggcatcataaaaaatgctgcatctaaagaatgtggacatttgacattttctcatcctatacatctcccaccctcccctcaaaattccaaatacacagatgctcgatatttttgtaataatagcatacgagtattcagtcataaagaaattaactaaagtccatcatttgttcatttactgagaamctactgtgtgcaagacactagtgtaggtgctgggatacaccataaatctgtggactcataatatttacattatagtttcaccgttggaatgaacttcataaatcttgtagcccaaata

SEQ ID NO: 906978 - DNA, 612 bp, Homo sapiens
acaagctatcaactgacaatttcaaggcccatctgttacactggcataatgcccacttaaaatgtggtatgccaatttcattaatgtttaggttgtgagtcaaaaccttaatcagtcaaaataggatactagaaaataaaacttttcagttgattgtcccttttcattctaggaataagaaataacctggcaatccaatacgcaaaagtaacttcttgaatctgctcaggatcattatgaagaccaacccaatccttgagccctggtgctaagaatagaccaaatgtacatcaaggtttggtccaaaaaggcatcataaaaaatgctgcatctaaagaatgtggacatttgacattttctcatcctatacatctcccaccctcccctcaaaattccaaatacacagatgctcgatatttttgtaataatagcatacgagtattcagtcataaagaaattaactaaagtccatcatttgttcatttactgagaacctactgtgtgcaagacactagtgtaggtgctgggatacaccataaatctgtggactcataatatttacaytatagtttcaccgttggaatgaacttcataaatcttgtagcccaaata

SEQ ID NO: 906979 - DNA, 601 bp, Homo sapiens
gcaactggacaattagtgatacggtttggctgcgtctccacccaaatctcaacttgaattgtatctcccagaattcccacatgttgttggaaggaccaaggggaaggtaattgaatcktgggggctggtttttcctgtgctattttcgtgacagtgaataagtctcatgagatcagatggtttattatgggtttccgcttttgcttcctgctcattttctcttgctgctgtcatgtaagaagtgcctttcacctgccaccatgattctgaggcctccacagccatgtggaactgtaagtccaattaaacctctttttctttccagtcttgggtatgtctttatcaggagtgtgaaaatggaccaaatacagtaaattggtaccagaagtggggtgttgctgaaaatatacccgaaaatgtgaaagcaactttggaactgggtaacgggccaacattggaacagtttggagggctcagaagaagacaggaaaatgtgggaacgtttggaacctcctagagacttattgaatggctttaacaaaaatgctgatagtgatatgaacaataaggtccaggctgaggtggtctcagatggagatga

SEQ ID NO: 906980 - DNA, 594 bp, Homo sapiens
gtttatgattcatctactgaatggttataagttaataagtggaatgaaggataggattgtttgttttctttttcacctacagaatattttgtttcaagagatggacaatacagattgcacctaagagcctgtaggcaagccatctgagaaagttttctgcatgcagccatcgtaggatctatattgcagacaagatatagaattatatgctcaattacgaatgggtcagctgtcccaagtgtctgatgtgatggttgtttgaaagggtgccttgcacatttggccatgacttgcatcagaattcttattaaaaactaagtaatacaactgaggctcaatccatggcacagcccagccctcaaaaccaatattcatgagtaagtaactaaatgactgtgctccaaaagcagagccttatttactggtatgccgtctacacaaaaatattagtattataagttgtccatgagttcattttttccatagtttctctmaagggggtaggattgttgttttatcatcaatttccaccttcagaaacattcaggagttccctcccatcaaacaaacaaaaacaatggcattaaattcatt

SEQ ID NO: 906981 - DNA, 590 bp, Homo sapiens
tttaatcatacatagcttttaatagctaatttaacamatttcaaaaacacatgaaacattatttttcttgttagcaaagaaaaatatagtctacatgaatattataaagatagtgaaatgcaaaccataatggtttctatcaatgaattaattacatgttcttagcttttctctgtggggttcttatcttcagtctgacagacacaaaatgtgactgtatttaagaaagtgaaaataaccacagtggcaatttatttatctttcattattgtaaaaggaaagattttccttaataaagttctttgcacataaattacttttccggaaaacagaattttgttgctttacatattaactttaaagtttttgactattttatagatatttaaattaacatttcatctactttcttgctgttttaaccagataatactgagcataatttaaacatttttgtagataactgaggatcaaaaaataaatccaaattattttaaccttctgtaattaaagaacctcagaatccagaaagtcttagtatcatgtatgccgtgatgaacttagccataaagctactggaaattattagc

SEQ ID NO: 906982 - DNA, 606 bp, Homo sapiens
ttgtatgcaatattataaagtaagtattaataactcccagtaatacaaataatgattccagagttgctagtctgaaaacatttgaggactctttttttttgagacggagtcttgctctgtcacccaggctggagwgcagtggcttaatctcggctcactgccagctccgcctccggggttcatgccattctcctccctcagcctcccgagtagctgggactacaggcgcccaccaccacgcccagctaatttttttgtatttttagtagagatggggtttcaccgtgttagccaggatggtctcgatctcctgaccttgtgatctgcctgcctcggcctcccaaagtgctgggattacaggcgtgagccaccgcgcccagccttgaggactcttaaaagaggaaaattcaattaatagagtcaatgatgaaaaagtcaagacagagtttctaatattttccttgatgttagttttgcagaaagacaacatgagatagaggtcgtatcttttccacataccaaatgagaggtttattttaaaataatgttaaagtagtaacacaaatgatagggaataatatatgtcaacgtgagtgggcttcttgt

SEQ ID NO: 906983 - DNA, 677 bp, Homo sapiens
tagaagagaaacaaaatatacctatataaatataaacctatagtgtgtcaggttaygattaatgcaatggaacaaaaagcaagacccgagaccaaagtaggccctctttgaaaaaataacattagagaaaagacctgagggaagtaagaaagagtgctttgagggtgtctgtgaaaagttcattcaagatggaggaaacaaagtacaagggtacaaggtggaggaagcaaagtacagagtgaatgactggaccagagaagcaagaagatgagattgaggaagttgagaaaagaaatattaccatacagcctggtaggccatagaaagtactttggatgttaattggagtaaaggtaaaaaggaaagccactggagaatttgagcagagagtaagccttatattttaaataaacagtaagactcacgttttaaatgaatcatactgactttgatgtgaaaaatagaatataatgaggcaagtataggaatagtcagaaactattagaatattgtaaggatttggtggctagatgaagatagtcatagtaaaggcagttgagaagtggtgaaatcctggatatattttgaagataaggggacaggatactccaattgatttgtatggaggataagagagaagaatttaaaagttttggactgaacaatgggctaaacag

SEQ ID NO: 906984 - DNA, 660 bp, Homo sapiens
gggaatatttacagatttatgagcaggtttagcagaatatagaagagatgaagagctattcagagaaaagcaactacaaggagctattataacacctatgtctgtatcattaagggtagaaaatggtgttagaaaaatctgagaagtgtactcagaaatgctgtagtccaggaagggaacaactattctctgacaggcagtgctaaaacatgaagagaatgggaaggaatggctgaccttcctctctctctgatctgtcagtaacttgcattgtacatataacagaaagccagagagcaatggagcccagatgatgtaacccacaggctcagcctccaggacatccatgaaggcacagagagatggataatttaaggcaatcaggaaataagctgtccacattcttttattgtcatatgcaaattatatagtgttaaaaatatttgcaacagatggcaaactatataaaccattctccaattttttttgttgtttaaaactgacacagacacaatgaaacccgtatgtctgtcggttaatgctttgtgaggcataggttagttcaaacctcaatccaaactgttgagcayctctcctatctgtaaataatgtcttcatgcactaaggctttaaatttctatgactatataagcatcttca

SEQ ID NO: 906985 - DNA, 658 bp, Homo sapiens
  misc_feature 477: n = A,T,C or G
tttttaaggtagaatatatagaggataatagaagctaagacttaaagccaagtagaggaagattttttaaggccttaaagaatgarattggacgtttttagccacagtcaataaggaatttctaaatatttttgagcaggtaagtgccatgaacaagcctttgtaacaatgtgaattgtgaagtgtccatgatgggatatctagagtgagaacaaagaacacagaagatttatttcaaacttttaaaaataaggtggtcagcacctgaacaaaggccttgtagaagaagtgaaaagaagagaactgagagaactggtgaaggaagactcaactggatacaaaagtcaagggcaaaggagaaggaaagaaggaaaagtgaaatacaaatttcatgcagtgatcaatgctactatgaatatgtacagggaactctatggggtggaaacatatacagaatgacaggaattaaaaaccaanctagagcagtacctaagttgacaatttcacttagatttggagatacagatttttgctttatttttaattctgagttttatctttacttctttacttactgatttgtccagcttcactcctgtcatctacatttcatttcttgattatccacctttgattttcttacatctacatctagatt

SEQ ID NO: 906986 - DNA, 603 bp, Homo sapiens
atcccatgtgtgtctgaatgatttayaaaaacactggattctctaaagataaagatctagaaagctttggaaaatagtctctcaatgaaaaaacaagataagcatataagcagtattttagattaactgaatttaaaacataggccaaattagaatacaagcatgatcacttaatgatggggatacatgctgagaatctgttgttggggaattttgttgtgtgaacatcatagaatgtatttacacaaatctaaatggtataacctagtatatatctaggccataaggtatagtctgttgctctcaggctacaacttgtacagcatgttactgtactgaatgccatagggaattgtaacacaatggtaagtatttgtgcatctaaacatatctaatagaaaatatacagtaaaaatacagtattctaatctcatgggaccacagtcatatacatggtctgtcattgatagaaacgttatgtaatgcgtgactgtatttcccaagttattgaccaagcagttaaatggtgacttacactatttagtctccaaggttgaccaataaaccaaatggaatggagatttttattggttacatatttgg

SEQ ID NO: 906987 - DNA, 599 bp, Homo sapiens
ctctttctcctttaaatattgaagtcttcaaaactctctttgggaagatcacaatgttcctttttggacacattctcaatcttggcaaartaaacctctaaaataattatgactcccctcagtcattttccttgatttatattcttttggctttgtacctcctggaatgtaggaattctgtctctcatccttggtaatctaccattcaccttctttactgcacaaatattagtcaataaacatttgatatataaatgaatgaacacatatgcaaaaataaattgagttcaaaataaaagccatcgtggatgccattcaagagcttttaataattaaagtatagattctaagttggttttaccattaaagtatttaactcttatgatatgaagcctgaagtgatttggtgttcgtttcttcatagaaggaacaataacttgggtgattatcttcatcacaattatttttctaactataacccagatttctcagtgtctcctgcttgatcatctttctgctaccaacaactaaatttgatttatccgagcctcagtcctcacgctgtcttctccagttccatggctttattttatttttga

SEQ ID NO: 906988 - DNA, 680 bp, Homo sapiens
aaatagtgacaacaccaaatgctgatgaggtatggaaaaactggatttctcaagcattgctggagggaatgtaaatgttgagctattttggaaaactgatagtttcttttaaaactaaacattcaactacaawgtggcccaatcattgtactcctaagcatttatttcagagaaatgcacccttatattcacaaaaagcctgtacatagttgtttatagaagttttatttgaaatagacagaaactggaaacaacccatatgtctttcaatgggtgaatgtttaaataaactgtgatacatccaaaccatgaaatactattcagcaatagaaaagaatgaactactgtattgatacatgcaataacttcgatggatctcctggaattatgctgagtgaaaaaagctaattctagtaggtcatatactatgtgatcccacttctatgacatacttggaatgtcaaaattatagaaatgaagagaagattagttgttgccacctgttggggacagcgttggagagatggaagtggttgtggtttaaaaggcaacacagggaatccttgcaatgatggaactgttctgtattgttctgtatctttactataccgatatcaaaatcctgtttgtggtatcatactagagttgtgaaagatgttatctttggggaaaaataggta

SEQ ID NO: 906989 - DNA, 674 bp, Homo sapiens
agtactatgaacacctctatgcagacamactagaaaatctagaagaaatggataaattcctggacacatacaatctccaaagactgaaccaggaagaaactgaatccctgaacagattagtaatgagttccaaaatttaagcagtaataaaaagcttactaaccaagaaaagcccaggaccagatggattcacagccgaattctaccagatatataaagagctggtaccattcctactgaaactgttccaaaaaaatgagcagggactcttccccaactaattctgaggccagcatcatcctgatacaaaaccaggcagagatgcaacaaaaaaagaaaaccccaggccaatatcccaaatgaatatagaagcaaaaatcctcaagaaaatactaataaactgaatctagcagcacatcaaaaagttaatccaccaagatcaagtagactttatccttgggatgcaaggctggttcaacatacatagatcagtaaatgtgattaatcacataaacagaactaaaaaatttcccaaaaccacataattatctcaataggtgcagaaataaaagagatgtgaataaaattcaacatctcttcctgttaaaaaccctcaataaactaggcattgaaggaatatacttcaaaataacaagagccatctatgacaaacc

SEQ ID NO: 906990 - DNA, 674 bp, Homo sapiens
agtactatgaacacctctatgcagacaaactagaaaatctagaagaaatggataaattcctggacacatacaatctccaaagactgaaccaggaagaaactgaatccctgaacagattagtaatgagttccaaaatttaagcagtaataaaaagcttactaaccaagaaaagcccaggaccagatggattcacagccgaattctaccagatatataaagagctggtaccattcctactgaaactgttccaaaaaaatgagcagggactcttccccaactaattctgaggccagcatcatcctgatacaaaaccaggcagagatgcaacaaaaaaagaaaaccccaggccaatatcccaaatgaatatagaagcaaaaatcctcaagaaaatactaataaactgaatctagcagcacatcaaaaagttaatccaccaagatcaagtagactttatccttgggatgcaaggctggttcaacatacatagatcagtaaatgtgattaatcacataaacagaactaaaaaatttcccaaaaccacataattatctcaataggtgcagaaataaaagagatgtgaataaaattcaacatctcttcstgttaaaaaccctcaataaactaggcattgaaggaatatacttcaaaataacaagagccatctatgacaaacc

SEQ ID NO: 906991 - DNA, 613 bp, Homo sapiens
gataacaagggatgtgaaggaactcttcaaggagaactacaaaccactgctcaaggaaataagaggacacaaacaaatggaaaaaccttccatgctaatggataggaagaatcaatattgtggaaatggccatactgtccaaagtaatttatagattcaatgctattcccatcaaactaccattaacatttttcacagaattagaaaaaatattttaaattttatatgaaatcaaagaagaccctgtatagccaagacaatttgaagcaaaaaaaaaaaaaaaaaaaaaaaaaccaaacctggaggcatcacgctaccagacttcaaactatagtgcaaggttacagtaacaaaaacagcatagtactggtatcaaaacagacatagagaccaagggaacagaacagagatctcagagataacacctcacatctacaaccatctgatcttcaacaaacctgacaaaaacaagcaatggggaaaggatgtcctattcagtaaatkgtgctgggaaaactggctagccatatgcagaaaactgaaaccggaccacttccttacaccttatacaaaaactaactcaagatgcattacagacttaaatgtaaagccc

SEQ ID NO: 906992 - DNA, 613 bp, Homo sapiens
gataacaagggatgtgaaggaactcttcaaggagaactacaaaccactgctcaaggaaataagaggacacaaacaaatggaaaaaccttccatgctaatggataggaagaatcaatattgtggaaatggccatactgtccaaagtaatttatagattcaatgctattcccatcaaactaccattaacatttttcacagaattagaaaaaatattttaaattttatatgaaatcaaagaagaccctgtatagccaagacaatttgaagcaaaaaaaaaaaaaaaaaaaaaaaaaccaaacctggaggcatcacgctaccagacttcaaactatagtgcaaggttacagtaacaaaaacagcatagtactggtatcaaaacagacatagagaccaagggaacagaacagagatctcagagataacacctcacatctacaaccatctgatcttcaacaaacctgacaaaaacaagcaatggggaaaggatgtcctattcagtaaattgtgctgggaaaactggctagccatatgcagaaaactgaaacyggaccacttccttacaccttatacaaaaactaactcaagatgcattacagacttaaatgtaaagccc

SEQ ID NO: 906993 - DNA, 644 bp, Homo sapiens
ttattccccccaaatgtattgttttgaatatttaagtgttaccactggggcaatattctgaaacaaaataaacaaggcccagccacctctatttatacacttaacaatttcttgatcttcaataacattttctcagaaattttcctctcccagttatgacaaattttaaaaacctagaaagacctcaaaaatgatatcttttgaataatagtatatatatcactgtttaacaagtagcaaaataatgtaaaataaagttaggataattctggattccccatcaaggattatgcagcaaaacagttaccaaaatggcagatgaattgatccaaattagctacattgaaaaaatattttttctgtttcttatttttttcctaatgcaaaaaaatgcattgctacagattgaatgtttatgtctccccaatattcatatgttgaagtcctaatccccaaattgatggacttaaaggtgaggacttggggaagtaattagggttagattaggtcatgagagtgggtcccttatgatgggattaatgtccttataaaaagaggaagaaatgagacatcaatctrtcgtgcccatgttaggatacagcaagaaggcagccttctgcaaaccaggaagaaggccctcacta

SEQ ID NO: 906994 - DNA, 634 bp, Homo sapiens
aaaactagaaataaataacaataggaaaaccgaaaacgttgcaagtatgtggaaattaaatatacatttttgaacaaccaatgggtcaaaaaagaaatccaaacraaacatatctggaaacaaataaaaatataaatagaacttaacaaaattttctgaatgcagcaaaagaagtactaagaaggaagtttacagtgacaaatgcctatgttaaaaaagaagaaaggtctcaaataaaaaaccccattgtatatctcaaggaaattgaaaaataagagcaactaaatccaaagcagactaaaggaaataataaagattatagcagaataaataaaatgaagaagagaaaaacaatagaaaatcaatgaaactaagagttggcttttgagaagataaaattgaaaatattaagctagagtaaccaagaaaaaagagagaagactcacataaaatcagaaaacagagagaatacattacaactgataccacagaaatgcaaaggattataagagattactattaacaattatacaccagaaacctgggaaacctagaagaaatggataaattcttggaaacatacatcctaccaagactgaatcatgaagaaataaaaagtctgaacaggccttta

SEQ ID NO: 906995 - DNA, 643 bp, Homo sapiens
caggatagaacatgggcctaggacccaataagcccacttctcaagccagcccaggaaactattcagttacaaactttgctataggtctctgaggggaaaaaacataaatgaggtctccatcttgttttatgtccttgggagcttgacattttaacaacgtggcggtaacttctttgggtctttgtcattttacaatagtggcctgggtttaatcctggcctagggaatgagtactttctggctaatatctgcatgacttaccatttgctgattctctccccctctgtgaacttctagcttcctttcttaaatcttcctttctctgagctacctcttaaagattctagattttttaagtactgcttgtcatctctttgaaaatacctggtacaatcatttttaagtcataaccttggttaaggcttcttggtttcacctgtgaggttacttttggcaaagttcaaaagccagaaatatcggctccttggtgcagctaaagtcaggtagcaagggatttaaaaggattttcttaaaaagcgctacagttaaaagtcagcttaattaaaagtggatatccaagctataggtatatttaaaaggcctttaygtttttctctacttcaatcttgtttcactggaaaaa

SEQ ID NO: 906996 - DNA, 609 bp, Homo sapiens
ataagccatgagtgaagaaatgcaggcagcctttagaagctgaaaaaatcaaggaaatacattttcccctagagcctttaaaagaaatgtagctctgctgacccattttgaatttttctgacttccagagttataataaacttagtctattttaagccattaagtttgtcgtaatttgttacagcagcattgggaaaccaatacaaggccttatttaaaactctttctagaatcataaagaaccccagaggacagaagtactcttattccataagggtccccaagccagtagaatgcaagctgggagctcctgatggtaattcttgccaccacattaggaaaacccatctgtgaataaaatcaaccacgagaaaaacaggacacttagataagtaaacacagatttcttttcattgtgttaaggacatttaaaatgagatctatcctcttaacacattcttaagtgtacaatacattattgttgcctaaaggtacaatgtcacatagcagatctctagtgctcatttatcttgcttgactgaaattttatgtcagttgattagtaatgccccatttccgcttctsctcagcccccagcaatcaccattc

SEQ ID NO: 906997 - DNA, 564 bp, Homo sapiens
ccaggtgccttctgccacccctttctttgactaggaaagggaacttcctgaccccttgcacttcccgagggaggcagtgcctcaccctgcttyggcttgcaaacggtgcgctgcacccactgtcctgtacccactgtctggcactccctagtgagaggaacccggtacctcagatggaaatgcagaaatcacccatcttctgtgtcgctcacgctgggagctgtagaccagagctgttcctattcagccatcttggctccagtcatttcctgactttttaatgattgccattctaactggtgtgagatggtatctcactgtggttttgatttgcatttctctaatgaccagtgatgatgagctttttttcatgtttgttggctgcataagtgtcttcttttgagaagtgtgtgttcatatactttacccactttttgatcgggttgttttgtttttttcttgtaaatttgtttaagcttcttgtagattctggatattagccctttgttagatggatagattgcaaaaattttctcccattctgtaggttgcctgttcactctc

SEQ ID NO: 906998 - DNA, 568 bp, Homo sapiens
aggaagtcaaattgtctctgtttgcagatgacatgattgtatatttagaaaaccccattgtctcagcacaaaaactccttaagctgatatgcagcttcagcaaagtctcaggatacagaatcaatgtgcaaaaaccacaagaaatcctatatcctaataatagacagagagccaaatcatgagtgaactcccattcacaactgctacaaagaaaataaaatacctaggaatacaacttacaagggatgagaaggacctcttcaaggagaactagaaaccactgctcaaggaaataagagaggacatgaacaaatggacaaacatttcacgctcatggataggaagaatcaatattgtgaaaatggccatactaaccaaagcaatttatagattcaatgatattcccattaagctcccattgactttcttcacagaattggaaaaaaactactttaaatttcatatggaaccaaaaaagagcctgtatggccaagacaatcctaagcaaaaasaacaaagctggaggaatcacactacctgacttcaaactatactacaagactacagt

SEQ ID NO: 906999 - DNA, 575 bp, Homo sapiens
ggactcatactgagtgaaaaaagaagggagatttacaatggaggttaagtgtaaaatcttgttggttragtgtaatttctatctaaatgagacagggtatatacttatttccattttaaatctcccttcaaatatagtaacaaccaacatttttatgaattgtggaacattattaggacattaaagagaaggcactgcaggttttgtcctaatacctagatattaggtgtcttgggggatgttcgtctatcttcctgtgagcccatggcatcttggttctcattacttactattacaaggggccatagtctgaaaaattctcaagattataaaattttcttgaaaattaaaacttaaagagtttattactgtgtttggcccaaaaaacaagcttgcaatatatcaattctcttcttgataaaaacagggttgggggtcactaaagccacattttaatatatttaggatatattaacaagagtctgagctgtttattaatcagtgtggtttattataatttttaggggtttctatcatttacctttattaatatctcatccctccctagagtttta

SEQ ID NO: 907000 - DNA, 634 bp, Homo sapiens
ataatggtgaatacgtagtagcaataatagtggtaatagttattgttgttctttttctcacagactaagaaactgagggtcaaagagaaggaaattccttggataaagtgagacataggaagcaataaaactggaacgatagaggatggtcctacattttcacgttagccctttttttgagagcaattgataacaaccgcagcaaacatttctgctgtgctcatctgtgctcagcactttacaagcattatgctatttacttaactcagtaagtccatgagtttatgtacaattgttattcttaaattaaatttgacaaccttgaaactcagaggttgagaaacatgtcctttgtccctccagatctacttgcccccttctcctctgcactgtgcctggagaggctgcctgctttggactgcctcaacctgctcttttgtcctctggtttctggttgcctttggccagtcggaagcactggcaggagggcttggggtggtcaaggagctatggccaaygccagccctcaggcatgcctcttgaggtttccctgcaccctgcccacacatttgcagagaatctctttattacttatcctcaaattgcccacttgaatgtgccaagtgtttcctgc

SEQ ID NO: 907001 - DNA, 666 bp, Homo sapiens
ttactgcatagcaagggccaactctgtgtatgtcctgaggtggacattttattgaattcatgcccattatgttacaaccatttccccytccctctttttccttccttaacatgcagaggctcgtttctttttctgcatgtctccattttatcaatctcaaagtactactcgagtatatttcctccacgaagccttccctgaggattgtatgattcattattttccccaactttgaggaccttgttttctgcaccttgccccttcagtagtaaagtgttgcttagaccatggctctatgttcagactactcacgttaaaatctccaccacttccttgctgtgtcacatgagctaatttcttaatttctttgtctatagaagatgataattaaacacaatctttaatatactgtttgctacctaataattaaggtgataataacatgacctacttcataaggtgataataacatgacctacttcataaggaataaaataataaggtgtctgtaaaaagcttagcaccatgcctggcacataataagtgtttaataaatactattattataactgatgaaataaatagccgtactcctctagcagacacatgtggtagctcctgtagatattgatatgcctcctacattaagctcttttttctgtttga

SEQ ID NO: 907002 - DNA, 578 bp, Homo sapiens
ggtggaatgtggggacttcagaggctatgactagtctagcagcatgtttttggacttgaccatgagatatggtctttctgaccccgatagaatctraagattgcccctagacctcagctctatagtgggttcttcttacctcctctacagctttgaagaggatctctttctagctgcgctaacaactattgcttctgtcacagtacctgcagcacaccagcaggaaggagattcactttggcagcccacagcacctgtgctttgctgtcaggcaggagcaggtgattcttcagaactgcacggaggaaggcctggccatccaccagcagcactgggacttccaggaggtgagtaatctgttcaggaagagcctggtagtgctgctggtcagaaggaactgctggttggcattggatcctgggctcttccaagaggtcaggtattagggacctctgcctctgcttttgaacttagtggctgggcagtaaggcctcagggggaggaaaaggcaacccagcagcaaagttggcccactggcatcttcatatgtaatgatttgccaggtctctgtgtagctc

SEQ ID NO: 907003 - DNA, 666 bp, Homo sapiens
aaaaatttttcaagacctctgttttttaactgaactttatcattggcattgtgggtctttgaagttgctgggataaattaatataattaaataaaagactgaatttaattgcataaattgtattaggtggcaattaacaaaaggacccagatggcttattgcctaattgggtgaacaaagcaagaatatggtgtttcttgcttccttaaccagctccatgatttattactttattgcagaagtggctgtcaactcagtccctggctggtatttacagacccttaatttaagtaaaacagatgcctccatttagttctagaaggaccttctcctttagtgtaaccaagtgttcaaattcccttcttctctatgaactcagcattcattttatccataatgatcaatttaaaagtagagaaacttgtcagttgagagatctgattcccaagagattggtttcacttgtctacctgaattttgtgattggattttgttgttcgttttttaagattgaattttgttaccacccccaccaagttcatcatcattattaactataccactggggagaacagagagaagtgtccggccagcagtctagagtcccacaytcttcatgctgtattacaacagtaagagcagatatccttcctggagagtgcctga

SEQ ID NO: 907004 - DNA, 636 bp, Homo sapiens
actgcttctttttcttatcagtcaaacacacaaatagcaattgctaaatattagtaacactttgtattttatgcccaggaaagaaaacaaaaataaataagtaaaaatgaaaataaatcttacatctcaaaatatttcacaaattacctcacttaatcctccgatatgctgattcccataaacacaacaaactttcaccacaaaaaagtttggatgtcttaatttatagaccttattgctctctgccttttcctccttacctatctttaggaaaaacactcctatttcatttgtttcatagattgatacttagttgaacattctacaaatgctgttgcttagcaacctattcacagcaccccatctaagtcttcatctattaaccttttcatctgtccattaagcttggtccttgtactccagtgaataaacaaaactttgctagattatcattcctttttttttgtcagtttttaaaaacttctgtgacttttctgattcaactatctaatctgtctctcattgcagattactgaacaagtgtcagggagcaaaaygtatgaacgagtttccagttctgcattgctcatgaaaaatttgaactgtatgttataatttcagagtatgctaaaaaaa

SEQ ID NO: 907005 - DNA, 643 bp, Homo sapiens
cttattagtagggaatctggatcaggaagattgctttcctatgggcttgggtaaaagccactagaacccaaggagacaatacttgtccaaactgatttataaccaaaagctaatgttactgactgataacccagggaaaaaatttatttaccactaaaatctaagagccaatattttaatttaataatttacttttctttgtttaatttacttttctttgtttatttctattcacaagttgaatattttagattggtttgaaagttatcacttctctatgctgttctctatcagcctctatttgataagcgatttgagattattaatgcaatttatgaacccacagaagaagaatgtgaatggaaaccagatgaagaaggcaagatttcggaggagttgaaagaaaaggccaagattgaagaagagaagaaggatgaagaaaaagaagagcccataggaattcctgaattttggttaactatttttaagaatgttgacttgcttagtgatatgcttcaggaacatgatgaacctattctgaagcactttaaatttattaaagtgaagttctyggatgctggccagcctatgagttttgtcttagaatttcactttgaacccagtgaatattttacaaatgaag

SEQ ID NO: 907006 - DNA, 595 bp, Homo sapiens
tggagaaataggaatgcttttatactgttggttggaatgtaaattagttcaacaattgtggaagactgtgtgtggtgattcttcaaagacctagaaccagaaataccatttgacccaacagttacattactgggtatatacccaaaggagtataaatcattctattttaaagatacatgcacacatatgttcattgcagcactattcgccatagcaaagacatggaatcaacccaaattcccatcaattatagactgggtaaagaaaatatggttcatatacaccacagaatactatgcagccataaaaaggaatgagatcatgtcctttgcagggacatggatggagctggaagccattatcctctgttactgcaaactaatgcagtaacagaaaaccaaactctgcatgttctcgcttataagcgggagctgaacaatgagaacacatggacacagggaggggaasaatacacactggggtctgctgctgggggaagcagggggagggaaagcatcaggaaaaagagctaatgtatgctgggcttaatacctagggatgggttgataggtgcagcaaaccaccatggtatatg

SEQ ID NO: 907007 - DNA, 647 bp, Homo sapiens
gagtggacattcttgtagttttgtccaggtattatyctttggggatagaaatggttcgtaatgtttttatagttcatcctagaccatggctcagccttgccacccaacttccctgtccagggagatcagaagcaataggtggctatcaaggcatcatttgaatagggtggatatcaaatacagcatccccatctgtacaggactcagcctttgatagttcttgatctacctgccagcaaccattccttcctcccacttgcctttacctccacaggatcagtaagagcaagaaaagttcttctccttcttgatttatttcctcctacttaaacccaggcagagaaactggggcctaacttttatgaccttggtgttaggaaaacaaagcttactaataatattaaggaatagaagtaattttatgtccagggcctgttgaccagtataatgttttctctgatgcagttgactctctgaacctgaacatattctatataacttttacagctccctttcccaagggagataatcataacaatagtctctaggaaattcccttacatgggctgatatgtgctgtccttttttcctcatgtcccaagatcagataatccaaatgcaactttcataaatgtcctacacagtca

SEQ ID NO: 907008 - DNA, 621 bp, Homo sapiens
catccttctctctttttctctctgcagctcccttctgcctggcattctatcctacaaatgctagccaatttgacatgttccaacttcaacttttgtctccttgattcaaggttattgtaagactctgtttgggtgtctgctctcggtctgatttttggtcactgcctccaaatgataatctagggaaatcatgttatttatattacttggtttgtcttctattgggaatcacagtcttgcatagcctgtggtacaatgtccaaaacgagtcattttatatttttgtcaagtttccatttgtttaagccaatatgatttgtttgttccctcaacaaagcaaaataacatgttttttataaatgaatctcttcactgattttctattattttcatattatcaatcaaatttttttgattagttcagccttatgactgtgcttttgagaatcaaagaaaacagcttccaagcacacttggaaaataagtgtatctaggagtggaactaaaatatcttggaggattatttgtactacagaaatagtatgcagaaagcaatgaaaaactcttctaaattaaaagcgacrggtgacaattaagataaattttcaaaatactccctgg

SEQ ID NO: 907009 - DNA, 591 bp, Homo sapiens
gaagcaaattactttcgtctttgttcatccaaaatgcttaaatttgagctaygtttttcagtgcaaaaattcctggaaatgaatcaattctagcagatcttgtagaatcataattctgaaaagtgcttgagcagttatttcattttgtcagggatggaacaaaggcataggaagattaagagatgtatttcaggtatcctcgttagagctaggacttgacttcaaggcttgggacttgccgaccatggcccttgtctggctttatgcctggtcagacctcaacaacttcgagcatatggaatgtcacttgttattttctctattaaccatttttagaaaattttaaattatagtaggacaccaattaatacctgtagaggaactgataaacttaaaacatcaatattttataattattataataatttaggcaagaatcaccagtggatgttaaaattaacaagtggacactgaatgaggaataagatattcatgtaacatcaaactatctccccacaaattacctattaataaaaggaaaaatagtaaccatatagtgaagaaacctggcagataacatttttaaccaag

SEQ ID NO: 907010 - DNA, 582 bp, Homo sapiens
aatatctcctattcagaactcaatgccttcactgtccttgaagccaatgattattttttacccccyataggacctctaccctaaatctcttctttgagattcagaagcatactctcagaggcttacttgatattttcttttaaatatctaagacaactctttaatattatgtccaaaaagaaactcataatctttctgctccaaatcttcctgctcctagaagagatacaaatgaataagcttgggtattcaaggagtagacagtccagtgttggaaagcaacaagaaaataaatgccaaattactatgtaatatgtgctattataatgatgatcaggacagaaatatatacataattcaaaagagaaaaaaatgccacaactataataaaactaagatgacaattttttttatacctagaagattgacaacaattcagcagtgtgactgtatcaatcattaagtgttacgagaatttagaggaaaataccaaaagcaggatacttaataaatgatacaggaatagtgattttaggacgtactgacaagaaaagacagcactttaactaagttttgcttaat

SEQ ID NO: 907011 - DNA, 601 bp, Homo sapiens
tccagctggttgttcctcacttctgaggcttccactaattcaggcctggctgtttttttttttttttttttttwaaccatccaccagtgcctgaagtttgtttaaattgtacgcctagagatgctctttatatgtatgttttcattatgaatgttattaaaaattaatggctagcaaatactacttactatgtattatatactacaaaaagcatgttaaaagtgttttatttgattctctctcacacacagaaacctgtaggaagtgttattatccccattttatggattgcaaaactgagactctagttcacagaaacacttggtggcagaacaggggcttgaattcaggtatctctggtgttgagattcttgatcttaactactacttatactacttcctagttatttgtatgatcaattgttaaagtatgatttcctacacttttaaattttggtgcgtgacttgtgactatttcgtcttcaaatttggtataatcacaaatttaggtacaataagtaattacaaagctgtgcatatatctctattaattttaataaatgagaagcttaagaagatcttagatactctattacttttt

SEQ ID NO: 907012 - DNA, 601 bp, Homo sapiens
tccagctggttgttcctcacttctgaggcttccactaattcaggcctggctgtttttttttttttttttttttaaaycatccaccagtgcctgaagtttgtttaaattgtacgcctagagatgctctttatatgtatgttttcattatgaatgttattaaaaattaatggctagcaaatactacttactatgtattatatactacaaaaagcatgttaaaagtgttttatttgattctctctcacacacagaaacctgtaggaagtgttattatccccattttatggattgcaaaactgagactctagttcacagaaacacttggtggcagaacaggggcttgaattcaggtatctctggtgttgagattcttgatcttaactactacttatactacttcctagttatttgtatgatcaattgttaaagtatgatttcctacacttttaaattttggtgcgtgacttgtgactatttcgtcttcaaatttggtataatcacaaatttaggtacaataagtaattacaaagctgtgcatatatctctattaattttaataaatgagaagcttaagaagatcttagatactctattacttttt

SEQ ID NO: 907013 - DNA, 598 bp, Homo sapiens
ttctgagggatgtccaaggcagtggttttgttrtgtctgtctcagagtgttgacagtacccagcatactctagatgtcaggggccacttagaagagactgtgttttgatccattatcatactagcacatgccacagccctacctctcagctcaatgcaaaataagcggtgaaaaaatacccacattccattttttttcctgggaaggggagtaaaggactggatcatatatccaatactctgattattacgaagcctgtccaagtcactggcttttgtcttgtagtgctaacagaacccagtatactctaaagagctgggggccgctgatatcaaagacagtaatttgaacaagcacaagttaaagaggtcaccaaaatctctgactgggctaattagtgaggttgttctttcataaaagttcagtctgtggagatggggagaagtggctgctgtatctaatgaataagcatcaatacaaaaatcaagaaaaatgaagaaacagggaaatatattctaaacaaaggaacaagataaatctccagaaacagatgctaatgaaatacagatatatgacttaccaaacagagaattcaaaa

SEQ ID NO: 907014 - DNA, 558 bp, Homo sapiens
agctttataggatgcagaagtggtcattgtaggtctttggaagttcaggcattggcgcctggctctgaaattattaccctcattaaaatgcttttctaggattatggaatgctacgtttggtatcacatagtcaatatgaaccctgtgcagacaggtaaacaacacatcacacactccatataccttgctaaaaaacacccagcagagaccctgacaaacttcagcacatgcctgtgtgatctgatttaaaatctgctcctagcaagttgcactgcttaagaaaacatatcttcttcaattagcctatatagtagatggctttttggaagctaaagtgttatatatctaagacattaacttaaaatgtaaatatttcaggaaaggagaataaagttaacatttacactgaattatatttttagagggaacacctagccacttacctagccaggaggccctgatgatagagctcacattattgatcrggagtgcagtgctttgaggaagatgggctgaagggaaaggtcaggctggggacagtgggtgttacctgggag

SEQ ID NO: 907015 - DNA, 596 bp, Homo sapiens
ttttattttttcctttatacctttaaataaaaactgtgtgtgtgtgtctgtctgttcatagctatcacataatattgcaattttgaaatgggagagttccttgacccccttgcaggatttgtgacaggggtgtggctcacttgctcagacactgtgtgcttaaatcccttttgggaggcggagcttgcagacggataggtgcagcagcctgggtgagtgcttttgggatccagctcatgttaacatctcggggtgtgttacaattaatgctcttttagcagttgctgttcgcagacagctaagtgttaaaccagctcagtggagggtcagggtaatagccttttgcaccctgcccccttggtaccaaggtccaggaggaatcaggtcacacacatacttgaagtatggtgaatgtagggattttatcgagtgttggaggtggctcttagtggaatggatggggagctggaaaggggatggagtgggaagatgatcttcccctggagcttggccatcccacagccaatctcctctccaacagtccccaaccaaastcctcttgacatttagtcactcctcttctctccttctctgct

SEQ ID NO: 907016 - DNA, 615 bp, Homo sapiens
cccattatccccattttgcagayaaaggaagaagccacagagtggctaagtaagctgcccaaagtaatacaacagcaggctgcagaagtagaacttgaatccaggtgtctgggtctctgagcctgctctctgtaaccattacactgtccctgttacctgtacattcactttagctatgaccggcagttttcgattttgcttgtatttattttcatttttaaaaatttccagacaattcaaatcccgatcctctgaaaagatttcctcagtcaaatgaatgcatgaagtacaaagtgtaattttataacaatgtttctgagatgtttttcttcctaaatttaatacttgatttcttttatttcctttcaaatgaaaacttagttatattgtaaactgacatggaagattctttaaattacattattcttaaatgcaggtagtataatacaactatgtcatgtaatatattgtgcagctatagcttttctgacacctgtccttctattttcaaaattcatcagaaaggatttggttttaaaaaatcataagttcccataagctttctggcaaaaataatgattaagaacttaataaggaaacatgacatgagacctt

SEQ ID NO: 907017 - DNA, 567 bp, Homo sapiens
cgtttatgaagcttagtttggctggatatgagattctgggttgaaaattcttttctttaagaatgttraatattagtccccactcttatctgacttgtagtgtttctgtcaagagatctgctgttagtctgatgggcttccccttgtgggtaacccgacctttctttctggctgcgcttaacattttttccttcatttcaaccttgttgaatctggcaattatgtgtcttggggttgctcttctcaaggagtatctttctggtgttctctgtatttcctgaatttgaatattggtctgcctttctaggttatggaagttctcctggataatatcctgaagagtgttttccaacttggttccattctccccgtcactttctggtacaccaatcaaacctatattttgtcttttcacatagtcccatatttcttggaggctttgttcatttcctttcactcttttttctctaatcttgtcttctcactttatttcattaatttgatcttcagtcactaatatcctttctcccacttgatcaaatcagctattgaagcttgtgcatgcat

SEQ ID NO: 907018 - DNA, 679 bp, Homo sapiens
ttccgtatatagcgagccagttatcccaacatcatttattaaatagggagtccttttcccattgattgtttttgtcaattttgttgaagatcagatgattgtaggtgtatagcattatttctgaattctctattctgttctgttggtctatgtgtctgtctgtttttgtatcagtatcatactattttggttactgtattcctgtgatacagtttgaaggtgggtaatgtgatgcctccagctttgttccttttgcttaggattcaattggctattcaggctccctttgggtttcatatgaattctaaaatactttttttctagctctgtgaataatgtcattggtagtctgatagagcaaattcctgaatctgtaaattgctttgggcagtacagtcagtttaatgacattgagtctttctattcatgagcatggagtgtttttccatttgtttgtgtcattttttgagccatgttttgtagttctccatgtagacatctttcacctccttgattagctgtattcctatttgtgtgtgtgtgtgtgtrtgtgtatgtgtgtgtgtgtggcagttgtgaatgggactgcatttctgaattggctctcagcttggatatttgtgtataggaatgctagtgatttttgcacattaattttgtatcctgagacttcgcagaa

SEQ ID NO: 907019 - DNA, 625 bp, Homo sapiens
ttaactaactacatctgcaatgaacctatttccaaataaggttacattctgaggtcctagaggttagaactccaayatatgaatttcagagtgaaggaggaacatgattcaacgcataacagcttgtaacattgtgtacagaaggtgcaactttttttttttattctacttcaagttttagggtacatgtgcacattgtgcaggttagttacatatgtatacatgtgccatgctggtacgctgcacccactaactcgtcatctagcattaggtatatctcccaatgctatccctcccccctccccccacccctcagagaactgcaaatcaaaaccactatgagataccatctcacaccagttagaatggcgatcattaaaaagtcaggaaacaacaggtgctggagaggatgtggagaaataggaacacttttacactgttggtgggactgtaaactagttcaaccattgtggaagacagtgtggcaattcctcaaggatctagaactagaaataccatttgacccagccatcccattactgggtatatacccaaatgactataaatcatgctgctataaagacacatgcacacatgtttattgcggcattattcacaatagcaa

SEQ ID NO: 907020 - DNA, 660 bp, Homo sapiens
attggcttatctttattttattgttactgtgatccatgtaactaatgaccaagttacttaatccacactgatatgaccatgtttcttactttcttgagtagaaatctcagatcttaatgaatgtctcatctttaatcagtggaaaagtcccataccaagtattttgtccattaacctcaagcgtggcttcacttttttcccccaaatttattttttctttcactttatatattaaatgtttataatctctttgtgttgtgtctatttttgtaaggcaactgaaatcctttttgaagcagactggggtataaataaatgatacagataaaaaataggtagttgaatagatggatcataagtaggtaatttagaatctagtctatattaaacagcacaactaaaaagaactgtggtgcagttctttgaaaggccattcccatctctcttctgtacataacagcagaactgatgcttgattcccattcccctcttaattggtctcgaaattttggaaaagtcattatatttctcttggcttcagtgttcttatttgtcaatgcgggagtgattgaatgatatttgaaatccattccaactttaataacatttggggatgaaaaatttcaccagtcaaarcttgtagagagtttctatgcagaa

SEQ ID NO: 907021 - DNA, 613 bp, Homo sapiens
caatagggcttattctagagtgatgagagtagtgtgtccttgtaaaaacctgatatccattgctcasagttcgattataatcttgacttgcctcaattttattatctcacgaatgcagactctcctgggttctgccctctccctctcttcattgtgtttcttcatgagttctccttgatctatgtaatttttaaaataaattgaccaactaattcattatatttctactaacttccctttcctattttcagtgtaatagattctgtttccgataaaaattacccctctacaggagcaatgatattttctctgtatgcctaagggtattaatagagatgaaaaggattaatatatgtaatagcactctgtccatagctttatactttttaatagataaaaacattattatatacaatattagtgtaatatttgttgtaacctaatcatttttttgggtcctgtatttgtactggagtctggacttttggagtcagaatgttacaggaaaggggtcccgatccagaccctaagagagggttcttggatctcacacaggaaaaatttagggccagtccccagggcaaagtgaaagcaagtttattaataaagtaaa

SEQ ID NO: 907022 - DNA, 656 bp, Homo sapiens
agtccaaagtgtcatctgagacaagacaagtcccttccaccgatgagcctgtaaatcacaagcaaatttgttacttcctagatacaatgggggtacaggcattgggtaaatacagccattccaaatgggagaaattggccaaaacaaaggggctacaggtcccatgcaagtccagaatccagcagggcagtcaaatattaaagcttcaaaatgatctcctttgactccatgtctcacatccaagtcatgctgatgcaagaggtgggttcccatggtcttgggcagctccactcctgtggctttgcagggtacagcctccctcccagctgccttcatgggctggtgttgaatttctgtggcttttccaggcacacggtgcaagctgtcagtggatctaccattctggggtctggaggacagtggtcctcttctcataactccactaggcagtgccccagtggggactctgtgtgggggctctgaacccacatttcccttccacactgccctagcagaggttctycatgaggaccccacccctgaaacaaacttctgcctgggcatccaggcatttccatacatcttctgaaatctaagcagagattcccaaatctcaactcttgactgctgtgtactcacagcctcaacaccatgtg

SEQ ID NO: 907023 - DNA, 514 bp, Homo sapiens
gtttcctgcatatgtcacatggactcactccatttgaccatcaggccaaatcaaacctattgcctctttttgtaaatgaagttttattgcaacacagacacacctacctgttcatttacatattgttgatggctatttacatgatataacagagtgaagggttgcaacagagacagtgtggctcaaaagctgagactatttactatctaacccttttcagaaaatgtttgctgatgactggcccagagccaaaacccaaataagtagtagcgtttaaacaaatgacaggcttgggtgggttgcaaaagcggggccgcttggaggtagtgaatatttcagatgttgtgcgggaggtgtgaggagaaaagtgagaagcggtgagggacgaaggaagaggaagtgagagccatggacttcagaagtaaacttgawcttcttggcaagttaccttggaagcctggggccagggtcattaagcagcaagattaccatgaaggaaaagagtgaaccaaaa

SEQ ID NO: 907024 - DNA, 619 bp, Homo sapiens
gcctatgaggaaactaaaatatgaagaggttaaatgacttgtcactgttgggtgtggaagtgggatagctaagaagtatgaactataaaagaaggagaaagaaaggcagataggtatgttaacctatatcagaattaaattggggatatctgtcctatcttatataagtccagggtgacataaacctgtctctgagagtaccctaagtgggcatttagcttcacactttccctggggtcagtttgatgcctccagaactctttttttaatctaattttggactttcaggcttggacaggaattaacctcagtttgggaagaagggaggcaatgtttccttttctggacctcctcttcaggacatctggtacattgttggggcttccacttaattgcctatatcactaccaggcccagagtagaaggaagattagaaatcagaagtccctgactcacagtcctgatctggactttatttatataagcacaaaggatgtaggctgcttttactttatcttcaaggtcattctctatgttcaaaacttggccatctcttaccrgcatttccctcacatagttgctgcgtgccaccatttgccccaagctcttgcctcaccat

SEQ ID NO: 907025 - DNA, 784 bp, Homo sapiens
tttcactgtattggccaggstgatctcgaactcctgacctcatgatccgcctgcctcggcctctgaaagtgctgggattacaggcgtgagccaccacacccagacctacatcgtctttttacaagatgaatcatctgtctggaatggcagaaactgaaactgcagacctcaatctatggtacatatcaagcaattcaacttcttgtaatgtcatgacttttctctgcttcttgggagtacttccagcatcactacacttcctgtgaatcctgtgatgttattcaaggtttgcagtatagaactaaacaggatgaaaaaaatgaaagaactatgagagatcaagttgtactgtgatatgcaattcactggagagatgaactgttcagggggaatgatcatcacatggctttttaagggaatatgcacagcacgagctcaatgcaataacaacaggacgtggctacagaattattacagcagtacagtatggatgataattttgtgcagttataatttaatactgcatttttgcttctgtttatatttttctcaactgaatggcaccatgtacaatctgtgtttgtgtgcataacttttgataaattttaacctttaaaataaatttgtgtgtattttatgattataaatgataaaatagagcagtgtctacatatattttatgcattcattacatttctatttcttaatttttttgatacttctaggctatgaagctcatctacaagttttttcaaattgtcataaatctccaaaatgttttccg

SEQ ID NO: 907026 - DNA, 336 bp, Homo sapiens
atttttcgttcaaaatgtcaagaacctgggcaccyttcaccagtaacaagctgactgaatggacctccttttggccaagtggaccccagagaaacctgaaaaactgaattcctggacacgacaggaagagtggtcagatgtatgtagttataccgccttccttttaaagtttaggcacaactgaccagcattaacattaaaatggagtacgtaagaccaacaaaagagactttgcagcaataaggtagaaaattccaaagtggtataacatcacatgacaatgaacaaaccctgaaggaaataaaaaatattttacctgaaaatatgtttatttga

SEQ ID NO: 907027 - DNA, 633 bp, Homo sapiens
acccgccaaagaaactgcgtgttcagccttamcctatgttattctaatgaacaatgtcaaacactcatcacttgtacttcaaggttatattttgccattctttccccatcagagtgtgccacgaatttcactttgccaatctccccattaacctcttcagtaacattatttcttccttttattttgctctttattgacctgcctattaagatctagctatctgtgtagcgtaatttttaaatggctttttattaactctttattattgcaaagatgataatttctgaatatgccatggactgagagtatcaatagatccatgatgttatgttcagtttaaactggtagacaacatgtttatcaattttaatatgtattttcttataaaaggatttctgtattaattcctaccttaaggaaccatataagtatagagcagatttgcctggtcattttaatttctgtcttgactcatttactgaatgatacattgttaaaaataattggtatatgccaatctcacatataaaagttttgagaggcagatggaatttgaaaatgatttagggcttcagtggtgggtatatataattgagttctcagctctaccaattactcagtgtccatagaagc

SEQ ID NO: 907028 - DNA, 673 bp, Homo sapiens
tgtgtgtgtgtgtgtgtgtgtgtgtgtgtgtgtgtgtacagaagcacagagtggttaagtgacttgatcaattcctcaggtggggattcaagctcttaaagctgtagactatgtcgtccaaacaaayactgacatgaatatgacttccaataggcaagaaaagaggcctaggtcaagatactgcaagacatgcaagcaatctagtaatggcataaaacctgctatccgaattggctaaaattatgtattctcccaaaataaagacttcagagtatgagtagatttttatttttacatagacaaagatactaattctttcataagatatggcatctctcgaatgctgaaactttggttcccatatatcataattattttctctgactcaataataaaattaaaaatctggggaatcaaaaaatgttgactgaaattctcctatttttaaggattttattgacagtgtaatatttattacccacaaaatgagcaggctgtggaaatttggcagtaaatttaaacataccctactgactgacatattacgatacttataatgacaaaccaaccaaaaacaatacaaacattttttggtgacttttttttggctttattaaacacttttgatcaaattacttaagctgttttagataaatgactttttaaacaaatg

SEQ ID NO: 907029 - DNA, 665 bp, Homo sapiens
catactttgttctttcgcaataacaaataattgtcgtgacattgaaattttagtcttttcctattttcatagcctttagcatgaagcgtacaaggaggcagattagttacttatgtcacaaattcactatattactatatcaactattatatcactagtaagacataattaacttaaaatgataaaagtgaacatagttatatcacaaacggctctttttctgttatgtatctctcaatatttaattatgcatgtagacatacagaatcactgtacgtttattatagaatatatagtattaaaaacaatttaacaccgttttttgatttcttgcttttaaaagaattctatatttttatatcaggtattaaatgcctatatgatttgtcttctttgcttaacattgcttacaccatttgaaataattttactacgtgttatagaaaaaaaaagatgtcaatcaaacgtaagcacaaacaccacaaatgatatactacagggtcagaatagaagaaaaataaaataaacatatgaaaaacaaaacaaacwtttttatatacacaggcttaacaggatactagaatcctagtgattcttaaggctcttgacatctcagggagaggcagactgggaccacgtggacagactggtctctgctttcagtt

SEQ ID NO: 907030 - DNA, 621 bp, Homo sapiens
ataaaagcatctctagagactatttcactcccaagtatggtcttcagaatgctacccattgttcatatcacagtttgaacagaagtttctacatgaagttattctgagcatcctcaaacagatatacttttccttggaccccacataatattttgcttctctatcatgttatttatacacaataaaaattataaaagaaattagatgccttgaaaacaaagctagattttccttacttttaaaaattataaaatttataaaaattataaatttataaaatattgcaaaacagatattcaataaatatacaatgattagattgttgaatttaacaataaacaaaagaaactattaataattattgaaataattatatatgtcattattagtttgaaaggaaaataaaccttgggatcccaaaatcactaatctaaaggaaaaagtcaagctgggaactgtttagggcaaacctgcttcccattctgctcagtcatccttccgctcactgagataagtgcatatctgattgccttctttcgaaaggctaaccagaaactcaaaagaatgcaacmatttgtctcttacctacctatgtcccagaagacccctccccattttgag

SEQ ID NO: 907031 - DNA, 634 bp, Homo sapiens
aggaggctgtcacccaagggttaactgagataatatgtattacttttagtatagtgatttgaccatatattagtcagggtttgcagagaaacagaaccaatagactatgtgtataaatatatatacagagagatttattttaaagaactagataatacaattgtgggagctggctagtccaacatctgcaggatagggtgggaggctggagacccaggaaagagctgatcttgcagcttgagtcgaaggcagtctggtgacagattccctcctcctctgggaggtctgtcttttctcaagatcttcagctgattggatgaagctcatccacattatggagggcaatctgctttaatctaggcctactgatttaaacgttaatcgcatccaaaaaacagctttaccgcaacatccagacttatttgatcacatatctgggtaccatggcccagtcaagttgacacagaaaattaaccttcagagtccattaggagcattcagaaaatgatgctgttgtgattaagctataatcaaagacttgaaggagtttkcatctagtggtaaagatagataatcacagtgccatgtgatcagttctatgaaacagatgtttgggagaccatgggtacaggca

SEQ ID NO: 907032 - DNA, 624 bp, Homo sapiens
cataatccatcacctaaacagaaccaactacaaaaaccacatgattacctcagtagatgcagaaaaggccttcaataaaattcaacacctcttcatgctaaaaaacactcaataaactrggtattgatggaacgtatctcaaaataataagagctatttatgacaaacccacagccaatatcatactgaatgggcaaaagctggaagcattccctgtgcaaaccagcacaagacaaggatgccctctctcaccattcctattcaacatagtatcggaagttctggccagggcaatcaggcaagagaaagaaataaagggcgttcaaataggaagagaggaagtcaaattatttctgtttgcagatgacatgattgtatatttagaaaaccccatcgtctcaccccaaaaactccttatgctgataaggaacttcagccaagtctcagcatacaaaatcaatgtgcaaaaatcacgagcattcctatacaccaataatagataaacagagagccaaattgtgagtgaacgcccattcataattgttacaaagaggataaaatacctaggaatccaacttacaagggttgtgaaggaactcttcaaggagaactacaaaccactac

SEQ ID NO: 907033 - DNA, 587 bp, Homo sapiens
ctactgagacaacagctggggtggctraggaagtgctggcatcacccctcccctaactgctggctgcacagctcacccactcgaaaagagaccccttcattttgcttgaggggaggagagggaagagtggggaggactttgtcttgcatcttggataccagctcagctagagcagaatagggtaccaggcagagtcatgaggccccttttccaggccctagctactggacaacatttctagacacactctgggccaggagggaacccactgccttgaagagaagaactcagtccttgcagtattcatcacctgctaactgaagagcctttgggccctggataaccaacagccatacccaggtactatgttgagggccttgggtgagccttggacttgctggcttcaggtgagactcagtacattaccagttgggggagctatagggcaagactccttctgcttgagaaaagcagagggaaaagtaaaggggactttgtcttgcaccttaggtaccagctcagccacaggtgcttagagcagcaagcaggctcttggactccctgattctaggacttgactattggat

SEQ ID NO: 907034 - DNA, 639 bp, Homo sapiens
cctggttttctgttcctgtgttagtttgctgcgaatgatggtttccagcttcatccatgtccccgcaaagcacatgaactcattctttttttatggctgcatagtattccatggtgtatatgtgccacatttcttttatccagcctatcactgaagggcatttgggctggttccaagtctttgctattgtaaatagtgctgcaataaacatacatgtgcatgtgcctttatagtagaatgatttataatcctttgggcatatacccagtaatgggattgctgggtcaaatggtatttctggtcctagatccttgaggaatccccacactgtcttgcataatgatttaactaatttatgctcccaccaacagtgaaaaagccttcctatctctccacatcctctccagcatctgttgttttctgattttttaatgatccccattctaactggtatgagatggtatcacattgtggttttgatttgcgtttctctaatgaccagtgatagtgagytttttttcatgtttcttggcaaataaatgtgttcttttgagaagtgtctgttcacatcctttgcccactttttgatggggttgtttttttctttcttgtaaatttgtttaagttctttatagattc

SEQ ID NO: 907035 - DNA, 655 bp, Homo sapiens
gttgcaaatgacaagatttcctttttagttaaggttaaatagtactccagtgtatatatgccacatgttcttaatcaactcattcattgttggacacttagcttgtttccatgtcttggccattgtgaataackcaataaacatgggagtgcagacgtatttttgatataatggtttcattcatttcctttagatttatatccagtagtggaatttctgagttatgttgtagacctattttgatgaacttccatactgtttctcagcttcttatcatgttttcatcatagcatctttcctctgcattttcttctgcccagaaatgaaggagggaagataccctcttttggggtccatattaattagtgatccatatgtgttagaaattgtattcagctatgaataacaaaaaccctccaaaaatgactcaaatcaattagtagttttacttttctactattttattttctagttttatttttccatgtgttgtctggaggtttacattctagggctggtatggtggctctgccacagaacagggtctttctgtttttctggtgagctatccttaacattgtatcctggtctagggaatgtttatttctagatctttgaaggcaggggctatattatttatttagatttttaaaat

SEQ ID NO: 907036 - DNA, 682 bp, Homo sapiens
aaacacatagaaaaatattattttccctgtccctatatttaaggtagattatatatgtataaagagcactgggtttcttcagtgttgggatctgcttataagacatcttggagataagaattggaacaagtacrttgagttatggaaccatcactggtaagaaagattctattttggtgcattggtcagttcaccctcataacttcttttgtgccatttccatggacttggctatttcttcagttctttgctcttcttccttatgcttatctactcagttctgtttctccttacaactttctggtactcagcaggattttggaccaggttgttatttactccctcttttctggggtgtagtctgcacaactctgacttcaattctttcttgtctccacattccatctccatttttggtctttgaaccgacactgacaatacatggtgatattatattcatgataactaaaaaaaaggaatgtgatatctttatgaaggtctaagtaaagatttcttaagttattgccattataagttctccagcctaggtggaccccttattttttagggtcaaaatttggtactcagaatgagcaacaccagcaacaccagtggtccttttatcagaattatctaaataaggcatatactatgtttgtttctacatgctacaaatgaattc

SEQ ID NO: 907037 - DNA, 616 bp, Homo sapiens
ccagcaatccaggtgatttcagagctctatggagatgtgattttccccaccagggcaatggctggcagccagaacactcacaagataatccactccgcccccgagctaggtcataatcttgctccagcctctgcagcacccacaactcactacaatgaactaaggtcccaaaccgagacctccagcagcacacacctgcacgcacacaggcataggtgtgcacccacactcagaaatggtcccgggggaaggcggagcactagacttccagctcttcagcagttgggtggctgcaagtgcagagaagcatcctactagttgaaaaagccatccttagacacacatcaccaattggaacagtctttggggactcctccagacagactgtgtcttctgactggagccaggaagaggccacctctgtgaaactgctagggggtgggtagtttattgctgcttccaaccacacctctatgcagggtgagaagaaaatggtgcagtctcgctaaaggactctgctgctgctgctgctgctgcygccgtgctactgctgttactgccgttgctacggctgctctgctgtagcacatgacatgaattcctgcctttttcatct

SEQ ID NO: 907038 - DNA, 679 bp, Homo sapiens
acaaaacatatatcatcatctataaaacacttattaaagaaagtaaacaggacacaaataaatggaaagatatcctgtgttcatggattgcaagaattcatattgtttttcttttaactttttttwaaatttattatactttaagttttagggtacatgtgcacaatgtgcaggttagttaaaaaagtatacatgtgccatgttggtgtgctgtacccatcgactcgtcatttaatattaggtatatctcctaatgctatccctcccctctcccccaaccccacaacaggccctggtgtgtgatgttccccttcctgtgtccatgtgttctcattgttcaattcccacctatgagtgagaacatgcggtgtttggttttttgtccttgcgatagtttgctgagaatgatggtttccagcttcatctatgtccctacaaaggacatgaactcatcatttttttatgcctgcatagtattccatggtgtatatgtgccacattttcttaatccagtctatcattgttggacatttggattggttccaagtctttgctattgtgaatagtgccacaattaacatatatgtgcatatgtctttatactagcatgatttataatcctttgggtatatacccagtaatgggatggctgggtcaaatggtatttctagttcaagat

SEQ ID NO: 907039 - DNA, 720 bp, Homo sapiens
ggtttttctagatatagaatcatggcatctgcaaacagggatagttcgacttcctctcttcctatttggatgcmcttaatttctttctcttgcctgattgctctggccagaacttccaagactatgttgaataggagtggtgagagagggcatacttgtcttgtgtcagttttcaagggaaatgcttccagtttttgcccattcagtatgatgttggctgtgagtttgtcataaatgactcattattttgaggtatgttccttcaatacctagtttattgagaatttttaacatgaaggatgttgaattatatcaaaagccttttctgcatctattgagattatcatttttttgtctttagttttgtttatgtaatgaatatatttattgatttgcatatattgaaccaaccttgcaccccaggcataaagcctagttgatcgtggtagataaggtttttgatgtgctgctagattcgatttgccagtattttgttgaggattctttcactgatgttcatgaaggatattggcactgaagtttcttcttgttgttgtgtctttgccaagttttagtgttacgatgatgctgtttccatagagtgggttacagaggagtctctcctcctcaatttttggaatattttcagtaggaatggtaccagccagctcttctttgtatatctggtagaatttggctgtgaatctgttcgatcctggg

SEQ ID NO: 907040 - DNA, 597 bp, Homo sapiens
ctgtttaaacccagaaggttgaggctacagtgagccataatcacacccctgtactctggcctgagggacagagtgaggtcctgtcttaaataataataataataatmatcatcatcatcattatcattatcatcatcaacatcatcattacctagaaacagaaaattgaacactgcatatttttacctatgtatggaagcttaaaaaggttgatttcatgtaagttaaaagtagaacagaggatactagagtttgggaagagtagggagaagggagggatagggagaagtttttcagggatacaattacagtgagataggaggaataagtttcagtgttctattccactgaattactataggtaacaatacattattatgtagtttcaaatagctacaagtagaacattgaacattgccaaaacaaagaaatgataaatgtttgagatgataaatatgctaattactctgatctgattactgtacattatatgcattgaaatatcactatgtttaccatgaatatgtacaatggttgtcaatgaaaaaaattaaaatattacataaagaaacaaaatattctttaatattataaaat

SEQ ID NO: 907041 - DNA, 667 bp, Homo sapiens
cttttggaagccactcaagacttttggcatcactcatggctaacttyttatcctcttctcatctcattctacacagtcttctctagatgacctctattcctatggcactagacaacttagattacccaaatctacatctccagcccagcttgtctgagttcacacccatacatgcaactgcctaagaacatctccatatggaaagctcacagatacctttcagctaaccatgtaaagttgaactcattatttgtcccaattgttccctatgtcagattaattccatcttcatccacccagttcttccagattaataattatgatccatcattacttttctttctcccttatcttctatatccaatcataacattctctagaatcaaacttgtaaacatctcttgaatttttctatttctctcattttaactgaacccatacttgcccaagccaatgtggtatctcacttaaatgggtataatagtctcctaactggtcttctgcttcagcttttgcccctctccaattcattctcaacacagaaacaaagattttttttataatgtcaacctgagcacattgttgccttgcttgaaacccttcactggcttccccattacacatgaagcgaaattccaactccttaaaatggtttgcaaagccctac

SEQ ID NO: 907042 - DNA, 582 bp, Homo sapiens
tattgctttcctcatttcattgaattrcttgtattctgttgaagtttgctgagctttttaataataattatttaaaattccttgcaaagagttaatacatctcgatttccttgggtcaatcactggcaccttactttttttatttaatgatgtcatttttccctgattattctttgtctttttggttatgcatcagtgtctgtgcatttgaagaaataggttcttattctagtctttgcagactggctttgcctggaaaaactctgcagcagatgcggcagtagggcatatcagaatcctgaggcagctgcaggtggtatagcactgccagacgtctagggttcactacagcaagtgctgtgctgtgacaggccagaagctttgggctggtgtagacagtgctgttatggggcatccctaaaactcaggcagcagtggcttctatggtcctgccagaagcctggggcagatatggccaccccaggactggggcacatccggatccagagaccactaaggcctgcctgctgctgagggctatctggaggctgggggcactgatgtcagcctggttgtgatttg

SEQ ID NO: 907043 - DNA, 622 bp, Homo sapiens
caacctatccatctgacaaagggctgatatccagaatctayaaagaacttaaacaaatttacaaaaataaaaaatcaaagagtgggcaaaggatatgaacatacacttctcaaaaaaaggcatttatgcgaccaacaaacatatgaaaaaaaaaaaactcatcatcactggtcattagagaaatgcaaatcaaaccacaatgagataccatctcacgccagttagaatggcgatcattaaaaagtcaggagacaacagatgctgaagaggatgtggagaaataggaaagcttttacactgctgatgggagtgtaaatcagttcaaccattgtaaaagacagtgtggtgattcctcaaggatccagaaccagaaataccatttgacccagcaatctcattactgggtatatacccaaaggattataaatcattcttccctaaagacacatgcatatgtatgtttattgcagcactattcacaatagcaaagacttggaaccaacccaaatgtccatcaatgacagactggataaagaaaatgtggcacagatatacaatggaatactatgcagccataaaaaaggatgagttcatgtcctttgcagggacttggatgaaactg

SEQ ID NO: 907044 - DNA, 586 bp, Homo sapiens
caaaacttacaaaaactgtaaaagaacaacgatttaaaatctctggaaattgtaccaatgttatacattaaattaaaaaaaaattattcaaaacaatctactaaaatcccataagaacatcataagtttgtggcatttgaaccacaatttgttcacaatcccatttctccaactcaatttgatgaaagctatttttagggcaggtgtggccagaagacacactcttgctctcctcagctctcaaccaaggatcacctcatctcactgggcaggtcagcctgccagcatttctcagaccttccaactgcaatttgaagagactaatttcctcttaaacatggccaaccattaagggagtccctttcccaatctggctcctattgataagtttgagtctctatttatttgtaaggtatagaggttacagcctatctatggtggctctctctaccctaggccctacccagaggcacagcagaccaagaataatgggacctaattgcttttgcccargctcacttgctagggtcgaatttccacactgggagaaataagcagagaagacaagaggttatcaccccactca

SEQ ID NO: 907045 - DNA, 624 bp, Homo sapiens
taactatatgagaaacttacagtttcttgaaaattaaattaagttggaagtgtgaatttatattctgaaccmcactcattgtgacagaggtgaggatagggcacagtatacacataaaggagaatcacttgttttaatccacagaattataaaagttctaagacgtggaattataaaggagaagcatttgttttaatccacaggcttatagaagttccaagaagtggaattatattgagttttgaaatgaacaaaatttttaaggttgagtgaatgttatgtaaaagatatgtcaaataacaaataggtgatgggtatttttaatatcttatcaaaatgttgcctgtgagagtcaaggcaatacactattggttgtcaggtgatcacaatagtgcctacataattattattttgttgcactcttatagacctctggtacgttatgataaaggaatgtggaaagaagagctaaccattaggagggatcacattaagtacgataaaaataaatttgaaagaaataattgaaaatcagaaaacccacaataatgaacaaaactgtatagcatacatcatttttattcaaatcactgcctaaacataaacaaatttgttgagccatga

SEQ ID NO: 907046 - DNA, 619 bp, Homo sapiens
  misc_feature 615, 616, 617, 618, 619: n = A,T,C or G
gcactgccctgataccaaagccaaataaaaaacactacaaggaaaggtaaccacagacaaatttcccttataaacaatgatgcaaaaatcctcaacaaaatatgagtgaactaattcaacagcacattaaacagattataaaccaggaccaagtgggttttattcttggagtgcaataatggtttaaacatacaaatttaatcaatgtaatataccacataaacataaagatgggaaaaaaagacacatgatttctcaattgatgtataggaaacacttgaaaaaattcaatgcatttttatgataaaaactctcaacaaagaaggagtagaaagaaactaccttaacattatataagccatatttgaaaaacactcagaaagcatcataatcaatggtgaaagactgagtccttttcctcctcaatcagggataagacagacagcatgcaccttttcaccatttctattcagcatagtactggaagttctagcttgagcaattagrcaagaaaaaaagacatccaaattggaaaaggagaaataaaattatttctatccacagatattataatttaatatgctaatcaccatgaggttaactcttagtggagannnnn

SEQ ID NO: 907047 - DNA, 585 bp, Homo sapiens
gtgtgcctgcaatcccagctactcaggaggctgaggcatgagtatcacttgaacccaggaggcagaggttgcagtgtaaccaagatcacaccactgcactccaacgtggcaacagagtgagactctctcaaaaaaaaaaaaaaaaaaaaaaacagctctgctactttagcagtgtggggtagttggagaaccaaatgcatgtgtagccacttaacaggcatctaaaacttgaacaaattacttcttttgaaactcagttttttcctctgtgaagtgagataatacttacctcgttgtctgtgtgagagagttaagtttccacgctggcccacggaaagcatttggaaaattgttgttctcttatcttgattacataggattccaaactgtgtgcatttctttccaactaaaatacgagttctcaatgttggaattgatggtggtcctcatttttttctattcgttttagcaagtgcctaaagaatttataaaataagttattttataaagaasagtaactttgtttattatgattagttaattcatacatgggtaagctgacttgatgagctccacaccacttag

SEQ ID NO: 907048 - DNA, 506 bp, Homo sapiens
gctgttattaatcaaaaccataaagacaaaatatttatgatcagcartacctgggattatgtaaattatagttaaattctgtacatttcaaatgatatcaatatctacataagaatgacttaaacaagatgatgattggatggctcactaacccttcaaagactgaaaattagaaaagttaagagatgctcaatttcatatgaactgttagaacatgtattttttatatacccttctcatatactttctcttaatgttaaactagagttaaagttagtagtgacaaggtctaagcatgtctttggaaaattctaattagctgaggatatttctcccttcacattctggatgataaaataacaattctgtcaattaggagaaactcacatgaatgagaatctagctctgaactgaatttcattagctaaaagcaggggtctatattagcagggatagttcttaaaggttaaacactagagatactgtttcattaacttttagaaacc

SEQ ID NO: 907049 - DNA, 449 bp, Homo sapiens
ctaaaccaatgtacttcttacatatattgattgatgactcatgtcttcctaaaatgtacaaaaccaagctgtgccccaaccaccatgracacatgtcaggatttcctgaggctgtgtcatgggtgtgtgtccttaaccttggcaaaataaaatatctaaattaactgagacctgtctcagattctccgagtccacaaaagacacccatttagagtaggtgagggtaacatatactatttgaagcatgttagatgaatgtatgggtttgtgctcagaagccaaaaatgaaatacataaacttgaaagttgtcagtggagggatgactatgggtgcagctattagattgcctaggaaaagaaagcatggagtgataaatgaagaggagctggggcagagcctaaggacattgtttaaagttcagaaagtcaggaaaaagaagattaaattg

SEQ ID NO: 907050 - DNA, 642 bp, Homo sapiens
cacacttggctttttttttttttttttaatttttgtaaagtcatggtctgcctatgttgcccaggctggtcttgaactcctggcctcaatcctcccaccttggcctcccaaagttctggaattacaggcatgactcctgaaacaagggaggcacgaagtgtgcccagcctccctttctattaaatagattggaactgagtttcttgtcttatggaattgaaagagccttaacagacaaaaaccccattttgcagatgagaaaatgtgagagtctccagatctatctaaaaagaaaaaaaattagttgctctttccattcacgtagcacaaattcatacagtgaaaatttggaatatgaggaactacggggatgaatttgtgaaaaactgcaaaagtgatatttcaggaagaatatacagccttgaataggtataacagcaatagagactgaaatttattgagctaaaaatttagaaagagaacaccaggataaatcaaaataaaggaagaggaggataaagaaaagagcagataagttaataaaacaaaaactaaagataaaaatwaagaggattacaaaattataatggaagtttaaaaatatttatatgtaaatttaaattaaaattaaatctatcaaaa

SEQ ID NO: 907051 - DNA, 791 bp, Homo sapiens
tataataaattataaacatttttgtactagtttttgtwtaaaagtaagatttcacttatctttggtaaatacctagaagtggaatggcagaatcatgaactatgtttaaattttaagaaactgaaaactgcattttcattcccagaagccatgcgtgagaatcccagtgcctccacaacctcactaacactcggcatgataggtctttaatttcagtaattctggtagattgccagctgatttagaatatcgtttgaatttacatttccctcatgttaatgacattgagtattttttattagcttatttgcatccatataaattctttagaaaagtgtttttttcttaatatattgcccttgttttcaatcattgtgtttgattcttatggaattttcaaagttctttatatactctggatataagttccttttcagatatatgctttgcaaatattttctcccaatttgtggcttgtttgtttgtttcattctcttagtaatatatttctgagatcaaggatttgcatatttgatgaagtccaatttattctttttatgaatcatgattggtattgtgttctaggaaattttgcttcactcaaggtcaaaatatttcttcctgcgttttattccagaagttgtatagtttcggcttttatatttaggtctgttatccatatggtattgtatgttgtgtattatttgaagtatggatcaattatagttttgcttttagacacaaatacacaaacacaacttcttgaatagaatttgtttcagaattgcctt

SEQ ID NO: 907052 - DNA, 614 bp, Homo sapiens
gtttacacatatatatacacacatatatgtgtatatatgtgtatatattcacacataaatatttgtaattattattcatttattattatagctaatttaattttttaaagaaygttatatttacatcatagctaacttttatgccttaaatatatttttctcaccttgtacttttgcattctctctctcttttgctcctcacagaactccttttcaataggtaaaagacttttttatagataatccacctgaattcagagctttagggactgactcatggttacttacctggtaagttgagcagctgtgttttaaactcaaactcctgaggtgttgaatacgttcactaacttggacaatggtgttatgtctgcataaatatgccaaagtacttcaaatcttacacattaaacaagtggcgttagttgtatgtcagttataaaacaatatacgtgtacatatatgtgtatatttttgtatttaattgttaacaacaaatatatattacacaaggagaaaaaatgaagattctcttgaaaatataaaatgcacacattgcaaacattttattcaactctgtagttaatgagggaactattaagatgtttaaattg

SEQ ID NO: 907053 - DNA, 542 bp, Homo sapiens
acatactctcaaatatcccttcaccaatcgtacaaacacagtgtttccaaaatgctgaatgaaaagaaaggtttaactttgtgaggtgaatgcacacatgacaaaatagtttctcagatagctttcttgtagtttttaacctgggatattcccctttttccattttcctcaatgagctcccaattgtccatttgcacattggacaaaaaatgtgttcccaaactgctgaatcaaaagtatggtttaactctgacctgaatgtacacatcacaaagttatttatcaggtagtttccttctagtttatatcctgggatattcgcttttccaccacgggcttcaatgagcttgcaaatttccattcccagaatggacaaaaacagtgtttccaaactgctgtatgaaaaggaaaggtaaagtctgtaagatgaatgcacrcgtcacaaagcagtttctcagaaagcttctttctagtttttatgtgaagatgatttctgtttcaccataggcctcaaagtgctcccaaatatccatttgcagata

SEQ ID NO: 907054 - DNA, 542 bp, Homo sapiens
acatactctcaaatatcccttcaccaatcgtacaaacacagtgtttccaaaatgctgaatgaaaagaaaggtttaactttgtgaggtgaatgcacacatgacaaaatagtttctcagatagctttcttgtagtttttaacctgggatattcccctttttccattttcctcaatgagctcccaattgtccatttgcacattggacaaaaaatgtgttcccaaactgctgaatcaaaagtatggtttaactctgacctgaatgtacacatcacaaagttatttatcaggtagtttccttctagtttatatcctgggatattcgcttttccaccacgggcttcaatgagcttgcaaatttccattcccagaatggacaaaaacagtgtttccaaactgctgtatgaaaaggaaaggtaaagtctgtaagatgaatgcacacgtcacaaagcagtttctcagaaagcttctttctagtttttatgtgaagatgatttctgtttcaccataggcctcaaagygctcccaaatatccatttgcagata

SEQ ID NO: 907055 - DNA, 541 bp, Homo sapiens
ttcctgtattgtgccacttttgtttcttcactggtgacaggattggtgaagaagagatatggtacagatgcatcttacttatgaggtacattaataacctagtactttctgaaatacttctacgtccaaaagcaaaccttgactcatctgtggggcatttttgtgggtatctacatctcacagttctcagtattttccatttatagtggctttttctagatgactaattaacaccgacacctatcccagccactgaattcttatggcccactcctttagcagctcctgatggacagacttgcttctaagacactccaagtttagttcttctctatgagatccacatcagctcttcagcaagcaaacacacatccttgactcatcaaactctggaagtgcaggctcttcccagagcaaacgtgcctcttaattytacagcccagaaggacactctgcccgtcatctcagatacaggtatttcactcataagatatcagctattttattccacaatctctatggaatatcaggttatgtgagt

SEQ ID NO: 907056 - DNA, 616 bp, Homo sapiens
agtgttcagtaagccaaactgcttgtgaagtataacccccatgactgctttccrcagactgattaggactgaaatagtgaatttgaaaatgcagcaccagttgaaattcatgggctgacagaggatcacagctgatcataatttctcatgtgaaaatgtgatttccctccccctgtttcctcttggtaagctgctgaaaagtattaagtgagtttcctagcctgtggtcagggatgtctgcacttgtgctgctggggagacacaattaggaggaacaaaggtatcagaactccaggctctgactttttaggcttaccaagagatagctttcaggcctatgaactgatgaatcctataccaaggggtgcaggaggagggaagcaaatactcttaaacagcttaagcctctcccctagtttaatatattttccacaatcactttggataacaacatgatcttgtatctaatgctatctcacagacaacacagctttgaggctgagtggtcatcgaaatcctgaaagcgccctcccaccttcccggagactctggatagttaccctaattgtttctatttttatatagcaattaacaaattactaacatttgttaagag

SEQ ID NO: 907057 - DNA, 595 bp, Homo sapiens
aaaacaaaattggtttgagaacaaagctgtcattacttgcaagatgaaaacagtaaaaattgcatgtgtttattaaaacacagaagtatattcctgtgcaaattaatgcagattctgaagcgaaagacaggacttttgagagattttgagtccaagggttcacctcttcaaacacaactgaaaaaactctattttttctatttttaaatctaatcagtttatatatgcccaggtccagcaaaaagaagctgggttgataatgtgttttgcagttattcaagctagtttgaaagagtacctggcagtgattgtgaagaccaatgattgtgctactaaggtctctcaattgccagacacccaccaagtattttttaaatatgctattctgttttgaaactcaaaaccttgtatttttgttaatctagttacctgccaaatcaaacaggaatccaaagtttcataaccctgctgtrttctctggttactagaaataagcatatttttgatgttttaacaaccttttaaaataataatttctaataatgaaatagaatatttctattttaagtagctattgggtagtatctttacataa

SEQ ID NO: 907058 - DNA, 575 bp, Homo sapiens
cccatggttattataggaacactaaatttgttggtggcagaattggaatctgagcacaattttgccacaaactcatactacctacataattatattctcaacactctgggtgtacttaaatatccttgggttgagtcatgaaaatggaacactttagagcaatgttaagatctctgaaaagtaggtaaatcctcaagtgtgagtacagtttgatacaatgatcctaaagggggaagattagggcagggagatgagtatagatctttatgaccaactaattttttcctgttagaatgcctaacattgattcaccactctaaatgaaaacagtcatccctggtttctgaaatgagtatgagttgcaggtggttactcactggtatatggttaatgtaaattccatgcaaatagtttttttttttttgcttgatgctgcattggttaatgtctaaatgcctatctcccaataaattccatccccaaaagagtctaaatgagtcactgcaaacrtgaacctccttccactaaggacaaacggaatgaagaaaagccagaaaagacagtatgtgaagagt

SEQ ID NO: 907059 - DNA, 645 bp, Homo sapiens
gcaggttttttacataggtatacacgtgccatggtggtttgctgcacccatcaacccatcatctacattaggtatttctcctaatgctatcccttccctagcctccccaacccactgacaggccctggtttatgatgtacccctccctgtgtccatatgttctcattgttcaactcccacttaagagtgagaatatgcagtgcttggttttctgttcctgtgttagtttgctgagaatgatggtttccagcttcatccatgtccctgcaaaggacatgaactcatcctttttatggctgtatagtattccatagtgcatatgtgccacattttctttatccagtctatcattgctgggcatttgggttggttccaagtctttgctattgtgaatagtgctgcaataaacatacgtgtgcatgcgtctttatagtagaatgatttataatcctttgggtatatatccagtaatgggatggctgggtcaaatccatatgaacacttaaaactctttctttctccccttccctccctaccccatgttttacagtgttttcaacatgtrgagcttcccctaactttcagcttatcgagaatacaaactcataattagaatttgtactatctctaatattcgatattatc

SEQ ID NO: 907060 - DNA, 624 bp, Homo sapiens
acatcttttctgagataatgcttgtggcacccaggcaataattttaaaattatataactatccagaagtcattctccttaactttttgaataaagttttaataagtttaaatatttaacatcgttctttgatcattactaatattactctcttttgatatgaatttggttgattttctgatattcctaattgaatcttagtaaacagaagtgtcaaatattgaaatgatacatatctgtttttatctttacaaaaatccaagaaattgtagattcaacagtaaaactaccatgactaaagacacataatgatgctacaggtggagcatcctaatccaaaatccaaaatgctccaaattctgaaatttttgagcatcaacatgacgcaagtagaaaattccatatgtgacctcatgtgatgtgtcacggtcaaaactttgtttcattaataaaaagatttaaaatgtagtataaaattaccttcatgctatatgtataggttgtatatgaaacataaatgaatttcatgtttatacctgkgtcttatcccatctcatgtataaacaaacatgctgaaatctaaaaaaatcccaaatgggaaaaaatccaaaatccaaaacacttg

SEQ ID NO: 907061 - DNA, 624 bp, Homo sapiens
acatcttttctgagataatgcttgtggcacccaggcaataattttaaaattatataactatccagaagtcattctccttaactttttgaataaagttttaataagtttaaatatttaacatcgttctttgatcattactaatattactctcttttgatatgaatttggttgattttctgatattcctaattgaatcttagtaaacagaagtgtcaaatattgaaatgatacatatctgtttttatctttacaaaaatccaagaaattgtagattcaacagtaaaactaccatgactaaagacacataatgatgctacaggtggagcatcctaatccaaaatccaaaatgctccaaattctgaaatttttgagcatcaacatgacgcaagtagaaaattccatatgtgacctcatgtgatgtgtcacggtcaaaactttgtttcattaataaaaagatttaaaatgtagtataaaattaccttcatgctatatgtataggttgtatatgaaacataaatgaatttcatgtttatacctgtgtcttatcccatctcatgtataaacaaacwtgctgaaatctaaaaaaatcccaaatgggaaaaaatccaaaatccaaaacacttg

SEQ ID NO: 907062 - DNA, 601 bp, Homo sapiens
atgtgccacattttctttatccagtctattattggtgggcatttgggttggtttcaagtctttgctattgtaaatagtgcttcaataaacatacgtgtgcatgtgtctttataatagaatgatttataatcctttgggtatatactcagtaatgggatttctgggtcaaatggtatttctagttctagatccttgaagaatcactacactgtcttccacaatggttgaactaatttatactcccaccaataatgtaaaagcattcctatttctccacatcctctccagcatcagttgtttcctgactttttaatgatcaccattctaactggcgtgagatggtatctcattgtgattttgatttgcatttctctaatgaccagtgatgatgagcttttttttcatgtttgttggctgcatacaaaaatgtcttgttttgagaagtgtctgttcgtatcctttgcccactttataatggggttgtttgttactgttttggaaatctgtttaagttccctgtasagtctagatattagacctttgtcaagacttccaagactattgacatgactgtgagtctagaaaattgattaagaaacct

SEQ ID NO: 907063 - DNA, 623 bp, Homo sapiens
tctttactcaaacttttttgttcctttatggacggtgccctgtgttgagtttgccagttttgtctatgtggtgttagacttttctgtctagagtggggactgagaaaggaccctgatgcttggcatataattatgtactgggaaaacatggcctaatattgcccaatccacatgctctgggactatggtctctagttttttccagtagaaggattcattttgacatcaaaattatatagaactcctacatgaaaatagttctgtttgattacgattggttgagaaaatacataaatgcatatagactcacagaataccagcttcacggaacccaacttactactaaaagttcaaagtccatagtttaggaaccatttgctttagggaatgctttagggaatataggaatattgcctataatgtccataaattcttagccatctttcaaatgcaacaaagctgcagcttagcagaattgctaccactgagaagcaaattagtgtgtgaagtcagttcagtgaagggctgaggtatttgattaaatgrccacatgaaaaatggagatgtagaaaaaagtgtgaaagaaaagagaaacgattctgtaagtacaaaggcagcaataa

SEQ ID NO: 907064 - DNA, 646 bp, Homo sapiens
caggaatctatgtgtctgtctcacaacatggagcagatggagagaaggaactcggctttgtgggagtgggcatggcttttgaaacttgtgatagaagtacacacaggaaggcaatgtgcatcaacaggatgctggtctcctcggaaagggtttgcccagacaaaacatggaacaaaacagaaaccaggtcagaaaatttagatggaaaaaaaaaatgggactaagtgctacagattctcaaagcctgtggtcattgctgaaacaccacaatactatatctggtggccaggcacagtggctcacgcctgtaatcccagcactttgggaagccaagacaggtggatcacttgagctcaggagtttgagaccatcctggccaacatggtgaaaccctgtctctaacaaaaatacaaaaattagccagacatgatggtgtgcacctatggtcccagccacttgggaggctgaggtgggaagatcactggagcctgggaagtcaaggctgcagtgagttgtgattgagccactgcactccagcttgggtgacagagacccagtctcaaaagacaaacaaacaaacaaaacaaaacaaaaaacaggaaaataaaactawacctgttatctaattagaagcctcagagtcaac

SEQ ID NO: 907065 - DNA, 563 bp, Homo sapiens
ttgaataaacgttctatccctatctatttctctctaattcctcttttaggctaacaactcttagatttgcccttttgaggctattctaaatcctttaggaattctttttaattctttttttttttttgccttatctgatggtatattttcaaatagcctatcttcattcttctgcttgatcacttttgctattgaaaagttctgatgcattcttcagtaagtcaattgtatatttcaactctggaatttctgcttgtttctttttaattatttcaatatctttttaaaatttatgtgatagaattctgaattctttctctgtgttatcttgaacttctttgtttcctcaacacagctattttgaattctctgtctgaaaggtcacatatctctgtttctccagaattggtccctggtgccttacttagtttgttcagtgaggtcacgttttcttggattgtcttgatgcttatggatgtttgtctatgtctgtgcattgaaaaattatttattatagtatttgcagtccaggcttctytgtccctgtccttcttgggaatgtt

SEQ ID NO: 907066 - DNA, 565 bp, Homo sapiens
catcaaatttgaaaagattctctataatgaccaagggaattacagtcctgtcactgggaagtttaactgctctattcctgggacatatgttttttcctaccatattacggtgagggggcgacctgctcgaatcagtctggtggcccagaataagaagcagttcaagtccagagaaactctctatggtcaggaaatagaccaggcctctctcctcgtcatcttgaaattaagtgcaggagaccaagtctggcttgaggtgtcaaaagattggaatggggtgtatgtcagtgctgaggatgacagcatttttactgggttccttttgtacccagaggaaacttctggaatttcaccataaatttgtgtcctgaatcctgtagtttagattcagtggaataagtcagttaacacagagtagtgctattaaaaaataacttccattttttcaagattataaaaataatacagaaaaattwaaaaagtcacctagtcaattattattcctattttaaggcacctcctttaaaaatatttatatgtatttcagagcatatgtctattaact

SEQ ID NO: 907067 - DNA, 588 bp, Homo sapiens
ttaattaacattataaacatacacttcctttgctctggaaaattcacctctataaaaataatagcaccartgagtaggtagatcgatagataaagagatagaggattagttttgtattgctgtcacaaattaccaaaaatttagttgcttagaccaatacaaatttattagaacaagacaaatacaattctggaggtcagaagtcctaaaatcaagatgtcagcaaaaactgcattccttctggaggttcccttccaatttccagagtgtgtttctttaccttttccagttctggagactacctgcattccctggctcatgaccagttccttctgtcaatatgacctctgcttctgtcttgacagctacctcctacattcctcttatgagaacccctgtgattaccctgagcctactgaatagtctctccatctcaaggccttaacttagtcatgtctgcaaagttcattttgccatataaaataaaataaggtttaaaggttccaaggattaggatatgaatatctttgtgaggcctttattctccctactatatttatatacccacgcccacatacacacacacac

SEQ ID NO: 907068 - DNA, 588 bp, Homo sapiens
ttaattaacattataaacatacacttcctttgctctggaaaattcacctctataaaaataatagcaccaatgagtaggtagatcgatagataragagatagaggattagttttgtattgctgtcacaaattaccaaaaatttagttgcttagaccaatacaaatttattagaacaagacaaatacaattctggaggtcagaagtcctaaaatcaagatgtcagcaaaaactgcattccttctggaggttcccttccaatttccagagtgtgtttctttaccttttccagttctggagactacctgcattccctggctcatgaccagttccttctgtcaatatgacctctgcttctgtcttgacagctacctcctacattcctcttatgagaacccctgtgattaccctgagcctactgaatagtctctccatctcaaggccttaacttagtcatgtctgcaaagttcattttgccatataaaataaaataaggtttaaaggttccaaggattaggatatgaatatctttgtgaggcctttattctccctactatatttatatacccacgcccacatacacacacacac

SEQ ID NO: 907069 - DNA, 590 bp, Homo sapiens
gattcttttgtaaaacaaaatcttaagacactggtggagcaagaatttttagcctcattttatagatgaaaacgagagacaaagtctgaatgattacccaaggacactcatgtagttaaataggaactrtgcctagctaccctgacttctacttcagttcttccatttttgtctgtaaaaatctagcagtcacattcttacagcagctttaaaaagtactaatgaaatattttattaagaccctcctgtcttcagctgaagagatcattcatcaactgcttttcctctgtgttagaagaaaaattggactttataaaccaccagattatagtcacctcccaacagtcattgatggtactaaatatcagtgttacagactatgttcctccaaaatgtgtttgttgaaatcctaacccccaatatgatggaattaggagatggggaccttcgggagataatgaggtgatgagagtggaggcttcatgaatgagattagtgcccttcttaaaaaaaaggcccaagaaagcattttcgcccctttcattatgttaggttatattcaaaatacagcagtctatgaaccaggaagg

SEQ ID NO: 907070 - DNA, 633 bp, Homo sapiens
gaaacttgacttggcagattgtgtagcttgcctcaaatgacagggctggcaagtagggcatcctgacctgaggttactaatgggagttaagaaccatcaggtccttgtcttcagtgtctgagtatattgttgctggatcaaatcagcatgcttaccgagtgcctatttgagtttacagcaaatgttacaagtttgttctgctatcagaaggatatgagtttgaataccagctctgctgcctacttatcttgttccttgggtcaggttactcttttcttcgttcctgcagcaacatttaccaagtgccttctatatgccaggtactgttctaggctctgggaacacagcagtgagcaaaataggcacgaactttattctcatgagttcataacctagagggaaataaagatgcattactgaaatcgtcccagagtcacaactgctatgcagaaaatgacacaggggaaggtatagagaatgattctgggaagaagagaactaatttaaaatggaatgtcaggaaaggccccttttaaaagatgagatttggcctgcaatctgatagatctacaaaataaccaccactcttcaatcagaaatcactaaattyttaagcagaaaagtaacattgat

SEQ ID NO: 907071 - DNA, 617 bp, Homo sapiens
gtgccacagtcttttgctgcacccatcaacccgtcatctacattaggtattcctcctaatgctatccctcccctagcccccaacccccgacaggccctggtgtgtgatattcccctccctgtgtccatgtgytctcattgttcaactcccacttatcagtgagaacatacggtgtttggttttctgttcttgtgttagtttgctgagaatgatggtttccagcttcatccatgtccctgcaaaggacatgaactcatttatgtctgcatagtattccgtggtatatatgtgccacatttcctttatccagtctatcactgatggacatgtgggttggttccaagtctttgctattgtgaacagtgctacaataaacatatatgtgcatatgtctttgtagtagaatgatttataatcctttgggtatatacccagtaatgggattactgggtcaaatggtatttctggttctagatccttgaggaatcgccacactgtctcccacaatgactgaactaatttacactcccaccaacagtgtaaaagcattccttggccaggtgcagttgctcacacctgtaatcccagcactttgggaggctgaggcaggtggatca

SEQ ID NO: 907072 - DNA, 665 bp, Homo sapiens
agaatatcacagtagttaaatggtcataattaattaacaagatgatcaataagtggaagtacattggaggccttggtaagaaacatgcactgtataggatgggagataaatcctataaagattcaaagatgtamcagatcaatgaaatgtttaagggaccattgaggagcttaggacaagtctgtcaaagtaaaacacaaattattcctcttggattcctattatgaaaaaacaaccacaaaacctggttttttgaatcctggaggtagcctatgccccatttggtaatggtactctgatgatttactgcataacctgtaaggataccagctttcagtgtggcccagatgaaggatatgttctatagcaggtccaaactgtgtgtaaacagccttgccacttgggccatatgacccagcagaccctatggtatctctggtgggaaaagacactgtgtggagtttctagcaagcaccaataggagaatcataagtagatctgagggttcttgcacaaagccataccatctatagcacaaaattatatagtgctcaataaacagctccaaatgtgctgctgagcccttgagagtatctgatcttgaaacatcaaatgacaatgagggtagaacagtttttcattctatcagacccaccatgtcacaa

SEQ ID NO: 907073 - DNA, 665 bp, Homo sapiens
agaatatcacagtagttaaatggtcataattaattaacaagatgatcaataagtggaagtacattggaggccttggtaagaaacatgcactgtataggatgggagataaatcctataaagattcaaagatgtaccagatcaatgaaatgtttaagggaccattgaggagcttaggacaagtctgtcaaagtaaaacacaaattattcctcttggattcctattatgaaaaaacaaccacaaaacctggttttttgaatcctggaggtagcctatgccccatttggtaatggtactctgatgatttactgcataacctgtaaggataccagctttcagtgtggcccagatgaaggatatgttctatagcaggtccaaactgtgtgtaaacagccttgccacttgggccatatgacccagcagaccctatggtatctctggtgggaaaagacactgtgtggagtttctagcaagcaccaataggagaatcataagtagatctgagggttcttgcacaaagccataccatctatagcacaaaattatatastgctcaataaacagctccaaatgtgctgctgagcccttgagagtatctgatcttgaaacatcaaatgacaatgagggtagaacagtttttcattctatcagacccaccatgtcacaa

SEQ ID NO: 907074 - DNA, 616 bp, Homo sapiens
aaagattatgagaattaaatgagagaatgaatgcaatgggctttgaagttatacaatttgggttagaatcctgcctcacacaatcctggcaagtgatttactgtctcaaaacctcagattcctcatttcyaaaagcaggaataataatagtgcccatctcctgggttttttgtgaagactacatgagataataaaggacttagtccattgctgaggacacagtaggcattcgtgaaatgaccattgcctttttccctttcccttcagttcccaaatgcgatcttgtgattattcttactaaacatcaatttaactatcaaactctccactattaaaattaaggaacctagagaaaaattcattttaaatttcattctgaagagtgaaacttacataatatgcccatttgtaactgcttttgtttactaaacaagtttgtaaagactttttaaaaaatctttcactaacactttttagaaacaaaaaaagttaagtacaataagaaaatgaaaataagagatttccatacccagcattaattactgttaacatcttagcagattaacttttatttttctttcttcactctaaagaaaaataactctattcttttaaa

SEQ ID NO: 907075 - DNA, 557 bp, Homo sapiens
ataaataaaatagccattatttataaacaatatgattgtataaatagaacattcaaaattacctacaaaggaatgattaarattaataggtatgaatataaaaatctgctgaattttatatataagcatactatactagaaaactgaactttaaaaatgagtttcctaaaacagcaccaaaatatcaaatatatggtcatgaatgaatgaatatagtggaaccctctacataaaatctacaaaagattatcaaaataaaaaatgaactactaaatagaaggaaaataagtttccctcctcttaggatatagaaagccacaacatagcctcgctcccagcctaataatgagaaaagaaacagataatctacaaagttattaatttttaaatttgtcaaaaagcagaagttgcaaagctaccaggtaaacaattccataggatgtctaactcttctagagagagacaggccacactaactgttttttccttaaacagatgtggtaggtatataaagctattttcagaaagaaaataactaaattttaatggattcttga

SEQ ID NO: 907076 - DNA, 611 bp, Homo sapiens
gtcaaatacaatccagtgatctacgaagagggtaacacaatttgacaaagtgggatttattccaggaatgcaagtttggcttawtactaaaattctaatcattttaatttacacatgaacagaatacaattggaaatttttatgacctttcctgtaaatatatagaaagcacttgacaaaattcaatacctgtcaatgatcaaaacttatcagtaaatgagataaatgaaacttttaaaatctgttataacatcagctaaaaattttctgctaatctcatactcaatgattcagtatatatgctttccctctgaaaaaaaggaacagaaaaaatgatgtccactctcctcacctttaattggctgtgtactggagacactaaccagggcagtcatgcacaaaaattaaattaaaattatgagaatttataaagggataaataaagccatttttctttataaatgcaacaattatggatgtagaaatcacctaatctacagttagaattaataaatcaatttagcaaagatgtcagaaacaaggtctgtatcaaaacaattatgtcggccggcacagtggctcaagcctataatcccagcactttgggaggc

SEQ ID NO: 907077 - DNA, 685 bp, Homo sapiens
aacttgtgttcatcaaaagccaaaattctaaaaagtcattagttaasctacaccttggtggaagtctttgtgacacattcttgtcttgtgtttcccagtatcccatgtgcagcccagtgcctgacacccagaggtgcaaacaaaagatgtgctttctccctgcctctcttccttcccccatctggtggccttatgcttgtcttgcgggcatgaatttctgtatcagcaaaggaatcaacgttccactatgcctggtatgaagaatcatataaaggttcactgtctagttgtgggtcttttattctgcaaatgttctaaagaacacctaacagagaataaggatagaagatttaacttgaatggccaaatacatgcacaaaccaaaacccacatggacaacaaagtacattcatcaggggcatagactacagccagacagttgtaggtttcagttccagagatggaatgtacttgttgactttggacaaaacaccacgcctcctgagtctcatttttcttatctgtaataaaatagcataactgtatagtagattgtttttaataattaaaataccaaaacctattccatgaactaccaattcccatgatgcaaataagtattccacatataaactatttcattatcaaatatgttttgacagttctgaatataatttttttaact

SEQ ID NO: 907078 - DNA, 641 bp, Homo sapiens
ccaccctgggagtgagcatgggaacatggctgaacaccaaaagtttgggttctttttttttttttttgagacagagtctcactttgtcggccaggctggagtacagtggtgccatctcagctcactgcaaactctgcctcccaggttcaagagattctcctgcctcagactcccaagtagctgggattacaggcacgtgccaccacacccagctaatttttgtatcattagtagagatggggtttcaccatgttggccaggctggtcttgaactcctaacctcaggtgatcctcccatcttggcctctgaaagtgctaggattacaggcatgagccactgtgtgtggccttgaagttggggttctttcccaccacatggcacccctccaaggagatgatggcagggcctgagacacccctgggaccacagcagaacttctggaacctttcccaccactgaccaaggtgctaggtgccatcctaattgttgacacaaccctctgggtaggcaccaatacaattccactatgaagatggggaaactgaggcacagagcagcctgctctcacctrgggtgggatagccagggctgcggcccagcagtctgaagtcagaacctatgcttttcacccctgttccac

SEQ ID NO: 907079 - DNA, 600 bp, Homo sapiens
tgtcttccttgccctatccagggtcctttctaagccaaggggaagacrgaggctttgtttctgagagaaaggcaggaaactgtgtcaggctctacacagatatgaagttctccatccccatcctctgtcccttttcccaactttattgtcctcacatttcatacatttatttggtgctatgtgttgtgtgtccccacttctaaaccatgaggcacatgaaagccgcaaggttgtcttgtttatccccaatgaccgcctcaggacctggcacagagtaagtgttcaataaacatctcttggttgaatgaataaatgagtgagtgagtggaaaacattatttttatccaataaactgtgaagagatgtagcaagaaagaaaagtacaacagtgtgatatatgtctggcactgctagggaagaaggtgtccacatcacaattgaagcttactccttggagaaacaaactttttatttggaagcctttttaatccaaaaaaaaagtctaaaatgctctaatactttgatggtaacttctagaacagcagagcaaacagatgtacaagaagattgcaaataaacagccccaagactgagcatctg

SEQ ID NO: 907080 - DNA, 642 bp, Homo sapiens
aaatctcatgtccttacatttaaaaaccaatcatgccttcccaacagtcccccaaagtcttatttcagcattaactcaaaagtccacagtccaaagcctcatctgagacaagtccagtccttaccacctatgagactataaaatcaaaagtaagttagttacttcccagatactatgggatacaggcattggataaatacacacattccaaatgggagaaattgactaaaatgaaggggccacagactccatgcaagtacaaaatccagtggggcagtcaaatcttaagctccaaaatgatctcctttgagtccatgtctcacatccaagtcacgttgatccaagaggtgggtcccaaggtcttgggctgctctgcttctgtggctttgcagaatacagcctccctcctggctgctttcacaggctggcattaagtgtctgtggcttttccaggcttatactgcaagctagcagtggatctaccattctggtgtcaggagaaaggtggccrtcttctcatagctccactgggtagtgcctcagtgaggattcagcgtgagggcttcaacctcacatttcccttctgcactgccctagcttaggttctccatgaggtccctgcccatggagcaaacttctgcc

SEQ ID NO: 907081 - DNA, 639 bp, Homo sapiens
acttcagtagcccttgattttaccrtatttatgcagacttgattttctggaaatgtgatcttattagaagaagatggcacataaaacaccaatgaatctattccagttgacttccttttttacttgtataaatattacctatcagttcctagtctcttcgtctctgtctgcctttacctctttctctccctctatctttctgattcttgcccactttatcattatgttacttattatatgacaaaacgtgtagatagcatgaatttagaagtatgcaaaatttattgactgctgtattttattattaaaagacacaaacatgataataatggttttcaaagtattgtgcttgttatgattttccaaaaaaaggaaatatatatgaaatggaatattacttagtaaaacatgtaaaattatttttgaggtacttttaaacaatgtcatgttattatattactttttctttaattagcccataagaattatagtacataaaatttttaaaaaaataactgtgcatcctgaatgttattgctttctcctaaaaatagattgagtaaattaataacatgttggggacattttatgcctacatgtttaaataggtttgcaactaattgcattactgattatttt

SEQ ID NO: 907082 - DNA, 660 bp, Homo sapiens
tgaacagtgtctcctccaactctctgctgggcttctatggccactttctcttctgacttctttctgtttctctaggtcttgcttcctagtcttcatttcatgaagactttttctctacttgacctctaaatatctattgtactaaaagcttgcatcttgtctcctgccattcactctcttcacacactctttggataacgcataattctaactactatttatgtctaccaagtgaccaaatgtctatcaaagctagtgctctcctctgatcaccagacctgtgcgctgacttgcctacttcttgatgtctctacattgatgtcactcaggtacctcaaactcaacatgtcccacctgaaattttcatctttttcttcaaatgttcttatggtggattgaaaatggctgtgtattctttgccactctacccatcaagagatggaaggctatttctgttcccattgaatctgggctggcctgtgacaggctttgaaaaatggcagactgtgtaacttttgaggccaggcattaagagatgtatagtttccatcttcacctcttggagtcttccttcttcaaacagatgccacgttgtggggaaacccragcagctatgtggagaggccttcataaggagaatggggcccactggctaacagt

SEQ ID NO: 907083 - DNA, 671 bp, Homo sapiens
agaggtacaaagaggagctggtaccattcyttctgaaactatttcaaacaatagaagaagaaggagtcctccctaactcattttatgaggccagcatcatcttgctaccaaaacctggcagagacacacacaaaaaaggaaaatttcaggccaatctccctgatgaacattgatgcgaaaatcctcagtaaaatactggcaaaccaaatccagcagcacatcaaaaacttatccaccacaatcaagtcggtttcatccctgggatgcagggctggttcaacatacacaaatcaataaacataatccatcacataaacagagccaatgacaaaaaccacatgattatctcaatagatgcagaaaacacctgcaataaaactcaacaccacttcagattaaaaattctcaataaatcaggtattgatggaacgtatctcaaaataataagagctatttatgacaaacccacagccaatatcatactgaatgggcaaaagttggacacattccttttgaaaactagcacaacatagcacaaaacagcacaacatgaaaactattcaacatagtattggaagttctggccagggcaatcaggcaagacaaagaaataaagcatattcaaatagaaaaagaggaagacaaattatctctctttgcagatgacatga

SEQ ID NO: 907084 - DNA, 576 bp, Homo sapiens
tacaagggatatgaaggatctctttaaggagaactacaagccactacttaaggaaataagagaggacacaaacaaatggaaaaacattccatactcatggataggaagaatcagtakagtaaaaatgaccacactgcccaaagtaatttatagtttcaaagctattcctatcagctaccattaactttcttcacagaattagaaaaaactacttgaaatttcatatcaaaccaaaaaagagcctgtacactcaagacaatcccaagcaaaaagaacaaacatcacactacctgacttcaaactaaactacaaggctacagtcaccaaaacagcatggtactggtaccaaaacagatatatagaccaatggaacagaaaagaggcttcagaaataacaccacacatttacaatcatctgatctttgacaaatctgacaaaaacaagcaatggggaaaggattccctatttaataaatagtgttgggaaaactggctagccatatacagaaaactgaaactggacctcttccttatatcttatacaaaaattaactcaagatggattaaaaatttaaa

SEQ ID NO: 907085 - DNA, 671 bp, Homo sapiens
taatggttgtgaaacccctgcttccttcctgggctactcgtgaaaggcctgactaccagatgggaaccactataatacatcatacaacctggaataatttggtaggtttttaagaagcatacgtatatgtggaaggaggtcttcttaatgggctgaatgaaaataatagcagcatgtcattctttcacgatgaactatttccccactccttttatatgaaggatgctcattagaaagtagcaaagataaagggtaggttttggtctataattgaagtgcacaaggggtcctaatgataccagaggaggcatagaacataaagttgctactgtgtcatgcccacccttcccaacttcttctactcctcccggctgaataatggctttgtgaacataagttattaggaatcaaaaaactttcaaacacatcatcactctctactttaaaaaattagtgtgttcccatgtaattgttagcaattcttacatagatccaagagacactgatttgcttccactaaaaatatctcctttataggtttgttagttcacctcaaatatttctaccattgggatcctatctttaaaataaaatattgaaaacctaygctaaaattttatgtactttatataaatgtaacttaccattagttgttaataccttgttaagaa

SEQ ID NO: 907086 - DNA, 613 bp, Homo sapiens
ccctcccaaatctcatgtctttctcacactgcaaaacrcaatcatacgttcttaatagtcccctaaagtcttaactcattccaacattaactgagatctcccaactcctaagttctatctgagactcaagccaagtttctttcacctataagcctgtaaaatcaaacacaggttattaacttccaagatacaatggtgttataggcattgggtaaacattcctgttccaaaagggagaaattggctaaaagaaaggggctacaggcctcacacaaaactgaaacacagcagtcactaaacattaaagctccaaaataatcttctttaactctatgtcccacgtccagggcaactgataagagaagtgggttccaaagacctttggcaactccacccctgtggctttgcagggttcagcacccaaggctactctcacagctgtagttgagtgtccgcagcttttccaggctcagggcacaggctgctggtggatctaccattctgggatctggagggcagtggcccaattcccacagctccactagaaagtgccctattggggactctgtgtggcagctccaaccccacatttcccctccacactgccctagta

SEQ ID NO: 907087 - DNA, 786 bp, Homo sapiens
agtatagcagtattaagatgtatggcagtactagaattgctaagacatacccgtgtgggaaagacctctatgaactagagtacaatgcttatgtgcagctacatttgccgttagtcttaccaactccactcatttctaaagttacaaaaatgaataatttatcagcctcctgcttttgtagtacagttagattctctagccatagtctgcatttctttgtggaatcctccaacttactaaataatttttaaattgcatatattaaggttctttctttgtgctgtaaaattctatcaattttgaaaacaggccttattgcaggattataaataataatttctttgccctaaaattttcctatgcttcacatatttatttctcccttttccttgatccctttacagcctctataatcttatattttccagaatgttgtataattagcattatatactatgtaggcttttcagactggctacttttatctagctgggggccaaaagagtggagctggtgccaacagtctctggaagcccagagcctagaggatggagttgcttccccggctgctaagaaaagagctctacctgccctcagcctataggacacagaataaagtcaaagaaaatgattctccaactttacagtctaatagatttttttctaataggctttggacttccttgaaacttgtgacccctttatttcttccaatgtcttcctttgaaatgggaatgtctatcatrtgtctctctcactactgtatttgaaatgaaatggcttgtt

SEQ ID NO: 907088 - DNA, 658 bp, Homo sapiens
cactgggggggttcctgttatttaatagtctgcatttacctgttcccttcattgttccttggaagagactctccactggctctctgaggcatccagaggaataaactgggcatgactaatgtrcacgcaaattgtcctgcacccgtggacacttcacccagagtccggtggcatctagcacgctacactggacgagaccctggcaggtggccattgaggagcctgcgtggctctgtgcttggaggcacagtgattgttcctcatgactgcttggcacttggccaggggaccatatgcctggagttgtgtaatgcagtgggatacctggccagtttccccaaccctcagggggcttcctggtctttttaaccaaccacatatgcataggctatattcgaaggaccaagctgatgaaaacaatatcagcttgtgggaagagacccaagaaatcggtgaataacttccattgaattgtcattgcaatcccacataggagatctgtgatagtctcttttctctgacgtctttaaaatacaagttttattttccctgacctttttttttccattttaaaggaaatagtacttactgtagatcatttatgaaaagccacaaagaaagaaaatgaaaatcactaataattctgtcacctgaacat

SEQ ID NO: 907089 - DNA, 602 bp, Homo sapiens
aaaaaaaaaaaaaaaaatccattctgtgaaggtttctctaactctcccagctggaattaccttctctcctcaatatccccagagcaccttgggacacctctattctatgtggtcttattctacaggtatttgggtacaccatctcctctaacctgacagtagcaggttctcagggattttctattctaaggttctatttttttttcttctactttcccccaacacctagaacagtggttacaaatagcatataatcaaaactgtcttattaaattttgaaatgcaactttttccaaaatgtttaggaggtaattgtttgctcttgcatcactactgtttaggataagctcctggcacatagtaggtgcttaacatatcagtaaacatattaacattgactttttaaacttataattgaatttatataaatgttttgagggggttctaggtatatggtagtaggtacttagtaaatatttgttaatttactggtactcagcagttatgctgatttttaatgattgttttccaactgtcaatcacaacccagcataacgtgattatattccragagtaaacaggcatgcattcttacagatgat

SEQ ID NO: 907090 - DNA, 635 bp, Homo sapiens
gggcggggtgctgcctcacccaggaagcacaaggggttgggggatttccctttcctagtcaagggaagtcatgagagattgtacctggaggaacagtacactcctgcccaaatagtgtgcttttcccatggtctttgcaaatggcagaccaggagattccctcccatgccttgctcagtgggtcccatgcccatagagccttgctcactgctagtgcagcagtttgagattcacctgggatgctggagcttggtcgggggagtggcatctgccattgctgaggcttaagtaggtggttctatgctcacagtgcaaacaaagcagcagggaacctcaaactgggcgaagcccaccacagctcagcaaggcctactgcctctctaaattccaccactgggggcagggcatatctgaacaaaaggcagcagacatcttctgcagacttaaacgtccctgcctgaaagctctgaagagagcaatggttctgcccagcatggtgttcgagctctaataatggacagactgcctcttcaagtaggtccctgaccctcttgtagcctgactgggagacacctcctagtaggggkccaaaagaaacctcatacaggcgggtacccctttgggaagaagcttcc

SEQ ID NO: 907091 - DNA, 610 bp, Homo sapiens
aactagattaattaatgtcaattaaatatactgaattcactgaagcctttacataaatcagaactcttttttttttcatgaaaaattcttgtaatgggttggagtgtttttgttaracttgattgctcctttcactcagcaactctgatcttgttgagcagttgtgataaggccagctgcatctgaaatgagcatgtatcagtattgtaacacctttaggtctatcacccctacaaaacccttgtcactttagtttaattgcaaattccctggagagcctcctctaatgacccatttacattaaagcttttaaattagatttcaatcttaatttcacttgaaatgttaccctggagtaatcattccattataaatcattttatttgattttatggaatccctcaattacaagagaagtattgaaataaagtgcagctatattgagacaagcagagagacaaaagcagagtctgtttgactttgggaaaatgttatcagtcagggcaaatcttagtcatttataagtcacacaatgtcttacagtactgaactgtgggatattttgtaccagagataattggagtagtctgacagtttgaatggatattaa

SEQ ID NO: 907092 - DNA, 582 bp, Homo sapiens
gcttactggagttgtaacctgccccttttggaattattaaaactctaagcataccattgggagacygtagattgtgtatgatgatgatatttgttgtttggtaacaacattataagcatgaggtagtatatagcatgtattaaaattgactccagaaagtgtgaattataatctcacattaactatgtgagcttggtcaagtcacttaattgatctctagtctgctttctcgttcataaaataaagatgttgaacaacaaaatcaccagtcaagttttcttttttaaaatatttttccctaaagagataaagcagtaagtgaatgtaataaaaaatataaatgatgcaaaagaaaatacaataaaaaataattctccattccagcttcctagtccttctccttatatgcaattgctattgacagattttgtgcatgtcgacacacgttttctatgcatttacaaccagttgttataggtatatgtgtgtgtatgtataactttctttttctttttaactcaaatgggaatatactgtaactactgttcagctgaattatataaaatgatacatatcttggag

SEQ ID NO: 907093 - DNA, 595 bp, Homo sapiens
cattcaagtgcatttatccattgactctgaaaataaatcatacttctggaaatttctgaagactcaggaatattaattaggaaaacatttccttacatttctgttctttcttgctttagtcaccatttcctattaatatttaagaaacttgtatatttaaaagctttctggggaaaaccttcaaaaaaaattcctttacagttttacaatgcctatctctaccctcaattttgtggaaaatcttaccaatgtgtagagcgatagtttttcacaagttgaaagataccccaaagtttattatgtcaagcagttcatatgtaggatcattaccacaatcctaatatcacaaggcaagaccaagatacaaagataaggctacattgaagtgttaagctgccatgcattggaaagggcaactacatttcttttttctgtgcatataagttaccctatcttttccaacaacctatcaaataccatttaacagtagcacataattagtgaagtaggctttgcaaagtctttacagaatcaaaactgaactcaaakgcacaatctatttgtttttcctaagctggtcgaatgatcttggtta

SEQ ID NO: 907094 - DNA, 603 bp, Homo sapiens
aaagttcaagaagtccaagatcaagacaccagccaattcacttacggtgaggacccactttctggtttatggatggcactttctagctatgtctttacatggtggaaggggacgaacaagttcscctgggccttttttataagagcactaatcccattcatgagagctctgccctcatgacctacctaattacctcccaaaagaccctaccttctaataccatcatcttgagagttagaattcctttcaacatgaattttggagggacacaaatattcagaccatagcctaaggtcatatggttttacttcttttgagttactacctaggagtggaatagctgaatcatatcgtaggtgtatatttagcttttaagaaattccctgttttccaaaatggttgtaccatttttcattcccaccagcagtatatgacagtttaatttcttccgtatcatttccaactttggaattttcatcacagcaattctaattctgatagtgttatctcactgtggttttaatttgcatttccctgatgactgataatattcagcacctctttgtctgcttactttccaaccatgtgtcttttttggtgaag

SEQ ID NO: 907095 - DNA, 659 bp, Homo sapiens
aggtcatacaggggtaggtaggtcattaatccagtatgattggtattcttataagagagaaatttggacataggtacataaggaagatggcactgtgtattagttcatttttacactgctataaagaactgactgagacagagtaatttataaaggaaagaggtttaattgactcacagttttgcatggctcgggaggtctcacaaaacttatagtcatgacagaaggcaaaggagaagcaagtaccttcttcacaaggaggcaggagagagagcaaaaggggaacagctacagacttttaaaccaccatatctcatgagaactcactcactaccatgaaacagcatgggggagccactcccatgatccaattacctcccaccaggtccctccctcaacacgtggggattacaattcgagatgagatttgggtggggacacagagccaaaccatattattccatccctggcccctcccaaacttcatctcctgctcacatttcaaaacacaatcatgccctcccagcagtccyccaaagtcttaactcattccagcattaattcaaaagtctaagttcaaagtctcacctgagacaaggaaatttccttccactgagcctgtaaaatcaaaaacaagttagttacttccaaggtacaat

SEQ ID NO: 907096 - DNA, 622 bp, Homo sapiens
tacaccagagtggtgagggcctgggtggaggataatttcgtaaattgggttgaaccacacagtcttgtgaagtgggctgcatgcttrttagatctgaaccctttcacttacttattctggggtatgctaaaggcacaggtttatttagtgaaaattagagacataaattcctgaggcattgtattccagatgtatatatagggactgatggaaattctgcattaatgcaccacactcattgcaatttcgtacaaagcattaagctatgaattgctaaaaaggaggaacatattgaagacattgtacaatgcttttgactatataacttattgtaatgtaacactaataacccatttattatggatattcatttgcctgtgtttccaggcttcaggttaccgtaaaactagagagtattttacactcttgatcatgaactcttcacattaatagcactgacagctacaacttccatttgtatatctgggtaacctcagagctgatacaaattttttaattgtttttcctttggatgttcatgtaagcaggtgggtacctgtgactattccatgcaggggctactggaaagatagctctaactcccagtcttggatacactttg

SEQ ID NO: 907097 - DNA, 478 bp, Homo sapiens
ttcagaagttctttcagggaaagtttctgtgcygtctttgaacgatcacaattcctgtgcatgactggaagaaatcattcccattagctgattgtcttctgtgaactagaaaacatgaatccctcttcttacctgaggcatatactcaatctatagaattgattgtgttctatcaccaaaatataacttgactcatccacttctccccatctccagggtccccctgagatcctccaggcctatctcatctcccacttgcacagtggatacatcttgctaattagtctccaggtttccacccttgctcctttccatttgtcctccacacagaagccagaggatcattaaaaaaaaaaaaatcaaaaccaagctatattattttcctgcttaaaaccctataacggcttccagtatacttaacataaaattcagtcataaataatctgcaaagacctgtaggactccctcacccctcacc

SEQ ID NO: 907098 - DNA, 627 bp, Homo sapiens
tgtgggtgtgttgtttgatagtccttctaaattagatttcttcatcttggatattgctttcattttagagaatattttttagagcacaaattcatcctcttactaatttaattggaatgcctatataattgcattctatccttgtggaagtgtgaaaaattgatacaagtgtattgctaaagtcacagaacagactcactgagaaaattgaaataaattaatctcatggtttatcgaatttattgcaaacacaccgtaagaatcaaggggaaagagaagaaggtagggttacacacttaggatagcatgcaagcagagtagaatgaccaagctacttgagtcttgttttatgcaatgtacatatatcctatctctttctgcttcatcaggttttcctactgatggcagggatacaagaaccagagttaaggtataaaaaaaggaagtcagcagatagaggggcctgtaaccataacactcttgttcttttgaagacactcaggaaggtgcatgcctgtagctgagccttacgaattggccagataaacagttacgggtactatatggcaraggacaaacgaatgacgatggggcatcactaatgggtggctggttaaaaactccgtg

SEQ ID NO: 907099 - DNA, 621 bp, Homo sapiens
cctttggcaaataggacattggcatggtgaactgaagatttgtttctttttaataattatgcttttaaagataatgcattaacaaagcctctctggtcacaaattcatatttgcatcattgaagctcacagaaaaaaaggttagcctccaactgtgcaaggtactaaagccaactctgatatctttcagaagaaccaatgggttttttgtttctttccttctttcttttttcttttcttatgctgatttgtcaaatatcttttatattgtttatcttccttacgttcatcatcatcactaagaagtaactctaaaacatctgtggcattaatagacatttcttagctattttcttcctcaggtttttatctggttgcaaatacagtttttccaacatattaaatccatccaaactggatttaattaagaattctgtaagctgacaggatcatctaacatctaaatattctggtaaaaaaacaggcaattgttttactaactaatgccttccttttgtcattcttacttgrtatgagttgaagagctctgagacacaataaaatcgacatcccaagaccagcatcttgtgcttcagtttgtataaatctactgaggcaaaat

SEQ ID NO: 907100 - DNA, 535 bp, Homo sapiens
ttgtgagatctgcattggacrcttggttctgattacaaatgacaaaaattacacactaagttcttccagaggctgctatttctagagaccaggttgtttttgagattcatttcatttgaggtctgtttaaagcaggcaggtgaaaaagagaaacattttctaggttccaagtcccgctacatttggctcaacagaaaatcacctaattctgctcttggggtagaaataggttgagtgatttgacacagcagggagaaaaacaaggtgacatcacatggcagggcagaactgggacaacacacccagagccttctgcctctaatagtcctcaatgattgatcctgcaactctactgtactactgcatgtataaagtcatgggagacaagagccctcttttcattccttccctctctagtaaatttacagaagaagaacatccaaaaaacaacaccctgtcattattagattgtatagtgtgctacttgctaaaagtcaaatttacagagatttacttgtgttggacctagcaattc

SEQ ID NO: 907101 - DNA, 571 bp, Homo sapiens
ctacctattcattttatttcataaaaataagtgggtgatctaaaagtacagggtttggggaaaatcagatacctaaatagttgtgaaaattcttccagaagttgaaaggactgttcagagattattattgtcggtgttgatggtgtttcacctccttttaagtcctgcaggcgttttggtgacatttcagcaaactgtgtactcctgtgaattttttattgtgaaattctgccatagagatatcaaatcatgatgccacaaggcccctgctggtttctgaccgtgcttaatagattctgtctctacagcctgacatgtgcagttgtgttggaaaatggctgattaaaaaatttagagtcaacacatgcagccagcctgcatggaacaagatagcgccctgggtgacagcctggggctttgatgcaggaaggatggaarggatcttatgctcctgataggaagtcagacatgcaccctaagaggagaaaattctgaaaaattcataagcttccttatcattaataattaatctctaaaccaacaggcactggcaatttatactggccaacac

SEQ ID NO: 907102 - DNA, 597 bp, Homo sapiens
gctcaatgctatagtgtccccatcagttcttatagttaatttatagttcctccctgtccagatgcaatttaccagtggagtcattattaccataagtaatgttgcctagcaacatagttgacatactgtatcaggttgccaggggaacagagctagaaagtgaatggagggttgaaaccctcttgtagaaggggaaaggtttttgttaaccctttagtacactggcctgccagtgctttcaacaccctatgataggagtttggttgggtgcagatgcttttccttgcctggtgtactgccttttaagggatgggaacagaggctccctgatattatgtgacaagtgcaggatccttaccccaggctgctcaactgcctccactcttgctccttggttagaggaatgagcacaggctttgaagacatcgaggcctggccatatctggactctgcagctcattagctgtgtaatcttggactggtaatttcacctctctgagcctcaattcctcatttgtaaaatgggaataacaacactmaccttagggttattgtgagaattcagtgatcttgagtgtcttgaatccttgttcatgt

SEQ ID NO: 907103 - DNA, 596 bp, Homo sapiens
cctttcccaagatcacacacaagccaggacatgytggaagcttgatccaggaaagtgagtggagtttaggggtgagggagtcaaagctgcaaaccttcccctagagccccttctgcacatggccacaccgcctcatctccctccaccgccgtgagcaccagcctcctttcaggcccttgctgatattccaagggggccgcagcagaagcaggacccacagcccctttatcactctgtcccacaaggggaggacagcctttcatatgtcccccagtgcatctgagtctcggctgtgacgtttaacaaggttgctgaaggttcaagaataacagaagaaaagctcaacatggagtaacctacaggtaaaattgtctgtgacttctctctgaatctacaggcccagtacacgtgtgaggtcccttggtgaacattgtcctgcctcgcagaggccagctcagctcagtccaggcccaagtgacacaagcccagcaacaaaaggtgactttccctccctcagtccaagacccaccacccatcaccccagtgcttccttctcctcccaggatgagtcacttccctgaataattgagaagggc

SEQ ID NO: 907104 - DNA, 571 bp, Homo sapiens
gaaaggtcaaggacagaaagagagcaggaaagaaataatctcacagtttccaaggctgaagccccagtaattgtccaggccagccctcgagaatatttttgccagtttgcaacgagtgtagattttggactcggcgcctgtgaccaggcagccaatgagggtcagaatgcccgcagccttcatcctcaaagcctgccggagacagaacctgccaaagagccggagaacaggtcagacgatcttgattcaggaacttcgaaatccagcatcggtgactgtgcacagccctgcctagatgctgcctgtcactttggtcattcagtgccaccatcagggaaaaccagccactctacggtccagggaaggaatgtgactgcaggctgtctccttaatgcttttccatacagtaactttcaagtcaatgctgtgttctcagggttaagtaagtgaaaaaattaaccttccttaatacacatccaggtgaaaaccacaaggggcatttttaggatttcyattttaattctatgaatgaaaaatagaatacaggggtgaaacattccctatactgctg

SEQ ID NO: 907105 - DNA, 630 bp, Homo sapiens
aaaaatgaaagaggggcttagaccccactgagacagccaccagaaaagacctctccaagttgggaggaaaacattaaacatattttgaaaaaaaaaagaaaaatgatctccatctctttatatgaaatgatttcccacatctactgctaggtgaaaatagcaaagtacaaaatgatctatggtctcgtatccatcatataagaaagaagaggctaaaagaaaatatatgtgtatctacacatttatgcaaaagaatttcaggaagaaccaaccaaaaatgaatgcagctaccatgacagacacaccctagagggacctccagtgagttcacctttgaataatccttcctcctttagtgcaggaagaacctctgaattgcttctaactaatggaatatagcaaaggatgtggggtaatcagtcacttgattatattacattatagaagactctgccttagcggattgaattgagaaattctcctggtggccttgaagaaggtaactgtcatgttgtaactgcctatggagaggamctctaggagttgaggccatggaggagcatggaggaggaccaagtggagggttatgatcttcacataggaacatggtccaaacagcatcttgtttgc

SEQ ID NO: 907106 - DNA, 670 bp, Homo sapiens
agttacatttgagaaccagtggtaggtmgatctttgctactctagtcctcaggcaaacagcatcagcctcacctaggagtttttaagaaatgcagaatctcaggacccagccagacctactgcatagaagtctgcattttaacaagatctctaggtgattggtgtatacacaaaagtgtaagaatccctgctttagtaatgactgctctgggaacaagcttaaacttgggcaacctggacctatggtcacccatcctatcagggagatagatggtagatggtgggctagggacagggtgagaggaaatctgagcagccacagatctggggtcctctccctcccaaactggcccctgatttagaaatatggtctcaagagcctatctttctgtccccagttttcaccgtagacaactttctaataattgaactgtctgtcctgcctgctagttgcctttgttattatcgtaatcattagtggttgctggaagtggggcagggtgtgtttaggtgagcaggggggagtgttaatgagcccatgggtctggtgtgagggggagatccctgtacctatcacaaccctgtgcctttattgcatgctcctttacacaccctccaccccttgaagaggcttcccctggccccctgcccagtaacttacttactatga

SEQ ID NO: 907107 - DNA, 594 bp, Homo sapiens
tcttaacattattgcattggagatttattttcaacataaatggtggaggaacacaaagatttaaaccatagcatagagggatccattgkctgtccttattggaaacctttagtttcgtgtaggaaatgctgtttttcagctgcattattaaaaaatgcagttcttttaatttttgttaatttaaattagttttttgcatatacatgacattatagtttctcttttaaatgtatcattctacttttataataaacttaaaggtcaattttgatagaaaaataaatggaccctttctgtcaaatttatgcagacctcttattcaaacaaatttcagtgatcccatgagctttatgaaataatttctttttataatttatgacatttcaaaaataaaatttaattgttgctttgaggaacttgggaacttggcaaagttgataaatatttcaaagttacaaataatatttacagtgaaacaggataatggaaattgcaatcaaaatgctatcaagacgagcatataaaatgatatgagctgtttttcaaaaagatatgtattcctgtaacttgttatctttcagtttctatcattag

SEQ ID NO: 907108 - DNA, 653 bp, Homo sapiens
caagggatgggaaggacctcttcaaggagaggaacaaaccagtgctcaaggaaatgagagaggacacaaacagatggaaaaatattccatgctcatggttaggaagaatcaatattgtgaaaatggccatsctgcccaaagtaatttatagattcaatgctatccccaacaagctaccatcgattttcttcacagaattagaaaaaaaaactactttacatttcatatgggaccaaaaaaagagcccatagagccaagacaatcctaagcaaaaagaacaaagctggaggcatcacgctacctgacttcaaactatactgcaaggctacagtaaccaaaacagcatgggactggtaccaaaacagatatatagactaatggaacaaaacagaggcctcggaaataacgccacacatctacaaccatctgatctttgacaaacctggcaaaaacaagcaatggtgaaaggattccctatttaataaatggtgttgggaaaactgtctagccatatgcagaaaactgaaactggaccgcttctttacaccttatacaaaaattaactcaagatggattaaagacttaaacttaaggcctaaaaccataaaaaccctagaagaaaacctaggcaataccattcagaacatcgacat

SEQ ID NO: 907109 - DNA, 600 bp, Homo sapiens
tattgcccatgaattactaaacagaggtccaattttgacttctaagaaacacaaatcagactgagtcgctgtttaactattatatagtgaaatattaaagtagcakcatgatagataggcacttgagacctgcattactgaactggttttttaaagcaatggagaagagagaccaagtactcaagaaatcaacaggaaatagattatactatttttgcatggtagcataacagaacacagaatgatttaaggactcttaagtttaaaacaactaaaattaatacaataaaaaggaagaaggcacagagatcaagtgctatatataaccacagggaaaaggtgcccttattatctttttaaatagaccaagttaaggtcagtaacaacacaccagcaggttatgggaaaaaacatgatcattctcacttaatttttgtcaatgtaaattaatcttttaaacagatttgaaattagtaatatccactatgtcaaggacacttgaatgcatcaccggaggatgtaagttgcatttttggctctaatattcatttgcaacttttgcaatgtcacagaagtcacctaaatgttgattctcagttt

SEQ ID NO: 907110 - DNA, 586 bp, Homo sapiens
gaaagacgtcaaattgacaacctaacaccacaactaaaagaactagagaaccaagagcatacaaatcccaaagctagcagaagrcaagaaataaccaagatcagagcagaacttaaggagatagagacagaaaaaacccttcaaaaatcaatgaatcccagagctggtgtttaaaaaaattaatacaatggatatactgctagctacactaataaagaagaaatgagagaagaatcaaataaacacaaccagaaataataagggggatattgccgctgaccccacagaaatacaaacaaccatcagagaatactgtaaacacctctatgcacataaactagaaaatctagaaaaaaatgaacaaattcctggacacgtacaccctcccaagactggaccaggaataagctgaatccctaaataaaccaataatgagttctgaaattaaggtagtaataaatagcctaccaaccaaaaaagcccaggaccagatgaatttacagctgaattctatcagagatataaagaggagctggtacaattacttctgaaacactgccaaaaaatttataggaaagactcctcc

SEQ ID NO: 907111 - DNA, 612 bp, Homo sapiens
taaaatggccatactacccaaagcaatttacagattcaatgctatcaccattaaactaccactgacattcttcacaaaattagaagaaactactttaaaattcatatggaaccaaaaaaagagcctgtatagccaagacaatcctaagcaaaaggaacaaagctggagacatcatgctacctgacttcaaactttactacaaggctacaataaccaaaacagcatggtgttagtacaaaaacagacacatagacctatgtaacagaatagggaactcagaaataatacagcatgcctacatatgaccttcaacaaacttgacaaaaataagcaatgataaaagtattccctatttaataaatggtactgggagaactggctagccgtatgcagaaaattgaaattggaccccttccttacaccttatacaaaaattaactcaagatggattaaagactttaatgtaaaaccacaaactttaaaaactckagaagaacatctaggcaataccattcaggacaaagttacgggtaaagatttaatgataaaaatgccaaaatcaatttcaacaatagcaaaaattaacaaatgggatctaattaaactaaagag

SEQ ID NO: 907112 - DNA, 612 bp, Homo sapiens
taaaatggccatactacccaaagcaatttacagattcaatgctatcaccattaaactaccactgacattcttcacaaaattagaagaaactactttaaaattcatatggaaccaaaaaaagagcctgtatagccaagacaatcctaagcaaaaggaacaaagctggagacatcatgctacctgacttcaaactttactacaaggctacaataaccaaaacagcatggtgttagtacaaaaacagacacatagacctatgtaacagaatagggaactcagaaataatacagcatgcctacatatgaccttcaacaaacttgacaaaaataagcaatgataaaagtattccctatttaataaatggtactgggagaactggctagccgtatgcagaaaattgaaattggaccccttccttacaccttatacaaaaattaactcaagatggattaaagactttaatgtaaaaccacaaactttaaaaactctagaagaacatctaggcaataccattcaggacaaagttacrggtaaagatttaatgataaaaatgccaaaatcaatttcaacaatagcaaaaattaacaaatgggatctaattaaactaaagag

SEQ ID NO: 907113 - DNA, 612 bp, Homo sapiens
taaaatggccatactacccaaagcaatttacagattcaatgctatcaccattaaactaccactgacattcttcacaaaattagaagaaactactttaaaattcatatggaaccaaaaaaagagcctgtatagccaagacaatcctaagcaaaaggaacaaagctggagacatcatgctacctgacttcaaactttactacaaggctacaataaccaaaacagcatggtgttagtacaaaaacagacacatagacctatgtaacagaatagggaactcagaaataatacagcatgcctacatatgaccttcaacaaacttgacaaaaataagcaatgataaaagtattccctatttaataaatggtactgggagaactggctagccgtatgcagaaaattgaaattggaccccttccttacaccttatacaaaaattaactcaagatggattaaagactttaatgtaaaaccacaaactttaaaaactctagaagaacatctaggcaataccattcaggacaaagttacgggtaaagatttaatgataaaaatgccaaaatcaatttcaacaatagcaamaattaacaaatgggatctaattaaactaaagag

SEQ ID NO: 907114 - DNA, 545 bp, Homo sapiens
tagattatatgatatgccacaaggcatatcccaataaatttttaaaaatcaaaatcacacccagtatcttcttagagcactgtggaatgaaactagaaataaactccaaaaggaaccccaaaaactacaaatatatggaaattaaacagtctgctcctgaatgacttttgagttaacattaaaatcaatatagaaatttaaaaattattcaaaatgaatgataatagtgacacaagtaatcaaaacctctgagatacagcaaaagcagctctaagaagaaagattatagcactaaatacctacatctaaaagtctgaaagatcacaaatcaaggaacatcacacctcaaggaactagagaaacaagaacaaacaaaacccaaagctagcagaaaaaaaagaaataacaaagataagagtagaatgaaatgaaacagaaggaaaaaaatacaaaakatccatgccacaaaagttggttctttgaaaatataaatgaaactaatagaccgctatctattaatagattaactaaactaaaaaagaggg

SEQ ID NO: 907115 - DNA, 555 bp, Homo sapiens
gctgagagcaatcccccagtcaccatcactcctttacagtgccacagaaattaaaagttaattaaagaaaagggcaggacacatttccataaagcatcaaacactcggggggaaattcatttacagtctcctttatagctgccgttgatcaggttcttccttccagggttacagagaactccctggaaatagtgtctaggcttacaagttttacagccaagggcctcattgtctcaatgtactgagatggagccacataaaacttaaccagcaacaaaggctgagcgcccccactcgggactgctaagtgtttctcacagcagcctgaaaacactggtataaacatggttcccaaggtctaggagtcaactacattggagttggcagataatgtcagagtggctgggaaataatttattttagcctgctcccatgaagctctttttatgcctccctcataaatatctgcttcctratgaaaatgagaagaaatgtgttttaaatccctcaaatagttaagaattagaggaagtctaggaagtagcttttaactcc

SEQ ID NO: 907116 - DNA, 682 bp, Homo sapiens
gacagcagctccaccatcttgctccatcagtgcaaaagagaaactggagagaggctgagtaattgcacaggagtttgtcattgcctcagcccacaagtgacacaagtcatttctctcattttattggccagaaccagtcagatgtccccttctaactgcaaaagggctgggagctgtaatcttctgaatgcccagtgagtgagaagataaatctgtgtatcgatgaggatgggcaatgtctaccaaagcacatcagtatttaagccaccagggtagctgctcataggtggaagggacaatgtgagtatcatggcttttattcttataggagtcactgagacttctgggtaatagttaagtacacttggctgtatctggcctttggataatgaggtaaactagagttaaaacccaatttcatgtcctgtagaagcccaaagcctcaagtagatgactgagaatagactgtgcatgccaaagagacttactagagcatgcagcaagagaaaatcagtatcacctgatccctaatggctcacaggaagagttctgagcctaaaacccaggacactgaggtatcacttttttggttagtagcttgtcttttaccttaacatttggctttagttggcagacaataactgtgascaataataaatcaattagagtcagctgcccagca

SEQ ID NO: 907117 - DNA, 660 bp, Homo sapiens
gatactgggacagagtttcaggtaggtgggagtgctgcagaggtaaaacagaaagcctgcttccagactgcagggcttgtatcrggctcacttgtatcctcttgtgaactttcctcactgtggacatagcactatgggacagcctcctgcccagcgacagatgtacatctttatgtgatctgtttatgtcacatgctaacagtttattactggagctaaaatctagatgagtgaacactgtgacctcaacacaggtcacagaacggatactttgcctgtgggcaactgaccagaatccacaggtttctgtttgaaacagtgagaaagaactaaacaagggtgcaggttggtgtttttgttaatgcaattttctttctcctggcttgtgccatatgctctcctccttatctctccttccactgacattgttctttctttccccactagtctcaacccagagacagagtgaagtcatgcaacttccttgtttccatattagatagaaatatttttccattaaagttccttcctggactctctaagtcgaggtggtggctgtcacagctttgccctctccccatctttgagaattccctggtaaagccctcttagtgagaaggatttacaatggacacaatgctgctttcacagcttttaatt

SEQ ID NO: 907118 - DNA, 552 bp, Homo sapiens
ggcatggtggtgcatgcaggctaattagtctcagctactcaggaggctgaggctgtaggatggttgagcctaggagttcaaagctgccatgagctatgatggcaccactgcactccagcctgggtartagagttgcgaccctgtctccaaaaataaaaataataaaaaaaaaaaaactaagccagtttctaagatttgttttaaacaacaccctcaaaaaagtattttccagagttagtcctaatcagcccaatctcttatactttctacatgtgcagttatataaagcaattgctttgttaagacagtgcttctcatgacccatcaaaagattgagaaccatcacttaaaaataaataaataaataaataaataaaaattttaaaaaacctaattatttctacaagctctagttagtgaaccagggaggtgaaataatttactttaggaaatgttttattaacaaatattcagagtgttagtgctccaccctctgagttgagtgcatggagttaatgatcataccccattccctgggcagtgggcaagagt

SEQ ID NO: 907119 - DNA, 671 bp, Homo sapiens
ataggcctcaaaccactcagaaatatccccttggagattctagaaaaagactgtttccaaactgctgaatcaaaagaaagtttcagctctgtaggatgaatgcatgcatgacaaagaagtttctcagaaagcttctgtctagttttaatgtgaggatatttccttttttaccataggcctcaataccctgagatatatacctttgcagattctagaaaaagactgttaccaaactgctcaattaaatgaaagtttcaagtctgtgagatgaatgcacaaatgacaaagaagtttcccagaaggcttctgtctagtttttatgtgaagatatttcctttttcatcataagcctcaaagtgacctcaaatgtccctttgcagattctacaaaaagactgtttccaaacttctcaataaaaaggaagtttcaattctgtgagatgaatgcacacatcacaactaagtttgtcagaaagcttctctttattttttgtgtgaagatatttcctttttcacagtaggcctcaaagggttcccaaatgtccctttgcagattctayaaaaaaactgtttccaagctgttcagtcaaaataaagtttcatcattgtgagatgaatccacacataacaattaagtttctcagaaagcttctgtatagttttgttgtgaag

SEQ ID NO: 907120 - DNA, 594 bp, Homo sapiens
aagaaagtttcaaccctgggagatgaatgcatgcatcacaaagaagtttctcagaatgtttctgtctggtttttatgtgaagatatttcctttttcaacatgagccttagactggtcacaaatattcatctgcagatactacaaaaagactgtttccaatgtgctccatgaaaagaaaagttcaactatgtgagatgaaagcacacatcccaaagaagtttctcagaatgcttctctctagtttttatgtgaagattcttcctttttcgctataagcctgaaagcactccaaatatccatttgcatattctacaaaaagagggtttccaaactgctcaatcaaaagaaagcttcaaccgtgtgaaatgaatgcacacatcacaaagaagtttctcagaatgcttctgtctagtttttatgtgaaagtaattcctttttcaccataggccttaaaccattcacaaatatccctctgcagatactacaaaaagactgtttccaaactgctccatcaaaggaaaggtagaaaagaaaggtgaratgaaagcacacatcataaagaagtttctcagaatgcttctgtctagtttttat

SEQ ID NO: 907121 - DNA, 475 bp, Homo sapiens
caactctgtgagacgaatgcaaacaacacaaagaagtttctcagaatgcttctgtctragttttatgtgaagatatttcctttttcaccataggcttcaaagcactcaaaatgtccatttcaatgttctaccaaaagacgttttccaaattgctcaatctaaagagaggttcaactctgtgaattgaaagctcacctcctagagcagtttctcagaaggattctgtctagtttttatgtgaagccatttcatatttcacaataggccattaagggctcaaaaatatccctttgcagattgtacaaaaagactgtttccacactgctccatcaaaagaaatcttcaaatccgtgagatgaatggacacatcacaaagaagtttcaaagaatgcttctgtctagtttttatgtgaatatatttcctttttcaccataggcctcaaagtgctccaaatattcatttgcagattcttca

SEQ ID NO: 907122 - DNA, 475 bp, Homo sapiens
caactctgtgagacgaatgcaaacaacacaaagaagtttctcagaatgcttctgtctgmgttttatgtgaagatatttcctttttcaccataggcttcaaagcactcaaaatgtccatttcaatgttctaccaaaagacgttttccaaattgctcaatctaaagagaggttcaactctgtgaattgaaagctcacctcctagagcagtttctcagaaggattctgtctagtttttatgtgaagccatttcatatttcacaataggccattaagggctcaaaaatatccctttgcagattgtacaaaaagactgtttccacactgctccatcaaaagaaatcttcaaatccgtgagatgaatggacacatcacaaagaagtttcaaagaatgcttctgtctagtttttatgtgaatatatttcctttttcaccataggcctcaaagtgctccaaatattcatttgcagattcttca

SEQ ID NO: 907123 - DNA, 613 bp, Homo sapiens
tcaacgatagacctcaaacagctccaaacatccatttgcagatactacaaaaagagtgtttccaaactgctaacaagaaagtttgaactctgtgagttgaatgcacacatcacaargacgtttctgagagaatgcttctgtctagtttttatgtgaagatatttccttttaagttacaggcctcaaagtggtccaaatatccacttgcagattctgcaaaaagagcgtttcaaaactgctcaatgataacaaatgatcaactctgtgagaagaatgcacacaacacaaagaagtttatcagaatgcttctgtcttgcttttgtgtgaagatatttcgttttcagcaacaggcctcaaagtgctccaaatatccatttgtagatactacaaaaaaagtgcttccaaagtgctcaatgaaaacaaatgttgaattctctgagttgaatgcacacatcacaaagaagtttctgagaatgtttctatctagtttttatgtgaagatatttccttttccaccataggcctcaaagcgctctgaatatgcacttgcaggttccacaaaaagagtgtttgaaaactgctcaatcagaagaaagtttcaactccgtgggat

SEQ ID NO: 907124 - DNA, 471 bp, Homo sapiens
tgatatgaatgcacatatcacaaagatgttcctcagaaaggttctgtctagtttttatgtgaagatatttcctttttcaccataggactctaagggctcccaaatatcctttgcagattctaaaaaaagacagtttccaaattgctgaattaaaagaaagtttcaactctgtgagaagaatgcacacttcacaaagaagattctcagaaagattctttctagttttttgcaaagatacttcgtttttcacaataggcctcaaatggctcagaaatatcgctttgcagattctaccaagagactgtttccaaactgctcaatcaaaagattctactctgagatgaatgcacycatcagaaagcagtttctcagaatgcttctgtctagtttttatgtgaagatatttcctttttcaccatatgcctcaaaccactcagaaatatccctttgcagattctagaaaaagactgt

SEQ ID NO: 907125 - DNA, 609 bp, Homo sapiens
aaactgctcaatcaaaagaaatgttcagctctttgagatgtatgcacacagcacaaagaagtttctcagaaagcttccatctagtttttatgcaaagatatttactttttcaccataggccycaaaattcacaaaaatatccctttgcagattccacaagaagactgtttcaaaactgctcaatcaaaagcaaggttcaaccctgtgagatgaatgcacacataaaaaggaagtttctcagaaagcttctgtcttgttttcatttgaagatatttcctttttcaccacaagacttaaaccgctcacaaatatccctttgcagtttccacaaaaagacgtttccaaactggtcaaagaaaagaaagggttaactctgtgagatgaatgcactcaacacgaagaagtttctcagaaagcatctgtctcttttttatgtgaagatatttcctttttcacgataagcctcaaagggctcaaaagtatccctttgcagattctacaaaaagacagtttccaaactgctcaatcaaaagaaaggttcagctctgtgagatgaatgcacacatcacaaggaagtttctcagaaagcttctgtctagtttttatatg

SEQ ID NO: 907126 - DNA, 658 bp, Homo sapiens
gacagctttgaaaagattagtggctctcccagcatgcagtttgagatctgagaacaggaagactgactactcaagtgggtccctgacccctgagtagcccaactrggaggcacccccaagtaggggcagagtaacacctcacatggctgggtactcctctgagacaaaacttccagaggaacgatcagtcagcaatattagccgttcaccagtatccgctgttctgcagcctccactgctgatagccaggcaaacaagatctggagtggacctccagcaaactccaacagactggcagctaagggtcctgactgttagaaggaaaactaacaaacataaaggacatccacaccaaaacctatcggtacgtcaccatcatcaaagaccaaaggtagataaaaccacaaaatggggaaagaacagaggagaaaaaatggaaattctaaaaatcagagcggctctcctcctccaaaggaatgcagctcctcaccagcaatggaacaaagctggacagagaatgacgttgatgagttgagagaagaaggcttcagatgatccaactactcaaagctaaaggaggatttcgaacccatagcaaagaagttattaaccttgaaaaaagattagatgaatgggcaactagaataaccaatgcaga

SEQ ID NO: 907127 - DNA, 658 bp, Homo sapiens
gacagctttgaaaagattagtggctctcccagcatgcagtttgagatctgagaacaggaagactgactactcaagtgggtccctgacccctgagtagcccaactaggaggcacccccaagtaggggcagagtaacacctcacatggctgggtactcctctgagacaaaacttccagaggaacgatcagtcagcaatattagccgttcaccagtatccgctgttctgcagcctccactgctgatagccaggcaaacaagatctggagtggacctccagcaaactccaacagactggcagctaagggtcctgactgttagaaggaaaactaacaaacataaaggacatccacaccaaaacctatcggtacgtcaccatcatcaaagaccaaaggtagataaaaccacaaaatggggaaagaacagaggagaaaaaatggaaattctaaaaatcagagcggctctcctcctccaaaggaatgcagctcctcaccagcaatggaacaaagctggacagagaatgacgttgatgagttgagagaagaaggcttcagatgatccaactactcaragctaaaggaggatttcgaacccatagcaaagaagttattaaccttgaaaaaagattagatgaatgggcaactagaataaccaatgcaga

SEQ ID NO: 907128 - DNA, 631 bp, Homo sapiens
atgtgtgcactcaactcacagagttgaacctttcttttgatagagcagttttgagacactcttttgtagaatctgcaagtggatatttggaccgctttgagtccttcgttggaaacgggaatatcttcacaaaaaactagacagaagctttctcagaaacttctttgtgatgtgtccattcaactctcagagttgaagctttcttttgattgaggagtttggaaacactttttttgtagcaactgcaaatggatatttggagcactttgtggcttatatttgaaaaggaaacatcttcacataaaaactagacagaagcattccaagaaacttccttacaatgtgtggattcatctcacagatttcatcctttctttggattgagcagttttgaaacactcttttggtagaatctgtaagtggatattttgagcgccttgattcctatggtggaaaaggaaatatcttcaaataaaaaatagagagaagcattctcagaaacttctttgtgatgayggcattcaactctcagagttgaatctttcttttgattgagcattttaaaaatctctttttgtagtaactgcaaagggatatttggcacgctttgaggcctgtagttgaaaatgaa

SEQ ID NO: 907129 - DNA, 504 bp, Homo sapiens
tcagaagtgaatctttcttttgattgagcattttggaagcaatcttttattagtaactgcaaatggatatatggagcgctttgaggaatgtatctgaaaaggaaatatcttcatatataaactactckgaagcattctgagaagcttctttgttatgtgtgcattcacctcacagagttgaaccattcttttgactgagaagttttgaaaaactctttttgtagaatctgcaagtgcatatttggagtgctttgaggcctatggtggaaaaggaaatatcttcacataaaaacaagacagaaggattctgagaaacttatttgtgatgtgtgcattcacctcacggagttgaacctttcttttgattgagcacttttgaaacactctttttgtagaatctgcaagtggatatttggagtgctttgtggccaacggtggaaaagaaacatgttcacataaaaacgagacagaagaattcgagaaacttctttgtgatgtgttcat

SEQ ID NO: 907130 - DNA, 630 bp, Homo sapiens
actctgaaatgtgaattcacacatcacaaagttgtttctcagatagcttcctactatatttttttctgggttattctcttttttgccatttgcctcattaagctcccaaataccactttgcagattctacaacaactgtgtttacaaactgctgaatccaaagaaagctttgactctgtgagatgaatgcacacagcacaaagcagtttatcagaaagtttatttctagtttttatctgaagatatttcctttttcaccatatgcctcatttagctcccaaatatcccttcacagattctgaaaaaacagtgtttccagactgctgaatgaaaagaaaggcttaactctgtgagatgaatgcacacatcatgaagcggtttctcagatagcttccttctagtttttttcctgggatattggctttttcaccattggcttcaatgagctcccaaatgtccattcacagaaggggcaaaaacagtgttttcaatctgctaaatccacagaaaggattacctctgtgagatgaaggtacacatcacaaagcagtttctcrtaaaatgcactcccaagtataaactcaaagattctacaaacacagtgtttccaaactgtggagtgaagtcata

SEQ ID NO: 907131 - DNA, 652 bp, Homo sapiens
gaggcccacgatgaaaaagtgaacattccaggattaaaactagaaggaagctatttttgaaaccgctttgtgatatgtgcattcacttcatagagataaacctttcttttcattcagccgtttggaaacactgttttggtagaatctgtgatgcaatatctgggaacgcattgaggcctatgatgaaaaaggaaatatcttcagataaaaactagaaagaagttttctgagaaactgatttgtgatgtgtgcattcacttcacagagttaaatctttctgtggattcagcagtttgcaaacactgattttgtccattctgtcaatggacatttgagagctcattgaggctgatggcgaaaaagtgaatatcccaggacaaaaactagaatgaagctaactgagaaacagctttgtgatgtgtgcattcacctagaacatttaaaaccttttcattcagcagtctggagacactactttggcataatccacaatgggatatttgggagcgcactgtggcctaaggtgaaaaaggaaatatcttcagataaaaactataaagaagcttactgagaaaatgctttatgatgtgtgtattcatttcacagagttaaacctttctttgaattgagcaktttggaaaaacggttgttg

SEQ ID NO: 907132 - DNA, 633 bp, Homo sapiens
  misc_feature 333: n = A,T,C or G
aaagtgaatatctcaggataaaaacttgaaagaacctctctgagtaactgcattgtgatgtgtgcattcatctcacagagttaaaccttccttttcattcagcagttttgaaacactgtttttgtagaatctgcaaagggatattggggcacgcattcatgcctatgttgaaaaagaaagtattttcagtaaaaaactagaaagaaactttctgagaaactgctttgtgatgtgtacattcagcacacagagttaaacatttctttggattcagcagtatggaaacgctatttttgtagaatttgtaaaggggtatttaggagctcattgagnccaaaggcaaaaaagcaaatatcccaggatacaaaccagaaggaaactatctgagaaaccacttggttatatgtgcattcacttcacagagttaaactttcttttaattcagcagtttggaaacactgttttgtaaaatctgcaaaggggtatttgggagaccattgaggcctatggtgaaaaatgaaatatgttcagatagaaactagaaagaagctttctgagaaactkctttgagatgagtgcattcatcacacagagttaaacctttctttggattcagcagtttagagacaatgt

SEQ ID NO: 907133 - DNA, 590 bp, Homo sapiens
ggactgtttccaaattgctcaatcaaaagtgaggttcaactctgtgagatgaatggacacttcacaaagaagtttctgagaaaccttcggtctagtttttatgtgaagatatttcatttttcaccwtaggcctcaaagcactcaaaaatatccctttgcagatgctacaagaacacagtttccaaatggaccaaggaaaacaaacgtttacctcggtgagatgaatgcacacatcacaaagcagtttctcagaaaccttctttctccttattatgtgaagatatttcctttttcaccatagacctcaaagcgctcacaaatgtccctttgcagatactacaaaaagactgtttccaaactgttgaaccaaaagaatggttcaacactgtgagatgaatgcacacatctaagaagtttctcagaaagtttctgtctagtttttatgagaaggtatatcttttttcaacatagctctcaaagcattcagaaatatccctttgcaggttctagagaaacagagtttccaaattactccaagaaaagaaatgtttgccactgtgagatgaatgcacacctcacaaagtactttc

SEQ ID NO: 907134 - DNA, 590 bp, Homo sapiens
ggactgtttccaaattgctcaatcaaaagtgaggttcaactctgtgagatgaatggacacttcacaaagaagtttctgagaaaccttcggtctagtttttatgtgaagatatttcatttttcaccataggcctcaaagcactcaaaaatatccctttgcagatgctacaagaacacagtttccaaatggaccaaggaaaacaaacgtttacctcggtgagatgaatgcacacatcacaaagcagtttctcagaaaccttctttctccttattatgtgaagatatttcctttttcaccatagacctcaaagcgctcacaaatgtccctttgcagatactacaaaaagactgtttccaaactgttgaaccaaaagaatggttcaacactgtgagatgaatgcacacatctaagaagtttctcagaaagtttctgtctagtttttatgagaaggtatatcttttttcaacatagctctcaaagcattcagaaatatccctttgcaggttctagagaaacagagtttccaaattactccaagaaaagaaaygtttgccactgtgagatgaatgcacacctcacaaagtactttc

SEQ ID NO: 907135 - DNA, 583 bp, Homo sapiens
gggtccctaacaaaatgaaggcagaaataaagatgttctttgaaaccaacgagaacagagacacaacatacyagaatctctggaacacattcaaagcagtgtgtagagggaaatttatagcactaaatgcccacaagagaaagcaggaaagctctaaaattgataccctaacatcacaaataaaagaactagagaaacaagagcaaacacattcaaaagctagcagaaggcaagaaataactaagatcagagcagaactgaaggaaatagagacacaaaaaacccttcaaaaaatcaatgaatgcaggagctggttttttgaaaagatcaacaaaattgatagactgctagcaaggctaataaagaagaaaagagagaaaaatcaaataggcacaataaaaaaagataaaggagatatcaccaccgatctcacagaaatagaaactaccatcagagaatactataaacacctctctgcaaataaactacaaaatctagaggaaacggataaattcctcgacaaatacaccccccaagactaaaccaggaagaagttgaatctctgaatagaccaataacaggc

SEQ ID NO: 907136 - DNA, 583 bp, Homo sapiens
gggtccctaacaaaatgaaggcagaaataaagatgttctttgaaaccaacgagaacagagacacaacataccagaatctctggaacacattcaaagcagtgtgtagagggaaatttatagcactaaatgcccacaagagaaagcaggaaagctctaaaattgataccctaacatcacaaataaaagaactagagaaacaagagcaaacacattcaaaagctagcagaaggcaagaaataactaagatcagagcagaactgaaggaaatagagacacaaaaaacccttcaaaaaatcaatgaatgcaggagctggttttttgaaaagatcaacaaaattgatagactgctagcaaggctaataaagaagaaaagagagaaaaatcaaataggcacaataaaaaaagataaaggagatatcaccaccgatctcacagaaatagaaactaccatcagagaatactataaacacctctctgcaaataaactacaaaatctagaggaaacggataaattcctcgrcaaatacaccccccaagactaaaccaggaagaagttgaatctctgaatagaccaataacaggc

SEQ ID NO: 907137 - DNA, 642 bp, Homo sapiens
gacaacttggaagacagtagtggttctggacacagcatgcagcttgagatctgagaacggacagactgcctccataagtgggtccctgacccctgagtagtctaacagagaggcaccccccaggaggggcrgactgacacctcacaagcctgggtaccactctgagaaaaaacttccagaggaacattcaggcagcaacatttgctgttcacaaatattcgctgttctgcagcctctgctgctgatactcaggcaaacaggatctggagtggatttccagcaaactccaacagacctgcagctgagggtcctgtctgttagaaggaaaactaacaaacacaaaggacatccacatcaataccccatctgtacgtcctcatcatcaaagaccaaaggtagaaaaaaccacaaagatggggaaaaaacagagcagaaaaactgaaaattctaaaaatcagagtgcctctcctccttcaaaggaatgcatctcctcatgagcaatggaacaaagaggacagagaatgactttgatgagttgagagaagaaggcttcagatgatcaaactactctgagctaaaggagaaagttggaatccatggcaaagaagttaaaaactttgaaaaaagattagatgaatggct

SEQ ID NO: 907138 - DNA, 634 bp, Homo sapiens
tttagtgccataaatttccctctacacactgctttgaatgcgtcccagagattctggtatattgtgtctttgttctcattggtttcaaagaacatctttatttctgccttcatttcgttatgtacccagtagtcattcaggagcaggttgttcagtttccatgtagttgagcagttttgagtgagtttcttaatcctgagttctagtttgattgcactgtggtctgagagaccgtttgttataatttctgttcttttacatttgctgaggagtgctttaattccaactatgtggtcaattttggaataggtgtgctgtggtgctgaaaagaatgtatattctgttgatttggggtggagagttctgtagatgtctattaggtctgcttggtgcagagctgagttcaattcctgggtatccttgtcacgttgatctgtctaatgttgacagtgggtgtcaaagtctcccattattattgtgtggtagtctaagtctctttgtaggtaactcaggacttgctttatgaatctkggtgctcctgtattaggtgcatatatatttaggatttttaactcttcttgttgaatcaatcccattaccattatgtaatggccttctttgtcttttttgatct

SEQ ID NO: 907139 - DNA, 503 bp, Homo sapiens
atcgccaagtcaatcctaagccaaaagaacaaagctggaggcatcacgatacctgacttcacactatactacaaggctacagtaaccaaaacarcttggtactggtaccaaaacaaagatatagaccaatggaacagaatggagccctcagaaataatactgcatatctacaactatctgatctttgacaaacctgagaaaaacaagcaatggggaaaggactccctatttagtaaatggtgctgggaaaactggctagccatatctagaaagctgaaactggattccttccttacaccttgtacaaaaattaattcaagatggataaaaggcttacatgttagacctaaaaccattaaaaccctagatgaaaacctaggcaataccattcagtacgtaggaatggggaaggacttcatgtctaaaacaccaaaagcaatggcaacaaaagccaaaattaacaaaagggatctaattaaactaaagagcttctgcacagccaa

SEQ ID NO: 907140 - DNA, 581 bp, Homo sapiens
aaaaggaaatatcttcacataaaaactagtcagaascattcttagaaacttctttgtgatttgtgcattgaactcacagagtttaaccttccttttgatagtgcagttttgaaacactctttttgtataatctgcacatggatatttggaacatttcagggccaacggtggaaaaggaaatatcttcacataaaaactacacagaagcattctcagaaacttctttttgttgtgtccattcaactcacagagttgaacctttcttttggtagaccagttttgaaacactctctttgtagaatctgcaagtggatatttggagtgctttgaggcctacggtggtaaagggaatatcttcacataaaaagtagacagaagcattctcagaatcttctctgtgatgtgtgcattcaactcactgagttgaaactttcggttgatagaggagttttgaaacactctttttgtggaatctgcaagtgaatattaagagtgctttgaggcctacggtggaaaagaaaatatcttcacataaaaactacagagaagcattctcagaaacttctttgtgatgtgtgcct

SEQ ID NO: 907141 - DNA, 611 bp, Homo sapiens
ccccatctctacaaaacatatgttaaaaattagccaggcatggtggtgcatatgcctgtagtcccagctacttgggaggccaaggtgggagaatcacttgagcccaggaagttgaggctgcaatgagctgtgatcatgccactgtactccagcctgggcaacagagcaagacctgtctctaaagaaagaaaagtaaaattggaagacagcataaattagaagaaaaaagtagagttatgaatataggaaagaaatgagacatgtctactctagcctattattctcactttatatactttattgtataagtatctgcataaatttaatagctcacacatatttgccacttttacagacggatcagtgttttctttgcccctttttaatttgcatgttttaaaaacgagtcaaaacctggaacatagcatttttactcgcttttatttcaaaaacctaaacttgtttgatttctgaatttaatactttgtaatataagaactatgacttcagaaggcagagcacattaaaactatgatcaataaattatactaattctgaaatatttgtgacagagsctctctatatttcactgtaaacccaacctctcatga

SEQ ID NO: 907142 - DNA, 611 bp, Homo sapiens
atcttttggaatagattcaatcgaattagtaccaattctttggatgtctggtagaatttggctgtgaattcatttggccttggactgtttttgtttgtttgcagtgttttggtttttgttgttgttgttgttgttgttgttgttgtttttctaaattactgattaaatctcactgcttcttattggcctcttcaggatttctagttcttcctgattcaagctagcgggggttgtatgtttccaggaattaattcatttcctctaaattttctagtttgtgtgcatagagctcttcacagtagtcccaaataatcttttgtatatctgtagtatcagttgtaatatctccattttcatttataattagtcttatttggatcttctctcttcttgtcttggttttaatctacctagtgttctaacaattttatctttttgaaggagctattttttgtttcattggtcctttggattttttttgtttcaattttatttagctctgctctgatytttattattccttttcttctgctagctttaggtatgtttttttcttatttctctggttccttcagatgtattgttaggctgtcaatttgtgatctttcaga

SEQ ID NO: 907143 - DNA, 571 bp, Homo sapiens
aagcagcaggctgggttccaggtagtctgtasgtagaactaaaaactgccccaggccataagccgtcccagtggagaccagtgaaaccacagctttcaggccgcaccccttctggtctacctgtgaagcaggagtgcccagctcctgcgcccatggctatagcaaacttactacttgcccctcatttctggccaacagggtttatcctcactcaaggttataatctcatatctcagatgggagcttctctcaacctgtgactgcagcttgagttagctggtagacttctgtgaggtcccctgtgaggtaggatcaggaatggcttccctctgtccttgctggagtgtgaaagtgcaggcaatgtgcatcctgataccgcttcttctcaccccatcactcgctaaatcagctccagcactgggtagtgttaagatctgcctccatggcctgaattgcccggctctccggtgggagtgtgtgtcacggtggcagtctctccccctctcacacactctggagactcacagttttccatctggttcacagtgtaggctgctgtttcttctttcaa

SEQ ID NO: 907144 - DNA, 583 bp, Homo sapiens
tactcatttaaaagattaggttaatcattagtgctgtctatccaatattttattttctcctcttggttgaggtsatgagtggtcgtgtgacgtgttttgttaatgaaatgtgaaagtgacatttgtgactcctggctagaagatttaagagccaattaataattcaccacactctatctacttccttctgctaaggtaattagcaatatgtgcaagagagtagctgttcaatcagtgtgggctccagaattagaagaaatcaagtatattctccagacaacccaaaatggacaactagagagagcaagaaaaacaaaacaaaaagctctgttgttataagtcactgcaatttaaaattctttgttattgcagtataatctactctgacagaaacaaagtgtaacatggaaggaattactccatgggacatatcaaatctgataaaaataaagtaattaagaccatgactatggtttggctgtgtccccacccaaaatctcatgttgaattgtaatccccatgatccccataatttccacgtgtcaagagtgggaccaggtagaggtaattgtatcatgagggt

SEQ ID NO: 907145 - DNA, 610 bp, Homo sapiens
aaagaatcttggtttagtgaggtgtgagccacccagatgttccaaacccagagttcagggtcctactccttccctgtgaaggttctgacttttccacagaaggcgtgctggtgctttmaagtgaggcttctctactgttctgctattcttataaccaggcacaagatctgatttttagctcaatctcctttaaactgcaaaaggagagggttgctttaaatggtgttatagagatcttgtgatgttcacaccatgtcctgagattttgattgaccagttgaagcttttttaaaagtcattttttcctttagatcactgacaatacttgcaactaccaactccacagtcattatcattatcattgtcactatctcaaattctggaaatactgcataaggcatacataaccttatatgtttatgccatcccaattcacataggggataatcttggtcattgtgatgttataaaatgccaactggtcttgataccaactggccaacaagcgattcaactccagcatcccatctgaaggctctgctccccacactgtagtacctctggtgtccaatggcttactgtggattctccaacagaaaatctggacaca

SEQ ID NO: 907146 - DNA, 522 bp, Homo sapiens
taccattcaggacatatacattggcaaaggcttcatgactaaaacaacaaaagcaattgcaacaaaagccaaaattgacaaatgggatctgattaaactaaagagcttctgcasagcaagagaaactattatcagagtgaacaggtaacctacagaatgggagaaaaattttgcaatctatccatctgatgaacgtctaatatccggaatctacaaggaacttatacaaatttacaagaaaaaaaaaccccatcagaacgtgggtgaaggacatgaacagacgcttctcagaaaaagacatttatgcacccaacaaacatataaaaaaaagctcgtcatcactggtcgttagtgaaatgcaaatcaaaaccaaaatgagataccatctcacaccagttagaatggcaatcattaaaaagtcaggaaacaacagttgctggagaggatgtagagacataggaatgcttttatgttgttgttgggagtctcaactaggtcaaccattgtggaagacagtgtgac

SEQ ID NO: 907147 - DNA, 635 bp, Homo sapiens
tagcacaatgcctccagatttgttcttttgcttaggattgtcttggctatatgggctcttttttggttccatatgaaatttaaagtagttttttccagttctgtgaagaaagtcaatggtagcttgatgggaatagcattgaatctataaattactttgggcagtttggccattttcacaatattgattcttcctatccataaacatggattttttgtttccatttgttttgttctctcttatttccttgagcagtggtttgttgttctccttgaagaggtccttcatattccttgtaagttggattcctagatattttattctctttgtagcaattgtgagtgggagtttactcatgatttggctctctgtttgtctgttattggtgtataggaatgcttgtgatttttgaactttcattttgtatcctgagactttgctgaagttgcttaccagcttaaggagtttttgggctgagatggtagggttttctaaatatgcaatcatgtcatctgcaaacagagataattcgacttcccctctctwtttatttaaataccctttatttctttctcttgcctgattgcgccagccagaacttccaatactatgttgaataggagtggcaagagagg

SEQ ID NO: 907148 - DNA, 618 bp, Homo sapiens
gggtctgtgctgaggtggattagtaaaagaggaaagcctcttgcagttgagatggaggaaggccactgtctcctgcttgcccctgggaactgaatgtctcggtataaaacctgattgtacatttgttcaattctgagataggagaaaagctgccctgtggtgggaggtgagacatgtttgcagtaatgctgccttgttattctttactccgctgagatgtttgggtggagagaaacaaatctggcctacgtgcacatccaggcgtagtaccttcccttgaacttaattatgatatagattcttttgctgacatgttttttgctgaccttctccttattatcaccctgctctcctactacattcctttttgctgaaataatgaaaataataatcaataaaaagtaagggaactcagaggctggtgccgccggtgcaggtccttggtatgctgagcgccggtcccctgggcccactgttgtttctctatactttgtctctgtgtcttatttcttttctcagtctctcgtcccacccgactataaatacccacaggtgtggaggggcaggctacccsttcacttattcccaacaatatgggagaaaatgggtgcaaaaata

SEQ ID NO: 907149 - DNA, 597 bp, Homo sapiens
aacacattacataggcaactacataaatgttcaacaaataaaaacaagaatacagtaatttttctttcscatttacccaacatacatgaaactaaaaagcaaatagaatgcattagtgtgtgagttaattgttgcttatctatgtacttacagaatttgtttgtcaggagtttgactatgatgattggtttccaaattaaataatatcccacagaaagatctaagcaaaaactagcttgagaatacagagtatgcatacagttaaatgtaaaatgtaaagtcccttcttcctctttacctcctaaatcctttcttctgtctcttctttccaaagtcttaatatatgttagaaaatgtagacgatataaaagataaagtacagtccctgtctgcaaaggattcacaatctagtaaccagaaaataaagcactttgtattttattgtcttttattccgcccaatacaatagtcaaaattgtagtcacttggtaattttacaaaagttttgttaaactttaacaaaatttgcccagtttctttgcactgaaagctgcttattctttcgcttttagacagctcgaatttacttgacttact

SEQ ID NO: 907150 - DNA, 412 bp, Homo sapiens
gaggttgttgtgagccaagatcacaccactgcacttcagcctgggtaacagagtgagactccattaaaaaaaaaaaaaaaaaaaatatatatatatatatatatatatatatgtatatatatatatatatatatatacttcagtttgtcttccaatatgactgagaacccttttactatactgagcctgccataaataataactataaactccaaacaaaataaaaacatagccacttgaaggcacttggaaacaaacaaacaaaacatgcatagatacatgaaaagaatcattatttgaaagaagggaatgacactgggtgagtttcccattttcacagcttctagctgatggcaagcaccccarcatgctatgctgggtgattaaaagtccaatggaaaaaccgcagtat

SEQ ID NO: 907151 - DNA, 533 bp, Homo sapiens
aactccaacctgtgagtttcttccattgctaattactgctccccatactgtgacagctgtgtctttcctgtttggtagctgatgaatcaatcaaaaratgcttttgtaaagtagtgatttgggggttgcttaagtgcctgatagaatgtgtgacactgacaggttccctggggatgaggacggtgtttaccacagcatgttctcagagggtgccaaacaggtgccccgcccaaacctactcaggatcaccatgcagcaagttgggaaatgcctacccagccctagttctagtttctatggtaatggtggtttgggggccaatattgcaacaatcctatttgcaggtatctgcagcatggcttttaatccccaaacagtgttggttttctttgttctcttcctgccaatcattcctgttcaagacttatctgatgcctattctgtaccatcaaaactctgttctctacacagcagactgagatctctgagtacagtatatttctggtaaggactcaatatctgctaacagtgta

SEQ ID NO: 907152 - DNA, 580 bp, Homo sapiens
cggggacccggccatgggccgaggcgcgggccgcccgcccgctgggagccacggcttagsagccgaccgctagctgcgccgccgcccggggaccggcatgaggaccgccgcggggggacgtctgcggcccgcgtcggcgctggggacaaaggtgcgtgtcgttgtcgggtccgggctctctcgttagccttgccctagttttgcacttttgaaaaagttgtgacaacaggaagacagatgccgggcgtagtttggacactttaaaactgaaccatgaactgggaagtgttaactgcagttgagcgcagcgtcggcccaaacttcagcagaccaggtagaatcacaattttgcaaaagatcccagtcccgatcacagactccacagtgttaaggattgacttagacttggtgtcgggctcttgttgagtcactgccagctggcaaaggtggcgagtcgacacgcatttccccaaggcattgtggtggttagagatttcggttgcaagtcggtgtttagcgtactgggtcgtcccgcagcctgatttttcttgggagatcagtttccctgaagtaccaagaa

SEQ ID NO: 907153 - DNA, 517 bp, Homo sapiens
tcccaaggatctcctaaaggaacaattggcgtaagagcacaaacaacctgcccctttgctgagtagggaacaaattctcaaattctgaggtatggcttatactctaagttggactaaaaaaaaccaccaaagctgggctgggtttttccccttctctattctgctgcctattcccttcatggtgtctctggagaacacgtcctcaataaaatcatctgcaccccaatccttggttcaagatctgctcccagaaaagcctgatctaggatggccttaatttgaatttattctgagagaaaaagtgaaaggaggtaatagaacagagaagagaatatatattgcaacttagctaagcaaagattgcacagtcataagttaatctgattcttaacagtcagtttctctttccttctaaaacttcttccatcagcagacaggtagtgaggggcagaggctaagtgagttaggattcaatctaatggcaaraaagatatatctttctaatccccttttccct

SEQ ID NO: 907154 - DNA, 689 bp, Homo sapiens
taggggacaatatccctagtcaacctccccacaagtgggccatctggctcaaaggttagttattggaggtagggtaaayagacttaagtggggaagcctctgttgtccctagtatttaccctaagacctaatgctctaaggtaagaaccggctgcctcagcctgttcaattattacaagctatgtaaactttcagccttccaaaaggtttgtgactattccctataactttccctagtatttccctttaatatttctgccaccatctgagtgaatcccaacactacaacatataagaagaaaaaaaaacagagaccgaggccaagaataaaaactataaacccatcatatgatcaaatacatttttagagtccaaaccatggtgcagaatatcctgagtttcctcatgttctctctcgctccactgaaagtctactgttacggccacagaggacccgtctctctgggctcccacattctttcctccctaccttacagttcctaagtctctttggccttttacccttaccataagatttcacgtttttctttttctgtccatctcagaagggttgtccttcagtttcacctgggcttccccttggaaggcctagtgaatggtctcaggtgattgtgtccggaggataaggggagtatgacagccacctgccctttcttttagggcttaca

SEQ ID NO: 907155 - DNA, 616 bp, Homo sapiens
gttaaatccttcttccttggcaatacwcattgtttcagtgactggctttctgtgtggcaagcagcaggacctagactgaacccctgtgctttggtagcaacaggaattgcactaaatctgtagcttgctttgattaagatggtcattttaacaatattgactgttccaatctgaacatggaatttttcttttttggtgggtgtgtccttttcaatttttctcatcggtgttttgtagttttcattgtagaggtcttttatctccttggttaaatttatttctaggtactttatttttttgtagctattaaaaatgggattgcttttttgatttcttcagctagtttgttattggtatatagacttgctattaattcttatatgttgattttatattctgcaactttaccaaattcattgatcagttccaagaattctgtggtgaagtctttaggtttttctctatataagattatgtcatctgcaaagagggacaatttgattttctcttttccaattttgctgtattgtattgctttctcttgcttaactgccctggctaggaattccagtacagtgttgaataagagtagtgaaaatgggcgttcttgtctggt

SEQ ID NO: 907156 - DNA, 609 bp, Homo sapiens
aaggctcactctctcaattccttcaggtctttactaagttactgacttttcaacagcgtttcttggaaactatctaacattttagttgcattcctatctcccctaaacttctcccctctctacctgacttttttctctttagcacttatcatctaacatacagtatattttactaattgtattgtttattgtctgtttcctccatcatatgtgatttcaacaagatcagggactttgttattgttttctgctgtagttcctgcttctagaatggtgcctgacacataggagacactcaataaatatgcatttaatgaacaaatagatgaatgatacaaaattatatgtagaatgggagcataactatttattctcccataaacacaatcaaaatagtactaagatggtaagattttaatagcttaaaaacctatttcctaaatttttactgttgctatcttgacttaaagaaaaggcccaacagaagagaccatcctctggaaaataggccttagccaagcatgacatayttagtgagcagattattttgagataatgtgaaggaccctatggctcatcacagaaagagcaatgtgccagaggcagtgt

SEQ ID NO: 907157 - DNA, 521 bp, Homo sapiens
ggggatgttttctatcaagagtaatacaggcatctaggacagcactagagccctggccatggcaccagaaatgtaaacctctcattgaggtggatacttgaagcgcagtgagctcgaagaacctcagcacattctccttctgctggaccttggacaccctgtttcagacctgaacctcctgttccttgaaggcctttggatcacactccaatatggtttggatatttgttcccttcaaatctcatgtcaaaatttgatcctcaatgctgaagatgggacctagtggaaggtgtttaggttgaggggttggattcctcatgaatagattagtgccctccctcaggggtgagtgtgttcttattctgtcagttctcattagatctgattgttaaaaagagcctggtgccttctccctctctcttgcttcctctcttgccatgtgatgctggctcgctttgccttctgccmtgagtagaagcttcctgaagccctcaccagaagcagatgctggccccatgctt

SEQ ID NO: 907158 - DNA, 637 bp, Homo sapiens
tagtaagtagtccattattaaattgttgttttaaytgttattttatacggtatttgacctgcttataaacacatgtaaacgctttcttcagagttacacttttctgcagcaaaaagtatctttatacaaaagctttccatatttagaataatgtccttaggttagaatcctactggaattactggctcaatggacatttttaaagctttgaatttatgttaggaaattactttttaaagggctatatcattaccacttctatcaggaatgtataagagcatttgataagcttatatagattctgagccctgggatacaggagtaaggaaaacagaagagctgcagttttaactgtatcaggaaatataatttgtttaaatttttacaaattggataagtaagaaatgaaatgtcttctgagcacaaagtaccaacataagcacttgggaaaattcgtgcggtctttggtatatatgaaaactttccagtgattcaactagcatttaataaaagtaaatttattatgttttcctgaacccctagtactaaagattttgtttggttttggctggtttataagcattcatagcatggtttatcaacctatttattttcgtggcaggagcttacacttggg

SEQ ID NO: 907159 - DNA, 697 bp, Homo sapiens
gttcaagtgattttcctgcctcagcwtcctgggtagctgggactacaggtgcgtgccatcaagcccagctaatttttgtatttttagtagagactgggtttcaccatgttgaccaggatggtcttgatctcttgaccttgtgatctgccctcctcagtctcccaaagtgccgggattacaggcatcagccaccgtgtccagctaaagctattttctaaataagatttggtaaatgattgttagaaaaatttaacattaagaaaagtggttttatggtgaaattctttaacagacttaatttttcagattagttttatgtttatagcagaatagtgcacagtacagaatttctcatatactctttgccttcacagaggcatagcctccctcattatcaatatctccaccagagtggtacatttgttacaatttatgaacctacattgacacataattaccacccagattccaagaccatagtttgcattagggggtcactcttggtattgtacattctatggatctggaccaaagtataagacaagtatctaccagtatagtattatacagggtatttccattgccctaaaaatcctctgtgttctgcctattcatctgtcttcccctctaagtcctaacagctactgatatatttttagacatttttgccttttccaaaatgtgatatacttgaaac

SEQ ID NO: 907160 - DNA, 697 bp, Homo sapiens
gttcaagtgattttcctgcctcagcttmctgggtagctgggactacaggtgcgtgccatcaagcccagctaatttttgtatttttagtagagactgggtttcaccatgttgaccaggatggtcttgatctcttgaccttgtgatctgccctcctcagtctcccaaagtgccgggattacaggcatcagccaccgtgtccagctaaagctattttctaaataagatttggtaaatgattgttagaaaaatttaacattaagaaaagtggttttatggtgaaattctttaacagacttaatttttcagattagttttatgtttatagcagaatagtgcacagtacagaatttctcatatactctttgccttcacagaggcatagcctccctcattatcaatatctccaccagagtggtacatttgttacaatttatgaacctacattgacacataattaccacccagattccaagaccatagtttgcattagggggtcactcttggtattgtacattctatggatctggaccaaagtataagacaagtatctaccagtatagtattatacagggtatttccattgccctaaaaatcctctgtgttctgcctattcatctgtcttcccctctaagtcctaacagctactgatatatttttagacatttttgccttttccaaaatgtgatatacttgaaac

SEQ ID NO: 907161 - DNA, 617 bp, Homo sapiens
aaaaacttgttccatagtttgacaccawcctaagctaacttgatcgtcctgtatagttcacatcagcataattgttcagctcaaacccaactcttctttactgattttcaaacacatcatgcttatgcttgaactccaggttttcattcacacactttgtgtgtcctaattttctttcccccttacttgtctaaatactccctttgtctatttagcactgccattataacattgatcctattttatcctaattaatgtatatatttttatctctctaataatggttcatacaatgtcatgcctgaaacatcattattcattgtctctgatccctctggattctacaaagcccagaagaagagatgctttcccctatctttactcattttatagcctttagcataagactagaaaaataagtattctgcattttagtgtgttttgtttccatgtcaaacgaatgtatcccctttcaagttgtgtattcagaaataattcacttcatgaatagctgaagtccgcaagattaaatggttgtttttatggaattgcctccattaatttcccaataaatcatttataatcttgtatgcctattaaacatgatagtctcaatc

SEQ ID NO: 907162 - DNA, 674 bp, Homo sapiens
ttcttatttaaagcaagtctctaaaagttttacattacatgttcattaaagaagtacatatgattccagcctctcattaaataatattcaattttaaaaaaaagaaagcaagaaaaagtattccttaaagcagtacttaactgataaaaatttatatattaaagaactaatgcttgcatgaaagagcttaaattttactttgttacatttttaacccatgcagaaacactgaagcaagaaaaaaatgtacaacatatttttatacgttgtttctacacatataggaagaataatatatgtgtctgtgtgtgcttgcggcctgtgtgtgtgtgtgtacatatgtatataaaatagaaaaagaacattagcgttatttgctaaaataaaaaagaacatttagtcctgtctgagtttttcctttaaagggtgatataaagattttgtagggaaaattcatagatgaccattagttatgattattttactagctaaagaagaaattctttgatagttctagataccagcacgttactttctttttacatagagctttttgttatgggagtwacaagaaaaattttcagacattcgtttcataattcttggccaaatttccatcagcagaagagcaaatttgttgatgactaagcagagattcagaaagcccagggacc

SEQ ID NO: 907163 - DNA, 562 bp, Homo sapiens
atggcaaaacgttgtctctacaaaaaatataaaaattagatgggcatgrtggtgcgtgcctgttgtcccacctacttgggaagctgaggggggaggatcacctgagtccaggaggctgaggctgcattgagccatgattgcaccactggattccaccctggggcaacaaggtgagactttgtctcaaaaacatacatacatacatacatacatagagttttctgacagaaagcagcttgaggaatggaagggcattcagtcagccagatcaggagttgatacccaacttcactgtatttactgtgtgtgtggcttaaccacttcaagcctcaaccttccttgctgaagaatggggatttaaatccctaggtcatagcatcacttaagcaaggtaacctgtggaggtgcctgagccagcgctagcacatggagagcgtccctgacatcttagctttcctttgcttccatttccatttattcattcagtcagtccaacagtctctccctcttccaggtaagttgcttggggaattggtgactcaaccagggtccatgcccccct

SEQ ID NO: 907164 - DNA, 608 bp, Homo sapiens
ttttccctttgattagtcaaaaataacatcatggacttatacagcactttcattcaaagggaccaaagaacgtgccttaaaaaaattgtgcatctcccattatctctacagagataaaggtgaaagggacttgcattctttctaatgaatagtggctgtctaaaataaaagaagttcacctgggccccaccccatgagctacctgcgcactcccttcttcccacacccatgtcctggtaagtgatggccttccccacccagttcagtatctcctaacaaaccacagtgaaatactaaatccagctacaaatgtccactatcaggaagtcattctggcctatagctttacagaccatggaatccagagaaactcttcctagtcagggattaggaatcttgagtcatattagttctttcaccatttcttcatttattcaattgatatccctactgaacttttatactatgtgtaaggctttgtggtaggtgccagaaaatcaattctgagcaagatccactagggccatgccctcatgaggcttagattctagctggagacataggtattaamcaattaattgcacaagtaattatttaagtaaacttgg

SEQ ID NO: 907165 - DNA, 586 bp, Homo sapiens
aggaactgataactagaataaccagtttagagaagaacataaatggcctgtggagctgaaaaacacagcatgagaacttcgtgaagcatacacaagtatcaatagctgaattgatcaagcagaagaaaggatatcagagattaaagatcaatttaatgaaaaaaaaacatgaagacaagattagagaaaaaagaatgaaaaggaacaaacaaagcctccaagaaatatgggactatgtgaaaagaccaaacctacgtttgactggtatatggaaagtgacagtcagaatagaaccaaattagaaaacactcatcaggatattatccaggagaacttccccaaattagcaaggcaggccaacattcaaattcagtaaatacggagaagactacaaagatactcatcgagcaaagcaaccccaagacacataatcaaccacttcaccaaggttgaaatgaaggaaaaaatgttataggcatccagagagaaaggctgggttacccacaaaaggaarcccatcagactagcagcagatctctgagccagaaaccctaaaagccagaagagagtgggggccaatattaaa

SEQ ID NO: 907166 - DNA, 651 bp, Homo sapiens
tgaaatttattttgattgttattattcaaggagagtttgcaataatgaggcagatattaaaatataattgaaattctggattttttaaattattcagaaattaataatacatttatttttactatatattttaatattgaatcttccttgaattaaatttattagtgatattaccacaatgcatttgatagttattggaataatttcccttttattcttatatctaccacatactcatgattatgatagtacactggggttactctcaaggaaagtaatatctggcgataatttagttgaatttgcaatactatcagtgagatacacgatttgatgaaaataagaggagagggatgttcccattgccctcgctctgtcagtttggtagttcttgcagagttagaccagctacagtattcaccagttttgctaccagtaaaaaattgcttgatttggaaaagagagtggaaaaaccagattcccctgggctttgtcagaaacagttgcattatcagtgtcaaatgaatttggaaggctaaagtctaagcamgcttgaggttgcaattttggttggggcaagcaataggctgacagactaatgagaattttagcaggaaaatgagggcaatgaaacaaccacagcagccttgt

SEQ ID NO: 907167 - DNA, 657 bp, Homo sapiens
attagcattactccaacgatttctttggaccattctaacagaacttaaaagcaagcttagaaagtatcrcattagtgccaagtaacttagccactgcacaccaaacataaaatagaggctatttaaagtaatacaatgaaattaagcattgggaatataaaattcaaaatgtccagaatacaaccaatactgaccaggcatgcaatgaagcagagaaatatgatccagaatcagtgaaaaaaaattcaatacaagtagaccttcaaatgatagagatgatggaaagaacagataaggaagttaaattaatacagctattattattttccatatgttccagaaggttccagaaagcatgagcatgattagaagagaaattacaaatgttaaagaaatacacaaatttatatagaggaaaaatatatctgcaatcagaaatgaaaaatagatgagtctgaaagcagagtagatacttaaacagaaaatatcagagaatttgaagacaaagcaatagaaactattcggagtgagtgaggcatggaaagggaaataaataataataagtaaaagaaaacaacagcaactcctgggataattcaagtggtctgatattgttgaaactggagtgctactagggcagaataggtagtgaaaggg

SEQ ID NO: 907168 - DNA, 628 bp, Homo sapiens
tatttacaattatacacatattacaattatatttcttgctgaattgaaccctttattattacataataatcttgtttgtcaatttttatggtttttaacttgaactctgttttgtctgatacaagtatagctatccctgctcactttgggcttccatttgcatagaatatatttttccatccctttattatcagtctatgtgtttctataccggtaaagtgagtttcttttagataaaatatagtggggtcttattttttaatccactcagtaagtctatatccttcatggggtatttaatctattaacattcaaagttattattggtaggtgaggaggttttgcatgttttcatgatggtggttatcatctttttacttccagatgtaagactcccttgggcatttcttgtaatgttggtctagtggtgatgaattatcttggtttttgtttatctatgacagattttatgtcttcttcatttgtaaaggatagctgtgctggctataatattsttggctgaaagatttttttctttcagaacttcgaatgtatcatcccattctcttctagcctaaggtttccactgggaaatcagctgttagtctaatggggattccattataag

SEQ ID NO: 907169 - DNA, 489 bp, Homo sapiens
cccacccatgtgggcttggtgtactgaagataaagctccagtgctggagaggcacagtggctactggcccccagaggagggcacactcaagagatgactctgttctccagatggtgctgtgttgctgcagcttaagcctctgggggtgggaagtcttcaccttgtactcctagtccaggacatgcagctgtgtcaattcttggcaatactccaaactggcctgagggcttgcaaagactgtgagattctcctgttgtaaagactttgtgtttgtgatggcagtggggctggtggggatcttctgcctaccttcaccctgcaatgagaagtccctcctgtctctgggccaattcaatccagatggggcagaaggggctgcacaggctgagtgcttccatactgtggcaacttycagtcaccacagatgtgtctccactcctttgctgcactccaggactatccctttgatactctaatcaaatctcagat

SEQ ID NO: 907170 - DNA, 489 bp, Homo sapiens
cccacccatgtgggcttggtgtactgaagataaagctccagtgctggagaggcacagtggctactggcccccagaggagggcacactcaagagatgactctgttctccagatggtgctgtgttgctgcagcttaagcctctgggggtgggaagtcttcaccttgtactcctagtccaggacatgcagctgtgtcaattcttggcaatactccaaactggcctgagggcttgcaaagactgtgagattctcctgttgtaaagactttgtgtttgtgatggcagtggggctggtggggatcttctgcctaccttcaccctgcaatgagaagtccctcctgtctctgggccaattcaatccagatggggcagaaggggctgcacaggctgagtgcttccatactgtggcaactttcagtcaccacagrtgtgtctccactcctttgctgcactccaggactatccctttgatactctaatcaaatctcagat

SEQ ID NO: 907171 - DNA, 576 bp, Homo sapiens
ttctctgacatcacaatataaattaggtccaccatattaacctctttcttggttgccttttcttttcctccatrtcactaagtaaaatttgtaattatgtatttatctgttaatgtatgtctttttatctagactgcaaactccaggagggcttgatgctttataatatttattgagtgagtgaatgaataaattaaaaaaggaatgtaagatgcaggatttccaacattaactgaccagggattattatcttttagaagtattggactattgaatagatttaccttaatgtatatattatcctagtaataataatatctaacatttactcagtgattgctgtgccttatgcataccttaaaaaagttaattaggccaggcacagtggctcacgcctgtaatcccagcactttgggaggccaaggcagggggatcacaaggtcaggagtttgagaccagcctgaccaacatggtgaaaccccgtctctactaaaaatacaaaaaaattagctgggcatggtggcacgcacctgtaatcccagctactcgagaggctgaggcaggagaattgcttga

SEQ ID NO: 907172 - DNA, 549 bp, Homo sapiens
tggttgtagatgtatggtgttrcttctgaggcctctgttttggttactgtagccttatagtatagtttgaagtcaggtagcgtgatgcctccagctttgttcttttggcttagggttgtctaggccatagggctcttttttgtttccatatgaaatttaaagtagttttttctaattctgtgaagaaagtcaatgatagcttgaatggggatagcattgaatctataaattacttgggacagtatggccattttcatgatattgattcttccaatccatgagcatggaatgtttttccatttgtttgtgttgtctcttatttccttgagcagtggtttgtagttctccttgaagaggtccttcacatcccttgtaagttgtattcctaggtattttattctctttgtagcagttgtgaatgggagttcactcatgatttggctgtttgtctattattggtgtataggaaagtttgtgatttttgcacagtgattttgtatcctgagactttgctgaagctgcttatcagcttaaggagatttggggctg

SEQ ID NO: 907173 - DNA, 590 bp, Homo sapiens
aactggcaaggagcaacctgctttcaccacaggcctctggaatcccagcaggaggagacccctcaaccaccacagccacttcattgacagggagagcggcttagataagtggtaggagcagcactcagccagtgtggagcccaaagggtgtgttacaggagcatatgtggtggagcatggccaggaatgccaatccccctaggctgcacttgctcccataggagactgttcccctaggggaactttagcccagatgtaaactctgcagggtggtcttccctatcacctggggctggtctgatctgagctttccttgatctgctggcctttcccagggcacccaatgctggactgcaaacagatgcagccagactggggccctgggggcccgcatcataactcctgcactgttggactgtgcctgaccagcagagcggccctctggacacgcaacagctgacctgttccttccctcactgcagcatccccaggttccatggccactccccgtattgctttgctaacgcatgtgtktgcaggcagatcttgccttccttgttccaccggttttgcatgtgaaccctgccata

SEQ ID NO: 907174 - DNA, 609 bp, Homo sapiens
ctcgaattcctgacctcaagtgatccgcctacctgggcctcccaaagtgctgagattacaggcatgagctaccatgcccaccctaagatctttagaaatatatgatagggtaaaaaaagaaaatgaaagatgagctggcatggcccagaataaaataataaaaccatgacaaaaagtaccaaattgaatgtgacaaatacaataacatattaatttgttcatgctacagtgaacaaattaatatgttactttaatgttaatttaattgtttgtctcaatgaatgaacaattgagaaacttccatgtgacaggccctggggatatggcaatgacctaaagagtcaaaaatgcttgtcctcaaggagtttgtattctagtagggggagacagacaatagacaaatacacatgtgcacagatgcacactcatatatagtttgtcatatgctgattagtgctatgaagaaaataaaactgtgaaggggtttagggaattctgsatgtcgagatgtatgtaattttatatagggcagttgggtccttcttgggtggatgattttagaacaaaaacctaaaggaggtgtaggataaggcatgcaggcatcaggat

SEQ ID NO: 907175 - DNA, 616 bp, Homo sapiens
ctgtacgtcaccatcttcaaacaccaaaggtagagaaaaccacaaagatggggaaaaaacagagcagaaaaaccagaaactctaaaaatcagagtgtctctcctcctgcaaaggaacacagctcctcagcagcaatggaacaaagctggatggagaatgactttgaggagttgagagaagaaggcttcagaagaccaactacgccgagctaaaggaggaagttcaaaccaatgacaaagaagttaaaaactttgaaaaaaagttagacgaatggctaactagaataaccaatgcagagaagtccttaaaggacctcatggagctgaaaaccacagcacgagaactacatgacaaatgcacaagcctcagtagccgatgcgataaactgaaagaaagggtattagcgatggaagatgaaatgaatgaaatgaagtcagaagagaagtttagagaaaaaagaaaaaaaagaaaccaacaaagcctccaagagataagkgactatgtgaaaagaccaaatctacgtctgactagtgtacctgaaagtgacgggcagaatggaaccaagttggaaaacagtctgcaggatattatccaagagaactttcccaatctagca

SEQ ID NO: 907176 - DNA, 602 bp, Homo sapiens
cagtaggggcagactgacacttcacacgactgggtactcctctgacacaaaacttccagaggaatgatcaggcagcagcatttgcggttcaccaatatctgctgtactgcagccaccgctgctgatactgaggcaaatagggtctggagtggacttccagcaaactccaacagacctgcagctgaaggtcctgaccgttagaaggaaatctaagaaacagaaaggacatccacaccaacaacccatctgtacgtcaccatcttcaaagaccaaaggtagagaaaaccacaaagatggggaaaaaacagagcagaaaaaccagaaactctaaaaatcagagtgcctctcctcctgcaaaggaacgcagctcctcagcagcaatggaacaaagctggatggagaatgactttgaggagttgagagaagaaggtttcagaagaccaaactactctgagctaaaggaggaagttcaaaccaatgacaaagaagttaaaaaccttgaaaaaaaattagacgaatggctaactagaataaccratgcagagaagtccttaaagaacctcatggagctgaaaaccacagcatgagaactacatgacaaa

SEQ ID NO: 907177 - DNA, 566 bp, Homo sapiens
cctgagtagctggggttacaggcaggcactaccatgcctggctaatttctgtatttttagtagagatggttttgccatgttggccaagctggtctagaactcctgatctgaggkgatccacccaggtcagcctcccaaagtgctgggattacaggtgtgagccactgcgcccggccagggtgatgtccatttatacagggaggtcaaatggctttagtcagtctactgattcaaatactgatctcttccagaaacaccctcacagacacaccccgaaaaaaatgtttgtccaaatagctgggcacccaataacctagtcatgttgacacacaatactaaccaccatcacactactcaaatctcaagtgttcaatcaccacctatgactactacttcccatattagacagcacagatctatcacatttctatcatcacacaaaattctattgccagagctagtctagataactatgtttaagtatactaaggtataacattttgagaatttacattttttctgtttacattatttgagtaatatatgccctattattctataatcca

SEQ ID NO: 907178 - DNA, 663 bp, Homo sapiens
attgtgatttttgtttaactaatgaagctagttcaaataattgtctaatggaaaaagaatgaatcataaactccacactaaaacctcaaattcaatcaaaaagcttcatagcccaacatgtaaatgacaataaactcctagaagaaaaaagaaaatattaggatataaattatgttttcaattaactataaaaatcgaattttttaatgaaattttttcacaaaagaaacataataagaatgataattcaaggtatacactgagaacacatatttgccaaatatatcaatatacagatgtatgtatttgctatacatatatgtatgtagatatatttgtgtgtatatattttctaactgcctacatcaacaaatgagttctattcagaatacataaagagtatctattgatcgataagaagacagaaaaactggggaaaaatctcaggcgatcacttcagagtaacatttttaccaatagccaataagcatatgaaaaggtgttcaacatcgagttattatagtgtgtaaatgaaactacaataaggtaccagtcattgaatttaatcactgaaattaataaaatatgcagaattaatatccttagatatatcaaagcactggtaaaagtgmaaagcaatcagaactgtcttactttgctagt

SEQ ID NO: 907179 - DNA, 657 bp, Homo sapiens
ttggtatgtttttgcagtggctgggaccagattttcctttccatatctagtgcttccttcaggagttcttgtaaggcaggcctggtggtggcaaaatctctcagcatttgcttgtctgtataggattttatttttccttcacttatgaagcttagtttggctggatatgatattctgtgttgaaaattcttttctttaagaatgttgaatattggcccccactcttttctggcttgaagagtttctgcagagagatctgctattagtctgatgggcttccctttgtgggtaacccaacctttctctctggctgacttaacatttttttcctcatttcaaccttggtgaatctgaccattatgtgtcttggggttgctcttctcaaggagtatctttgtggtgttctctgtatttcctgaatttaaatgtggcctgccttgctaggttggggaagttctcctggataatatcctgaagtgtgttttccaacttggttccattctccccatcactttcaggtacaccaatcaaacataggtttgttcttttcacacagtcccatatttcttggaagctgygtcattcttttttctctaatcttgtcttcacactttatttcattaagttgatcttcaatctctgatatcctttcttctg

SEQ ID NO: 907180 - DNA, 504 bp, Homo sapiens
agatcacacagctaccaagtgttgggagtagcgaccaaagcccatatcagcctcattagaaagctcctgcttgcagcttctgggggctgtgctgcttctctatgtgatgtggatgatctgtgtatacaaatcccattgtccttcagccaagaggctttagggtacagagagaggacctgaattgagacaaaagggttgggggagctgttgtctgctgccttgcctgctacttaatagctcacagaccacagggatgttagtttttcagagctcagtctcctaatctgtaaggtggatgttctgtacatagaaaatgctttataaatccctaaggtgctattcaaatgtcagggatgtttttgttttaggtatgcaattgaccaaacattgggtataccacagtgctttttcttcacaatttacgcaraatattcttggattgcagttaccttcacgtgcagctattttcaattcaattcttagctaccatttattgagcaactg

SEQ ID NO: 907181 - DNA, 607 bp, Homo sapiens
gctgcatggcgcccccctggtccccacccccccgggcgtcgcctcgcgtgggtgggcttcgcgttccctccggggtttcagagccaccacgtgacttccacgaagcgcrgggcgccggcggaaagccgcggcaggggtgggatttgggaccccgaggtgcggagagagggcgggcagaggaggaaacgaggcgggggtgggagaaggagggcggggcagacgtgggacgggaaggacggctgccgggactggcgcgcggggacactgggccgacgcgtggagtagcggggagagcgggaagcctgagggggcggggccggcgcgaggccgtgggtgcggcacgaggatgccggcggcgggacagcgcccgtaggcagccccacgggcagggcgcgcgggcggggcggggcgggccgggccagaggagcgcccggcatgtcgcaagggctcccggccgccggcagcgtcctgcagaggagcgtcgcggcgcccgggaaccagccgcagccgcagccgcagcagcaggtagagggcgagaggctcagggagggccgtggggtgcggggaccggcgcgccgcggggggcgaggaggtgggtgctggagtt

SEQ ID NO: 907182 - DNA, 565 bp, Homo sapiens
tgtcatcacatttttctctgactctagtcttctgtctctctctttcacgttaaggatccttgttattacactgagattacataatggttttcataatttargatgatctccttattgtaagatcagctgattagcaaccttacctccgtctccaaccttaattcctctttgccattataagggaacatattcacaaactctagggattaggatgtgcatctctttagaggactattaatctatcacagtgtaacctatactgaacaggagtgactccaagtggggttcagcaaaagaatcactgagaagccagagccattttggaattttaggcccctagcaggctgctgaagggttagaatgggaagctcatgggtattcaggagctcatggccactgagaagaggaagtctggaacagctgcatgagtccttgtggaattttttttttgtggctatagggtgttttcattcagtaagaaagtatttgagggcattggagagttggggacccgtgggtcagatttggtgatggactccccaaagggccagcattctgaggctct

SEQ ID NO: 907183 - DNA, 721 bp, Homo sapiens
caatgtatgagtgtgtgcatgcacatgtgtgtgtgcatgcacatgtgtatgtgcatatgggtatttatggagttgcagaatcttttttggtgttaatgctaaatgtaaggctcttcagaacttcagatcaattttatgctttgagatgttcaacataaataaaattgattacttgagggctgcaaagacaaatacaatgggaaaggaaacaatgtacttttgttcagtggctctttcactttaccatatggaaacaccattttttattaagctaaactctttatacagaatattttccaaagctatattagcccttaagatgaaacctgtttgctcaaggatgtatttgccctttcaaatctatatcattcaatagctatacaaggattgccatcattttaacttatcaatctgctttttatgtttggataaatatgttgacacacttaaaggttgcagtgtaaaagagcataggtgtcttagttggatttgagtcaacatttcagcaccccaacctttactaacttcatggaagaaataataagacttaagctttctcagcctgttttattttctgtcaaattctgtgcaaataaacgggaaggtacatgttaaggttgcaaaccacaataaatgttaattcttgccctttatcctcaaatggaatggtctagttacatttatttatttrtttgtttatttatttatttattttgagaca

SEQ ID NO: 907184 - DNA, 611 bp, Homo sapiens
aattgaaggcacataaaatatgctgtctaaccacaatgtggctaagtaaaaaaaaaatcaataacagacaartatttgagaaattttaaatatctcaaaattaaacacactcaaaataaccaatgtgtccaagatgaattcaaaagggtcttcagaaaaagcactgagatgatggctgggcatggtggctcacgcctgtaatcccagcactttgggaggccgaggtgggcagatgacctgaggtcaggagcttgagaccagcctggcaaacatggcaaaaccccatctttactaaaaatacaaaaattagccgggcatggtggcagaggccagtaatcccagctactcaggaggctgaggcaggagaatcgcttgaacctgggaggcagaggttgcagtgagccaagatcatgccactgcactccagcctgggtgacagagtgagactctgtctcaaaaaaaaaaataaaaataaagaaaaaagaaaatgcactgagatgaataaaaatctatacaacacatcaaaatttatgaaacatggataacacagtgcttagagaggaaaattacagctgaaacacttctattaaataagaacaacaaaaaatttt

SEQ ID NO: 907185 - DNA, 623 bp, Homo sapiens
tttttaaggtctgttggtctaagatagctttatggcattatgctggcaagaagtttaattattagccattcatacaactccagttagcatgcattgagatacttctgttcactatcagcctctgggtatatggcccagatggacttggttgtttcccttgccataattgtgagatgcctctaggctataagcactttcttccttttaaattacttcctatactttcctccaaaaattggggaagtttgattgttctctaaaactactctgtgctcccagggtattcagtgggacaacccctcctcctcctgtcctcagcgtttcaaacagcttttccaggaggcactttgctttactgcttcctgtgataataacactgggaccacagtgaaactgctgcttcccaaacgtccagaggtgaagcaggcactcattccctttaatctcaggtttctaaagactttgattgaccactgacactttccttgccctctaaattctttgcctcctcaatctcaatgtaagaaacaktctctcaggtgagatacactggtacagtaagcattcttccaaacctgtctgtctgatatcaggttgtgattttattagttcactttgtagtc

SEQ ID NO: 907186 - DNA, 585 bp, Homo sapiens
gaagcagccaggagggaggctgtaccctgcaaagccacaggggcagtgctgcccaagaccatggaaacccacctcttgcatcagcaagacctggatgtgagacatggagtcaatggagatcatcctggagctttaagatttaactgccttgctggattttggacttgcgtggggcctgtagcccctttgttttggccaatttctcctatttggtatggctatatttacccagtgcctgtacccccattgtgtctaggaattaactaacttgcttttgattttacaggctcataggtggaagggacttgccttgtctcagatgagattggaatgtggacttttaagttaatgctgaaatgagttaagactttggggtactgttgggaaggcattattggttttggaatgtgaagacatggaattttggaggggccaggggcagaatcataaggwctggctctgtcctcacccaaatatcatcttgaattgtaactcacacaattcccacgtgtcatgggaagaagccggtgggaggtgattgaattatgggtgcgggtctttcctgtgttgctcttgtgatagtga

SEQ ID NO: 907187 - DNA, 652 bp, Homo sapiens
cacagtgctaactgagaaaaatacaaaaccatcacactaaagaatgaagtactttaatacacacccaaataatacatgtacacataaggaatatttaataagtattcacggacaataaactttctcagacttctacaggcatgcttaaatagtatgttctaaaaaaaaagaaataaaattttatttcttctctaagctagatatggaaaagtctctatgtgtgtgcatgtgtgtgtgtaccccgacactaacattatattgtaagacatttcattgtcttagaaacacattacttaatgtaagctcagaaagacctacacaattcaggatcagtaaaacccaatgaaatattcagataatgttaccattgaaagagccatgaataatctctgcattaaaataataatcatggcgagcaacagataaaataatgttaaatatgtaaaagaattataatatcaagggttatgaatagtcaaaagggctcatgttttctgctggccattttgattcattatttaaaaattgatgaatatatgggtaataaaattaacttagtttacatttatgttttaagtctactgagtttttttcaagcccaccataacacccagycacacaaggggcctgcaaagttgctgtagagaactgg

SEQ ID NO: 907188 - DNA, 668 bp, Homo sapiens
ctgtgctttgaaagattcttttggaacttagaatggaatataaaaatgatacatattagctcatgtatctrtcctgtgtgtgtatacgtaatttaacatatggatatataattttgtgatttttgagtattagaacttctgtgacaggtcttgaaatttttgaaagataatcgtgtgaatttataccacaacgatgggatcctgaaggctatttgttcttagatattatcaccttatgctgagaactctgtagaaatgtaaactttactggattgtttctcccaaagacttaacaagtataataatccacatgatagcaattaggaagctagtgtacctctttctcactccagaatctgtagaactggacatggtaccaccaaatgaaacaaaacagctgcttctttaacataaccaaagggggaaaactcctttaaggtggagaattaacgaataaatcgtaaaatatacctgaaaatacagttttttctgtgactgctgtaaagacatcattccttcattctccacacacagagaagtgtattactatgcccagaaacaaagcctctgtgcttcaggtttctaataatctttttataaaatgcatttttaagtaaaattcttatataaaaatattgacagggaaatctcattatccacaatattta

SEQ ID NO: 907189 - DNA, 485 bp, Homo sapiens
gttgctgggaaagagaaaagctactacttattatatattaagttgtgtctagccactggccttaaaaagtgtcaaaatgagtaactttgaattccttggtaagaatgaaacacaaaggtgaaatcatatcttttgttgctttaaaaggctagaacgtaatgacatagtaaattaggatgtaaagatgaattattccattcatttatttttattgagtacctattaaattcaaaacactgttactacatcaatagtggtttaaaggaagttaatgagatgtgtcttctaacataaagaaatttaacatcttactggcaagataaaaatgtaaacaacaaatataggcaagaataacagaaaaactatagtatgttttctttatggctcactgttagctttctgaaacaggacctgtgacttggtacccaaaatatcatattakgcatttaatagcagttgagtgtgaacaagaaatgattcattcc

SEQ ID NO: 907190 - DNA, 636 bp, Homo sapiens
gcccattaactttttctctcataattattttacctttgttccagccatgtctgtgaaaattgtcatgtcctaagcctcaagctcgtataggctatacaagcaattcttgctatgacctattctagttcatagtttcagtacagctcataaactgtttaccagtaacctctagggttggtgtagatatgaacagagtaaagaataaaactgtttgctctttcccactggaaaccatcctaattaaacagtaaacaaaaaatgtgtttgattctactcatggttatgcctttgttctatttatattggaatctatccatggtatatgaaacaccaccaccaaaaacaacagctaaggaagatgggaaagccatacatagaattatttttgtctcctggatatttttttacaaaattttgtgtccttctggaagttccttccactcactcactattattaaattcagcttcaggtcctgcagtaagcatgttataggcagtatcctcacaacatctcataccatgttttattttattttggttttcattttataattaagaaaatgaaaactcaggaatcastgagtttctgactccaaaagcaaacacttaaaagtttgccttagaagagttctctat

SEQ ID NO: 907191 - DNA, 396 bp, Homo sapiens
ttttttttttttttgagatggagtctcgttctgtcacccaggctggagagcaatggcacgatcttggctcacygcaagctccacttcctaggttcaagtgattctcctgcctcagcctcctgagtagctgggattacagacacctgccaccgtgtctggctaatttttgtatttttagtagagatggtgtttcaccatgttgatcaggctgatctcaaactcccgacctcatgatccgcccatcttagcctcccaaagtgctgggattacaggcatgagccaccgcacccagccaataaaacagttttttattttgttaagggatccttcttctgttgtctaagaataggcagctcttgccatgaacctgagaacaaagaggtgcccgctctcaag

SEQ ID NO: 907192 - DNA, 577 bp, Homo sapiens
ctcagctgaatcaaatggctccatttccccagtggctgaagctgctgggtaaagaaaacagaatcagttgctccctttcatgagctgtggacaagaaaggctctgaaatgygaagcttaaacttgttttacagtctaggaacaaggtgtaagtacacctctgctggcttcccaagagctagcttccaaagcaaggtaattgattgcagcatcccacaaagtaagtaggcaacccatctttgacctgctggcatggcaaaagcctgacacgcatgcatgggcgctgtaataagaaagataatgcagccctggtgtcccaaaggttgaggagctcctagcaaagggttagagtggctaaaagggccctggagatgagccggtcccatgttcccccaagagagattcatggagagttgcctctccatctcgagttcattcgtatttggtgggtcccagggaaggagttggcagtagaggctggaacagcttgaaaaacaaagtctgttcatgttttaggaacattatcattggcttgaattccccaattggtatttggaaccagtggggaaacattcact

SEQ ID NO: 907193 - DNA, 577 bp, Homo sapiens
ctcagctgaatcaaatggctccatttccccagtggctgaagctgctgggtaaagaaaacagaatcagttgctccctttcatgagctgtggacaagaaaggctctgaaatgcgaagcttaaacttgttttacagtctaggaacaaggtgtaagtacacctctgctggcttcccaagagctagcttccaaagcaaggtaattgattgcagcatcccacaaagtaagtaggcaacccatctttgacctgctggcatggcaaaagcctgacacgcatgcatgggcgctgtaataagaaagataatgcagccctggtgtcccaaaggttgaggagctcctagcaaagggttagagtggctaaaagggccctggagatgagccggtcccatgttcccccaagagagattcatggagagttgcctctccatctcgagttcattcgtatttggtgggtcccagggaaggagttggcagtagaggctggaacagcttgaaaaacaaagtctgttcatgttttaggawcattatcattggcttgaattccccaattggtatttggaaccagtggggaaacattcact

SEQ ID NO: 907194 - DNA, 606 bp, Homo sapiens
atcactggtcattagagaaatagaaatcaaaaccacaatgagatacaatctcacagcacttagaatrtctatcgttaaaaaatcagggaacaacagatgctggacaggatgtggagaaataggaatgctcttacacagttggtgtgaatataaattagttcaaccattgtggaagacagtgtgacaattcctcaaggatctacaactagaaatatcatttgacccagcaatcccattactgggtatatacccccaaaattataaatcattctaatataaagacacatgcacctgtctgtttatggcggcacttttcacaaaaccaacgacttggaaccaacccaaatgcccaccaatgatagactggataaagtaaatgtggcatatatacaccatggaatactatgtagccataaaaaaggatgaatccacgtcctttgctgggacatgaataaagctggaaagcatcattctcagcaaactaacacaagaacagaaaaccaaacaccacatgttctcactcataacttggagttgaacaatgggaacacatggacacaggaaggggaacatcacacaccagggcctgtcagcgtggggggctag

SEQ ID NO: 907195 - DNA, 606 bp, Homo sapiens
atcactggtcattagagaaatagaaatcaaaaccacaatgagatacaatctcacagcacttagaatgkctatcgttaaaaaatcagggaacaacagatgctggacaggatgtggagaaataggaatgctcttacacagttggtgtgaatataaattagttcaaccattgtggaagacagtgtgacaattcctcaaggatctacaactagaaatatcatttgacccagcaatcccattactgggtatatacccccaaaattataaatcattctaatataaagacacatgcacctgtctgtttatggcggcacttttcacaaaaccaacgacttggaaccaacccaaatgcccaccaatgatagactggataaagtaaatgtggcatatatacaccatggaatactatgtagccataaaaaaggatgaatccacgtcctttgctgggacatgaataaagctggaaagcatcattctcagcaaactaacacaagaacagaaaaccaaacaccacatgttctcactcataacttggagttgaacaatgggaacacatggacacaggaaggggaacatcacacaccagggcctgtcagcgtggggggctag

SEQ ID NO: 907196 - DNA, 553 bp, Homo sapiens
acctttgaccattgtaatttgcaacagctaaccagcttgttgtaagaaaatggcaactataataaatgcgcatatatgtatacatatatattaaaaacaaacagaaaagcatactatagggagttggactgaacatatttacgacaacctaggagactcaaattaaacactggcagattgggtcctctgaagtacacaaagagggacacctatctccttatttaacaaggacattctattagggaaagtctgatggtgggcaaagttctttgttttccatggaacactgtgtaaccattttagcaatcggcaatgcaatctctctaaaatacctctatagctttcttctattcttgcacaaggcttgcactgaagcattttcagtggcaccccattttcaacttaccttttcctttccctgggaaacaggactctgctactctgaaaaccatgtacctcactggcctaattcagcatattcaactgatcsacaatatttatctctgagatgcatttatatctaaaattctttaggtacactgcccaaatgcat

SEQ ID NO: 907197 - DNA, 594 bp, Homo sapiens
ctaattttttgtattttagtagagacggggtttcaccatgttgccaggatggttttgatctcctgatctcrtgatccacccacctcagcctcccaaaatgctgagattacaggcatgagccactgcacccggcctccatgaatactttcaacagggagtgcagatgaccttctgaatgcagttctgagtgacaacatttagtttcctttttatgtatttaaagaggcatagaaagagaaaaagaaaaaagaaattcagaaacagtcataagggacttaaagattccattttttaaaaatgaagtctcataaacactaaccagtttaatttttttaagttttatgtgcccatgtggtatgcttaaagagacactatacatttatgtaaaagcaagagccagagacggaaggggacaattatggtgacccaacatggctaagatggaagaatttttctttttaaattttaagtacctgcacaccagagggacttaggtcaactggctactgcaatcccaatttctcaagttttccaactaggttggaagagggctgagggaccttttggctctccatggaaatttgaggcacgtag

SEQ ID NO: 907198 - DNA, 669 bp, Homo sapiens
atcagaaacctgcactcgaggactataatccatyttttgaagaggattaaaacaagacagcaattgcctgtgaatatcagtgtcctaaggtagtcacagtcaaaaacatgattggcaaagaaatttgatcacctctgtggtcaacaataacctaacacaataaccctaattatgattgaaaacacatactcagacatcagaattttagaaatcccatacattttgaaacacatattaacattattcactaaaatgtaacctgaagaagatcaaacaccactttattttgacaattccatgtgactaaacatgtcagataatcctgtttacctctgctttgaatgctccaggggtcagaaaagacaattttgaagctgaaatttgattttggggagcctatcaaatgtgttaaaggtttaaaacacttgacattatgaaatagaattccaggttaccataagtcacttatttagccaaaatgctgactcaaaaaaagaaggtaaaaacctttacacattaagagagaagacttagctttctaaacaatctgtctcttgtttttccctttttctttcggtagtttatttgcaaggcaaacaaaaatctttcatcatcctttaacattacctgaaaatcttaatcagtttgaccatgagctgagattctcct

SEQ ID NO: 907199 - DNA, 645 bp, Homo sapiens
taaatgtctgttgtttaagcatcccagtctatagcatcttgtgattgccccccaagcagactaagacactgccattgttcctttgtccctgtgtgatcctagaagctccctacagctcaccccagttagagatttcatctgttccttggaccagtggccccagccactaccatagcaactatagctgcgccccgactgtgcaacgccacttgcagcctgtgtttagacatcaggactcagcctggtctgctaaatatctggaagtgccactttctcactcaaattcttcctcttgccaagcagtctgatctgacaggggtcttgagcaagaaagaaagatagaacttgtcatctttgcagtacataacattctatagagtaattcataacttgcccctttcccacttctcttacatacatccttttgtgaccactaacattccaaaatcactgaggaaatgaaataacatattgtgaaatgcaatataaaattattctcatgatcaaaattaaatatcttgttgcaacctggaaagaaaaataacacagaacagaatagccctaggaggctgcctccaaactggaggagggcaccggctgattttcaggmtaagacatcaccaaaggtgacaagaactgaccgtc

SEQ ID NO: 907200 - DNA, 591 bp, Homo sapiens
tatgttttcttctaggagttttacagttttaagtcttatgtttaactttttaatccattttgagttgatttttgtgtatggmgcaagattaggatccaatctcttttacacatggatatccagtttttccaataccattcattgaagacactaatgtttccccactgtttactctgggctcccttggcaaagagcaattgatcactttttgtatagattaatttctgggctctctattctgttctatttgtctatatgtctatcgttaggcaagaaccacagtgttttcattactatagctatattttgaaatcaaatagtgtaacacctccagttttgttctttctgaagattgatttgtggtcttctgtggttccatataaattatagaatttctttcttttctatttcaattaaaatgccattagaattttggtagaaattgcattgaatctttagatttctttgggtagcatgaacattttaacaatagtatttcttgcaattcataaaacataagttgcctttttatttatctgtgtcttctttgacttctttccacaatgttttgtagttttcaatatacaagtc

SEQ ID NO: 907201 - DNA, 588 bp, Homo sapiens
ccaaagtgctgggactacaggcrtgagccacctttcttcttttaaagactgaatgttatttgaatgttattccattgtatgtatataccaccttttctttatccattcatgcatcagtaggcgtttgcgttatttccatttcttggctattgtgagtaatgctgcaatgaacatgggtatacacacaccttttcaagatcctgctttcaattcttttggatatatagccagaagtggaattgctgggtcatacggtaattttgacggaccaccatactattttccatagcagctgcaccattttacattaccaccaacagtgcacaagggttctaatttttccatgtccttgccaactgttacttttttttagtggccatcctaattggtgtgaggtgatatctaatgtagttctgatttgcatttctctagtgattagtgatgttgaacatcttttcatgtttgttggccatttgtatatcttctttgaagaaagtctattcaagttctttgcccattttaaaattgggtaatgtggtttttgctgttgttgggttgtagaagttctttttatattctggatgttaa

SEQ ID NO: 907202 - DNA, 584 bp, Homo sapiens
taaagatttgataagagcagaagaaacattagggtttatataaaatgaggatrtattatacagattggaccttatacaattgtgggagctggttaaatgtttatgtacagctattgtttctgtgtttcaggctggaatctgaaatcagaaaggcaggcaatgaggaaagaaagatggacatgaactgggggcagcaaaactggaacctgcaaagacaggttaaaacctacaccagtttctcactgtccccaagcctccatagagtggcattggtgggagaaataggtacttttcctcatgtagctgaagtgtgtctagcccaggaatcagtgaagcagaagacattggcccagcagaatctggaggagctacagacccagctgctgtctcatcctaaccaggcaagccagcagaacagtaacagcaggtaccaagcaccaatgccttgtgtgctgcaccaaccttgtgagtgtaaagtgaatacggctcctacttcacgttcaccttcctaatctcacacaattgttggttgtggcccagctaacccagaactatgtagagaattctggagatgtagttccagc

SEQ ID NO: 907203 - DNA, 615 bp, Homo sapiens
ctgcaggtgtctctagggaccagggggagggtgagaggacagaagcaaaagccctgcaggtctttatcattctggtcttgggtctagagtctctgaccacctcatacgtagctgaggaaagccctggtaaccatcaaacatccatttttatttcagaaggtggagctactacacctgccctctgtccccactgtccccagcttagggatgaacatgaggatgcttctcttcctgagaaagtctgctccctgcccaaagactccagctgagcgaagctcttgtaatttctggcctcacctgggcagtttgcctctatggagtcttccagattgggagtcactaaatttcctggcttctgccattcccaccttgtcctctggaggcactgtctcatgacttggccccagtcctttcagaccaccaggaccctggctaagggaatgggcagctgcccccggctgattaggttgctggcctcagaaggcataacaggatactgcaacttgaagtaggtcccatcagctggagcacttaccaacagacaaacatctcctcragatttaaagcattcaatttctgactgcttaagaaaaattccataagggaatttgagtt

SEQ ID NO: 907204 - DNA, 673 bp, Homo sapiens
aaatactaacttctacctcacccgctatgaaaggcaccagttgtcaaacattcttttaatgtgttttacataattataacamagaaaacagagggaaaatcaacagaatagaatccctaagaaatgatatagtgaattctaaaataactgggttttgccgtctcacgcatccctttactatcaatttcagcataaattattttatagacacagagaaaacaaatataaaaggtatttacagaaataagtatgcattcatagtaatccagtaaagaagctaaataagttttgctataatgaacaacgtagattatcagctttagtattgtcatagtcatgaaagtgtgtcagtggaaaacacaaatacactcaaaaatttcttacagcatttcttttttctaaacagaacacaaaagtaaaacaatataagcagatttgtgtctgtatttcgggtattcaaaaatataggttatataaaaataatagttttaaaatatatattccacaaacaacttaggtaaatattacagaggaaacaaaattttattttttctgctttctctaaatttgatgtttgttactggaaataaatattttcaaaaataattttactacatatatacaaaaccacaaatattttgcatggctttaaacatgtttcatattgttgaat

SEQ ID NO: 907205 - DNA, 535 bp, Homo sapiens
ctttgcctgccaccatccatgtaagatgagacttgctcctgcttgccttctggtatgattgtgaggcctccccagccatgtgaaactgtaagtccattaaacctctttttctttccattctttggtatgtctttrtcagcagtgtgaaaatggactaatacagtaaaatggtatcactagagtggggtgttgatgaaaagatacccaaaaatgtggaagtgactttagaactgtgtaatgggcagaggttgaaaaagtttagagggctcagaagaagataggaaaatgtggaaaagttgggaactccctggagacttgttgagtggctttgaccaaaatgctgataatgatgtggacaatgaaatccagcctgaggtggtctcagatggagaggaggaacttgttggaaagtggagcaaaagtgactcttgttatgttttattaaagaacctggtggcattttgcccttgccctagagatttgtggaactttgaacttgagagagatgatttagagtatctggcagaagcaattt

SEQ ID NO: 907206 - DNA, 654 bp, Homo sapiens
ccagtattggcatttccatgaaggaagaacagttttattccaacttcaagttaatatgctcatacttagtttcactttcctatcctttcaaagtcatttgcaactttcttttgaactaaaaaaygtgtgtaagtacatattttttgcaactttctgacatctgatctgtggcaacagaaagctttaaagaatatctagtccactatagtcctgagaagcactcaaatgatttttctgcatctattgaaattcttcaatctcaatgtgagagtttttaatttaaaaaaatgtcaggattgactccttcttatcaatatttctaaatttaactttattatggtaagagcttgtggtctgggtcattgattttggggaatttaaatggaatccttttttgatctaataggtattgtattccttctttaagattaaatgagactgcctttgtgggtcaaatatatagtcaacttttgtgtttcctatgtgcttgaaattaaattacatatgctctacatgtgattatataaattgctcttcctgaatctagaaagccactcaaatgtgctttccctttgcatcactcacatctgtagaatctttgctaattcagtgtccattttaattgtgtgattgaagggtactataatatattct

SEQ ID NO: 907207 - DNA, 620 bp, Homo sapiens
atgaccattttggcaatattagttttccctatccatgagcatggaatgtttctcactgtttgcttcatctctgatttctttgaacagtgttttgtaattctcatagcagagctctttgactcccaggttagctacatttatagatattttatacatttttgtctgttgtgagattgtgttctagatttggctctcagcttggatgttgttggtgtataggaatgctgctgatttttgtacattgattttgtattcagaaactttactgaagttgtttatcagatcaaggagcttttgggcagagactataggcttttccaggtacagaaactgaatcagtagcaaacaaggatagtttgactacctttatccctatttggatgcctttcatttctttctcttgcctgattgctctggccaggacttccagtactatgttaaataagagtggtgaaagagggcatccttgtcttgttcaggttttcaaggggaatgcttcyagcttttacccattcagtgtgatgttggcagtgagttcattgtagataggtcttattattttgaaggatgttccttcagtgctagattgttgagagtttttaacatgaatggctgttgaa

SEQ ID NO: 907208 - DNA, 657 bp, Homo sapiens
agtttttaacatgaatggctgttgaattttatcaaaagcctttcctgcatctattaagatgatcatgtgctttttgtttttagtttttgtttatgtaatgaatcatatttattgatttgtatttgttgaaacaaccttgcatcccagggataaagccgacttgatcatggcggattagctttttgacgtactgctgggttttacttgctagaagtttgttgagaatttttgcatctatgttcatcaaagttcttggcctaaatttttctttttttgttatgactctgatagattttcgtatcaggatgatgctagtctcatagaacaagttagggaagagtacttcctcctcaatttttttgaatagtttcagtaggagtggtatcagctcttctttatacatttggtagaattccactgtagtcgatcaggcgctggactttttttgtttggcaggctttttgctactgattcaatttctgaacttgttattggtctgttcagggattcaatttctttctgrttcagtcttgggaggttgtatgtgttcaggtaacttatctatttcttctgttttctagcttgtgtgcatggaagtttttgtaatagcctctgaaggttttgttgttgttgttgttgttgttatttctgtggtgt

SEQ ID NO: 907209 - DNA, 650 bp, Homo sapiens
cacagtcctcttgctgcggtccacggcaaagttatgtgctcacttcattctcctttccctttcccacatgaaaggtatctctctccacactgttctgcccttgcttggtaacttgaaaatgtccttcctaacctmttcaaggtatcttttcttatttctgtgccacgcctaggactcccatatagtgaagactagtaatatctcacctggattccttagctcttgtaaaggtatttttcttgcaaggatagttgttcaaattgatatttctgcaaagggataaaggttattttgccatcttgctggagtcatttctcctaagtatttttttttttacttttatatattcaaagccatgagttcacactgatgcctctaattccaattctaaccattctagttttctctctttccgtattataattgccatccctaacaattaaaaacctagctaccattatctttaatatatttacttatttgatcaatccttttatgtaaccaatctctcatatttgctcccagactcttccttacgtggatatccttttcatactacttgggctctaatatcgcatgttaggttgccaattctgtgaggacatcctccttacccccacttgatctctgacctcccacatcagagtgaa

SEQ ID NO: 907210 - DNA, 558 bp, Homo sapiens
acactgtttctataaacactttagacacagtgagccactcttctcagggaatggtggaaaccctcccaattccaatttccttaacaccagccaagggccagccttgcatgcaggcctttctaaggatggcagtctcttgcctgctatatgaaatcttttctgcacaatgcttatagccccaatttaatttttagtgttgttttaaaattttattttaataacacataatattataagataaggtaacttggtactaatttctgttgtatgatccatcttaagttgcaatgctggttactttttgacttttggtgactaacaggtatttgtatataagttaccatagcaatgttaggtaattataatctgtcctttttatctcattaagctttcagtaaaattgttaaattaaataagcataataatttgagttaaaattagaataaaaattgtattttattttaattacatgaataatctagttttcatattgtgctaaatccctgtttagaattatgaaataagataaartattcaatcatttttatcaatattttc

SEQ ID NO: 907211 - DNA, 618 bp, Homo sapiens
gctgtcccctcagcctaaaatgattgtctttcccctctgccttccccctcctggtggattctccctcatcattcttttaagcrtcagttttggggtcacctaaactccctgtgctcttttgcattttccttagcactgtacctatacttaaaacattatctgccagccaggcacagtggcacatgcctataatcccagcaatttgggaagccaaggcgggtggatcacgaggtcaggtgttcgagaccagcctggccaacatagcgaaacctcatctctactaaaaatacgaaaaaaaaaaaaatagctgggtgtggtggcaggcgcctgtaatcccagctactcgggaggctgaggaaggagaattgcttgaacctgggaagtggaggttgcagtgagccgagatcgcgccactgcactccagcccaggtgacagtacgagactctatctcaaaaaacaaaaaacaaacaaacaaacaaacaaacattatctgccatgtgtctgcctccttcattagatcagattggaactcactgagggaaaggactgtgtattatttatctttttattctcttcatctaactccatgactgaaacatagtgaggatttgataaac

SEQ ID NO: 907212 - DNA, 600 bp, Homo sapiens
ctttttcattattaaatgtggcccaattagtgatctggatccaactaatcaaaatgatgttcctttttggtaggaagaattcagaaaaggcagrcatggtataggagaagcattgataattttgtaattatctctgagtttctgttcccagtccagcaagaggcacatataaaaaggatgttctggtgaatgctcattttaaaaaataatcttactctaaaccattctagctctcttcataatattttacttgaatgttcaccaattcctccttcctatctatataactgctttttgtttttgccttttgtatgattgctgattttttctacttgatctattaaatcttaataaagttagattaaaatagccttttatgatggtagacttgttaatttccccggtaattacaataaattttgctttctatgttttaaagctatgtcattaatgcctacaattttaaaatgttcatatttttccagtgaattgaaacttttgttaattaacagcacctattcacaatgaaaatgaaagctctataggcacatgcgtcaacatagataaatctcaaagacataatgctgagaaaaacatgca

SEQ ID NO: 907213 - DNA, 669 bp, Homo sapiens; identical to SEQ ID NO: 904124

SEQ ID NO: 907214 - DNA, 640 bp, Homo sapiens
agcttgatgaggatggcattgaatctataaattaccttgggcattatggccattttcacaatattgattcttcctatccatgagcatggaatgttcttccatttgtttatgtcctcttttatttcattgagcagtggtttgtagttctctttgaagaggtccttcacatcccttgtaagttggattcctaggtattttattctctttgaagcaattgtgaatgagatttcactcatgatttggctgtctgtttgtctctcattggtgtataagaatgcttgtgattcttgcacattgattttgtatcctgaaactttgttgaaattgcttatcagcttaaggagattttgggctgtgatgatggggttttctaaatatacaataatgttaagaaactcgctgaaaaccactcaactacatggaaactgaacgttctgctcctgaatgactactgggtacataatgaaatgaaggcagaaataaagatgttctttgaaaccaatgagaacaaagacaaaacatacaagaatctctggcacacatttaaagcagtktgtagagggaaatttatggcactaagtgtccacaagagaaagcaggaaagatctaaaattgacaccctaacatcacaattaaaaga

SEQ ID NO: 907215 - DNA, 602 bp, Homo sapiens
taattactctgtattgaagtgaggactgtccttagcaaagttttgaatacaatgcttttcctttaaatacaactgcctatatcataatttactgaattttagttcataattttatacagcctcagcaaatgttctatggataaaataattagttctggtttttagaacccctaatttcatacaaagaaccatctattaaatttattgataaatctgttaaagttagttgtgtccagtatatcctcaaattaactaagaggcaccttatttatgacactttttaatcttactcttaatatttacctgattctcaaagagaatcttgtttcatttttatttcattctgaaaggctcaaagtaataaaagcatagaaaattaccaagttagtaatctcaactgaaatatatttaaaacaatcttaacactttttcaagtacattatttcatcaacttgatcatttagatcgtatactagcttarcttagtaattataaagatgaaggctgaaaatatcttccaaagtgcttggaaaatatgaagaaataattccccaataatttgaaaaatgcaaattattattagtataaaaatgaacagaaca

SEQ ID NO: 907216 - DNA, 602 bp, Homo sapiens
taattactctgtattgaagtgaggactgtccttagcaaagttttgaatacaatgcttttcctttaaatacaactgcctatatcataatttactgaattttagttcataattttatacagcctcagcaaatgttctatggataaaataattagttctggtttttagaacccctaatttcatacaaagaaccatctattaaatttattgataaatctgttaaagttagttgtgtccagtatatcctcaaattaactaagaggcaccttatttatgacactttttaatcttactcttaatatttacctgattctcaaagagaatcttgtttcatttttatttcattctgaaaggctcaaagtaataaaagcatagaaaattaccaagttagtaatctcaactgaaatatatttaaaacaatcttaacactttttcaagtacattatttcatcaacttgatcatttagatcgtatactagcttaacttagtaattataaagatgaaggctgaaaatatcttccaaagtgcttggaaaatatgaagaaataattccccaataatytgaaaaatgcaaattattattagtataaaaatgaacagaaca

SEQ ID NO: 907217 - DNA, 360 bp, Homo sapiens
cacactcatggactctagcgcaggtttgggtacattcagggggcctagtaccacaggraactggagggtaaatcactgatgcaccacaatggcaggttaattcatcaaaacctggtggagcagcaggtaaaacaaaagaatcctttctgagtttgggatgtgcaagtacatactaacacacacaaacacacacatttttgcttgtatttttagaggagaatttatgggggtgctacttttttcaaaagaggtttttattttattaaacttttattttattaaagctaagctggtgaaaaaggcatgaacagatatgaagtttcatttattactatgaccctgacaacttcccaatacttt

SEQ ID NO: 907218 - DNA, 604 bp, Homo sapiens
agacctttgtcagatgcatagattgcaaaaattttctctcattctgtagattgtctgttcatgctgatggtagtttattttgctgcgcagaagcactttagtttaattagatgccatttgtcaatttttgcttttgttgcaatggcttttcgtgtttttgtcatgaaatctttgcccatgcctatgtcctgaatagtatggcctagattttcttctaagttttttatagtttggggttttacatttaagtctttaatccatcttgagtttatttttgcataagatgtaaggaaaaaaaggaaatctattccccattgcttgtttttgtcaggtttgtcaaagatcagatggttgtagatgtgcagtcttatttgtgagttctctattctcttccatcagtctatgtgtctggttcttgtaccagtaccatcctgttttggttactatagccttgtagtgtagtttgaatcaggtagygtgatgcctccagctttgtttttttttttttgcttaagattgtcttgaatacaaaggctcttttttggttccatatgaattttaaagtagttgtttttctaattccataaagaatgccaatggtagt

SEQ ID NO: 907219 - DNA, 658 bp, Homo sapiens
tccacatggctactgttggctagtcaatatkttttcagcttgtacaacgttggaccataccttgttttcaaaatgttagctattaattggttgccgacattaataaatttaattaagagattacatataagtatgtggatttatggctttaaaaaatatagacctacatgctcatatatatgaattggctgaatgtgaataattttcaatggtccctacccctctccattggtccctggcattgagtctgactgtaactaccatttatctttatgctagtcctgttgttttacttacaatgcagttaagataaaaatgacttctttatcgccattaagcttctaaatttgcaatctataggcatctaaatttgtcttccacagtctagacatcctgaaattggagcaaagtcaattatacttctaggttaactgaactttctctcaaataattccttgaatactaccatgtttaacaaaacatgctgttgtatgtttcatggtgtcaggggaagattgttttttattactgttatatccgtagctcctagagtaatgctcaaaatgtagtaagtatataaaaattgtatgatggatggcaaactaggatatgatgcaattatttactatggtccctattttcaacctttcataagcac

SEQ ID NO: 907220 - DNA, 505 bp, Homo sapiens
gcggatcacctaaggtcgggagtacaagaccagcctggccaacatggcaaaaccccatctctactaaaaatacaaaaattagctgggcgtggtggcacacacctgtagtcccagctgctcaggaggctgakgcaagagaattgcttgaacccaggaggcagaggttgtagtgagcctctgcagtgatcacaccactgcaatgcagcctgggtgacagagtgagactccgtctcaaaaaaaaaaaaacaaaaaacctttcttggcctcagttccctttctaggtaccctctatatctctccttcccatttcaaaaaaacttctttaaagggttatctgtagaaagaaacttcaatttctgttctgccatttcctttcaaacacacccagtcagactttcacctcctgttattttgccaaaactatttatgtcaagcacactggtgacttctaaaccacagaatccagtggtcagttttcagtagttaaccttacttgatctgtcag

SEQ ID NO: 907221 - DNA, 426 bp, Homo sapiens
gaagagcacctggctgtatgaggtgttagtcggcccctactgggaggtatctcccagttaggctactcgggggtgagggactcacttgagaaagcagtctgtccattctcagatctcaaactccgtgctgggagaacctctactctcttcaaagctgtcagatagggacatttaatctgcagaggtttctgctgccttttgttcagctatgccctgccaccagaggtggaatctacagaagcaggcaggcctccttgagctgcagtgggctccacccagttcaagattcctggctgttttgtttacctactcaagcctcagcaatggyaggcgcccctcccccagcctcgctgccgccttgcagttcgatctcggactgctgtgctagcagtgagccaggctctgtgggcatggaaccctccaagc

SEQ ID NO: 907222 - DNA, 581 bp, Homo sapiens
agcttgtattgccagccacccaggcaggaatgtggttgccaagcacactggctcctgcaatgatttaccacttccaaatgttacatttgacaacaaatctaagaartgcagctttctcagctagaagcttcctgagttggatcttctgtcactgctgcttggctttggtgtctccatgaaggaccagttagttttatgcatctctgcttgccaaagctcaatcccatgacttagactctgcacttcaggttgccttcatctttcgtgttccactaacagacccaatcaaaccaaaggtctgattgaattaactggttgagttaactggcagcccagttcaagaaggaggggaaggggagagcaaactaaaaaaatgcatttgttgaatacaaaagagactaaatgaaaaccacttctctgagtatatggaatgctacacaaacaggatgtctgaaaattagtatctgctatatgcaaggagaatgactgtcacatatgcccagttgaaaccaaatcataactttcaaattgagaggtaaggtaaaaatgtatatttgtgaattgtacaggatattagaaat

SEQ ID NO: 907223 - DNA, 557 bp, Homo sapiens
agcctgtattgtgttatgtttaactttacttgctacttcttcctgtcataagactgtaaagtgctttggaggacagattgcaactgctcatctgtgtagtctgcactataaaactattgaattgaatttmgttaaaatgggcaaaggtaaattctgatacagtgtgggtgttttgcaggctctctcaaactagcttctcatctcgtattccctcagtaaatagtacctccacccattcaactgctcaagtttgaaatgtaggataatgttttgatgcctccttttctctcagtttccaaacacaatagatcaaaaatacagattgattttacctccaaaatatttctttgatccaactagttttcctcattcccattgtcattattctagtccatgatccacacgtattctcctgcaaaggaccagacagggaatattttaggggttcaggaccacatatgggctctgttacatattcttcatttttgttattattgttttaacaagtgtcttagtcaatttaggctgctacaacaaagtaccagagaatgggtggc

SEQ ID NO: 907224 - DNA, 729 bp, Homo sapiens
ccaaagtcaggcttctttttggaataaactatcaattgctaggaataattattttgtgagattagaagtaaaatgaaagcacacacttatagatcgctcataggctccagtagcgttgttgtagttgagctatatttctaaacatatggactttaaaagggtttaatttccttcacctagagttggtgaattttacacctgttttaatctgctattctctggtttgtctgtgttacataattgaattcacttcctcccttcccccatgggttttgtcttaaattctcacaacagttcccataggaaataggaaccaaggtacattgcacttgcctttcaattcttcttttaggttaaagtatgtttgttacaactgcaaatttgaaagttggttttaagtctctgattattttttggttaaaatataagctaatattaggaataatcatataacttgaaataagactaaatatattgtctttaaaccaaaattaaaaagacttctactttgtggcacttaaagatatgattaatagaaagttagttttcaaactcctacagaaatgtgaagatattattcctaatcccaactttgtctattctatcttataaacctctttcaacttttttctcttttttgggtccattctgctatttttgtagttttcaccatcrtcacctctaacctaggcttctacaatagcttcccaagttctctctctttttttc

SEQ ID NO: 907225 - DNA, 638 bp, Homo sapiens
ggctataaaatagccttaagtagggctgacactgaaatgtgtggggtccagtgcaaaatgaaactgttgactgcttgttcaaaatacagtttgaaagctttyccctttcttctgcccaccatctctgtcttgatttgttacagtgttttgtatgtgttatttaatgttgtacttcttagagcacaaggtttgttgggctagtgcagaccatcacaagtacctggtgcactgtccccacccaaacactcctgcacccaaacccagcaccctttcagaggcagagggcagtgctggtcactgggtggaagccaagtagcatgaggccaagaccctgtcccaggaagaaagggatgtaacgggcaggtagatgaatggaggcttcatcacgctttacttacaaaacataaattcaaggatacaatcactaaaaatttcaagatgctaattgcatccttctacttgcaggaacttgatgacactagtagcacactcatgacacctgccctggttttaggccagaggagaaggtaactgcatttcaatatagatttttcctgggcacttaaactcagttagctactactacatttaaacaacacatgtgctactatagctatttaagatgttaccattgcggg

SEQ ID NO: 907226 - DNA, 558 bp, Homo sapiens
ttttttttaagtaagcttatgtttggttagtatttactatgtggatacactgatctgcagttctcaagtaccaaattcaagtgtaagtgaatttagattttatcaataatcctttytgatgcagcacatataaaaaatgttaagggaaatgtgcctgatgccagctcatctttgaagtgcagacattataagtcaatcacctataagaacatagtttccattctgcagtatatatgtgtacaatgtatatttcctgactaaaggtttattatcaagaaaactagctaccaaacagcacatcagcacatcagctagcctcagacccttaacaaatttgcttttcttttttttttcagagtccacagagctattttattattattactattattattattattattattatttttaattatattttaagttttagggtacatgtgcacattgtgcaggttagttacatatgtatacatgtgccatgctggtgtgctgcacccactaactcgtcatttagcattaggtatatctcccaatgctatccctcccccctccccc

SEQ ID NO: 907227 - DNA, 565 bp, Homo sapiens
aaagcactatgtataataaaaatttggattatccatcctaagtattcaacacaagatccatagaatagaatrttgttaaccattactaaaaattcttaaagactattgtataataaaatgaataaagctggaaagagtactatagagaaagcaaagatgcattttatgtgtaaacatacacacatgcaatacatgtacacatagatgtatagaaaaatactgaaaagaattagaactagaatgttcgtcactgttccctctcaccagtgagattatagaggatttttcttctttttctttcacatacatttctgcattttcccaaattctccaaaatgtattttgtgaggagtggtaaactggttccagggctccatacgttcattgcccaattttctgatgaaaatatttctactagtaattgcactcctagaaatatagtctatcaaaataatcaaatgtacatgtagagttttatgtactgggaatactgattgcaacgatataacaaaatttacaaccttactaaatgttatcagttgagaaatggttaaataaattgtag

SEQ ID NO: 907228 - DNA, 616 bp, Homo sapiens
agatcagaaaagtaaaccaacaaagagaatggagagtattaagtacttcagctcagtgccaagggaaggacacttggccaaggacagtgcttatgatgggaggctgtgwgcagaagagccagagaaagcttccaagtggagttgacctctgagctcaatcctgaaagatgagtaggggatacacttctagacaggatggcgaatatcagagtaggtagaagagatgacaaatggttagagagatcaggacccatttaaaaatctctgtcattagacctggcatctagtgaagttgagcagcaagaaggcatgccctttcttagtgacactttctttaaacatatagttttcaggtagctagttcagattttctcaagtgttctttattttgctttcttacatgctggttgagaacttgtatataggaagtgatctaaaacttcatgctggtcttgttcacagcaaatttgtaacaccttctgaaaagcaatgtctttcttcaaaggcttggcacagtgaacatcttttgtcttggaatggtctcatttcagatgttctgttgtcttttatgaatatacttgtcccactgtttacaaaacagagacctttatataag

SEQ ID NO: 907229 - DNA, 529 bp, Homo sapiens
atcaaataccagtgaatacacactttaaaacaaaaaactgacaattatagtaatgacaaggatgtggaccacctgcagttctccaacactatgtatgtgaacataartcagtttaaccacttggaaaagtgtttatttttcactaaagttaaaaggatgtgcattaaatctagcaattgcattcataggtgtctacccaggagaaataagtgcatgtgtgcaaaaagatatttacaaaaatacttaacaatagcagaatatttgcaatatgctgaaactgtaaataatccaaatgtccatcaacagaagaatggataaataaattacatgtgtagaagggaacactttatatagcaatgaaaaagaatgaattggggctatacacaacaatatggatgaatcagagaaatgttatttttaataagctaatctcaaaagaatacagtatgatttcatttatataaagttagacaacagggaatgctaatcaaggtgatagaagtcagaataatggtgagtttggagtggg

SEQ ID NO: 907230 - DNA, 611 bp, Homo sapiens
acttaccaaattcatcttccaactctaggaaagatagtyttgtgatctactttatgttcaaattatctttataaattatattttattatgtaagtccatcttttcatcccaagtaggacttctcagaaatctccttggactgaaagaagtaatagttattgaaatacagtatttcaaaaaaagatgacaaatacacaacatagaaaagagaaagagaaaaaaactggcagaataataacaatagaggtctcttactctcgttatttaagccatagaaattctagttacactttcatctggcatcccaattgaagttctttaaggcattcagcatgtcaaccttctcaggatgtttcttcatcctaaggaaaagagtaacgtgcacttcagaagtgttcactttttaaaaattcatttctgaaaatagatgctagccttctctgacttcgtttgtagtcaagtataaggtccttaacgctcactgtctcctgggataattagctagacaagtaatttaaagtaacacaaatgccaaagaagaacaataagaaaactggccatttttgctgggtgagttatggctcctaatgtctctgctgtcatttggaatg

SEQ ID NO: 907231 - DNA, 600 bp, Homo sapiens
gtctaggagctatgaattgtcccaggctgagagcaagcaagaatgtagggacttcagttttgcacctgcaaaaaaattgagtccttccaataatcactgaacttggacaaggatcccaaacttcagatgagatcacagtcccagctaacatcttcatttcagcctggtgagaccctgagcaaaggactcccaggcctatgaacccatcccaggactcctggcctatgaaaatgtaagataataaatttgtgttgtgttaagccattaaatttgcagtaagttgttgcagagcaatagaatacaaaagcagtatagatgtactgaacaaaatcaatatatttgtgaatatatttcttaatacccccttaattattaaatgcaaatatgtacttcaagaagaattaaattaattcatgaagaatcggtaaaagtttagtttataattcataaattgactataattagtcaattttctctaaatatagatgttgaaaaaaatgtatatacayttaatatgatcgctgtagataatattatctgaaattttgctttaaaagattttgacatatttatcacttgcacaaaagatatattgaacag

SEQ ID NO: 907232 - DNA, 597 bp, Homo sapiens
actgtactactcaaagcaatctacagattcaatgcaattcccatcaaaataccaaagacattccttatagaaacagtaaaagaattctaaaattcctatggaaccacaaaagaccccaaatagtcacagtaatactgagcagaaagaacaaatgtggaggcaccacactgttagacttcaaaatatactacaaagctactgtaaccaaaacagcatagtactggcataaaaacagtcacagaccaatggaacataataaagaacccagaaattaatctatatattttcagccaactgatttttcaacaaagacaccaagaacatacattggagtaaggaccctctcttaaataaatggtgctgggaaaactagagtccataaacagaagatgaaactagacccctatctctcgccatccacaaaaatcaactcgagatggattaaagatttaaaagtaaaaatcaaatttgagwgaacattccactcaacatgtgctgtaatagttgagcccagatcagctgcaaacaagatcagaactttcaatggaaattttatgcaagtagaatcaagattctgaagtattttttcaaataatt

SEQ ID NO: 907233 - DNA, 387 bp, Homo sapiens
ttctaaaacaatcattagtttgatgtttaaatgttttgaatttctgatttccatttctttagaatgcagtagaaattacagattattcctttaccgccttttaaaatgtaaagtcagtctgtagtctataaattgggtttcctttgaatccacaactacactagagtgaaaggtatattaccactttgatttctgttcaagaaagaaatatattcagtattataaagagaaattgaagcaggctgctggatagtatatctgatttgtgactttcttggatttggtgacaacagagatgaatatttcactcttagttttttaaaaaagctgttgaagttgcattggctattawttttattctcttctttcccagaagagtctagacta

SEQ ID NO: 907234 - DNA, 608 bp, Homo sapiens
ttttaatattggatacatagagttctgtattgttaaataaatattatttttattattctttttttggggaaaatagtcttgctctgttgcccagtttggagtgcagtggtgagatcttgtttcactgcaaccttcgcctcccaggttcaagtaactctcgtgcctcagccctctgtgtcactggaattacaggcgtgcaccaccacacctggctaatttttgtatttttagtagagatggggtttccccatgttggccaggctggtctcgaactcctagccccaagtaatctgcccaccttggcctcccaaaatgctgggattacaggcatgagtcacagtgcccagtctgttattcttgaaggattttatttttacttttttcaaaccaactacttgaattggctacatacaaatttggaaagctctctaaattaagcaaacttcttgccttgtcttaaggtcatttatttccaaccaatcacacacagatacagatacagacatatgcgtttattttagaaaccctcataacttgacccatactttgcagcccctggcatcacatacaattattttttataygataaaataaatcagaccattcaa

SEQ ID NO: 907235 - DNA, 649 bp, Homo sapiens
ctcttcaaggagaaatataaaccactgactgctcaaggaaataagagaggacacaaacaaatggaaaaatattgcatgctcatggataggaagaatcaatataaaaatggccatcctgcccaaagtaatttatagattcagtgttattcccattgaactaccattgacatttttcacagaattttttttttaaactattttaaaatttacatgaaactggccaggcatggtggttcatgcctgtaatcccaacactttgggaggctaaggtgcgtggatcatctgaggtcagaagtttgagaccagcctggccaacatagtaaaccccatctctactaaaagtacaaaaatcagctgggtgtggtggcatgcacctgtaatcccagctactcaggagggtgaggcaggagggtcacttgaacccaggagggggaggttgcagtgagccaagattgtcccactgcactccagcctaggtgacaaagtgatactccatctcaaaataaacaaataaaataaaataaaatttacatgaaaccaaaaaacccatatagccaagacaatcmtaagcaaaaagaatgcagctcagctggaggcatcacgctatccgacttcaaactatactacaatgctacagtatccaaaacag

SEQ ID NO: 907236 - DNA, 656 bp, Homo sapiens
aaaagcaggctagcaatcaagaggggctagaaactgaaattytggataggggagtaaaatgtctaatgtcaggacccaatttacagatcttaaaatatctgaatcattaaatattggactattggaaaagcaacagttttaatcaatcaacaattcaatcactgtaaattattttgagcacctgtggtaagttcaaaacagttcagttagctttcatttgttttatatgtggagtgatattacatgctgcttcagtgtaggaattatgttcaacaatggcatgctttgaccactagaagcacacaaaacatacatgttaatttataaaggtgaacaagagctgaaactattagtccaatagtgatagggagacttgggtttttcttactgctgaattgtgttctccatcaccctactccaaaagggccttaatcttaaagtgaaaattaaaacaaaggctattagtgtggaaaggatcgtataggcttcctagaatacccttctatttaatgtatgggtctcctaataatctaaatttatgtatgctcatttgtgatgtgattctcacaagcctgatcttatgttcagttgaaacatgaagtgatctatctgtgggatctgagaggctcctagaagttgccacttcaggatacaaa

SEQ ID NO: 907237 - DNA, 587 bp, Homo sapiens
taacctaaatttctttatattttattatgtttagtaaagctaacatcattttagatactgatagtttgttttcatcttaaaggagcccataattaagagttctgaaaaaaattgagaaaatattaatttcttaaaatgtatgtatatataaagaataaaactatatattgtcatgataaacacacaaatgatttgagtggattctgatgctttaattgcagatacaaagacataaaacaaacatgccctacataaaatgagcttcatttaatttcttgaaattacctagtcgatatgttagataagatatttaaccactttggccctcacctaagtctactcacagaaaaagtatagcactttggcatataatctcaaagatttcttccagcaatacagttctggtgtgtacactctttaagcttcatttactacctcttcgtgagtgttccaatatgtcagtgctatagtgtagaagaggtcatctagtagagtggttaagaaggcaggaagacccagccctgccatttctagatctatagaattggaycactgcttaaaatgtatatataattttctaatttggg

SEQ ID NO: 907238 - DNA, 587 bp, Homo sapiens
taacctaaatttctttatattttattatgtttagtaaagctaacatcattttagatactgatagtttgttttcatcttaaaggagcccataattaagagttctgaaaaaaattgagaaaatattaatttcttaaaatgtatgtatatataaagaataaaactatatattgtcatgataaacacacaaatgatttgagtggattctgatgctttaattgcagatacaaagacataaaacaaacatgccctacataaaatgagcttcatttaatttcttgaaattacctagtcgatatgttagataagatatttaaccactttggccctcacctaagtctactcacagaaaaagtatagcactttggcatataatctcaaagatttcttccagcaatacagttctggtgtgtacactctttaagcttcatttactacctcttcgtgagtgttccaatatgtcagtgctatagtgtagaagaggtcatctagtagagtggttaagaaggcaggaagacccagccctgccatttctagatctatagaattggaccrctgcttaaaatgtatatataattttctaatttggg

SEQ ID NO: 907239 - DNA, 595 bp, Homo sapiens
gcattagattctcatagaaacctgaaccttactgtgaactgcgcctgccagggatctaggttgtgcactacttatgagaatctaatgcctgatgacttgtcactgtctcccatcatcatccccagatgagacagtcaagttgcaagaaaacaagctcgctgctcccactgattctacatcatggtgagttgtataattatttcattatatattacaatgtaataataatggaaataaagtgcacaataaatgtaatgtgcttgaatcatcccaaagccatctcctgaaactctgttctgagaaaaaattgtctttcacaaaactggttcctggtgccaaaaaggttggggactgttggcttatagtatttcatacagtagcatactgtacaggttgtaagcctaggggaaattggctataccatatagcctaggtgtgtaatagtctataccatctaggttcctgtaagtacactctgtgatgtttatacaaggatgaaaccacctaatgatacatttctcagaatgtttccctgtctttaggcaatgcaagaytctatgaaaagagaataaaagcaaattgtatttattatatt

SEQ ID NO: 907240 - DNA, 541 bp, Homo sapiens
aatgaaaaaccgtgacttcaggctgctgaaagcctaaaataaaaatwaaaaaaaagaacaaaaacaaaatataaggaaggttggacaagcttgcaagttagataataatatagattctctttggttttatataatatattcatatcaaagaatgcttttacaacatctcttaaatacccaaatctgattctcttgtgcttacattcaaggattttctttaagaaaaaatggtatgactaggtctacattagaaaataattcttgtaattttgtggaagagatgtaaaaaagcagaaactgggaaccagaaaaagggcaggaatagaaagatagttcacaagcaattctggtataattatgaacagatgagaggcaaggtatgagagagagagtgagtagtaaatggtgattcaggggttttagcaatgtgaggacaaaagagagagcaggaatgagagtcaacagaatagtaggcacagatggggatgtatcagaaggctccacgtgcctccaactatcatacagtaaaagcacatgtgta

SEQ ID NO: 907241 - DNA, 670 bp, Homo sapiens
acagagacacggcgacacacgtagatatgcttctagcacacaacctaagtgtggcactgtcattacaaacaataggcacctggcctcctttctctttgctctaataagagatggcttttgtaatcaggaaaacgatcaaaatgcccagtccaaagaaccaatagagacaagtgaactgaaataataacttcgcctcttgactttgtgtgttaattggtgattctttcttctgaactccccttttgctcacaggctgttgtgatgctaaacgatgttgcaatgtgaacagctaatgtgcacctttgctggtagctgtctttcccacatatgccttgattttagtgactgaatgttagcaattgctgttacacatctggactgattgatgagtgaggcagccttacatgtctatggaaactgtaaaaacaaattgatcaggcctttctactttatcttccctgaagatctcatttttatactcagatttattctatttgacaacagtcattagagatacctttgtgtacattttaatgagactgatactrttctggaggtggaagactggtttggacttgtggttgttaaggtgcagagttttctaactaaaagatgagaaatgagctccagaagctaataacatgaatatggttcctctcagagattgttt

SEQ ID NO: 907242 - DNA, 673 bp, Homo sapiens
tttttcctttgtggtttcttctattccttttgagatcagtttccttctgttatgggctgaattgtgtcccctcaaaactcatgttaaagtcctcgccttcagtatctcagactataactatagttggagatagggtctttaaagaggtaattaatttaaaatgagataatatgactggtgtgcttataaaaagacaagatgagacacagacagacatagagggaggaccacgtgaagacacggagaagatgacgatctataagccaagaagagaggcctctgaagatcggttttattccctgctgacaccttgatctatgacttctagactccaagactgtgagaaaataaatttctgttgttgaaaagcctcccagtgtgtactactttgctatggcagccctagcaaactaatactatatcctccaacctccaaaattctgtaaaatgctatacaattctattttcttctgtcttttctatggctttatttttcagttgacttctaaaatttatttgtatttttttcttgaatctaaattgatatatatttcccccaaattgctgaacagctaacccatctacatgtattgtctattttaatgtgggattattttagcctcagagatataattgtctggaacayagggaaaactttttcagatattgctgc

SEQ ID NO: 907243 - DNA, 577 bp, Homo sapiens
taacaagtcacaatcccttaaccatcttgatgttttcattccctaagtttcatttacatccagttctgaaggatctctgtagtctttagtgaaaagataagctttttgaataacrtttcagattaaagcaatctaaaaaccaaaaaaaatactctttcagcttctgtgaaagtatattctctgttttcatttttaaatcttgagatcaaggatttgaggtaggggctattaaggtaaagatgagagggaagcagagagagaaaaagagggatgaagataagatgggatggtgtggataaaagaaagagagttgtaagcataaaagcatgagggttatggcttgtcttgcaaaatagaacagatgaagtatcctctccaatacaattttcttcttttcttaccctctgtgctaagataaattttcttttcggatcatgattatggattaatttatgacttcccttaattgtctgagcaacgcagggttaatgtcctggtaaggacaagttctcttttactttatgagagcaatcacttaacgaaaattaggctattactttttatctccttctccttg

SEQ ID NO: 907244 - DNA, 288 bp, Homo sapiens
tttaaaagtgagtttgtttacatgtcgttgggattaaaccaccaccttgacctctgtttattcatgtcttctgattccagtrttactcagacattgtggccctttatgtgccagagagtaataacattgggcttcaactcacacgtcctcacatctctatctggccaattctcttggggtcaaatatcttgagagctgagtgtatgtgaggcagtggggagacaaatacctctgagagataagacaaagaccctgcatgtggaggttatttgctctttccgagaggcg

SEQ ID NO: 907245 - DNA, 609 bp, Homo sapiens
taaactagtgataatcttcactcttggaacctttagatgctatcatgatgttagcacagaagataaatttataatgttgcagtgaggtaaggaaataaaacatgtaagtctttgaaaacaacactatgagagcccttgcaggctaaaaattagacaccaaagcattttttgttacttttggagaataaaagaagtgtgcccctcaatgtcttatgggagaaaatatatagtttgatacacttgtcaatatctctaactcaaaaatgatgagtataaggagtgacccttattgtagtcttatatttctctccaacaattaagagagttggtggggatgttttttccatgagttcatcccgggccccaggagattttcatcttgtattctctttataatcctatcttagtgtttcatcctcatggctaagttcagcaatacttctgcattccagccagtaaaatgtgtaagaagagatgtaaaaacaaccggctttgtctttatggagattaacttaaatttatgctcataatataattcatgttatayttgatcaaaattaatcactgataagagactatagaaggtaatctgcttgtggtcatatgtac

SEQ ID NO: 907246 - DNA, 672 bp, Homo sapiens
gatgaagggactgacctcgaagaagaggggagtccacaatcctcggatattagaaggaaagtacagtagctcccctttgtccatgggggatgcattccaggatccccagtggatgcctgaaatcatggatagaaccaagccctatctacctatactatgttttttcctatacatatgtaccgatgataaagtttaatttctaaattaggcacagtaagagattaacaatgatacccaataataaaatagagcaagtgaatgtggtctctatttctcataactatcttagtgtactgtactatgggaaactgcaatcacagaaatgaaactgggtaagtgggggctacaggaaagataaatctggctatagtaagttcataatgaatagtattgggatttggaggcaatagaccaaattgcatcaatgtttctagaaaatagttggcaacgtctttttgttgagaatgagatgacaggtaaatggtctgaggacatggatcttgaaattcttggtttctggcaagcaatccccccaaattaaagtagtttaagtctgttttaaggtaaacaaacaaacaaggcagtttgtaccaagatagaaaagagcatttataagttytacccctaagagtagaacttcagagtatcaaaaaatactattataagcaaaag

SEQ ID NO: 907247 - DNA, 458 bp, Homo sapiens
aggcaccccttatcctctgttgcttagaaagaaatcttttgttcarttccatggtgtcagtcctcacactgtcaacctgcacctaatcccctggtttgtggtctttgcccggctcctctggatgaagtggggaaagttttacttgcatcagttttctagggctgctgttacaaaggaccacaaactgggtggcttaaacaacaggcatgtgttgtctcacagttggaggctagaaatccaaaattgatgtgttggcggggtttgttcttctagtgctgtgagggagaatcttctccacacctctcctaacttctgatagtttgccaaccgtcttgtgacattccttggtttgtgaaatcatcaacaggatctctgccttcatcttcacatggattctccttgtgtgtctgtacccaaactgcccccttttataagaacaccggtcatattggataagg

SEQ ID NO: 907248 - DNA, 615 bp, Homo sapiens
cacactgaagtacaaagaccaatgatactatgaagcaactacataagtaagtctgcaaaataaacagctaggatcatgattacaggatccaaattcacacataacaatattaaccttaaatttaaatgggctaaatatcccaattaaaagacacatagtagcaagttggataaacaaccaggacccattggtgtgctctactcaagagatccatctcacatgcaaagacacaccaggctcaaaataaagggatggtggaaaatttaccaagcaaatggaaagtagataaaaacaggcgttgcaatccagtttctgacaaaacaaactttaaaccaacaatgattaaaaaaaaagaagggcattacataacggtatagggatcaatttcaacaagaagagctaactatccctctcctaaatatatatgcaccaaatatagaagcacccagattcataaaacaagttcttagagacctacaaagagacttagactcccacacaataatagtgggatgctttaacaccccactgtcaatattagayagattgacaagacagaaaattaacaaggatattcaaaacttgaactcagctctggatcaagtggacctgata

SEQ ID NO: 907249 - DNA, 604 bp, Homo sapiens
  misc_feature 1, 2, 3, 4, 5, 6, 7, 8, 9, 10, 11, 12, 13, 14, 15, 16, 17,18, 19, 20, 21, 22, 23, 24, 25, 26, 27, 28, 29, 30, 31,32, 33, 34, 35, 36, 37: n = A,T,C or G
nnnnnnnnnnnnnnnnnnnnnnnnnnnnnnnnnnnnnatagaaaatcctaccggcacttttttgtttttttktttttgtgatggtgtctcactctgtcacccagactggagtatagtggagcgatctcggctcaatgcaacctctgcctcccaggttcaagcgattctcctgcctcacagcctcccaagtagctggcaccaccggtgcccaccaccacgccaggctaatttttgtatttttagtagtgacgcggtttcaccgtgttagccaggttggtctcgatctcctgacctcatgatctgcccgcctcagcctcccaaagtgctgggattacaggcgtgaatcaccctgcctggcctactggcattttaagttgtaaacacagtcttccatcagaactgtggaacattcagcaataatcacaattcttcattttctttagtattgaaacttttcctaccttcaacaggatcctgctacctctgggctgctggcactgggagaagggggcaaagttcttctctctttcttgtgtttcagcaatcacaccctgctgtcagctctagactctgcatccttgtcatcccaatcagaatgcctttt

SEQ ID NO: 907250 - DNA, 579 bp, Homo sapiens
gatttaaaaaattgtgctttaatgtgtataaaacttggtgatttttagttaagtcctatagatgggcagagaggcattcagccaagtatatacatttgataaatagttaggggatcaattagctctatggctacaaaatgcctattatcccagcctgtcatcacagcaaagctgttttctaagaacataaggaagatcaaaccaggacagaatggcaacccaaggcctgtaggtggaagtggagaattgatgctggggccttatcaaataatggcagagagcctgcgatagcagagtttgtcaccagcagatggaactcccataggatgactcagctaggatactgagatgttgtgcttcaatgtctgagactcatttctctacagtttctctcttttgtgtttcatagattcttgttcaatcgtgtttcaaactattctggtttgctaagaatcttccttgtcacttcctcttttcttcacgaaatttccttgtctctgggtttcaatcctagtcagttccttctcttycttctccttacccctggtactagatgtatttattgctgtcactagatgt

SEQ ID NO: 907251 - DNA, 481 bp, Homo sapiens
agcatagcaagagtgacctttgctccagttccaaataagttcctgatctccatctgaaaccacgtcagcctggacttcattgtccataacactatcagcattttgctcaaaaccattcaacaagtctctaggaagttccaaactttcccacatcgtagtgtcttattgtgagccctccaaactgttccaacctatgcccattacccagttccaagtcacttccacattttaaggttatctttatagcagtgccccacacccactaccaattttctgaattagtctgttttcatactgctatgaaaatactccctgagactggataatttataaacaaagagacttagttgacttacagttccacatggctggggagtcctcaggaaacttacaatcatggtggaaggtgaaggaaaagcaggaaccatcytcacaaggtggcaagagagagaaagcacaggggaaactgccactttgaaag

SEQ ID NO: 907252 - DNA, 667 bp, Homo sapiens
aacaaatgatattatcaaaaggtacctcagaaaactgtcccaagaaattgaacttcctygggtcacactttcctcccatggctttactgcaagtaagaaatacccctacaaaattaggtctgagccctttcaagattctgtatggatggcctttcattacaaataatttcctattaaaccaggaaacctctgaattggttaagcgtgtaacctctctggctcactttccacaggaactaatacaactaccagaagcccaaccccaaggaataggaccaccattatttaacccagaagatttggtatttgtaaaagttctcccttctctctccttccataagcccaggctaggaaaggccctacactgttctcctttcaaccctctcagtgacaaaagttacaggaatcaaggaatcaactcctggatacatcacactcaagtcaaagcctggaaagctgagggagcaaaccctgatagcctaaaaaaagtcctggctatcaatgcaaaaaaaaaaatagagcttaagctgaaaatcataaaagataagtaaatgagtgagggctactcatcctactgagtgccacccccatgttaccagatactgtcaatcatgtttacttttcctcttgagattcaccatcagatattagaacttctttattacac

SEQ ID NO: 907253 - DNA, 401 bp, Homo sapiens
tgactgtcagcggtacctccggactcgggcgggtgggagcctggcgggcaccccacgccgtccrgtgggcccgcccttggactctcagcgcggccccagccccggccccggcctccctgacccaccctgctctcccactgcaggcctcttcggcacaggaattcggtcctacttcaccttcctccgcttcctgctgctactcaacctgctgagcctgctgctcaccgcaagcttcgtgctgctgcccctggtctggctccgcccccctgacccaggccccaccctgaacttgagtgagtgtgaggcccaccaggggaagtgctccggtgcccacctgcgccatgggggggctggcccagggcccagagcgtggcgacaacgctgggcgtggtcctgccgtg

SEQ ID NO: 907254 - DNA, 558 bp, Homo sapiens
aactaaaaaatttactaaggaaatttcattatacagttagaagcattaacaacagaatagataaagctgaggagagaattttagagctcaaaaactggtcctttgaatcaacacagtcacattaaaaataagttttaaagaattttttaaaatgcacagcctccaagaaatatgttattatgtaaggagaccaaacctatgactcattggcatccatgagagagaagaatagagagtaagcaacttagaaaataaatttgaggatataatccatgaagatttttccaatcctgctagaaagaccaacatgaaaattcaaggaattcagagacccctgaaagatatcatacaaaatgactatctgctaggcacacagtcatcagattgtctaagttcaacatgaaagaaaaaaatctcaaaggcaactagagaaaaggatcaggtcatttacaaagggaaacccatcaggctagcaagggacctytcaaagcagaagaaattggagaactattttcagcatccttaaaaaaaatccaactgagaacatcatatccctcg

SEQ ID NO: 907255 - DNA, 607 bp, Homo sapiens
ttacaagggatgtgaaggacctcttcaaggagaactacaaaccactgctcgaggaaataagagaggacacaaacaaatgggaaaacattctatgctcatagataagaagaatcaatattgtaacaatagccatactgcccaaagtaacttatagattcaatgctatccccatgaagctaccactgactttcttcacaaaattggaaaaaactactttaaactccatatgaaacaaaaaaggagcctgtatagccaaaacgatcctaagcaaaaagaacaaagctggaggcatcatgctacctgacttccaactatactacaaggctatagtaacaaaaacagcatgttactggtaccaaaacagatatatagaccaatggaacagaacagaggcctcagaaataacaccacacatctacagtcatctgatctctgacaaacccgagaaaaacaagcaaaggggaaaggattccttatttaataaacggtgttgggaaaactggcyaaccacaggcagaaaactgaaactggaccccttccttacaccttatagaaaaattaactcaagttggattaaagacttaaatgtaagacctaaaaccataaa

SEQ ID NO: 907256 - DNA, 526 bp, Homo sapiens
ttggaaacaatctaaatatccatcagcaaatacatggataaatataatttggtatgtccatatgatggaatattatgcagcaagaaaaagaatgaaatattatatatgttatagcatggataaatcttgaaaacattatgctaagggaaagaagccagttgtaaagactacacattgtataattccatttatataaaatatccagaataggaaaacatatagagatagaaagtagatttattcttgcctagggctaggaaaagtagggagtgactgtgaatgaatatgggatttctttttagggggacaactgttctaaaattgatagtggtgatggttatatatccctgtgaatatactataaaacactgaattgtacattttatatggatgaattgtgtagtatatgaattatatctcaktaaatctcttttatgttttttgaaggaaatagtgggagtaactattttgtgtattttgtgtattatgttttttgaaggaaatagtgggagtgcaaagatcctga

SEQ ID NO: 907257 - DNA, 645 bp, Homo sapiens
tcacttttagaatagatttttctatttctgtaaaaatggcattgggatattgataggaatataattttctttttaatattgccmttatctgacatagatatcaaggtcataccagacctcatagataagttgggaagtgttcactcatttttaatagaaattattagcttaggttcacctccgtgtatatcaatttcttttttttcctttttttctttcatctcagacttccccgctagtgtcattttccttattcctaaaatttatattttagaagtctctttaacagaggactgctgctagaaagtatctcatttttgtttatttgaaagtgtctttattgtactctcattcttgaaagatagttttgctgggtatataattctaggttgacagttgttttactctcagcactttgaaggtatcaatagttaccaagcttccagttttgctaatgtgtgtataaaaacagattggaaataaacacatgaacaattgtgaacattctgcccagtgcatttggagtgaactatctgtccttcttgccctcatcactttacatcctcaaatggaaaacatgattctcttgactcttgtgtctagcattctcttgcttcttaaaaaagccttactacatatatatgc

SEQ ID NO: 907258 - DNA, 646 bp, Homo sapiens
ataaccaagaagaatatatgggcggagaggaaataatatttatctacttggatatagggaaaatttagttaaacgaaataatttgtaaagagcaaatgtagtttatacaattagagcatcaatatcagataaccctgacatagttttgaccatataaataaaacagtgcaatacagaggttatacatttaaacagaacaaactaaggaatgtaagatcaaaactgtcataacaggaaatgtaatcctttaaatgactcatttgagaacctaaataacattgaaaaactagatagccatgaaatgttactagatcttcaaaaagcatgaaaaattacactgctgtccacggtatttatatagtcaaaatatttttcaacctcatcatttacattggcttttgttttaaaagccaattttgttctaaaaaaataaaaagtaaaggaaaaaaagatccaaatatctgtcttattttcaaccaatctaaaatcataaaagtaaacgaattcacacatacaacaatctacaaaagtatttacaatattacggtcatggaaatacacacacacttccaaatgtgcagtgccaaatttcytgaagcctctcaaaagtatttttttcaatcgttatggcttcaaaaaaaatagt

SEQ ID NO: 907259 - DNA, 552 bp, Homo sapiens
ctctcctgagttccagaccaacacagccccctgactgcagacttccccatgtggatgtcccatagataacctcaattcaccatctcctttattgcagcttttatcttttctccaaaatttattctttcttccataattatctctttagtggagtcacaatcaaagccaaaagaatgaaaagtcatccctgatcctgcctgctcatcacttcttcatggactgaatgatctagacctgtcaattacatcactattcatgaatgctttccccatctcctcacaccatcattatattctacctggatgagggcagtgttctcccagggtgtcttcttgcatcctgtcgggcccaccctgctatctctcctccttattacacactcagatgctcagttacttcccatgagtctctctccttaaaattctyctctagatccctatcctagttaacagcataatgtcgcaattcattctaacaaagtccctaattatttgaccctgtctgttttttcccatcactgtcctactattcatcccttcattcaaacaactg

SEQ ID NO: 907260 - DNA, 582 bp, Homo sapiens
aagaaaatacaccattaattatattcagatctttatagtaaccaaaacaaacaaagaaatctaaacatgtatttattgagttctcacagttgtatccagctctgtgttatagcacagaaaagcatgcaatttaatgcataataatatctaattgtatcatctttggtgttgttggggctcagaacacaatccccaaattatggcgctttggcatgctgagtacttttaaccaaaggaggttggaaggccttagaagcaactttagaaccaaggtctttctgactttcccatcctcctgttttccatccttctttctcccttgaagcaagtgatggaaaccagaatttatcttccttaaggtggatcatagaaactagaaccattctccccaaagcaagccataaaacccaggactattattctaatctccccctgtctttctgtgtaggagctggccataaagaaattccctggcctgctttatcttactgtaggtcataagacccttgttccagagggatcctgccccatacctgggaggaaggaatgctayacagagaggccaagaagcatctgaataaa

SEQ ID NO: 907261 - DNA, 676 bp, Homo sapiens
gccctttgcatagacactcattcacttttccatgtctttcatcctgcaagaccactcagagtctatggagaaataaatgattcccaaacagatgacaawgtcaatagtagattaatatcatctcaaaagcatgtaaattgtgcatctgttcttaatccttaagacaataacttgaaattattgagtatgtaaatatttagtaaatgaatggtattaacttattcctctggcaacacctggcagacctaatcacccagcaacaaaactggccttaccttaaggagtcacacctcccaaggaagcacagcatgcaacatcgcaaaccaaatcactatattctacacatggaatcataacgaggatatatcaagggaaaaatattgcctttgggttttttttgaaatccttcttcaactcttctttgcatgggctaatagctgctgtaaaattctattccctgtctgagcgcccaggtgttgtcttcttttatgcttttattcccagagtaccgttgcccattttaaggacttttttcttcctttttgtcctaggcagaaaattgtttctgatttcctttctctctttgtcttttcttaattcagactaagggtaggtttcagcttctctctttcaagagccatgtttccggcagaagtttacagcacatgaggtaaca

SEQ ID NO: 907262 - DNA, 526 bp, Homo sapiens
cttccattcagtttctgggagtacaactagctgacagccttcagctattacagatttgaggatgccctcagctttcaaacccaggttacaatcttctggggaagcctctggacaatgtctgagcatgataggaacactaagaacatagtcatttctgcccagtgtgggggtccactaatgggcaatgttttctctgaagctccccatcaggattttacagaatgttattgcctgatattctctcttctctaatcctgctcctgctttcttttctttcattggtgtcagtggtgaaaaaatgatcaggatgaagtttataaaaagtcatgactggagaatcacaataccaaaccttgaatttgaggactaaggcaatgtcatttgcagctgagagttacaagccttttgaaaattacctcttggtgtgctactgggccatggtagagatgaaatactsaactaggggacatcaactggccatgcaccaggaactgcgtatcatgagttggattctatggaagcctct

SEQ ID NO: 907263 - DNA, 686 bp, Homo sapiens
tcacacagtaggctctctgattgttgatagtcttgtggatgtctttctagtctatcaaaatttagcaacttgtgtttaaaaacaaagaaataaactttagtccctgtgttttcggtgtcctgggtactttttttcatgtattaaattgtgatgttttggtctgtgtacatgtgaatttttatatctgtgtgtgtgtgtgtgtgtgtgtgtgtgtgtatgaggacttttttctaaaatatatatggtccattttatcatgaacaaggttatttattatgataatatggtaacatttacaaatgagcttttcatgggtacagttatttttctgccctgaagggaccactctggtttgattcactagctctgctgaagaatacatacaattgtttgtggctttatgaaacgctggcttactgaagtgttcattttagacgaatgaatttttaattttttattaagtcaaattttttatttaaatcttttgcattattcacatagaataacagaatcatatattttttaattgtggtgaaataaatatatataacataaattttgccattttaaccattttttaagcatrcaaatcagtggcattaattacattggtagtcctgtgcacccatcaccactgtttccaaaacttttttatcactccaaacagaaactctgtgcccgttaag

SEQ ID NO: 907264 - DNA, 691 bp, Homo sapiens
gctggcatgtactaaactagaaaacaaagtcaaaccaaaaggccagatcacatagggtctgtgggtcaaaacaaagccttttagattaatgcatagtgtaatgaaaacccacttcagtattttcaacasaggagcttcttgagctgacattcgtttttaatgatcactttgcaatggtgtggagaatattacagggagccctgtggaaggcagtagcagtattccaaactagagatgatggtagcttggagttgggtgatggctgtggagatggtaagagttgggtaaattcctgtatattttgaagatattcctcacagaaaatggcactcaaactaaagggaaataaatggtttagtcaaaatacaggattggaatattgagatattccctaccttgagagaggataaaatttaaaccaaagcaaattgtagatggattaaaaattcaacgcaacccctatcaaaataccaacaatgttcttcacagaaacagaaaaacatgatcctgaaatttatatagaacacaaaaaacacagagtagacaaagcaatcccaagtaaaagtaacaaagctagaggcatcacattacctgacttcaaattatactacaaaattatagtagctatgacaaaatggtactggtgtaaaaacaaacatatagaccaatgggatagaatggaaaacccatc

SEQ ID NO: 907265 - DNA, 619 bp, Homo sapiens
caaagtcttttattagtacattattttatgaagacgttaagaggtttccattaraagaatttgtatgattcttcactgacagtaagtgacttttaattacactaaattgttatttaccatctgaataaaaacaataatacaagaagacaaaataagataacagagaacaaagcaacaaatgagtcattttgtcagcagaacaaattgatactatacactaagtgccctacaggatgtgttaaagttccccgctgagctatataacagaaatacagtgcaccctacagatggttccaagtcaaaggctatcattaaaaaaaaaaaaaaaaaggcatccaaagtttttaagagaaagaaatacataaaagagaaggaagaaatacataaaagagaggatgatttttctgcaacattacacaattatttctaatttattataaacgaatacattaatgtgacaatcatatcaatgataccttcaatttttattatgctgctaactctttaatttattgatttaatttattaatgtacttgtggtctgccaaaaaattaagaactgacaaaatttaccattagttttataattcagagccttacaagcattatctaataatag

SEQ ID NO: 907266 - DNA, 650 bp, Homo sapiens
attgtcttggctatatgggatcttctttgattccatataaaatttaaagtrgttttttctttccaattctttgaagaatatcaatggtagtatgatggaaatagcactgaatctataaattactttgggcagtatggtcattttcatgatactgattcttcttatccatgaggatggaacgtttttccatttgtttgtgtcctctcttatttccttgagcagtggtttgtagttttccttgaagaggtccttcacatcgcttgttagctgtattcctaggtattttgttatctttgtagcagttgtgaacatgagttcattcatgatttggctctctgcttgtctattggtgtatagaaacgcttgtgatttttggacattcattttgtatcctgaggctttgctgaagttgcaaataaatttctttttatttctaccagaaagagggtttattagaaagagtatgctactatattatgtaactcagtgtgcaatgatgactaaaactgagttgaagaaacagtgtttttgtctacctaaaagagtggcatcaatctgatagagaaatgactttctattggatacagaccaagcaggaggcttttctttttggacttaaaaactgggtaggccacgaaataggtatcaat

SEQ ID NO: 907267 - DNA, 642 bp, Homo sapiens
ttttcattttaaattcttgcaatgttttaaacattatttgcatctatcacatttttccttgtggttaacctacttttgaatacacgtaactaattagcaaacatgatttttgtttgtttgcctagcataaagttttgtacctaacagtcatacactgagaagatcagaaagaaataataggaggtggtaaataagacatttctcttatttaacctccaacttattatcattctttagggaacttcatgaggatcaatgtaaaaagatttagagtaattatcagtggcactctaaagttgtctgcatacaaataggacactaataaatcaggtgtgtgtgactcaaagaaagtaattattagtaaatttgtctgtcaaatatatttcatttaaaattttctgactccaattaatttcatttcaacatgcagaaataatcccaagaagcttattactcattctgaagaaacagatgctgtaaaaaccaagaatagtggaataaaatctttttgttaaataagacatctagcaaaagatattcccttccatctgtggtctmattatcaagagattccaggatattagacttctagactggcatcatattttttaattactgaggaaagaaaaaggaactaaaaaa

SEQ ID NO: 907268 - DNA, 636 bp, Homo sapiens
taacagagagtgcgttaagttgagagtcttgtagagacaattaggagctagtggaaggggaggttgtgattgtgtgaggtatccaaggaagcaggagggatatacgtagggaaagagcaaataagaaggtaaagagggtgctctggaagacaagattattttatctagtctgagttaaaggtaggagtaaattgctgtcaaaaggaaggaagattgaagaaagaaggttgatgtgattaggattttcatcctggtaggagctacagtatatagtcctattgcaaagagtatggttagtatgctgttttcacttaccttttttaaggaggaaggggtttttccacaggatcagtggtaggagcctttttagtctgggatgtttccttctgaaataggagatgtaagtcctccaatggttcacaggtgtatcgagggtggtctggctgatcttgggactcctgagctgagggtcctgcaggttcctcaggggatgtccaaagtttaactcgggtgtggtgagtccaagwttccactcctgccaccttaactgcagtgggggtagagaagattactgagtatgttccttcccacaaagagtccatagatgggcaggtagaggggagagatttgaccaac

SEQ ID NO: 907269 - DNA, 600 bp, Homo sapiens
caggcattgatgattcagggtggagctggagggcagaagtgcatgcttccgacatttcagggaccttgccatggtgtgggagggcagcctggggttcctaagccccttcagcctctgctgaaccaggttgcctagcatacatccatcatgtggctgccggctgggccgctgcttccaggaaatcaattgcaaaaacctgcgattgtcagtggctcacacactggaggccatccagggagtagattaaattgtatgaaaaaatagtacagggctcaagaccgctcgtaatggagacccctcggtgacctttctgcagaagttaaaagaacacaggcagacatactctcacccttgctcaccaacgtgctagcccgcctgccaggagcatagcccctctgcccttggaggagccgcgcctcattagcaggaagtgggaggcctggtccagggcccagtctgcctgtgcatggcaagaaggccagcaggrgcacctgcttccctgcagggtggacccaagttgaccatcaggccttagatgcttaaggtcactgagccccccttctccatgccagccctcttctgcttcccatgcaggcacca

SEQ ID NO: 907270 - DNA, 291 bp, Homo sapiens
tcctgtgctgttctcgtgatagtgaatgggactcatgaaatatgatggttttaaaaacaggagtttctctgcacaagctctctctttgcctgcaaccawccatgtaagatgtgacttgctcctccttgcctttcaccttctgccatgattgtgaggcctccacagccactggaactgtaagtccaataaacctgtttcttttgaaaattgcccagtttcaggtatgtctttatcagcagcatgaaaatgaaccaatatagtaaattggtactgggagagtggggcgttgct

SEQ ID NO: 907271 - DNA, 616 bp, Homo sapiens
ctgatcttcgacaaacctgacaaaaacaagcaatgsagaaaggattccctaattaataaatggtgctaggaaaactggctagcatatgcagaaaactgaaactggacccattccttacaccttatacaaaaattaactcaagatggactaaagacttaaatgtaaaaccctaaaccataaaaaccctagaagaaaacctaggcaataccattcaggacataggcatgggcaaagacttcatgacaaaattgccacaagcaattgaaacaaaagctaaaattaacaaatgggatctaattaaactaaaagtcttctgcacagcaaaagaaactatcataagagcgaacaggcaacccatagaatgggagaaaatttttgcaatctacccatttgacaaaggtctaatacttagaatgtacaaggaacttaaacaaatttacaagaaaaaaacaaaccctgtcaaaaagtgggcaaagtatatgaacagacacctcaaaagaagacatttatgtggtcaacaaacatttttaaaaagctcaacgtcattgattattagataaatgcaaatcaaaaccacaatgaggtaccatctcatgccagtcagaatggcaattat

SEQ ID NO: 907272 - DNA, 693 bp, Homo sapiens
ttaagtcccatctatttatctttgtttttgtttcatttgcttttgggttattggtcatgaagtctttgcctaagccaatgtctagaaggattttttcaaagttatgttctagaattgttatggtttcaggtcttagatttaagtttttgatccatctggtgttgatttttgtataaagtgagagatgaggatccagtttcatccttctacatgtggcttgcaagtatcccagcaccatttgttgaatagggtgccctttccccactttgtttcgctttgctttgtctaagataagttgactgttaagtgtctggctttatttctgggttctctattctgttccattggtctacatgtctatttttataccatgtattttataccatgtatacaacatgtttataccatgttgtttcagtggtcttatagtatagtttgaagtcaggtaatgtgatgcctccagatttgttctttttgcttaatcttgctttggctatgtgggctcttttttggttccatttcacttttagaatagttttttctagttctgtgaagaatgatgattgtattttggtgggaattgcattgaatttgtagattgcttttggcagtgtgctcatgttcacaatattgattytacccatttgtgagcatgaaatgtgtttccatttgtttgtgtcatccatgatttct

SEQ ID NO: 907273 - DNA, 624 bp, Homo sapiens
cggcaagtgactttttttttttttttttaaagaaaaggcaaaataaagctgaaaatagtaygtgagtctgtagcaatggcaaatctcataatgaaatttatataggctttcagtgtctgtggatttgagaaaatgtatcttttctttttgctcctttgctccatgtccaggcctttatgcttcctgacaacctactgcttatggagtgggctgctgacctgctcctatgagctgaggacaagggtaactgtgggattgggctggagttttttctgtactgatttcatccttaagacaccagcagtttgatgcatgagtatttctgtcttataaaaacaacaatggcaacataatttactgagctcctatcatgtgctagcattgttctaaattcttcaaatgcgtaatccgatttaattaatcttaataggcggaggcaaggggaaaaggggttaacgtctttcagaaggacatctaatatattttccggcaaattttttctattggcagaggcaaactgtgattctaagtatgacacagagtcctgagatgcaatgaagacaatctccatcaattctgtaagttcaaaaacccatgtataatttatttccttgttgtttccca

SEQ ID NO: 907274 - DNA, 636 bp, Homo sapiens
cattaaatgccttgttcagtaatttttgtttgtttttgttttcctgtcaaggaaaaaaagcaggccaaagacttagaggcagtgtrttagtccattctcacactgccataaagaactatctgagactgggtaatttatgaagaaaagaggtttaattgattcacagtccctcaggctgcacaggaagcatggctgtgaagctcaggaaacttacaatcatggcagaagggcgaaggggaaataagcacatattcacatggcagagcaggagagagagagagcaaagggggaagtgccacacacttttaaacaaccagatctcatgagaactcattcactatcatgagaacagcaaggaggaagactacccccatgatccaatcacctcccaccaggcccctcccctgacacatggggattacaaattgacatgagatttgtgtgcgtacagagccaaaccatatcaggcagagtcaatctttcttttcctgtgtgaggcagcatcccgttgcctatttcttgtggtagagcaagcagtcctccttaagtcagacaatagctgactccaaatgtgtattaagtttaaggattcttaaaatactgttcatggatttagaaggtgattcaccagtattt

SEQ ID NO: 907275 - DNA, 640 bp, Homo sapiens
aatccactaaaaagcaaaaacaaaaacaacacctctcccctcaccaaaaaaaaaaaaacaaaaaacaaaaacaaaacaaaaaaacaactcagttcttgaaaccttagctagaagcataggctggttaggcaggtaagtgattgctaagctgaatgaagtgttgataaaaagacttccactagggattggtgataagggttgtccagataaaattcacaggccaagttgaagacaggatggcttttcaataagctgtgcttagagagcaaaatattgaaatcaagaaggcaagtagctctctggctgggaatcagtgcccaacaaaccaaaaccatagctggaagagcagctgctagaggaagggagactgatcaacaagagagacaaagagctgaatcaaagaacaagccagattgggaaactgatgcaaatgaatgtaaggaataggtgaggctaggaggctaattatttctgggcaatattcttgggttttaatgatctgaattaaactgtgtgacccactccttcattacagaaaacctggcacttcccatmtggatcttaaggatggttctcatagaagacagagatccaagaggacaaatttatgtgtgagaatatggcaacaaggggaagttgg

SEQ ID NO: 907276 - DNA, 525 bp, Homo sapiens
agaggcttccatagaatccaactcatgatacgcagttcctggtgcatggccagttgatgtcccctagttsagtatttcatctctaccatggcccagtagcacaccaagaggtaattttcaaaaggcttgtaactctcagctgcaaatgacattgccttagtcctcaaattcaaggtttggtattgtgattctccagtcatgactttttataaacttcatcctgatcattttttcaccactgacaccaatgaaagaaaagaaagcaggagcaggattagagaagagagaatatcaggcaataacattctgtaaaatcctgatggggagcttcagagaaaacattgcccattagtggacccccacactgggcagaaatgactatgttcttagtgttcctatcatgctcagacattgtccagaggcttccccagaagattgtaacctgggtttgaaagctgagggcatcctcaaatctgtaatagctgaaggctgtcagctagttgtactcccagaaactgaatggaa

SEQ ID NO: 907277 - DNA, 630 bp, Homo sapiens
ctctggggtgtaaagtaacttgcccatagcttctcacatgctcatgtcagagcctgaacagtcctcaactccagtgctccttcctcctcacctccacttccccaattaaagagggagtcaggctttttccaactagtactcatctctaattatgagacaaaatgccttcatccccctttcccaaacaagatcttcccctgctctgaatttttggtgaaataataattccataatgatacatcttcttccttcactactctctccccaaccaagtacagtgcctgtctcctattgcaatggacatttgtgaaaggaaggataggagagaggaaagcaaaaagagggtcaggcaggaagggaagactcagaaaattcatcttttctcattaccccagcaactaaccaaccctaagtgttttgaagcacttaataggtgctctgtattccgctaggatataagagaggtgtcagtcagggatcccaccctaaggaaaattataatacagcaaaaagataacaaaaaatggatcaagtagagaagaaaacaatgtgagacagaccattcaatggggagatgagagctggagagaggagarcagggagccaggggaaggctctgcaggggagggg

SEQ ID NO: 907278 - DNA, 662 bp, Homo sapiens
  misc_feature 630: n = A,T,C or G
ctcccaatttctgcctccactttaaaaacactttgcacttactagtgttattccaggagagccagttaatagtttaatgaaactagttagagtttaaaggcagcaaatgggataatttaaaataatcatcccatttttattgatggttctcaaatctctctccagatctgacattttgccctagctcagacttgcacctacactttctattcagactaacgtcctccatagttttaggacatcaccatcccaacttgggcactgacagcccacaggccacatcctcctcaagtagcaactcatgaacccagagaactgactgaaatagttcagtgtttcttgagctccccaaggccttcaggcttctgtgcagagtggaagtggtagtggtagtggcacaagtatgctaattgccacagtacactctccaaggtaagtgtaaccgggcccattctacagataaactaaaggttaggtaaattaaatctcctggcccatccacatctaatcatcatcagggccaggattcaagtccagttctaacaacaaaagccatgccaatggtaacagagtgygtgtgagctgctaagtacttctgtgtattaactcatgccattaaagtccgtagantgcatagggtgacccagagcacactgggtagg

SEQ ID NO: 907279 - DNA, 359 bp, Homo sapiens
acactcatggactctagcgcaggtttgggtacattcagggggcctagtaccacaggraactggagggtaaatcactgatgcaccacaatggcaggttaattcatcaaaacctggtggagcagcaggtaaaacaaaagaatcctttctgagtttgggatgtgcaagtacatactaacacacacaaacacacacatttttgcttgtatttttagaggagaatttatgggggtgctacttttttcaaaagaggtttttattttattaaacttttattttattaaagctaagctggtgaaaaaggcatgaacagatatgaagtttcatttattactatgaccctgacaacttcccaatacttt

SEQ ID NO: 907280 - DNA, 624 bp, Homo sapiens
taaataactatctagttttgtaaaaatgactaactgggaaatatccaaacattcaagatcttccttcccaagccaattatacatcttttatagtaattttcattacgtccatatttaaacctgctaaccctgccctgaagccaaatcagcctgtggagaatctaagatgtcctagaatgtttcctggaatgtctttctatttttgtgttcttgtgcatctgtcattactaacaagaagaagctcaaaacacacggtttccaagaagctgcccttgatatacttacatatttatatactgtgttgctccaaacatttttattctatacaaaaacctcactaaacattttctacttcttctaaaattctccccatatccacagttttaaaatcaatcactctatctatctatctatctatctatctatctatctatctatctacctacctatccaatttatctatcaattgagagtagaacaaattatttcctttttagaagacttacatcaggctcaggaatcattaagcttacagtctgggtcagggatgatgtaggaatgattgtctctccccacagttcagggaagtrtacatgtacttgctctaataaagcctatattggt

SEQ ID NO: 907281 - DNA, 425 bp, Homo sapiens
gctagtttaaaaaactcataggaagatcaatgaaactcccttgcagaggttgtaggagaacctgcttctgtaaattacagcactacacagtttccttagcattatagraggattttcccaggacaggattttaaaatgataaatgctggcttattttagagggttactgttgtctcttgcgaaatctttttactatctggccatctaggcattgagggccaggattattaaccatctttaactgtatgcatacagatgctactcacctgtgcccatttgagaagaactttacaattctcttttgattttgttgttcagggtttacactgaagctactgttttctctatctacagcatcttaacatttatgatatgtctcaacccatctgaagcccagaacttttgttctttgtcttttctggata

SEQ ID NO: 907282 - DNA, 486 bp, Homo sapiens
ccaccctcaaataatttacatagagcattatgccttgagaacttccatttctatatcctggatgaagctgaaaaatgtgatatgaatttagaatacatgtctattgtaatgcctatttcttcatgattatgttttaatgaaatattacatatttatcctaacatgccaagtcttttataaacgaagttaacagtttgcaagagttcactatgtatttcagcagaaacacctcgtagagatgtaataaagggttctcatgaagtttaaagaaattatagaatattacatcatcaatgagattacatattccttggcaatcatttgaaatgaatgtttcccacactagagaaagcaattaataagtgtatcaaaatatatacctaaatgcctactacaacacaaaacattatgacagccagaaaatgtagtagtatacaatctrtaataaaatgccccctgactgccttcttatttaaaaaatgttta

SEQ ID NO: 907283 - DNA, 664 bp, Homo sapiens
ggtaatccagaaaattttcctggatctggtacaagaccatcaaggtaatacctctgtgaatctgcaagaaccaaagcattactgagcttgaggtgtctcctaaaacagacacaatttasatcataacatccaagtcctttcaaatatctgaaaagcctttccaagaagaatggagcctcctaaaacagatacaacttagatcacaacacccaagggctttcaaatatcggaaaagcctttccaagaagaatggctacaaataagcgcagacagtgaagactacaatgaatacttagctcttcaatggccagacaccaaagaacatctactagtatcaacactattcaggaaaacatgacctcaacaaataaactaaataccagggaccaatcctggaaaaacagagatatgtgaccttttagaaaggcaatttaaaatagctatgttgaagaaactcaaagaaattcaagatagtacagagaagcaattcataattagatatatttaacaaagaaattgaaataaaaagaatcaagcagaaatcctggagctgaaaatgcaatggcatgctgaagaatgcatcagagtcctttaacagcagaatgaatcaagcagaagaaagaattagtgagcttgaaaacacactacttaaaaatacatgaag

SEQ ID NO: 907284 - DNA, 637 bp, Homo sapiens
aagtcaattaaacacagtttcaagaaacagagcaaccatcaaaaccaaactcagatacrgcagagatttgggaattatggtacagaaatgtaaaataactatgaataacatgctaagagttctaatggaaaaaatgggacaagatgcaagaacagaatggataatgcagtgagagaaatggaaactctaagaatcacaaggaaatgctaggtatcaaaatcactttaaccaaaatgaagaatgcctttgatgagcccatcagtggggctgggggaaagaattaaatagattgaagcttgaaaatacatcagtagaaatttctcaaaagaagaattaaaaaaacaagaaaagaatatccaagaactgtggaataatagcataagttgtataatatacaaaatggtaatgccagaaggagaagaaaaaaaggaaaaagtgcttaacatcaccaataatcagggaaatgcaaatgaaaaccacaatgggatatcatctcatgcctgcaggatggctgttgtcaaaaagatgatagataatgtagtggtgacggtgtggagaaactggaacccttgtacgctgttagtaggaatgtatgttggtacaacaattgtagaaaacagtatagaggttactaaag

SEQ ID NO: 907285 - DNA, 621 bp, Homo sapiens
gctgttttgattacagtagccctgtagtatagtttgaagtcgagtagtataatgcctccagctttgttctttttgcttaggattgccttggctatttgggctcttttttttttttttttttttttttttggtttcacgtaaattttaaaatagtttcttctagatctgtaaagaatctcggtggtagtttaataggaatagcattgaatctataaattgctttgggaagtatggccattttaatggtattgattcttcctatcaaaggtttttccatttgtttgtgtcacctctgatttctttgagcagtggtttgtagttctccttgtagagatcttttgcctcgctagttagctgtttttctaggtattttattctttttgtggcaattgtgaatgggagttcatttctgatttgagccattcattcatggctcttggtttgactcttgttagtgtatagcagggctagggatttttgcacattgattttgtatactgagactttgctgaagttgttcatcagcttaaraagcttttgggctgagttgatggggtttactagatataggattatgttgtctgcaaacaggtatagtttgacttcttctcttcctatttg

SEQ ID NO: 907286 - DNA, 505 bp, Homo sapiens
gccattacaagatagtttgctcaaagtaggatccaaattatgtccatactcaaatgaaaatattatccaagctgggagaatgtgtggttccaaagactgactacaaaataaattatgagcttaaatggattaaaatcatattaaatatgtagaaacttcaaaactccacaaatcaaaagtatgtcatgtacggatagaaattttttcttcactgatgagatagaaaaaggatttgtctggcacaatgtatgaccctttgtctattcaaaaatgatcacagctaatgcaaaacatttaacagaaagataaatttaatgttaacaagcacatttgataattgtcccaggaaagattataggtaactggatggaagtatttttcaagtaatctaggatagtcaacattttaaatgcaccacagagacatttatctcagcaattcagcaaagcagcatcaactcttgagycagaataaaagctttcagcttctcttttgagaagattct

SEQ ID NO: 907287 - DNA, 546 bp, Homo sapiens
gtagataatttcaaaacaaggtggttactgttactgaaattgtaaattatgtaggggctgtctgttttatgtctgatgtatttgttaatatttagaattaattcctatttctgaaaaatatgtcaagcttcttattacaatacagaattgtattgtaatgtatatattacattatgtatacataaatatatgtatacatatatacaaatgtataaatttataatgtatataaaaatgtatacagaacatttttaatcaaaataaactaaaaactagtggatggtagcagtgagcttgatattagtaattcggtaggacatttggattgaaatgttctagtttcttaacattcaaggagagattccaaatctgcttatcttttattttattttattttatttttttttttttgagacagagtctcactctgtcgcccaggctggagtgccgtggcgcaatcttggctcactgcaagctctgcttcccaggttcaygccattcttctgtctcagcctcccgagtagctgggactacaggcacctgcca

SEQ ID NO: 907288 - DNA, 658 bp, Homo sapiens
gttgtgtggttttcatcttccccatcagctcggatatacagggatcccrcagagggttgcagaaggagcagccacagaaataaacaggagcctttgctatcacatggcaagcaagtgtcgcatctcctgagcatcccaggtatctggggcagccccctgacaatggatgaaacgatatcacatccagccagaaaacaacccagcagaaacagtgagatgacacataaacccacaagcttggctcataatgtggagcagcaatacatgagcatactgtacttctgcagccactctagagaaagaaaaagagtaaaatgtgtgagaaaacaccattaaattactcactattagcccctaaagtgtgcttccaacctatgtggacacacatacacacatgtacacacacacactctcacacacacacatacatgcaggagtagagaatgtcacagttaaattttttactagtataatgaggaaagggaccaactgaagaagctccctgggctaattttctagccagcagccactgcaatgttcccactaggagagtgagaaggagggagagcaaagtataataaataatgactggctttgctggtcaggagaaattatcactatgcttgagggatctaagcatatgttcacccaggaatat

SEQ ID NO: 907289 - DNA, 624 bp, Homo sapiens
acctgtgtataaaatttcatgtatccaactattcatttatttacttattgagtagagtttaaagtacttatctggctcccttctagatccttgaggtacagcattaaacaaagcgataaattcttgctstcttggagtttacagagttaccttaataatcacaatcctgaattttgtctaattcttttcctgcatctattgaaatgatcatgtgatttttgtttttaattctgtttgtgcaaccctttattattaaaactctcagcaaaactggcatacaaaggacatacctcaatgtaataaaagccatctatgacaaacccacagtcaacattatactcaatggggaaaagttgaaagcattccctctgagaactggatatcaagacaaggatccccactgtcaccactcctcttcaacacagtactggaattcccaaccagagcaaacagatgagagaaagaaataaagggcatccaaattggtaaagaggaagtcaaactgtcactgtttgctggcgatatgtttgcttaccttgaaaaccctaaagattcctccagaaagttcctagaactgacaaaagaattcagcaaagtttctggatacaagattaatgtacacag

SEQ ID NO: 907290 - DNA, 546 bp, Homo sapiens
gcttaatcagagacagagcatggattcaaacttaggtctttattgtctccatagctcagctttttccaactaaaatgctatatcgcactgtccctctaaacaaaacaaaatagaaaaacactctcttctcatctctggtaaattttacatttaactggcaagaattttgctgttttttaatgtcacatcccagaagtcttattccagtcttcattattattaacagtcaatgtttcttgattttactctgtcctaggtagtacacaaagcatttcacaaccctatgacatagaggatatgttaataacgtttattcatattaaatgtatgcaaatttaaggttccggagataattttcctaagatcccactgctcgaataggtctgagtcaggatttgaacccaagtgtgtctgttttcagatcaaagcactcactccttatgctatgtcatgaggcacagttattgtaaactttccagagacggggggctggagggtgcggtgaaaacracaggaaagagatgttatacttttattctctgcttg

SEQ ID NO: 907291 - DNA, 667 bp, Homo sapiens
catttaaaactctctttcatgatggcaatgaataaaagaggatcctagaccatcagaagattttagccttggrgctccccaccgtcctaacacacacagatagagctggctccgaactctgctgcttccatggtcgtggctacctactactctgttcctacttcatcttcactgtgatttttgtccatatgtcagactgaagcagactgcttagggccttgggttgaggtaggggacatctttctccaggttaggcatttcaactgaagaggaaaaaaagtaggaataggaaatgatgactactagaggtcaattgatccattaaaaacaaaaatgattatttttgactcctgagttctgaaaatgtatttgagggttcttcaacacaaggagcaaaagaacaaagagaaaggggaaatctttgttgttttattgatctgccttaatagtattctttcatcttagaaataagacgagcttgcatagaagccgctgtctgtggttcggtttctgaactagaaaacaaatctttttaaaaatcaaaatctgagcatttcagattaaaacatgataggggccaatactacttttttggtgaaagccttgaatggggtgatccagtgaaaggacccaatgacaaatttaaaacaaggggaataacagttcc

SEQ ID NO: 907292 - DNA, 660 bp, Homo sapiens
gtaagttactgggcagggggccaggggaagcctcttcaaggggtggagggtgtgtaaaggagcatgcaataaaggcacagggttgtgataggtacagggatctccccctcacaccagacccatgggctcattaacactcccccctgctcacctaaacacaccctgccccacttccagcaaccactaatgattacgataataacaaaggcaactagcaggcaggacagacagttcaattattagaaagttgtctacggtgaaaactggggacagaaagataggctcttgagaccatatttctaaatcaggggccagtttgggagggagaggaccccagatctgtggctgctcagatttcctctcaccctgtccctagcccaccatctaccatctatctccctgataggatgggtgaccataggtccaggttgcccaagtttaagcttgttcccagagcagtcattactaaagcagggattcttacacttttgtgtatacaccaatcacctagagatcttgttaaaatgcagacttctatgcagtaggtctggctgggtcctgagattctgcatttcttaaaaactcctaggtgaggctgatgctgtttgcctgaggactagagtagcaaagatckacctaccactggttctcaaatgtaac

SEQ ID NO: 907293 - DNA, 621 bp, Homo sapiens
gtttgacattttcctataattgacacatttggataaatgacttttaaaacattcttcttttttttatattgtctcatagtgttagtatttatatgatttattaatatttatttattaatatgttttcattacattgcatttggaaatccacttgttcttttgtttatatgcaaattatctagtatggggaagagagattaattctaggtttataatctttaatttctagaaatattgtgaagcatgaccaaagacagtgacttgggaaaagaaataccaggagggacataatagaagttttaaatgatagaagtaggaatagtataaaataatcaatttaggtaaataatagactgtaacaagtggtagcaatgtagcatagtgaaaatatcagtgacctttggaatcagagacatctgggttgaaaaacaaatatctttatatactagctgtgtgattgtaatcaagttttttaacctccctgaggttcaatttcmtatctatacaatggaaacaatacctagaacagtaggttgtttctaggacaaaataaaaggatatatgaaaagtatgtagtattggcatgtaataatggaataaccattttaaaagttttaaaag

SEQ ID NO: 907294 - DNA, 621 bp, Homo sapiens
gtttgacattttcctataattgacacatttggataaatgacttttaaaacattcttcttttttttatattgtctcatagtgttagtatttatatgatttattaatatttatttattaatatgttttcattacattgcatttggaaatccacttgttcttttgtttatatgcaaattatctagtatggggaagagagattaattctaggtttataatctttaatttctagaaatattgtgaagcatgaccaaagacagtgacttgggaaaagaaataccaggagggacataatagaagttttaaatgatagaagtaggaatagtataaaataatcaatttaggtaaataatagactgtaacaagtggtagcaatgtagcatagtgaaaatatcagtgacctttggaatcagagacatctgggttgaaaaacaaatatctttatatactagctgtgtgattgtaatcaagttttttaacctccctgaggttcaatttcctatctatacaatggaaacaatacctagaacagtaggttgtttctaggacaaaataaaaggatatatgaaaagtatgtmgtattggcatgtaataatggaataaccattttaaaagttttaaaag

SEQ ID NO: 907295 - DNA, 672 bp, Homo sapiens
catcagccagaagagctctacctaacatgatttacaagcaatccactattctgtgagtgtgagaaagcaagaggcaaaatctcaggttgccaaraaattgtgtaatcccatgccccttagttttcctatctctaacatgatggggtaaacaagatcaatctgagctgacataattatatgcaattacaatgcagtttttttccctgaaggcaataatttattatatttcttgaacttgaaaactgttttgtattttaagaatgcctcctccagtctcctgatgaggatttctctgcagctcttgtttaagaagctctgtatgctagtaagcaccaagtcttttgtaagtcagcactgggctgtaggcaacttccgcttttttgttgtttgtttgctttttctgagacagagttttgctctgttgtccagcctggagtgcagtggcgtgatcttggctcactgcaacctccacttcccaggttcaagcaattctcctgccttggcctcccaagtagctgggattacaggcatgtgccaccatgcctagctaatttttgtgtttttagtagagacagggtttcaccatgttggccaggctggtctcaaattcctcacctcatgatccacctgcctaagcctcccaaagtgttgggattacaggtgtgaaccacc

SEQ ID NO: 907296 - DNA, 430 bp, Homo sapiens
gccattccaaatgagaaaaaatttgccaaaaccaaagggttacagggcccatgcaagtccaaaattcagcagagcagtcaaatcttaaagctccacaatgatctcctttgactccaggtctcacatccaggtcattctgatgcaagagctgggttcacatggtcttgggcagctccaccctgtggctttgcagggtacagcctcccttctggctgctttcacgggctggcactgagtgtctgcagcttttccagacacacagtggaagctgtcagtggatctatcattctggggtctgaaggatggtggcccttttctcasagttccactaggcagtgccccagtagggattctgtgtgggggctcccattccacatttcccttccacactgccctagcagaggttctccatgagagccccgcccctgca

SEQ ID NO: 907297 - DNA, 505 bp, Homo sapiens
attttgtgctttaaaagatagtatcattcttattttattgtctcrctataagtactacaattctcactccttttgtagtgatttcatggtgcttaattccatgaaaataccaaggcacagttcacattctcaggttcattaagaatgccttattaggccgggcgcggtggctcacgcctgtaatcccagcactttgggaggccgagatgggcggatcacgaggtcaggagattgagaccatcctggctaacacggtgaaaccccgtctctactaaaaatacaaaaaaaaattagccgggcatggtggcgcgcgcctgtagtcccagctacacgggaggctgaggcaggagaatggcgtgaacccgggaggcggagcttgcagtgagtcgagatcgcgccactgcactccagcctgggcgacagagcgaaactccgtctcaaaaaaaaaaaaagaatgccttattctcagagaactctcttaagggttttgtatttaaagtaccac

SEQ ID NO: 907298 - DNA, 505 bp, Homo sapiens
attttgtgctttaaaagatagtatcattcttattttattgtctcactataagtactacaattctcactccttttgtagtgatttcrtggtgcttaattccatgaaaataccaaggcacagttcacattctcaggttcattaagaatgccttattaggccgggcgcggtggctcacgcctgtaatcccagcactttgggaggccgagatgggcggatcacgaggtcaggagattgagaccatcctggctaacacggtgaaaccccgtctctactaaaaatacaaaaaaaaattagccgggcatggtggcgcgcgcctgtagtcccagctacacgggaggctgaggcaggagaatggcgtgaacccgggaggcggagcttgcagtgagtcgagatcgcgccactgcactccagcctgggcgacagagcgaaactccgtctcaaaaaaaaaaaaagaatgccttattctcagagaactctcttaagggttttgtatttaaagtaccac

SEQ ID NO: 907299 - DNA, 654 bp, Homo sapiens
aaagagggagcattgcttgaagccaagagttcatgaccaaccttggcaacagagtgagatcctgtctccaccaaaaattgaaaaattagctgggcatggtggtgcttgcttgcatttccagccacttggggtggggggctgaagtgggaggatcacttgagcccctgcgattaaggctgtagtgagtcataatcatgctaaccacactgtaacctgggtgagagagctaaactcttgtctcaaaaaaataaaaatacaaataaataaaaaaaagtggtttacttatgaatgggcatacttatgaatgctcatgtcatgaatgtcataaataagttaaatgtagagttagtatttgatgacagagcaatcggatttcaaactttttcctttctatcatggaattttaattaattattatgtgttgctgactaacattctcagccctttaaaaacagaaacttggggcctgggcaagatgacctaataggaacagctccgatctgcagctcccagtgagaccaacgcagaaggcaggtgattattgcatttccaactgagatatctgattcatctcattgggactggttagacagtgggtgcagcccacagagggcgagtaraagtagggtaggcattgcctcacccaggaagctc

SEQ ID NO: 907300 - DNA, 621 bp, Homo sapiens
accaccaaacctgtcttgcaagagctcctgaaggaagcactaaatatggaaaggaaaaaccattggcagccactacaaaaacacakttaagtatacagaccagtgacattatgaaacaaccacataaacaagtctgaaaaataatcagctagcatcatgatgacagaaccaaattcacacataacaatactaactttaaatggaatgggctaaatgccccaattaaaagacacagactggcaagctgaataaagaaccaagactcattggtatgctgtctttaagagaacccatctcatatgcagtgacacacataggctcaaaagaaagggatggaggaaaatttaccaagcaaatggcaagtagaaaaagcaggggttgcaatcctactttctggcaaaacagactttaaaccaacaaggataaaaaaagacaaaaaaaggacattacataagggtaaagacttcaattcaacaagaagagctaactatcctaaatatatatgcacccaatacagaagcacccagatttataaagcaagttaccagaaaagttcaaagagacttagactcccacacaataactgtgggagactttaacacccactgacaatataagtga

SEQ ID NO: 907301 - DNA, 653 bp, Homo sapiens
agaatcatatggcccaaaatggcagcataccattgttgataaatgccgatttagatatatcaaaaaaaatttaaattaacaagacatcagataaaagctaaaattatcatacttatttgctatttcaayttatataaaggttcataagatgggcctccaataagtggttgctttgagatattaactaatgatggcaatacatatatactggggctactccctcaaaaattttgggtgcagtacatacatgactgaaaatattagagtccatcatgccacaatctcctccaatttggtcattctccttgggtgaggtacattttaggggagaagaaaagtgctgcagcccctcttatgattacttttactacctccattgcacaagaaagaatggaagagatcagcagcctcctgattttaccttgggaaaaatgaagcttatcaaataaccttcctgacataagatcttagctagatgctgtgaaaatggactgaaaagtggaaattacagtcatgtttataattggcagttttcaggtatatttaaatatgtaaaatgtaaaccttaaagaggaaataccatgttctgccaaaccactttctctgatctgtgttttttgggggacataatacagtccctttttcaatgtaga

SEQ ID NO: 907302 - DNA, 276 bp, Homo sapiens
gcattgaatttgtagattgcttttggcagtatggttattatggtcgttttcacaatattgattctgcccatccatgagcrtgggatgtgctttcatttgtttttgtcatctacgagttcttcagcagtgtttcgttgttttccctgtacgggtctttcacctccttgtttaggattattcctaagtattttacttttgtgcagctattataaaagggatttagctcttgatttgattctcagcttggttgttgttggtatatagcagagctactga

SEQ ID NO: 907303 - DNA, 610 bp, Homo sapiens
gcaggatttcaaatggaatgttgccagtttttgaccattaagtatgatattggctgtgggtttctcataaatagctctcattattttgagatactttccatcaatacctagtttattgagagtttttagcgwaaaggggtgttgaatttcatcgaaggccttttctgcatctattgagatagtcatgtggtttttgtcattggttttatttatgtgatggattacatttattgatttgcatatgttgaaccagccttacaagggatgtgagggaactcttcaaggagaactacaaaccactgctcaaacaaataagagaggacacaaataggaaaacattccatgctcatgaataagaagaatcaatactgtgaaaatggccatactgcccaaagtaatttgtagattcaatgctatccccatcaagctatagtaaccaaaacagcatggtactcatatcaaaacaaatatatatagaccaatggaacagaacagaggcctcagaaataacaccacaaatctgcaaccacctgatgtttgacaaacctgacaaaaacaagcaatggggaaaggatcccctatttaataaatggtgttgggaaaactggct

SEQ ID NO: 907304 - DNA, 610 bp, Homo sapiens
gcaggatttcaaatggaatgttgccagtttttgaccattaagtatgatattggctgtgggtttctcataaatagctctcattattttgagatactttccatcaatacctagtttattgagagtttttagcgtaaaggggtgttgaatttcatcgaaggccttttctgcatctattgagatagtcatgtggtttttgtcattggttttatttatgtgatggattacatttattgatttgcatatgttgaaccagccttacaagggatgtgagggaactcttcaaggagaactacaaaccactgctcaaacaaataagagaggacacaaataggaaaacattccatgctcatgaataagaagaatcaatactgtgaaaatggccatactgcccaaagtaatttgtagattcaatgctatccccatcaagctatagtaaccaaaacagcatggtactcatatcaaaacaaatatatatagaccaatggaacagaacagaggcctcagaaataacaccacaaatctgcaaccacctgatstttgacaaacctgacaaaaacaagcaatggggaaaggatcccctatttaataaatggtgttgggaaaactggct

SEQ ID NO: 907305 - DNA, 679 bp, Homo sapiens
ttgtgacctctcttatttccttaaacagtggtttgtagttctcctggaagaggtccttcacattccttatgagttgtattcctaggtatttttttctcttagtagcaattgtgaacgggaattgactcatgatttggctctctgtctgttattggtgtataggaatgcttgtgatttttgcacattgattttgtatcctgagacttttctgaagttgcttatcagcttaaggagattttgggctgagactatggggttttctaaatatacaatcatgtcatctgcaaacagagacgatttgacttcctgtcttcctatttgaatacctttatttctttctcttgcctgattgccctggccagaactttcaatactatgttgaataggggtggtgagagagggcatccttgccttgtgctggttttcaaaaggaatgctttcagcttttgcccattcagtatgatattggctgtgggtttgtcataaatagctcttattattttgcgatgcatcccaccaatacctagttaatttagtttttagcatgaagggatgttgarttttattgaagaccttttctgcatctattgagataatcatgttgtttttggcattggttctgtttatgtgatggattatgtttattgatttgcatatgttgaaccagccttgcatccca

SEQ ID NO: 907306 - DNA, 506 bp, Homo sapiens
tcaggcagtaggactgatatctgaattaacacctcttcacgctacaccacacataaacttgaaagtataagtctaaggttattatgcttattacacacagtttcaaaagaagcacgcataaggtatgtttttaatgaatcgtacagctaaagagcagttgttatagatcagttactgtggatctcaccaatacctatcaagtagaccagatgcataagctaacacgtgaaaggcagtccatgtaggaatcatacttaacttaaaataactagctgtggggaaaaaaaaagatttttctaatgtatctttaaaaatttacatctcatatcaatattacctttaaattctgctgagatattgaccaaataataattattttcaagaatagtcattttctctcrttttgaattttgacaaaagtgtgtgtgtgtgtgtgtgtattctttaaaacatgaatacagttttaatggtggaaatctgctatgctgtgtttcaaaatgttcaca

SEQ ID NO: 907307 - DNA, 685 bp, Homo sapiens
tccaccattaggccactttcaacacaatgtgrattaacctaccaacgtgcggtcctgtactacttgagagatacggtcacagccattaacctgctttacagagcttgtcatggctgcaaggactctgtagagaatgtttcgagatagaccttaaaaattagtggaatatgggtgaacaggaaaaaatgagagagcaagtgccttggaaagtgattcttttcctagaaccaagtctccacttttattcggaagatgttttatttaaggctccttttcatttcaaagttaattaaaatggaaaataatatagtttctaaagcttttcacagaaacaaatcagccaggagtccttggaagatgtattttactagatcaaaacttattttcttctctttaaacagccaagtataaagactgcttatagagtatagaaggcaagatcaaagttatgccccactttgactcaaattttaaggctttttgcattctcagaagctgagaacattccatttttctgacttggaggacctggattcaagttagaagccacctgtgctcactataatattctgtctcaggctgcactttgaccaaaatttgattctaccatgatagctgaacattatgatgaaaccctggaagatgaaaggacatagatttcctcccaatgatttatgtgtaacct

SEQ ID NO: 907308 - DNA, 697 bp, Homo sapiens
ttttccagggacagtagacaccatacatggagaaggtagactgtgtgtgaaaagatgagtgttagggawtgctgaaaattgtgtgtgcctgttctaaaggcatgtaaatacaaaatacattaaaaaagcgttttgtggatgaaaatgctatgggctcatcactgaattccaacaacattcctaagtcctctgggttatgtcttagtctaacctccattttcacacactcagtattaacagtgacatttcctgaggactcaacttgcaacttccagtgtcaccccctgacttttgtttcttcagctgtcactcctacccctccaccccaccaacttacactgatgctaaagcaaggtgttttgttctctggaatggccctgagcactctgctgtcttctctttactccttttcttccctcttttgcaagtatccttcccctcaaaatccttctcattctttaaggctgccatagttaaaactaggttgtaagtggtagaaacccaacgtccgtgtgcttcagtaagacatggggattgctggcttagacatcagaagtccaggggttgacctagctctcaggagtaacagtctgctcattatttcccagacttgtgcagctctatgttttttgttttttcagttttctgttttcttatgaataggcctcattctgtctctttgtagccattcttcttt

SEQ ID NO: 907309 - DNA, 585 bp, Homo sapiens
cctcttgtgttgctgcttgttcttgatgtttcaatagagaatactgcattgccctgatgggggatggctcccagtcagctggtttggacatttgagacaatatgcatggcacaaagcagcagctcctcagtaatgagaaggaggaatggctaatgcttccctgtgttcagctgaacttctggataatggtttacctgtaccatttcatcttcccttttatacagcacaattatgatgtgctaatagttttaagaatgcaaatcctgcctttcaagcttgctcaagagcttttagagtttaaatgttttgtattctccatgtggcctactcaacagttgttgggtataaagaatttttaccacgttaaccagctatctagtcccatcttagtccctaaaagtatttttggtggttccaggtagtgtaggtattctgtaagtaagcccaatttgaacctgtctctgctcttcaataacagcgttaactaggtcttttcctagtacttcaacattttggctaaggcttcaaaactgagatcaatggatgataaacrcacattctaaagagagatgtctgatacttcct

SEQ ID NO: 907310 - DNA, 579 bp, Homo sapiens
ctcctgtataagcctgcctatacctttattaaaacacttttagaagttctacttttgacttaatttttctcttgtcagttttctttcctattggtgtactccctgagacacagtctgagtaattaaaaaatatattctgtgcccattccttggtatgagaagtgtggcagtgctctttatatattttgtgaatgatttaatgagtgcatttttttttataaagaaggagaccgatccatagtcaaagcattgtcctcttacttaccagtaaagacactgaattctatgatcagccattcaaaaaagtattcaggtcttgtttatctactttttattttttattaatcctgctcattgggctaactaaaacaacagatctcttatttgacctcaattaaagaacacagtttggagagacagtggtctaatggaagtaaatgttcagaatgactattattttattgaatccctttttcttcactggggcttcataattggtgctcccactaatggtatttcttgtttgggttctcaaagaaaaayaaacaacttaaaatagacagacacggtggaaagttt

SEQ ID NO: 907311 - DNA, 683 bp, Homo sapiens
ccattgattgtgaccatatggtagttatcaygtaagcatttcaaatttcttatttcattaatggttatatcaaccctatgaagaaggcactactattattctatttttacctttttaaataatgtgagtctagacaggttaagtgacttatcaaagatcatataactaacaaatggtggaactgagccttgaaactcttatttttgatgtcagtctatattcttcagtgccaagacataatacttccacttaatgctggttagctgaggttactgtatgcatgctgagtcattaaatggcaagctgtgtcacactgtgcactctaaatttaaatacgtaaaagttatttaaaacaatagcacagcaaaacctgattgtgttaacctgcgcttaatttggttaattgcaggactttaatagctcaatatggctagcaggtggcaatggtgttccattaagccaacacagcaacttcaggcaaattaatgtacatgtaacatactaatgtacatataacatacaaaactgcaaaagagtgagaaggagtgggctacgtttctttagtaattcttgtcatctaggccctatgattcttatgcacttagcctcttgcacacatggaatttttgagttgttcaaatacgtggagtttaattgctgtgtgggtgagctaagttgaggaa

SEQ ID NO: 907312 - DNA, 515 bp, Homo sapiens
cacacagctaccaagtgttgggagtagcgaccaaagcccatatcagcctcattagaaagctcctgcttgcagcttctgggggctgtgctgcttctctatgtgatgtggatgatctgtgtatacaaatcccattgtccttcagccaagaggctttagggtacagagagaggacctgaattgagacaaaagggtgggggagctgtgtctgctgccttgcctgctacttaatagctcacagaccacagggatgttagtttttcagagctcagtctcctaatctgtaaggtggatgttctgtacatagaaaatgctttataaatccctaaggtgctattcaaatgtcagggatgtttttgttttaggtatgcaattgaccaaacattgggtataccacagtgctttttcttcacaatttacgcaraatattcttggattgcagttaccttcacgtgcagctattttcaattcaattcttagctaccatttattgagcaactgctatggggcaagtgctc

SEQ ID NO: 907313 - DNA, 597 bp, Homo sapiens
tgatcctcccacctcagtctcctgagtagctgggactacaggcttasgctaccaggcctagctaatttttgtacttttggtagagatggagttttgccatgttgcccatgctggtcttgaactcttgagcttaagcgatccacctgcctcagcctcccaaagtgctagaatttcaggcatgagccaccgcaccaggctgagactcttattttctttttaaaacattattactgaatcatcttttctgtcgcaggcactttcagtccctctcaactcttatctgttctctaccttgggaccagatcattctggaactactctaatcatgctgcttctttgcctaaaatttttcagtggctcaagtgcattttcttcagattggtttcagagcctggtggggacacctggtgttttttctacccaacaggcagttatttatttggtagggctttaagtttctttacaggtacccattccttcatcccagtttgtctggcaatgatccttcttcttggctctaggagtgaacacatgacgaatcctcctagacccaataattgggtcagggacaggcataaattagttaagtcagataaa

SEQ ID NO: 907314 - DNA, 648 bp, Homo sapiens
gcccaactttgcaatggtaagatttctagaaatttttaaaaaacctataatatacaagaagactggggcgggttgatggtaaatcctggggcacattggaaaggcgtccagaggccgctgtgctaattaatgcgcagctgcacccattgtgggcatgtccacagccggcttcctggtatgcagtggagatgggcccattgacactagtgaagggaccctggatgggctcacatttcaggtcctgtttttctccaactgtatttggatctctcttgaaatgctccctttaaaaatactaatgctagctcagaaacactccaattaccatctccccacaggcttaaatgttaaacctcaagatctaaactttatcccttatgtatgtgagcaggcttgccagatggcaggccaattaatatatttttgcaaggtgtagaaatgttttttctccataggggaacaatgaatccatctgctccacatcttcctttcccctctgtcttttggggaaaaccattatttaattttcagacataagttgtgcaactttgtaagtgatactttctgcttttttagggaagtagctttaataattgaaacytttttttaaactctaaagatgtgaagaaccctgtcatggactaaaat

SEQ ID NO: 907315 - DNA, 612 bp, Homo sapiens
aaaccccatatttccaccattaatgcagcagtggtagggaagactccttaacttccaccttgtcatatatatatgtcttctcagtcatatcgaagtactgtggtttaaaccaatgtccccccacaacccacccacctctactgataaaaatatatcacactactctagtgtagccttaggttcctcttctgcacacacatgtatacagctagtccatgatgtatgccttccagccggcaaaggtcttttctgggtcttcatgtggtatctgaacatgtcccaattctccattttcttaagaccactctttgaggtcattgctctgacactgtttagttatgtaacactgtggtgagctacaattatttaaacaatgaaaaatctcctgaattggtggtttctgcaatatagggagggtcattcattcattttcagcacatatttattgaatatttatgtgggctgctcttggcactgggattaaacagctataaacaacacacaacacacttgccttcttggagcctacactctgayaggggaagacagacaataaataaatatatgttaggtgaaaaatacatcaagatgagaagaaagcctgggcgtggt

SEQ ID NO: 907316 - DNA, 638 bp, Homo sapiens
tttttgtggaagaggaacattggraatagactatagtgtttcacttgctagtcttgagctttcttttttcggtgtaggacatgtctggaggttttttaactagcaaaatagaataacatggtagcttagtaagatttctgcataggagaaacttggtctgaatagagtagaaggaaagtgcagaaaaggaatgatgaagagctgaagaaaggcaggcttgagaaggggaaggaagaatggaaggcattgtgaaagaagagttgacaggacctgctgaaggatgggaggctttttacgcagattgggagaattgctatatctcagatagaagcagggataacaatccattttgaagataacagtttcacttttagctatggttagtaatatcgaacctaaaaatgatggcacagcagccaagtagaaaggtccagcctgctgttggagatgcaccctagggagaatgttcggaacttcatatataatgtagatgaaggtgtaggaggtgtcaacagagacactgagtcctctttaaaattgtgagtagcgggggcagatgctcggcaaaatccaccttgctccttgttcctgtggtttaggtctggactaagaaaaaaaaatagtcattagtttgggga

SEQ ID NO: 907317 - DNA, 590 bp, Homo sapiens
ggtagttttatttctggtgcccattacttgaggataagaggtaatagtaagtgatccccatcaatccagtaacactgtaagataasttggtgatgagctaactaccaaggtatctatatatgccttggcacagtgtgcgcatgtgtttgtgtatgttggggtggggtgatgagagccagaatgcacgtgtgtgtgcatccgtgtgtgtatgtgcatgccttatgtgaatgcagcttattttattttttatttttattttgtgtatttattttttgagacaggatctcactcttttgccaaggctggagagcagtggcattatcttggctcattgcaacctcaaccaatgggctgattttgcccacttttgcagagagaatggagtagcccatttttgcagagagattggaggtcaagttttcaattaccatccacccctttgatagaaactgcagttttgttgtgcctgttatggaactggaaaaataaaaaaaagaaaggaagagaacctaagatatcactttttaaggtattacttaattggaggtagtgcattttacacatttctgatggtttaggctaaaccattt

SEQ ID NO: 907318 - DNA, 590 bp, Homo sapiens
ggtagttttatttctggtgcccattacttgaggataagaggtaatagtaagtgatccccatcaatccagtaacactgtaagataagttggtgatgagctaactaccaaggtatctatatatgccttggcacagtgtgcgcatgtgtttgtgtatgttggggtggggtgatgagagccagaatgcacgtgtgtgtgcatccgtgtgtgtatgtgcatgccttatgtgaatgcagcttattttattttttatttttattttgtgtatttattttttgagacaggatctcactcttttgccaaggctggagagcagtggcattatcttggctcattgcaacctcaaccaatgggctgattttgcccacttttgcagagagaatggagtagcccatttttgcagagagattggaggtcaagttttcaattaccatccacccctttgatagaaactgcagttttgttrtgcctgttatggaactggaaaaataaaaaaaagaaaggaagagaacctaagatatcactttttaaggtattacttaattggaggtagtgcattttacacatttctgatggtttaggctaaaccattt

SEQ ID NO: 907319 - DNA, 649 bp, Homo sapiens
cgcaacgtaaagcaagttcccatccttcagcccatgttgttccacatattgaatttcctgatctcatgaaggctaagttcttccccaggcatcatggaggctatttaactacctcctgccttagccctttcaacttcaagatcagttttattagatggactcactagacaatggccaagattatacatttctaagagcaattattcatggttaaaagtataatctatggcaggattagaaaataagtgatacagtatgaccactagcccctcttaagcccaaggaaacatgatcactactggactttggcctagaatcgttctcaaaacagagccccagagagcctctgtcaatcggtcggagtcagtacttgagttaaaaccaaccttcaaaccctgatctatagtcttcacctgggtaaactagcaggaagactcatggccagtgagtctcattgcagccattttgtacctaccacaactcgttttctgaaaatctgccagagaatgacttaggctccaggggaaagagagcttaccctccaacctccacacttcaaacctgacttcacaccagtttaaaacackttatggagtccttccattcatagagtgctcttttggatgtttctttttgtcctcaattccat

SEQ ID NO: 907320 - DNA, 636 bp, Homo sapiens
cacattttttttctctagtctaccattgatgaacatttaggttgattccatgtctttgctattgtgaataatgctgtgataaatatgtgcttgtatgtgtctttatggtagaataagttatattccttwgggtatatacccaataatgggattgctgggtcaaatggtagttctgtttttagctgttcgaggaattaccacactgctttccacaatggttgaaataatttacactcccactaacagtatataagcattctgttttctctgcaactttgtcagtatctgttacttttttactttttaataatagtcattctgactagtgtgagatggtatcattgtggttttgatttgcatttctctaatgattagtgatgttgagcatttttgcatgtttgtcggtcgtgtgtatgtcttcttttgaagagtgtctgttcatgtcctttgcccactttttaatggaatggttctttgcttataaatttgtttaaattccttatagattctgatattagacctttgtgagatgtatagttagcaaatattttctcccattctgtagattattgattctgttgatagtttcttttgctgtgcagaagctctttagtttaattgggtcccatttgtcat

SEQ ID NO: 907321 - DNA, 625 bp, Homo sapiens
atgatggaaggtatgagtgcaagttttttwattttgtttttttatatggatacctagttgttccagcacattttgtttaaaagactatcctttctccactgaattgcctttacatattggtcaaaaatcagttgcttatctatgtgtgagtctatttccatgctctcttattaaattcctttaatatatttgtgtatgtgtaggctcattgttttttagatgaaataactagaatcaccctttcctcagctagttagcttacaattaatgggttacttatatataaaacttaaattttggctgggcacggtggctcacgcctataatcctagtactttgggaggccgaggcaggtggatcatgagtcaggagttcaagaccagcctggccaacatggtaaaaccccgtctctactaaaaaaaaaaataaaaaaaaaataattagccaggatggtggcacattcctgtaatcccagctactcgggaggctgaggcaggagaattgcttgaactgggacccgggaggcggaggttgtagtgagccaaaatcgtgctactgcactccaccctgggctatagagtgagactcggtctcaaaaaaaaaaattaaaaaattaaatttttga

SEQ ID NO: 907322 - DNA, 681 bp, Homo sapiens
agctatctttaatatttaatagacatttcacaaaacagtacaaatggccaataatttgagaaaaaaaatatcgacttccccagcattcaaagaaatgaaaagtaaaaaacatgctacttttcatctatctatctatctatttcatatatatacacacacatatatataaaagtttcaggtaagatggtgctgatttatcaacatgaataaaaaaacttgaaacatgatccaacctgtgatccactgcaaagtatttatcttagggtaacaatgtgaggtacacaaaaaccttctgtaacagaatgtctatggatatcaataacagcaaaaccttggaaacaatctcaatttcccaaccacagggaaatagtaatacaaattacagtgtatctatctacaagacaaagcactatgaagacactgaaagtcatatttttgaagactatttaatgtatgggaatatacaataagacaactggtcattttttttaaagcacaggagaaaaggaacagaaatatataaaaattttaagaaactttcaaaacactattttttcatagtataaatactctacaaggactactttasactgttaaactatggataaaagccttttaaaaaaatgtcttgtgttgaaactgccttcccccaaaaacatgttataaaggaatattaagtta

SEQ ID NO: 907323 - DNA, 624 bp, Homo sapiens
cctctacatgctgctttaaatgtgtcccagagattctggtacattgtgtctttcttctcactggtttcaaagaacgcctttatttctgccttcatttcgttatgtacccagtagtcattcaggagcaagttgttcagtttccatatagttgtgtggttttgagtgagtttcttaatcctaaattctaatttgattgcactgtggtctgagagacagtttgttgtgatttccgttcttttacatttgctgaggagtgctttacttccaattatgtgttcaattttagaataagtgtgatgtggtgctgagaagaatgtatcttctgttgatttggggtgaagagttctgtagatgtctaataggtttgcttggtgcagagctgaattcaagtcctggatatccttgttaaccttctgtctccttggatctgtctaatattgacagtggggtgttaaagtctcccattattattgtgtgggagtctaagtctctttgtaggtctctaagtctaagtctctttgtaggtctctaaggacttgctttatgaatctgggtgctcctgtattggrtgcatgtatatttaggatagttagctcttgttgaattggtccctttaccattatg

SEQ ID NO: 907324 - DNA, 644 bp, Homo sapiens
tgacctccataagcccctactttaactggaaaaccacaatgactttttgtgcctcctggattgacatcygctcagagccagtgttcagtagtccccaaaatgtctgataatttccctttccctaaagcacagtgaccctggtaaaaggccagaggtctccttcgggaaggatgggagagagattcaccacgtaaattgtcggtaatgtagtggggtccttcctcaagggaacccggcttccccttcattcaaggggttctgggcacgtagactggctcaagtctggaaattgactgacaggccgtgattctctgtttttgtatttcaaattagtcttttgtccattcgacctagaagttttatccttatataaattaaataggaatgcagtaggcttcctatcaattttacttccaggaacgctgtgattaattagccaatgccacagctctacacaagttagactattctgattgctgctttgtctctgctgtccattacagtagctacgaccaccttgcctttgacggttgagtgctgtcacttggcccctgccacctcaagatccaattattcccgttgtcttgtagttgagtgactgcggttcccactgttcgatctgacatacagagaacagcaattac

SEQ ID NO: 907325 - DNA, 632 bp, Homo sapiens
ggacactatatagcaactgcatcaacaagtctgcaaaataaccagctagcatcatgrtgacaggatcaaatttacacataacaatattaactttaaatgtaaatgagttaaatgccccaattaaaagacacagaatggcaagctggataaagaatcaagacacatcagtgtgctgtattcaagggactcatctcatgtgcaaagatacacaaaggctcaaaataaagggatggaggataatttaccaagaaaatagaaagcggaaaaaagcaggggttgcaatcctagtttctgacaaaacagattttaaaccaacaaagatcaaaagagacaaagaaggacattacataatggtaaagggattaattcaacaagaagggctaactatcctaaatatatatgcacccaatacatgaacagccagattcatagaacaagttcttagagacctaccaagagacttagacacaataacagtggtagacttaaacaccctactgtcaatattaggcagataatcaagacagaaaattaacaaggatattcaggacctgaactcagctctaggtcaagtgaacctgataggtatctgcagaactctccacccaaaaacaatagaatatacattcttc

SEQ ID NO: 907326 - DNA, 620 bp, Homo sapiens
tccatttgttgtgtcctcttttatttcattgagcagggtttgtagttctccttgaagaggtccttcacatcccttgtaagctggattcctaggtattttattctctttgaagcaattgtgaatgggagttcactcatgattggctctctgtctgttattggcatatagaaatgcttgtggtttttgcatattgattttgtatcctgagacttgctgaaatgcttatcagcttaaggagatttgggctgagacgatggggttttctaaatatacagtcatgtcatctgcaaacggggacagttgacttcctcttttcctaactgaataccctttatttctttctcttgcctgcttgcccctggccagaacttccaacactatgttgaataggagtggtgagaaagggcatccctgtcttgtgctagttttcaaagggaatgcttctagtttttgcccatttgatatgatattggctgtgggtttgtcataaatagctcttattattttgagataatcaatacttagtttattggaataccatcaatacctagtttattycaacaaaagccaatggaaactaatacaaatggaatctaatacctctaataccatcgatacct

SEQ ID NO: 907327 - DNA, 514 bp, Homo sapiens
tatcttagttttgtctattctaggttcytaccatttcctggcttttctttcctctaggctgaatttttattaggcagtctttttccttgtggagagaagcatagctccccacttatataatcctcagcactctcagttgcagaaggaaggatactttctcacagcttcaagagttcctgccccgaaaaaaagcactttgattggtcctacttgggtcagatgtaccaatcactgtgtccagggaagatggaatactctaattggtctaaccagggtcctgtggccacactaggagacagccccacccaagtcactggcactgggaaggggaaggggtagttctggaaggaaaaagggctgtaaccagaaagtaaacaaagcaggcaaaagcaaatgtctacaaaaagatacattcacacaaagtaaaacaagaatacaatataaatacaacctctacacacccagtagcataggtaaaattagaaagatttatggtaccaaatggtggcaaaga

SEQ ID NO: 907328 - DNA, 528 bp, Homo sapiens
tttgatgtgggcatttagtgctataaatttccctrttaacaccgtgttagctgtcccaaagattctggtatgttgaatcttttttatcattagtttcaaagaacttgatttctgccttaatttcattatttacccaaatgtctttcaggagtactttattcaatttctatgtaattgtatggttttaagtgaatttcttagtcttgagttctaatttgcttgcactgctgtctgagagactgtttgttatgatttcagttcttttgcatttgctgaggagtgttttacctctgattatgtgatcaattttagagtaagtgccatgtggtcataagaagaatgtatattctcttgtttttgggtggagagttctatagatgtctatcaagtctgcctgacccagagctgagttcaggtcctaaatatctttgtctaatattgtcagtgggatgttaaagtctcccactattattttgtgtaagtctaagtctctttgaaggtctttaagaacttactttatgaatctga

SEQ ID NO: 907329 - DNA, 624 bp, Homo sapiens
tcaccatgttggccaggctcgtcacraactcctgacctcaagtgatccgcccaccttggcctcccaaagtgctgggaatacaggcgtgagccaccgtgcccagccttggtagtgtttttgagttcaattatgtccataatgattttctgcctactggatctgtccatttctgatagaggagtgttgaaatctccactgatggtgggattcattgctttctccttgcaattctgtttatctcacatatattgacactctgttgttagatgctacatgttaagaattgttgtcttctttgagaattgactgctttattattatgtgatgtccctctttattcttgataactctccttgtttgaagtctgttttgtctgaagttagtatacagtgaacaacataggggttgaacaaataggggttaagaactctgaccccttgcatagttgaaaatccatataaaacttatattttatttattttacgttttgtttttattttattttttagaaacagagtcttgttatattacccaggctggtctcctggcctcaagcgcttctcccacctcaggccccgagttgctgggtttataggtatactccactgtgcctggcaaactgtg

SEQ ID NO: 907330 - DNA, 656 bp, Homo sapiens
ctattcagctccaaggacagcagctcagtcattgacccaggcagacatacaggtattacaggacggtaagccttttagacacaaagaggaaatacagtgcattataattgtgactctagaaaataagactgatacagatctttagatttgcctatccaaatgaaatttaaacatctaaaaatcacagagctttatgagtagcagtagattcttactgtaaaactgtacctgcgtaatgagacatgctggaacatgaaccactatgaaataattcacatatctcagtgttcagatcgctaatggaaagaatgtatgtgacatggatacaactctacggtataaatatataggtatggaacccttaaaaacatgttttgtaaaaaatactatatacacctaactgaaaccttttaggtgcataatagtaataaatatttcttattctgtacccctccccacccccaccatactctcaagaaaagcctgtttagatttgtgcttttatctgcatcaaaatttttcttatttaacacatgttaaatttggtggttttggtatcatatattcttttgyatgtcttttcatcgaatggtatttcaaagactactgctatttgcatgcaagtaactgtatgcaattattgtcagattgcaaac

SEQ ID NO: 907331 - DNA, 598 bp, Homo sapiens
agttcccacacagagtccctactggggcactgcctactggagctgtgagaagatgaccaccattctccagaccccagaatgcagatccactgacagtttgcaccatgtgcctggaaaagctactgacactcaatgccagatgtgaaagcagccggcgggggagctgtttcctgcaaagccatgggtggagctgcccaaggctgtgggagtaaacctcttgcatcagtgtgacctggatgtgagacatggagtcaaaggagatcattttggaactttaaggtttaatgacagccatattggattttggacttgcatggggcctgtagtccttttgttttggaaaatttcttccttttgaaatggctgtgtttaaccaatgcctgtacccacattgtatctaggaagtaactaacttgctcataggctcataggcagaagggacttgccttgtctcagatgagactttggactgtggacttttgagttratggtgaaatgaattaagactttgggggactgttaggaaggcacgattggttttgaaatgtgaggacatgagatttgggaggggccaggggtgaaatcagatggtttggtt

SEQ ID NO: 907332 - DNA, 596 bp, Homo sapiens
aatctataaatcatagcaatgttaatttaaagaaatacttattaaatgcccactatggactagacagagcaccctgtgcctctaaattgattatgaaagcagtcaatgaagtcttttcttggcttaaaatgtataaaatgccacgacgtccctggctttagttggttaacaacactttgcatgtgggctaaaacaacgtgtgtgcatttttaaaaattaccaaaactcatttggtcagatctcaattgaattttcagatgccaaaagtcaaatgtttccaaatagaaattcagtatagattttaagattttgtttaagattttgtctcccatcaagtcatgtcaagagaaccaagtttaaatagtggaatagttcctaacacgatctcaatattttgtctttccagaacgatatgtggtaccccaaattatctctctcctgaagtcctcaacaaacaaggacatggctgtgaatcagacatttgggccctgggctgtgtaatgtaagtaaatgcagcagaataattaaaaagcaaattcggatttagattttaacacttgaaaagwgttgctttatgaccattgctaaagatgtgt

SEQ ID NO: 907333 - DNA, 563 bp, Homo sapiens
aatcacttatcactttaccccagtaggtttttgattagataattttctttatcatggattktcctttctttctattgtatctttcattctagacaaaactcaggccctcatgtctacaaactcttcatattcctatgtgtacaaggtgcctccacacatttctcatctcctctgtaaatcactataagctattttcttgtccttattttcttgctaaaattcctgtcttatgagctacagctaagtgtgtgaaattaagaaaaaaatggtggatatatggatgatgaaatggagaatcatagacaataaaggtgtctgaatatttattatgacaaatgtattaaccaaatatgcattcagaaactaactcccatgatttctagttgggcgaagtaagctaaaccacagtttccttttctaaaagaataaattaatactagctactttgctgcttttttgtcagttaattaaaacaatgcatgtaaagatcttatcacagtgcctaccaaataataagcattatttcaatgtagttgatcacatatataaaacatacacgtgtg

SEQ ID NO: 907334 - DNA, 621 bp, Homo sapiens
atttcactgtcctgctacctccactggagcaggtgctagtatccacagctgagagacctgaagatgaatcctgtcacaggactctttacagacactcctcagtaccagcctggagcccagtaacttcactgggaggctagacccagaagagcaataacaatcactgtagtctggctcttaggaagccccatccttagggaaaggggaagagcaccacataaagggatcaccccatgggacaaaagaatctgaacggcagctgtagaatcccagatctttcctctgacagagtctactcaaatgagaaggaaccaattctggtaatgataaagcaaggttctttaacactccaaaaagatgatactagctcaccagcaatgggtccaaaccaagaagaaatctctgaattgccagaaaaataattcagaaggtcaacctatggacataaaaaattaaatataaagaatttagaaggtggattattaagctactcatggaggcaccacagaaaagtgaaaaacaatttaaggaaattttaaaaataatacaggagatggacaaaaaatytccagagaaacagatagcatcaataaaaaataatcaaaacttttggaaataaaa

SEQ ID NO: 907335 - DNA, 643 bp, Homo sapiens
tagataccctataagctagaagggagtggggtcctatcttagcctcactaaacaaaacagtatccagtgaaactaagcttcataaatgaagcaaagataaagcctttttcakacaaataaatgctgagagaattcaccactgccaagccaacactacaagaactgctcaaagaagttctaaatcttgaaataaaacctcaaaatacaccaaaatagaacctgcttaaagcataaatcccacaaggcctataaaacaataacacaatgaaaaaaaaaaccaaggtatttaggcaacaactagcaagatgaagacaatagtacctcacatctcaatatgaacattgaatgtatatggcctaaatgttccacttaaaaggcacacaatggcacaatggataagaattcacccatcaagaatctgctgtcttcaagagactcacctaacacaaaaggactcaaataaggtaaagaggtggaaaaagatattccctgcaaatggacaccaaaaatgagcaggagtagctattcttatatcagacaaaacagactttaaagcaacaacagttaaaaaaaaaaaaagacaaaggtggacgttatataatgataaaaggactagtccaacagaaaaatatcacaatcttaa

SEQ ID NO: 907336 - DNA, 553 bp, Homo sapiens
aaatcacagcagagcttcctaagcagctgtctctrccatttcctgactggtactcctcccctgggtgacaaatgcgtatatgctaatagcattagctgtaccctggcatgctcgtctgcccatttatttctttctgctaatgaacaaggcataaatattttgtgaactgagccataggattacagtttaaaagcccacttccccaaagagaagatacttgtggaccattagtactggcaaggggctgtgcagtgaattgccttccagagaaaaggctggcttgtccacccactcggcatttagcactctttatagaaattgcttgtataattggcttttcccctgctggaccataaaaaaatgagggcaagcaccatgccttcttgttcttccctgtgcttagcagaggggcaggcactgctaggcacacagtaggcatccataacttattaattaattagtcatcacagaattaggccagtagccacaggtttcttgatttattctaaattgagttttgaactataatggattatgagactgccttattaat

SEQ ID NO: 907337 - DNA, 553 bp, Homo sapiens
aaatcacagcagagcttcctaagcagctgtctctaccakttcctgactggtactcctcccctgggtgacaaatgcgtatatgctaatagcattagctgtaccctggcatgctcgtctgcccatttatttctttctgctaatgaacaaggcataaatattttgtgaactgagccataggattacagtttaaaagcccacttccccaaagagaagatacttgtggaccattagtactggcaaggggctgtgcagtgaattgccttccagagaaaaggctggcttgtccacccactcggcatttagcactctttatagaaattgcttgtataattggcttttcccctgctggaccataaaaaaatgagggcaagcaccatgccttcttgttcttccctgtgcttagcagaggggcaggcactgctaggcacacagtaggcatccataacttattaattaattagtcatcacagaattaggccagtagccacaggtttcttgatttattctaaattgagttttgaactataatggattatgagactgccttattaat

SEQ ID NO: 907338 - DNA, 553 bp, Homo sapiens
aaatcacagcagagcttcctaagcagctgtctctaccatttcctgactggtactcctcccctgggtgacaaatrcgtatatgctaatagcattagctgtaccctggcatgctcgtctgcccatttatttctttctgctaatgaacaaggcataaatattttgtgaactgagccataggattacagtttaaaagcccacttccccaaagagaagatacttgtggaccattagtactggcaaggggctgtgcagtgaattgccttccagagaaaaggctggcttgtccacccactcggcatttagcactctttatagaaattgcttgtataattggcttttcccctgctggaccataaaaaaatgagggcaagcaccatgccttcttgttcttccctgtgcttagcagaggggcaggcactgctaggcacacagtaggcatccataacttattaattaattagtcatcacagaattaggccagtagccacaggtttcttgatttattctaaattgagttttgaactataatggattatgagactgccttattaat

SEQ ID NO: 907339 - DNA, 553 bp, Homo sapiens
aaatcacagcagagcttcctaagcagctgtctctaccatttcctgactggtactcctcccctgggtgacaaatgygtatatgctaatagcattagctgtaccctggcatgctcgtctgcccatttatttctttctgctaatgaacaaggcataaatattttgtgaactgagccataggattacagtttaaaagcccacttccccaaagagaagatacttgtggaccattagtactggcaaggggctgtgcagtgaattgccttccagagaaaaggctggcttgtccacccactcggcatttagcactctttatagaaattgcttgtataattggcttttcccctgctggaccataaaaaaatgagggcaagcaccatgccttcttgttcttccctgtgcttagcagaggggcaggcactgctaggcacacagtaggcatccataacttattaattaattagtcatcacagaattaggccagtagccacaggtttcttgatttattctaaattgagttttgaactataatggattatgagactgccttattaat

SEQ ID NO: 907340 - DNA, 621 bp, Homo sapiens
tttttttcttttcttttttttttttttgagacagagtctcgctctgttgcccaggctggagtgcagtggcacgatctcggcttgctgcaaggtccgcctcccgggttctcaccattctcctgcctcagcctcccgggtagctgggactacaggcacctgccactgcatcaggctaatttttttttttttgtatttttagtagagacagagtttcactgtgttagccaggatggtcttgatctcctgacctcatgatcctcccgcctcagcctcccaaagtgctgcgattacaggtgtgagccaccgcctgagtgagtttcttaatcctagttctaatttgattgcactgtggtctgagagactgtttgttatgatttccgttcttttggatttgctgaggggtgttttacttccagttatgtggtcaattttagaataagtgcgatgtggtactgagaagaatatattttctgttgatttggggtggagagttctgtagatgtgtattaggtcyacttggtccagaactgagttcaagtcttgaatatccttgttaattttgtctctcgttgctctgtctaatattgacagtgtggtgttaacttttcgcactgttattgt

SEQ ID NO: 907341 - DNA, 594 bp, Homo sapiens
ttgggttggttccaagtctttgctattgtgattagtgccacaataaacatacatgtgcatgtgtctttatagcagcatgatttgtattcctctgggtatgtacccagtaatgggatggctgggtcaaatggyatttctagttctagatccctaaggaatcggcaccctgccttccacaatggttgaactactacagtcccaccaacagtgtaaaagtgttcctatttccccacatcctctccagcaccccttgtttcctgactttttaacgccattctaactggtctgagatgatatatcattgtggttttaatttgcatttctctgatagccagtgatgatgagcattttttcatgtgtctgttggctgcataaatgtcttcttttgagaagtgtctgttcatatccttcacccactttttgatggggtttttttttccttgtaaatttgtttgagttctttgtagattctagatattagccctttgtcacatgagtagattgcaaaaattttctcccattctgtaggttgcctgttcaactctgatggtagtttcttttgctgtgcagaagctctttagtttaatgagatcc

SEQ ID NO: 907342 - DNA, 586 bp, Homo sapiens
ctagacaagctccagtctcactcttgcmccttcaacagatgcctggtgaattgggccccagtaaggtccaggtccccttctttctataagacttaaagcaaattaagggggatcttggcaagtttttagatgaccctgacagctgtatagaggctttccagaatttaaaccaagtatttgaactctcctagaaagacattatattacttttgaattagaccttgacaaacactgagaagcagccacctctgcaagcagcagagagatttggggatgagctttttattacatatggtgtcagggaaggggccaaactttacccaactggaggaaaagcagtaccagtggatgaccctaaatgggatcccaatgatgagatgggagaatggaagaggagacactttcagatgtgcataatagagggcttaagtagtactagaactaagtctctcaattatacgaagctactcatcatagaccagagatataatgaaaatctcactgccttcttggagaggctaagaggggccttggtaaagcacacctctctatctcttgattccgttgagggacaactaatcctaaa

SEQ ID NO: 907343 - DNA, 623 bp, Homo sapiens
tggcagacatggaaggggcagacatcacttcaaaccatactcctccrgcaggaacacagtggtgttgcctcaagctcactgaaagggaaacaaggagatgcaatcttccaagactgagaagaaacaatgggactggtgaacatttcactagcctgtgccacattcatatatatttgtttaattctcacgacacagggactttattatccccattttgcagataagcgagctgaggcatgaagagtttcataaatatcacaaggtttcatgaggagtaaaaggtagagctaagaaataaagccagtgaaattgtcttcagaggtcaaatttctaatttttatgaacatactgttcaaattaaatgtcacctaattcataaaatacttttatctgcaagacaaggttatatacttttaaaaactcatcagggaaataatgggttctttaactgttctttatttcagtgttatttattactacattgctactctcaatctttctgtgaatatgtgtgtacatgtgtgtatctgtacatttttgaaatgtattcttagtttctgaattttatttcagaactacgattattgactatcttcatcattgttgaaatatgtatgaagcac

SEQ ID NO: 907344 - DNA, 653 bp, Homo sapiens
tctcatggcaagtgaaatgaaatatattggcttagttagtaaagtttattttactcaatcaaataaatatttaaagacataaatctaagcatgttacctgtccagattaaagccttctatggccttctattacacttggaataaagtccgctctcttttccatgatttattcatacccacataatcgaggtctaacctctcagacctatctccctgatatctgccttcctttccacaggatccagtgacacttgctttaatgttcccggaagacttacttctgccacctgaaccaagctcttcctcctcgaatgaccttttgtggtcatcagcctttagtagggcttcgcatggtcctcatttctggtgtcctcgtctatgtgtaactcctcctcttgtgcatgagctacacctattaactcaacttctagtgaatagaatgtggcaaaattggtgagaagtcccttttgagagtaggtgacttctgtttggggttctatctacttttcactcccacaccttccagtccttaagtctgagggaagcccgctgctctgttgtgagtagcccaggtggcaaggaaatgaygtctctagctgataggcagggaggccctgacacctgtcaacagcctgtgagggagtctgaacaca

SEQ ID NO: 907345 - DNA, 548 bp, Homo sapiens
aatattgtggagacagtgaaaagatcagtggaaaccactggttaggggtgagggagggatgaataggatccctttagcactaaggatttttagggcagtaacaatactctgtatgctactctaatggtagatacttgtcattatgcatgtgttgaaactcagaatgtacagtaccaggagtgaactctaatgtaaactgaatttgggatgataatgatgtgtcagtgcaagttcatcagttgtaacaaatataccactcaggtgaaggaagttggtggagaggagtttgtacatgtgtggggacccaaggtatatgggaactatctacttcctgtttagatttactttgaacttaaaactcctttcaaaaaggaagtctattaaaaattaattgactgtatatttgtctatttttgagctcgctattctactccattgatctktatgtctatctttatgtcaagcagtactttgattatttagctttacagtaaattttgaaatcagtgttactcctctttcttcatctttgtcaagattattttggc

SEQ ID NO: 907346 - DNA, 600 bp, Homo sapiens
ctttgagaggccaaggtgagagaattgcttgagtccaggagtttgagaccagcctgggcaatatagcaagatcctttttctacaaaaaaaatgttaaaaatgagccagatgtggtgatgcatacctgtaatcctagctattccagcagcttagaggggagaatcactggagaacaggagttcaaggctgcagggagctatgatcgtgccactgcatcccagcctgagcaacagagtgagacctgcttctttttgagaaggaaagaaagaaaaatggataaataaaaggtgtttttcttgagccctcggtggatatgaaaagtcaacttttcaatccacagttggttaaatctgcagatgcagaatgcacagatatggagggctgactgtactatgccattttttgtgtgtttgtcttgttttgttttttttgtttttgtttttgagatggagtctcgctctgtcaccaggctggagtgcagtggcacagtctcggctyactgcaacctccgcctcccaggttcaagtgattctcctgcctcagcctcctgagtagctgggactacaggtgcatgtaaccacacccagctaatttttgtat

SEQ ID NO: 907347 - DNA, 641 bp, Homo sapiens
gactgccaagtcattagggaatatctccaagactgcttttgtttgaaaactgttgacttgtttctctgaaagaaaagtacagccactattgtttactattgataggtttgtaggacttttcattctttaatttccttgtttgatataacaaatatttatttgaacactaacaatacacaaggcaaaatgcaagggatggagggaaaacaggacatataaatatgaaatatgtattttatatatatatgtgcatatcacttcatttggagtgatagagaagacatatgcatgtatacaaataaagataactaatcatataaaacaacaagtaaaattccaaattactcttgtaattgtttaggggagagaaaatcttctatcctctgaaggttcaataattgaatctatgaaataaactgacagtagacagtttagtaagagaaaagctattttaattacacacaggagtcccacaaagtagaggacttgaagaggggccagatgatagaagtttttatagcatcctgagctaaagaaaggagtaggggttggtggtttatsgggggtggtgtctatacaagttgcaggggagtaagaggagggaatgcatggagaacaaaggttgtcttgttatacagata

SEQ ID NO: 907348 - DNA, 606 bp, Homo sapiens
ggaggcaagttgtaatgaacattaagtaagataatgtgtttaaaagttccacctggcatttgtaggcaccccatagaagatgctgttttcatcatctgcatcataatcatactcttttcaaattaattcccatatacaaatttccttatcatcctcatgtttgtcttcaatgcataccatgagaattgctttagtatctttactattctcctttctgataatcttttcctaattcattcctaattcttattcatttccttcaaatactcttcatcaaaccagagcttttgtatctaagtctgatgaaaagaacaaagagaacaaatgatcttatcatattcccttagcaaattgttagtaaaatgtctgggtcacaaattcagtataattatgaaatgggatccagacagaaaacaaaattctattcacatggttcaaatgaaaagacttcagtgaagagcttgagtaagttttacagaacaaagatgggattttgcagcacctaaggccagcctcagtggmaaactgggtactgattttatggctgatgagtcaagaggacaatatagtgttatttcaccccagtgagagctgaaaccttaaagg

SEQ ID NO: 907349 - DNA, 628 bp, Homo sapiens
ctacaatcagataagaatgtatgtcgtgtgcacaggtaaaaattaaggcatgacatgactattattggtactttttaataaataatataacatcttttctacagcagagcattargaaaaggaatggaacgctgaaggacaagaacactggaagattaaataggattaaaagggacttcctatttttctatatccaagagaaatggaaagacatatcataaggaattatggaaaaagaaattgaatttctcttctactaatttgtgactttttgaaaaagatagtgccttgatcagaaataggttagatgagtgattgccaccatataattcattttctcagatagatgttaagtaaagaaaaccagtcaagacatagcacctaaaggcaagacgggagaaaatgattttgaaaatattgagaagaagaaagagaagtcctaagctttgatttttggagtaacttatcattgaagtcacttctgctccactatggaaataaactatcaatggatttagaaaacagattttgcaggctgaagtcacttaacatttttaagcatctaaatatgcagtttactttattatatagacttttctgttattcagagtttataaaacgctgtata

SEQ ID NO: 907350 - DNA, 642 bp, Homo sapiens
tataattaccttggatgtccaacaacttgtggcaatatcatctagtaaatccaagtcaacaccaatctgttgactcagaagtccaccttctaggtgtacccccaagataaatttgttcttcaaaaaaaatgtgatttcttcataaaaggcacatctggaaacagcaaaaatgcccacaaataagaaaacaaatgaacacatcacagagtgttcacactattgaatattgcaataaagcaaaaactgaatatagcaatagaaatgaagtatttctacaaagagcagtatgcataaatctcccaaacattaaaaaaagagcaggagaagccaaacacaaaataatctatagtgaattattccctccagatgaattccaaaaatacctaaaattattggagattaattatcctcaccccttctctgaagggagaggtagaagttgggaattcgtggggaaggcatggggaaacattctgatactctgttcacattctatattctgaataattaagtattctggaaggggttacataggtgcacagcattatacaaatcttcgtctaggtatagtctcaagatttgggcatgttaatatatgartgttacacttcagttaaaacagttcagtttcttttgaattcc

SEQ ID NO: 907351 - DNA, 588 bp, Homo sapiens
tttagactctccattttatttcatcaatctgtakcaacaagatatattcaataattttgaactctccaaaattattaaatatattccatccgataatatttttgtactcttcattttattccactgtctacacatatgctaatgccacattcacatgcatacttctgctttgaagacaaattttatgaattatgagtcctccaattttgtccttcctttttactataattttggctcttctgtatccctggcatttccatataaatttaaaaatcaacttgtcagtaactacaaaaaagaaagctggaaatttaatagggattgttttgaatatgtagatcaatttgcaagtattgttttgttaacaatattacatcttctctttaatgaacaggcatttcttaccatttacttgggtctttacttctttttattattattattattatactttaagtttcaggatacatgtgcacaacatgcaggtttgttacatatttatacatgtgccatgttggtgtgctgcacccattaactcatcatttagcattaggtatatctcctaatgctatccctcccccatccccc

SEQ ID NO: 907352 - DNA, 588 bp, Homo sapiens
tttagactctccattttatttcatcaatctgtagcaacaagatatattcaataattttgaactctccaaaattattaaatatattccatccgataatatttttgtactcttcattttattccactgtctacacatatgctaatgccacattcacatgcatacttctgctttgaagacaaattttatgaattatgagtcctccaattttgtccttcctttttactataattttggctcttctgtatccctggcatttccatataaatttaaaaatcaacttgtcagtaactacaaaaaagaaagctggaaatttaatagggattgttttgaatatgtagatcaatttgcaagtattgttttgttaacaatattacatcttctctttaatgaacaggcatttcttaccatttacttgggtctttacttctttttattattattattattatactttaagtttcargatacatgtgcacaacatgcaggtttgttacatatttatacatgtgccatgttggtgtgctgcacccattaactcatcatttagcattaggtatatctcctaatgctatccctcccccatccccc

SEQ ID NO: 907353 - DNA, 588 bp, Homo sapiens
tttagactctccattttatttcatcaatctgtagcaacaagatatattcaataattttgaactctccaaaattattaaatatattccatccgataatatttttgtactcttcattttattccactgtctacacatatgctaatgccacattcacatgcatacttctgctttgaagacaaattttatgaattatgagtcctccaattttgtccttcctttttactataattttggctcttctgtatccctggcatttccatataaatttaaaaatcaacttgtcagtaactacaaaaaagaaagctggaaatttaatagggattgttttgaatatgtagatcaatttgcaagtattgttttgttaacaatattacatcttctctttaatgaacaggcatttcttaccatttacttgggtctttacttctttttattattattattattatactttaagtttcaggatacatgtgcacaacatgcaggtttgttacatatttatacatgtgccatgttggtgtgctgcacccattaactcatcatttagcattargtatatctcctaatgctatccctcccccatccccc

SEQ ID NO: 907354 - DNA, 664 bp, Homo sapiens
ttgttttagcccaaaatcttcttaagctgataaagaacttcagcaatgtttcaggataaaaaaatcaatgtgcaaaaatcacgagcatacctatacaccaacaacagtaaagcaaagagccaaatcacgaacaaactctcatttacaattgccacaaaaagaataaaatacataggaatacagctaactacggaggtgaaagatctctacaaggagtactacaaaccaatgttcgaagaaatccgagatgacactaacaaataaagaaaattccatgctcatggataggaagaataaatatagttaaaatggccatactcctcaaagcaatttatagattcaatgctgttcctattaagcaatcattaagattcttcacagaactagaaaaaaaattttaatttatatgaaaccagaaaagagcctgaatagccaagaaaatcctgagcaaaatgaacaaagttgcaggcatcacattaccagacttcaaattatactacaaggctacagtaaccaaaacagcatggtactggtacaaaaacaggcacatcaaayagtggaacaaaatagagagcccagaaataaggccatacatctatgatcatctgatcttcaacatagctgacaaaaacaagcaatgaggaaaggattccttatttaatag

SEQ ID NO: 907355 - DNA, 578 bp, Homo sapiens
agactgcaagactaaaacaccaaaagcaacggtaacaaaagccaaaattgaaaaatgggatctaattaacctaaagagcttctgcacagcaaaagaaactatcatcagagtgaacaggcaacctacagaatgggagaaattttttgcaatctatccatctgacaaagggctaatatccagaatctataaggaagttaaacaaatctacaagaataaaacaaacaaccctatcaaaaagtgggcgaaggatatgaacagacactcctcaaaagaagacatttatgcagccaacaaacatatgaaaaaagctcatcatcactggtcattagagaaatgcaaatcaaaatcacaatgagttaccatctcacggcaattagaatggcaatcattaaaaaaatcaggaaacaacagatgctggaaaggatgtggagaaataagaacacttttacactgttggtgggagygtaaattagttcaaccattgtggaagacagagtggcgattcctcaagggtctagaaccagaaataccatttgactgagcaatcccattactgggtatatacccagagaattaca

SEQ ID NO: 907356 - DNA, 606 bp, Homo sapiens
taagaatgaaaaagagaacaaatagccaaagtaatcctaagcaaaaagaacagaactggtagcatcacattacctgaattcaaagtatgctacaaggttacagtaacaaaaacagcaaagtagtggtataaaaacagacacatagaaaaatgggatagtatagagggccaacacataaagctgcacatctacaaccatttgatatttgacaaaattgacaagccaaagcgatagggaaaggactaccttttcaataaatggtgctgtaataactgaactgtcatatgcagaatattcaaactagaccccttccttacaccatacacaaaggtcaaatcaagatggactaaaagcttaaatgtagaacttaaaactataaaaccctggaagaaaatctactaattacctgtctggacataggccctgggaaacatttcatgatgaagacattaaaagcaactgaaacaaaaacaaaagttgacaaatgggacccaactaaactaaagatcttctgaacagcaaaagaaactatcaacagagtaaayagacaacctacaaaatgggagaaaatatttgcaaactactcatctaacaaaggtctaatat

SEQ ID NO: 907357 - DNA, 619 bp, Homo sapiens
tgcataaactagaaaacctagagtagatgggwaatttactggaaatatacaccctcctagattaaatcagaaagaaatagaaactctgaacagaccaacaacaagcagcaagattgaaatgttaataaatggtgtaaagaaattgccaacaaaaaaaatcaatgaccagatgaaatcacagctgaattctatcagacattcaaagaagaattggtcccaatcctattgacactattctacaagatagagacagagggaatcctccttaaatcattctatgaagccagtattcccctagtacaaaaactgggaatggacataacacccacacacacaaaaaaaactacagacaaatatccctgatgactatagatgcaaaatatagctaacaaaatactaactaaccgaatctgacagcataacaaaaagataatccacaacgatcaagtgggtttcataccagggatggagggatggtttaatatatgcaaatcaataaatgcaatacaccacataaacagaattaaaaacaaaaatcccatgatcatctcaatagaggcaaaagaagcatttggcaaaatccagcatccctttatgattaaaaccctcagcaaattag

SEQ ID NO: 907358 - DNA, 669 bp, Homo sapiens
attattccttttaactttttttcaattttaatttttattcagcctcttacctttttgctaaaaccaaaagttcaaaagaaaggtgatcagggcactcccaggaattttttagccatgtgagaatatatggtgaaatgattcaagtagatgcaacatggtctactggaaaagcactgagattttgaggagaaaacttagctctgccattagttaattgtcatcaaggtcttcctatgaaaattgtagttcaattttcaaacatttattgtttttctccaaagtgctaggcatatgcttttgtgctggagatgaaagatgaataacatgtaggtgctgtttttgaagaacatcactgaagagagagtgagctaaaacaaataatgatttgtgtgctagaatagagccaggttgtacagaaaggttctattaatagcgctcagtgatccctgcaaaagaagcatttgattctgtccaaagagatgagtacagaaaaagccaaagagaagaaatgatatttgatttgggattttgaaggatgaataggatttaaccagatgaatacattggaggaaagatattctggtaggaacactgtgagtaaacaactgtaggactttgggagggattgtgagtagagtgtgcaagayggaaagtacgttggcattataa

SEQ ID NO: 907359 - DNA, 661 bp, Homo sapiens
ctagaaagactagcactatctagggatgaagkacttattaatagaagagagagagagagagcttatgacttagtccttcctctactccaacccttcaatgcttttcacagggaattcagccagagtaaaatataatagggatcttcttattaaaagtatttttaagatggcagacagtagtattctaccaagtaactacatacaatctttgcctcctcataccctggaaaagtaacaaaatacccagtctttattctactagcttcaccataatggaggctttagatggtatggctaattaaaattcaattgtatttcaataacaggtctttctttgtcatttcatactatacaaagctacagatctttctacctgttatgagaaaaacaggaagcatcatagtcactttataggcaaccaaaattttactagagaaataaaagatacagaatgcacaatgaagcatcactgagagaccccctaatgatatttgacaaccttccagaagacagaaaggaccttatccaagacagaactgaaaactagcaaacaggcatgctgctctgccacaataactgttcaagcctcccagaaataaatctgaattaacacataattgttgttttctggctagttttttttctagaaataaatatggga

SEQ ID NO: 907360 - DNA, 608 bp, Homo sapiens
cctgaatagaccaataaagagttccaaaattgaatcagtaataataaaaaactttctaaccataagaagcccaggaccagacrgattcacagctgaattctaccagaggtacaaagaagaactggttccaatcctactaaaattattccaaaaaattgaggaagagggactcctcctaagtcattctatgagaccagaatctttctgataccaaaacctggcagagacaaaagaaaaaaagaaaacttcaggccaatattcctgatgaacttagactccaaaatactcagcaaaatactagtaaaccaaaaccagcagcacaacaaaaagcccatctaccactatgatgtggtttggccgtgtccacacccaaatctcatcttgaattgtagctccaataattcccatgtgttgtgggagggaccctgtgagggatacttgaatcatgggtggcagtggggaggggggtcctttcctgtgctgttctcaggatagtgaatgagtctcatgacatctgatggtttttataaaggggacttctcctgcacatactctctcttgcctgctaccatgtaagatgtgactgctcctcattctcctgctgccat

SEQ ID NO: 907361 - DNA, 548 bp, Homo sapiens
atatcttttctaagctctcaaaaatgagtctaacttaatttagtaagtatgtgaccagtttctagtaaacttgatttcttcttctaagctcttgctagttttttaatagaatcttgcttacaattaaactttgtaatatacatatgcataattttgctgaattgctcgagaacaagaggaagacagcaaagaattttttaatatactacaatataatgatcactctcaagaaatgtattattaatatattatgtaatacatagttcacattcagatttatccactgccacataatgtttttcagagcactatccaaatgaggttcatatgttgcttttagttgttgtgtctttttagtctctttaagtctaaagtagtttccctgccttttacagctttcatgacactgaagaattttggagagttcagtacaattattttgcaaaatatttctgtatatggatttatctgattgttccttcatgatcrgattctggtgaaacatttttgtcaagaatactacataattgatgtgtctttctaagtgt

SEQ ID NO: 907362 - DNA, 654 bp, Homo sapiens
tacagagaagctttttcctcagktttttcttcgagtgatttggtaaaaatacttaggtgacagaatcatggccaaatgcctcccaaacctgccctccaaattttgagggagttagtacttaagctgctttgtgagtatctttatttcgccactgtgcttggggaccagcacccacatacatgtttgattggcatgctgaccaaacacaggatgaatgcaattaaagtatgccttattttttcttttctaaagtttctttggataggctgcaggtaacttggggtaacttgtatattttccaccagtaacactctgaccgaggctcccttctcctggtgtctgtccactgcactaacaggctttcactggagtcccctgcctgacagtcctccctgccaggacctgctaaggcttcatgaagtttgctctcctcccagaaggggccaagatggagtcttgagggaacactcccatggcaaaagggagttaactctaggtctctgctctcctttctctctccccaccccaccctgcccacgcctccctttctcctctgctctcactctcttcccacctgctcctcccactacaggccatgctgttttagctttcacaaagtgaaatcaggcaccagacctcatgtccccagctcca

SEQ ID NO: 907363 - DNA, 656 bp, Homo sapiens
ttacatattttattgttcttagtggtttcttgtctgtatattttatctcccaggtataagtgccttaaaaagaattatatctttactcttattatatcttctctttgtcattaatgtagtaccttgctcatagtaaacattcaataagtattagatggattgatttgatgtatcctatactttttcacaattattctttacatattatattaatcaagactcttttggttgcaagtggtagtaatccaaataaaactgacttaatttgaaaggaaattttttggtccacctaaatgaaattgcaggtatagtttgacttaaggcagagatggatctacaaactcaaataatataattaagaatcaatatctctccatctctccattctgatcctctgggttagatctcaggcagtctgttgactatgaatggcaaaaatggccaccagaaattccagctttcatcttaccagtttaccaacccaatggaaagaaaaaaaactaaatattaggttgaaatatataaaattgctatttatstaggtcaaaatggttgaataatggcaatttcatatctttcaacctaatagttccagaaaaagtcccaatgctaaagttctttggtccaacttagatttcataaccattattaaacca

SEQ ID NO: 907364 - DNA, 673 bp, Homo sapiens
cctgactcaggatgtgtggcagaggggaccatgaagttaactgtgactttcggaagggtgcagtctgttaccctttcggtggcgaggtcagtttccgggaggctctgcaacactgatattttccagatgtttctcctcttctcccttctctggctggctatatcttcctcccttcatcctgctctttcagtgaaattgagataacatgttagaatcttaggcaggttagaatctctcagcagtaggatgtgatttaatatctagacctcttacattaatatttataatagccttcactgcttgtgaatagcataagcactcttttctgttcaaagtcaatactgaaataaaacccaagagtatgttttataaaaatttacttttaatggtgcaatggtaataatctatgtagtccttatggttttcaaatccctttgtgcttatattaccttatttaatacagacataaatctgtgaagtaaataatactatttttatcttcattttacaaatgaggaactggaggctcagagaggttaatttgcataaggtcatacaaatgatagatggcagaactggatttaagttcagactccttaaatccrtgtcttttgtacgttcttttcactaaatttgccatagtgtttctattggtttttgcctatataaaatc

SEQ ID NO: 907365 - DNA, 404 bp, Homo sapiens
tctaccctatattctgctcagtatagagcttaaggagataactatcacagctttaggttttttttaattgtgttaatgttgratcaaaacttttctttaggtgtgcatataaaagggaataagaaagggaaccaactatgttgatagaggaataattcttcaaatgaatgttacattaagaaattgtcaatgaaacactgctgttaataatataaaaggttttatgtgttagattcctctgaatataactttcacattttgtcctcttttgtgctaatagaacattctagtatgccagtagaaaaaaatatcactttagaaaggccttctaatgtaaatctcacatgccagttcacaacatctggggatttgaatgcagtaaatgtgacttggaaaaaagatgg

SEQ ID NO: 907366 - DNA, 664 bp, Homo sapiens
ggtgtggtgctgaaaaaaatgtatattctgttgatttgaggtgtagaggtctttagatgtctattaggtctgcttggtgcagagctgagttcaattcctgggtatccttgttgactttctgtcttgttgatctgtctaatgttgatagtggggtgttaaatttcccattattaatgtgtgggagtctaaatctctttgtaggtcactcagacttgctttatgaatcttgggtgctccctctaatagggtgcattattatattaaggatagtagctcttcttcttgttgaattgatccctttaccattatgtaatggtcttctttgtctcttttgatcattgttggtttatcatctgttttatcagagactaggattgcaacccctgcctttttttgttttccatttgcttggtagatcttcctccatccttttattttgagcctatgtgtgtctctgcacatgagatgggttttctgaatacagcacactgatgggtcttgactctttatccaatttgccagtctgtgtcttttaattggagcatttagtttgtttacatttaaagttaatattkttatgtatgaattttatcctgtcattatgagtttaactggttaatttgttcgttagttcatgcagtttcttcctagtcttgatggtctt

SEQ ID NO: 907367 - DNA, 615 bp, Homo sapiens
ttgaatctaatttttaacatttcttctctctctcctttttctttttttcccctcttcttgtgcattactaggacccagtaccacctgccaggaagattcatgtgccaaccagggggtctgcatgcaacaatgggagggcttcacctgtgattgttctatgacctcttattctggaaaccagtgcaatgatcgtaagtacaacaacctttcatactggaactttgtgaagatgtttggagatttggagaatcttaaaggacaatatgtaaaaggatggctcttctgaaagattcataagtaattctctcctccagaaacttgggaaataaatgactagtgctcttatgagaagagtgaagagatgtgtcttgcttaacaacactaaatattctcccacttgctcactccctgtgttttttctttagattagaatagcgactgagaaacaataaccacagcagcaaaccatttcaggcaatatttttgttgtaagggcttcagttcttcatgaattaaatcacsttatcttattgaatttaactccaaattggttaataattttgagactctccccttttgcattgcctagaattttgaggctatttaaagggtata

SEQ ID NO: 907368 - DNA, 448 bp, Homo sapiens
aaaatgatgcatgatgttatctgagaaaatagtaaagtcacattatggtgtgaccacatgggagcagacaccaattacaatgctatgccccccagatctrtgtggtttttttgattctttatttctcagctttttatctgtgtgcagctgtctgttgttgttctttttcccgttttttctcagtagttttggtcccatatgctctttcattctcttaaggtacactgaggagaaacaagtggagaagttggcaatatagagagaaaattatgtaatacgcattcatctaattacataagcatatgtctctgtatctgtcatgtgaaggatacgatgtctggagaaagttttggtataagactgctcttaccaagtcttttggtattattgaaagtcatgttgccatatttatgatgtggaaatactgtttcactctgaaacaggtagt

SEQ ID NO: 907369 - DNA, 609 bp, Homo sapiens
acagaataaagcactgttgtgtttactgaatagtytctgacacttctgttttaaaaaactaattcttgttttgtttgtggtggttgacttcttgcatgatgcaaaccaggattccagatgagggtttcagtcacggaaacccatttgctttcattaatcccttcatgccacagacaatttaaacctacatattagagtaatataccatttgttctttaactgtttcaaacattgtgtgaagttattttttctatttcttgaacctgctagaaaatcaattttaaagcatgcttattaactcaagaccatatacattaagtggttacttcttaggttcagtgtcttgtcagttccaattacaagctgccctacagaggcatttttaaaacagaaataaatgtaatcctctgttgcatctcttatgtggatgttaagtaaatgaggacaaaagcattcaattttatttgcttgtttacctttaggtgacagttaattcctgtgctctcagattacaatcatatcattatgtgcagctcagagacaatacaatgcaatgtcaagttgaacacaggcaggatttttcagaaaccacaaagctttccattatac

SEQ ID NO: 907370 - DNA, 634 bp, Homo sapiens
tctgggagtagacatgttttaataagcccttcaggctattctgctgctgctcaaatttgagaaccacttatctagaagaagcaaacatttgccaaaggaaatagtggagattargctgtaagttctgtggggaaggagttagggaagtggtgggaaatgcaggatcgtgcctcgtggtaatgcaaagtgcacagatgctgaccgtgcgatccccagctaacccagggtcttatttcactaatccctgtctttggcagtaaagttttccaaatttgaaaaagaaaagccactgtgattggtacagatgataaggaacatttgagatctctttctgatgaaaccatgtccatatatatggccatgatatatgttgggacaaaagacatacactaagtatttaaaacactggctgtaatttgagcaatcttaggcatttacactaaatttggcatagtacctgtatttgtcataatatgagctctggacctacaactaagagactcctgtcagggcctacttaattctagaagagcctctaaaattagccatacaatttaataatatttcaaagggttatcttgtctcattgacataatgagagcaaatcaaaaaaaggctacagcataaatgtata

SEQ ID NO: 907371 - DNA, 596 bp, Homo sapiens
ctcagagattatatactcctctttaatcttaaagggttgtaraagggcaaaggtctgtcttctctaactgcttcctgatgattttatgagggtaggtccagcccagcattggaggagtataaacctctggataagtgatctaagggacccaaaggcaggatgtctgttttccaggtcagaaaatgggatacattggaagcattctgccagcagtgtctttgcattgaattgttgtaatgtagataatacaaattttactaagagtttaaataagcaagagctaatgattaatactaacaagatagcttgttaaaggtcctagaaaaggtaaaaaacaagagactgactagaaatccatttactgaattccaacagcaggtataaaagaggtctttacctgggaaaaactgtctagaacagtggaatagaaaaattacaattagaaagaacagaaaaatgtatgcttttatgcctacttacagcatcatgttaccatttctgactgaatgttaattatcttaaataggtgtggaggtcttccacctatctacagatggaagtattctggacaagtgtgcccatttagtgatccccag

SEQ ID NO: 907372 - DNA, 563 bp, Homo sapiens
tctgcaagtggatatttggacctctttgaagatttcgttggaaacgggagaatcttcacagaaaagctaaacagaagcattctcagaaacttctttgtgatgcttgcattcaactcacagagttgaactttcctttcgagagagaagctttgaaacactctttttccagaatctgcaagtggacatttggagggctttgaggcctgtggtggaaaaggaattaacttcccgtaaaagctagatagaagcattctcagaaactactttgtgatgattgcattcaagtcacagagttgaacattcccttcgacagagcagtttggaaactctctttgtgtataatctgcaagtggagatatggaccgctttgaggcctatggtagtaaaggaaatagcttcatataaaagctagacagtagcattcacagaaaactcttgktgacgactgagtttaactcacagagctgaacattcctttggatggagcagtttcgaaacacactatctgtagaatgtgcaagtggatatttgggcctctctgaggatttcgttggaaacgggat

SEQ ID NO: 907373 - DNA, 538 bp, Homo sapiens
aactcacagtgtggaacctttctttgatagttcaggtttgaaacactctttttgtagaaactgcaaggggataattgcacttctttgaggcctaccgtagtaaaggaaataacttcctataaaaagaagwcataagctttctcagaaaattcttttggatgattgagtggaactcacagagctgaacattccttgtgatgtagcagtttagaaacacactttctgcagaatctgcaagtgcatatttggtcctctctgaggaattcgttggaaaccggataatttcagctgactaatcagaagcagtctcagaatcttctttgtgatgtttgcattcaaatcccagagttgaactttcctttcaaagttcacgtttgaaacactctttttgcaggatctacaagtggatatttggaccactctgtgtccttcgttcgaaacgggtatatcttcacatgacatctagacagaagcattctcagaagcttctctgtgatgactgcattcaactcacggagttgaacactccttttgagag

SEQ ID NO: 907374 - DNA, 612 bp, Homo sapiens
ttggaaataaaaactcaaaatttgacttggattatctaagaatgtatatcaaactcatggtggataacttatacagaaaaggaatttgcataagattgtaggagagttcacaaaagtagttttagaataggataagagccagaacagtgccaaggatctagagaacattgagtaataatctcatcatgatagctgagatgaatcaagttctattttaaaatttattttggtaattgttttactctttccaagatttaaagtcctgggagaggcttgtatttcttattcttggtactttgatttattcctgcaccaagacaaagaccaagacaaactctgacctttcctcagattgaaagaaaattcctcaaaaagaaaaaaggggaaaaaaaagaaaaggaaaaaaaagagaagaagagaagaaaaggaaaaaagagaacaaaaaagagaaagaaacgatatgtgagtattgttgaaaccacaataaggaacaactgggaaacaacaatacttccttctaggatcaagtaaaatgaatcagcatttgcttttgttccagatatctacagytgtgtcacaaatcactggaaatcatagagacttaaaacaata

SEQ ID NO: 907375 - DNA, 676 bp, Homo sapiens
taaaattctgagtgaaatttcagctttttagccagaggacaggagmaatgtacccacagagaaactcctcggaaggaagaactggagaagaggattccctacttttatctgtgaactggctcaagttctgggctcaccctcatactgtatatgcaaaacagatgcaaattagcataaaaaatatttttacaataatctatagtataaaacaatgcccaagtctcaccctaaaccctgagttccaggatagacccaaacaaaataacaaagtctttgaaaactatattggaaccactggccacagaagattaaacagaatttacatactaaacctgaccaggtggattatctgataaaatacaacatacccacacacacatcctccaaaggatttttattaacacaacccagagtctcacagcaaaatatttaaaatgtaattaaaatgtattgcacatacaaagatccaagacaatatgaccaattcttgagaaaaatgacaatcaagagatgtcaatgccataactaatattgttaaaatatccaaaatatccagatgatatgttttggctctgtttccccacccaaatctcatctcaaattgtaatccccatatgttgagggaggaacctggtggcaggtgaatggatcatgagggcacttccccccatgcttt

SEQ ID NO: 907376 - DNA, 550 bp, Homo sapiens
tggaaaatactgggggtcatgctattgtagatacttcttaagtgacctaatttttcttcttaatttttaaagcttcagtatttcataatccaataaataaagctagttactgttactatctataatagagttcattaaaaggatatttatgtgtttcttcttttcttcactaaatgactaagaagcaaacattgaaaatcatttaggataagaagtcatatacagtttttgtccaaaatggttcctacttttaaagaatgtaatattaaatggtttgcctgataattgaattcctcatcataaaatacacacacacacacacacacacacacacacatctgccaaaaaactttaaaaatattttatactagaatatgagctctcttgtgggaaaacataaacattgtaagtatggcatattaccagcaactttcatttaaatataaaattgaattttgtcagtgtttatggcagctagtgaaattttaggtaagaaagtagccaagtgyctcataattaagtagttcagcttttttaaatttccaaaaaa

SEQ ID NO: 907377 - DNA, 620 bp, Homo sapiens
caagttatgaaagacgtgtttgtgataaagaaaattactgaactaggccagagagctgaaagtttactcttagtgcagtgatgtctaactagttacaaattagaatcactggatataattttcaaaatgcatatttccaggccaaagtcccagaaagctctctcaccagggtatccaagtagtttgccaaggcctgggcaagaatgtcagtgacatgacgataagcactccaagccaatgctcattggaggcacaagtgaaacaagatagaaaataaaagcttcatgactttttgccttttactttgtattaactgcctcagccaatcttatacattagaaataatttagctgctttaccaaacgtgttatgacattaaattttaagataaagaaggttgccagtgaaaacgttcttgctattcttacttacaatttagagtcaccatgagggaacctaaaataatgattaaactctcctttctttggttttgtggttgctaaatcactaagacctgtaggaaaatttcacactttgtcactaaatgttatgatgctgtcttttctcaagtgataatmtatttttaaataaataaaataaaaactccagagtgttaattc

SEQ ID NO: 907378 - DNA, 637 bp, Homo sapiens
ctataaattgatggctagcagttatcaaatgaatgttgatgaaaagcagctacttaacattttcatcccaacaccgagttttggaaggayggataatttagatctgagggcctcaactataaataaacagcaactgctttctaaatcccacctttctgtagttgaagattgtgctgcaaatctgacagatgatttttgaaagagaatgatgaatccttattaccaagatactcttaatcccaaacaagagtcctgggtaattttacatatactctcaagattgattgcacagttctcctctggcagctcacaaatgtttgactagatcggaaatggcattcgggcatgattaaaaagattcttctgggcttcccagaaattctcagtcctgtgtcgtcaacaacctaactcattgccattgctgcgggatagacacctcccccgtttcccatgattagcaaccatatacaacctacaggcttctgataaatgattgattctcaaaaaaaaaaaatcgtttaggggaacccatagctccagccagtgtttgtatgtcaaggtattattatttatcacaatggatcagtaagcattgatgacaactggcaaggtattgcttcagatattttataacgga

SEQ ID NO: 907379 - DNA, 566 bp, Homo sapiens
ggtcatcgagtcaatgcccaagatgaagaagccttttctttctgaataccctttgggttcaaaaaggtaacagaggtctgagagtcagaatcatctttttagagagagtttaaccacggggaactgagttttaatccagggacagctgtcccaagagcctgtgtgcttaaccatgctgcgacgtgtgtgtacattatctaatccagagtaaaacagagtaaaagtcacaagatttgggctggggggttggctacatggagcagatcatcctgttggtctattacataaaacgggtgtgctttgagacactgtgtgatctgtctgttccgtgcaacagcttccaatgatgcctcattttttcctttggaatctagaataccgtccaactcccagggcgaatttggtgtttctcaaattgttgaccttgaatcaactgcattagagtcactgaggctggtcctccatgagaaagcaccctcagttaaaaatgcagattcccartctctacccccaaaatggcctcaaccagactttctgtggatagggtctggaaattccaattttac

SEQ ID NO: 907380 - DNA, 647 bp, Homo sapiens
tcctgctaggtgccaaccagacttacgtgcaaaccttagctttgctgtttccttaatgcatgataacctgaacaaactcctgaaattcccttgagcctcaatttccttctctgtgcaatgggcataagaattcccaaccctgtgagttgtaaggattaagtgaaatagcaaaagttgctttcatccctgcagcatgcattaagaaaatcctatggaagtgattagcacctgacatagggtaggtgcctagtaatatattgccgccctgggagtctcttattttttcttcgcttattttcagagggcattgcctggccaatatcatcctcattatatataagctcaaacaagtgcaaatcagagctcctttttttttaaaaaaagaaatcaggttctgcatttggaagagcctagagacaaggaaatgcaacttgaggcatttagggcaactccaattttgggggccacttggttgtgctggagagggaaacaggggcaaaaggagaatttgaaatccccacaggttcctgggaaacaatggaagtcacagggtggggcccttgcatgagaatacattcttttgattttgttttgtctttytgattggctgccagtttcttaatgcaatatgagagcaagagggagct

SEQ ID NO: 907381 - DNA, 615 bp, Homo sapiens
ccgcacctggctcggagagtcccatgcccacggagcctcgcttattgctagcacagcagtctgagatccaactgcaaggcagcagcgaggctgggggaggagcgcccaccattgatgaggcttgagtaggtaaacaaagtggcagggaagctcaaactgggtggagcccaccgcagcccaaggaggcctgcctgcctctgtagactccacctctgggggcagggcatagccaaacaaaaggcagcagaaacctctgcagacttaaatgtccctgtctgacagctttgaagagagtagtggttctcccagcatggagtttgagatctgagaacaaacacactacctcttcaagagggtccctgacccctgagtagcctacctgggaggcatcccctagtaggggcagactgatgcctcacacggctgggtacccctctgtgacgaagcttccagaggaacgatcaggcagcaacattggctgttcagcaatatttgctsttctgcagcttccgctgctgatatccaggcacacagggtctggagtggacctccagcaaactccaacagacctgcagctgagggtcctgttagaaggagaactaacaaacagaaagg

SEQ ID NO: 907382 - DNA, 641 bp, Homo sapiens
caccatcttgctccacccctctcaaatttatataaaaatttaaaagtcatttcaaaatgattctaaaacaatgtggaagaaataacaggcaataattattattcaccatactgagattatcatatcaagaattttattgaaattattatattaactttacttctaaaaaattgtaatttttaaaaactatacttatggttaaagacattatttacaaagcaaaaagtaaaataagttcagagaaaatttctcatcaaaaaatattaagagaaggatatcctgtaattaagtataataataatggcaaacatttatatagcatgttacatatacacaattatagtatacacacatattgatatgtaagtgattatgtgaatgtgaatgtactactagcaacttctctgaaaattatgtacagagttagagaggaataaatttaagtatagataagttactcattcaaagtcttacaggtcaaaattggtagagttgggacttaaacacaggtattttggactcagtctttgtttttagccactttgcaatggatacatatatgctaatagcatatattaccaaaacaataaaaaattagagctcaycactaacaggtaaatttgtcatatggaagaggtata

SEQ ID NO: 907383 - DNA, 673 bp, Homo sapiens
aactcctccaaaaaactgttaggatccataaacaaattcagtaagttgcaggatatgaattcaacgtacaaattcagtggcatttctataacctcacaatgaactatttgtaaaaagaaatgcagaaaacaatccccaaccttatacacaaatgctaccaaaaaaaaaaaaacaaaaaagaataagtttaaccaaggagctgaaagacctgtatgctgaaaattataaggcattgactaaataaattaaagaggacacaaataaatggaaagatacaccacattcatgaattgaaataattaatattcttaaagtgtccatcctacctaaagcaatgcctatcaaaattctagtgacattatttcacataaatagaaaaaatcaatcttaaactttccatgaaaacaaaaaacaacccaagtgaccaaaacaatcttgaataaaaagaacaaagctggaagcctttcactacctgacttcaaaatatactattatacaaacctattattgccaaaatatcaaggtactgtcataaaaacagacacatagatcaacgaaacaaattacagatcacagagataaatccctacatttatggttaattgttttttttaaaaagtttccaggaatacataatgggraaaaaaagagcctcttcaattagtgatgttgg

SEQ ID NO: 907384 - DNA, 605 bp, Homo sapiens
aggaatggaatggaattgaatgcaatggaattgaatggaatcaagccgagtggaatgtaatggcatggaatggagtggaatggaatggaaaggaatggaatggattcaacgcgattggaaaggaatggaatggaatggaatggaatcaacccgactggaatggagtgcaatggaatggaatgaaatggaatggaatggaatggaatggaatggaatggaatggaatggaatggaatcaacgtgattgtaaaggaatgaaatgaaatggaatggaatggaatgcaattgaatcaacccgattggaaaggaatggttggaatggaaatgaaaggaatgcaatggaatgaaatcaacccgaatggaatggaatggaatggaatggaatggaatggaatggaatggaatcacccagagtataattgaatggaatggaatggaagggaatggaatggaatggaatggaatggaatggaatggaatccaatccaatgtaaaggaatggaatggaacggaatagaatggaatgkaatggaatggaatggaatggaatggactggaatggaaaaaattcgagtggaatggaatggaatgcaaagtaatataat

SEQ ID NO: 907385 - DNA, 641 bp, Homo sapiens
cggcagcggttgttctgttggggaccagtgatcacgtgctggggagggctcgcctgtgcttcctcagtggctccacctctgcttctaagaaaaatcactcattccatggctggarcagagaaaatacaacattagcttagaacatcttgttcctgaaactaaaaaagtgctgacagagtaacgaagacaaataaaaaagacaagaagtcagcttgaaatgtctaccactggcctaatcttggggaattggagcaccagaatcatgagctttcccttctcagttatttattggttttacttctccatgtacagcaaagaagagaagaaaataatcatctggaaaccatcatagtaataattgttcaaacacaagtcatccatgaaatgctaaatctagtgggttctgggagtaactggatatttacagagcctcaaagtatctccccacaaaatacggttcaactacaaaaagaaaattgtcacattagcatggacaagcctggcaggtactccttaactcccctaagtagtaaaagctgtaaaatgcaaagaagccttcgatgacctttactaaagtatcaatgatgacttggttctttggctgtttaaacagctggcatttgggcaatttgagtacgtca

SEQ ID NO: 907386 - DNA, 528 bp, Homo sapiens
gaggaatatgagtggggggggyctcatctctatataaaaagtatgagcgtatttgtgctcttttgtacattcatttgtatagtcactgggaaaaaaatgagaaaaacccaaacacggctttctatatgcctctgtgctttgttttcaacactgagctgtgagaaatctagttactaaaatgaaactttgaaaaaatataacaatttgggacaatggggacacttagctgatgcagcacaggtgaacagttcttcttttgtgcccaagaggacacaattcccaggaggctgcatgtggtctcctaggacaagcctgtgggcacccactggctgcagttccacctttccttccctggactctcaggaagacatgagttctggattcagctgaactgagctcaagttcaggttctgtgactcactggctctgtaattctgggtaagtctcttgctctccttgagtctcatatcctccttggtaaaatggagaggtagagctattgttagattttgaaggcaaggcaagggt

SEQ ID NO: 907387 - DNA, 569 bp, Homo sapiens
aaggataacataccatgaaggcctaggcaaagtctagctaagacgtgggctccaaataaggtttttagtgtagggtgagcatcaacttgctcaatatttgtgtggataaagctaggaggcctagctgccagagcagggtgctgggaacaatgactgagcacaagtacataaactaataaacaccgtagctttgacctctatatatgaatcaccatgaaaactgaggggtctgaatcagtgaaggcatcctggtggcaaaggtcaatcattatcagattgcaggaccggttataatggcaataatacagcaagtgagtccatggaaacaacagaatgattagaatggccttttttccccttcttctgacttgtaaagaaagattgccttccttggacttaggaaaccccttagcttcttggaaaattcaaagaaggaagacacaggagagagccccaggggacaatacaagaytttctgttaaactggacattacaagactcaataactaattagaaaagtcaggccaggcatggtggctagcactttcagaggccgaggcagggggatt

SEQ ID NO: 907388 - DNA, 626 bp, Homo sapiens
tatctatcttaaaagccctggccaggcgcggtggctcacatctgtaatcctagcactttgggagtccgtgccaaggcagacagatcacttgaggtcaggagtttgaggccagccaggccaacatggtgaaaccccgtctctaccaaaaacacaaaaattagttgagtgggccaggtgcggtggttcatgcctgtaatcccagcactttgggccaaggcgggcaaatcacctgaggtcaggagttcgagatcagcctggccaacatggtgaaaccctgtctctactaaaaatacaaaaatcagctaggcgtggtggcaggtgcctgtaatcgcagctattcgggaggctgaggcaggagaatcgcttgaacccaggaggcagaggttgcagtgagccaagattgcatcactgcattccagcctgggtgacagagagagactccatctcaaaaaaaaaaaaaaaaaaaaagcctaatgtcagaaattctgtcaataggaacaatgggaacgcaaatggtctctatgtagtgtaacctgacttttggttacaaggaagtgggtcagagtgcagcctgattaatgctcaattataactatatttccwtccagaattcttgttaacccttt

SEQ ID NO: 907389 - DNA, 612 bp, Homo sapiens
tctattccagtcaataggtcaggaaaaaccttacatttaagataaggaaaatraagagttagacaaataatgaggcaaaccaagaaaaacaaggatgtagagggcatacacttttaaaaaccttcaacataaaaaaatccttctaactaaatattttctgcatcctcaatcctaaaattgtagagtcatcagtaacatgggactaccttaagaaaggtattatttggaaattcatgagtaatataggttcataactgcttttccataattgcagagttccaaaaggcatgtaaacctggagtttgtgattatttgtttacatgacaccaaaactcatttgcaaggcctagcatgaacactttgtactttttacttcagaagttaacgtgtttagttatgtgatgctgggtgaagggagatgtttcattatgtatgattaaaatttgtttcctaaatttggagaaaattctgaattctgaaatttggttttaaaaatatcaaataaaagattgtgggttcgtataaggttaaaacacaaattaaaatattgacctattgtttaatatacaattaaaaagaaactaaaaatgttggaactctgacatataggtg

SEQ ID NO: 907390 - DNA, 651 bp, Homo sapiens
gccaggaaggcaacaggaacaaatgaaacggagactcgtttactttgtttaatttttaccactcagaaacataagcccaactgttgcctaatatttccatttttcaagagaagccggaaacctttttttttctatgttggtaacaaatttaaaaggcatttaagcactatacccatgcctggagaaaactaacctatagatttataattagaacttctgacgtagtcccatgatttttagtcctaccttaaaacagaaatatatcacctgagagctttaaaaatacctctgctttcctctccaccaggaaatttctaattttaatttttatttatttatttattttgagacggagtctcgctctgtcaccaggctgcagtgcagtggcacgatctcggctcactgccacctccgcctcccaggttcaagcgattctcctgcctcagcctcctgagtagctgggactacaggtgtgtaccaccacgcccagctaatttttgtatttttagtagagatggggtttcaccatcttggycaggatgttctccatctcttgaccttgtgatctgcccgtatctgcctcccaaaatgctgggattacaggcgtaagccactgtgtgtggcccgaaatttctaacctaattggtcaag

SEQ ID NO: 907391 - DNA, 661 bp, Homo sapiens
tcagctcagatggatcatgaatgtgcttttgatgttatctttgagaggcataggggcccagctgacagagttccaatattgcaaagtctcttaactgttctttctctgaaaagttagaagagaaagatatcagtcctaacaacctaaaaaatttttttttttgaaataagattaaagagtttacaagaagcaaggaaggaagcataaacacagataaaaaggagagaaaagggttacaatccaatcaaactcctttatgcctgaagaataagttgaatcatatcctagtaatgacaaaagagggggtgggggaggaaggattggacaggtgctgccacaaaacgacttttaaaaaccatcaattgatgtattttgaaattattaataaatgaggtcaaatcatttaggaaatgatacattatattttggtgcatcatattagtgtgttgtaaagtacatgtatgtacgtagaaggctgctgccacctgaataaaagtgagcaagactgtgtctttcttgttcttttctagcacacttcttggcacgaygtggtgctcaagaaagcatttgtttagtgaataaattattcatttagagtcattttacacatactggaaataagcttagcctgcctcaatactataaaggaaattataagaag

SEQ ID NO: 907392 - DNA, 591 bp, Homo sapiens
aagatattcccgttaccaacaaaatagttagagctctccaaatatccagttgcatattctacaaaaagagtgtttccaaactgctgtatcataagagaggttgaactctgttagttgaggacacacatcacaaagaagtttctgagaatgcttctgtctagtttttatgggaagatatttcctttttcaacataggcctgaaatcgctcgaaatgtccacttccagatactacagaaagagtgtttcaaacctgctctatggaagggaatattcaactctgtgatttaaaagcaaacatcacaaagaagcttctgagaatgctgctgtctatttttatatgtaatcccgtctccaacgaaatcttcggcggtatcctaacatcgacttgcagattccacaaaaagagcttttcaaaactgatctctaaatagaaagtttcaactctgttagttgagtacatatatcccaaagaagtttcttagaatgctyctgtctagtttttatgggaagacatttcctttttcaccaatggcgtcaaagcgctccaaatgtccacttccagatactacaaaaagagtggttcaaacctg

SEQ ID NO: 907393 - DNA, 663 bp, Homo sapiens
ttgggcagtatagccattttcacgatattgattcttcctatccatgagcatggaatgtttttctatttgtttgtgtcctttctgctttccttgagcagtggtttgcagttctttaagtggttcttcacttcccttgttagctgtattcctaggtattttcttctctttgtagcaattgtgacctgtagttcattcatgatttggctctctgcttgtctgttgttggtgtataggaatgctagcaatttttgcacatcgattttgtatcctgagactttgctgaagttgcttatcagcttcagaagcttttgggctgagatgatagggttttcaagacacaggatcatgtcatctgcaaacaaagacagtttaactacctctcttcctatttgaatatgctttattgctttctcctgcctgattgctccagccagaacttccaatatgatgttgaataaaagtggtgagagagggcatccttgtcttgtgccaattatcaaggaaaatgcttctagcttttgctcattcagtaygatattggctgtgggtttgtcatagatggctgttattattttgaagtctgttccttcaatacctagtttattgagagtttttaacatgaagggatgttggatttttatcaaaggctttttctgcatctat

SEQ ID NO: 907394 - DNA, 678 bp, Homo sapiens
aaatatacactgtgaactgtactctcctctcttctccagcagccctggtgcttactttctgttagtgtgtggggttgcctctccgtactcatgggtccaactcctccctaaaattccatagttcacagaaggcaactgaggtttacttgcagaaaagagatagcataaggacaattaagcagtctgagtgagttataaaacaaaataaaaagaaagtgaggacaggttctgaggacttcttgtagtgtgggctaacaaggacaagtgaaggaacacctggcaggctcttcccgcaactgcataccccagcatatcagcccatcacccgtggagtccaactctgttcttagggagctttggtgtggccttggattatttcctccatatcacagacaattctaaaaatatttccaaaaacttccttatgtgcaggataatggaagggaagctgtgatttaaaaatgttaatttaacaatgaactgttttgcttggcaagtcagtaaacctcatcgtgtctgttttctcagctataaaatgaaactcttggacaaaatgtcttaaggaccctgccagctctaaataattttaattccaaractttgggggaccaaaaaaaaaatccttttacttttagaaatgtttatatatatatagttatatactttatcttggatata

SEQ ID NO: 907395 - DNA, 557 bp, Homo sapiens
aaaaaaacaaataaaattatcaagtttcaggactgtatacataacataatctsatttgtgttaaaatatattttataatatatatgttattatatgcatagaaaatttcttgaaagacccacataaataattattgttccttctgtggagtgggaacagacagtgagagggtaaggaatgaaaggaatgggttgggagactcaaaataattgagaaaatttaactttcattttccttttgcactgttttaactttgttaaacatgaagatatattacctttatgatcaagagcttttgaacagtgtcgcacacgctgtgtgtatgcatacatacatagctgcatgtcatttatttgtcaccacgaagggtaagaagatgttttagatagttctgcccacagtctaactaggaagatgtaaatgtgtggaaagttaacaaaaaaaattacaatatctactgactatcactcagtagatattgatcacatcccaataattggtatccacagcggtattctaggaggtaagaagaggaaagttgctatgactgcaaaaat

SEQ ID NO: 907396 - DNA, 594 bp, Homo sapiens
aagagccaggaaccctagactgacctcttaktttctttaggctgggaacctgagctaccagggagagcgtatagctcaacaatactgtatttaaaatcatgaaacacaagttagcaaattaagagcctttcctaggtatttgttttcagactggagtgatctcttcaaataataaattgcttcaattaactacctgttatatatcttcgtttatggccaggatcaagacattaaaattcttcaacccatgctctcccacacataccttgcacagactcaccttaatttgacattgtcatattgattgtgagtctgtggccaagatcaggatcactaagtccttgaatttaactacctatctccattgcatgatttcaaggagtatatgtggaagagagaatacactagataaatatacccttattagtgatttcatagggaaaccaatgtgcaatgtagcccgttaatggtaaagaaagctggcccatatgtgggcccctgggattcctagtgactgtgttaaattagaaggaagaagacctcaaatcccactaggattatgggagggaagagtgaaacaaggtgtgagtcaat

SEQ ID NO: 907397 - DNA, 582 bp, Homo sapiens
ctgaatagaccaataagttctgtaatcgaggcactaatagcctaccaaccaaaaaaaaagcccagaaccaggtggattcacagccaaattctacaagaggtacaaagaggagctggtaccattccttctgaaactattccaaacaatagaaaaagagagactcctctctaactcattttatgcggccagcatcatcctgataccaaaacctggcagataacaaaacaaaaaaaaatttcaggccaatatccctgatgaacattgatgcaaaaatccccaataaaatactggcaaactgaatccagtagccaatcaaaaagcttatccaccatgatcaagttggcttcatccctgggatgcaaggctggtacgacatacacaaatcaataaacgcaatccatcacataaacagaaccaatgataggagtcactattcttatgtcagataaaacagactttaagccaacaacagtaaaaaaggacaaagaagggcattgtgtartgataaagtattcaactcaacaagaagatttaactatcctaaatatatatgtactcaactggagcaccagagctataaaa

SEQ ID NO: 907398 - DNA, 654 bp, Homo sapiens
atgtgctacacattttgataaaacaaaacctctggtcagaattttacctagacggcctcaaagtttattattatactcatctaaaagggaaaacttgctattatttttgccacctttttctcttgagacttttacctatggctttgcagtagatactatgaataagagagaaaacggtattttttttttcttttcagtctcatggaggaatgggaacatgtcatacaaaaagggcatcttgtgataatactaacaaagttcatatcctaaaaaatgtatgtttgtttcttaagccttgtgtgaagagcaactactaaaaatagaaatgtcttctttcttaaaaggtgaaaaacaaagccccggctgaggtacagataactgctgaacaactcttaagagaggctaaagaaagagaacttgagcttcttccacctccacctcaacagaagatcacagatgaagaagaattaaatgattataaactaaggaaaaggaaggtcagtcagtgtggtatctttcagtccactaattgttaagactgtatcggtcagtttgaaaagctcctcattggttggattctgtagggcaagatgaggttaagtgtttccagacrcatgaataatgtacttctggttaccagataacagcattttt

SEQ ID NO: 907399 - DNA, 599 bp, Homo sapiens
tttcagtgttacataatgagcatgtattacttctgtaatcagaagaaggtggtataaacctcaccttaatataataaaacaaaattactggccaggcacagtgtctcatgcctgtaatcctagcactttggaaggctgagactggtaaatctcttgagctcaggaatttgagaccagcctgagctcagtgagacagtgagacctcgtctctggaaaaaatacaaaaattagccagcgatagtggtgtacacctgtagtcctaagttacctgggaagctaaggtgggagggtggcttgagcccaggaagtggctgcagtgagctgtgattgcaccactgcactccagcctgggtgaaaaagccagacccagtctcatacaaaaataaaaacaaacaaacaaacaaaaaagttattacttaagtctcacatgctgtcttggagccatcttagtgttgagggattcaagagactggagagaccaatgggtgagacaggaggattttattaaagtgaccacttgcccagtggatttkcatccaaaaggctgagcccggaaaaaagacggggcctggtttttaagcatgcagctgtgcaaaact

SEQ ID NO: 907400 - DNA, 643 bp, Homo sapiens
caaaaaaagcttttgataaaattcatttttttatgttaaaaaacctcaagaaactagggaacacatttcaaaataataggagccatttatggcaaacccacagtcatcctcatactaaacagggaggagctggaagcatttcccttgaaaactggcaacagacagggattccttctctcaccattcttgttcaacattgtcttggaagttttggccagagcaatcaggcaggataaggaaataaagggcatccaaataggaagagaagaagtcaaactatccttatttgtagacaatataatcctgtatcgaagaaaccccatagtcttggcccaaaaggtccttaagctgataagcaacttcaaaaaagtatcaacatacaaaattaatgtacaaaaatcataacattcctatacaccaacaacaggcaagccaagagccaaatcatgaatgcagtcccatttcacaattgctaaaaaagcataaaataccttgatatacagctaaccagggacrtgaaaaatctctacaaggagacctgcaaagcactgctcaaagaaatcagaaataacacaaacaaataaaaaagctatgctcatggataggaagaatcaatattgttaatatgaccatactgcctaaa

SEQ ID NO: 907401 - DNA, 659 bp, Homo sapiens
  misc_feature 18, 19: n = A,T,C or G
ggtgtgtgtgtgtgtgtnnttaaattgatttcagttacaaaactagacaatatttaacaagggttcagaggtcaatcacctcaccaatatttcaatccataaatatacatatgtatgctctatgctagatattggaactataatgatgaggaagacattctctgccctcacagaactcaagttctcgtgggttcataagtagagttattaatatttagttgagatgataaacgtcgttggtttggagaccaagaagataaggtgattacctctgaattggggggatcagtgaagagttcaaagaactctaccatttaccaagtaagtgaccttgactacttattctctctgtgccttgggtacctctgtgtattaaccagagataatagcagcactatctaatggggttgtatgagaattaaatgagataatgcagcagagaactgaacatggtttctagcatagagtcatcccttaataaacatgagttgttgagaggagcagagcaagatgttcaaatagaagcctccactgagtgtcccccaacagkaacatcaaacttaacaactatttacacacaaaaacacagcttcataaaaaccaaaaatcaggtgagcagtcacagtgcctggttttaactttatatcactgaaagaggc

SEQ ID NO: 907402 - DNA, 605 bp, Homo sapiens
gctctgcaaggtaatctttggtgtcagtgctgaggaggctcctgaggtctgctatgacataaatcttgaaagttaccgatttggacattgtactygacgacaaacagctctcaacaaccaggcttgtgcaggaatagataagttttgtggaagactgcagtgtaccagtgtgacccatcttccccggctgcaggaacatgtttcattccatcactcagtgacaggaggatttcagtgttttggactggatgaccaccgtgcaacagacacaactgatgttgggtgtgtgatagatggcactccttgtgttcatggaaacttctgtaataacaccaggtgcaatgcgactatcacttcactgggctatgactgtcgccctgagaagtgcagtcatagaggggtgtgcaacaacagaaggaactgccattgccatataggctgggatcctccactgtgcctaagaagaggtgctggtgggagtgtcgacagcgggccacctccaaaaataacacgttcggtcaaacaaagccaacaatcagtgatgtatctgagagtggtctttggtcgtatttacaccttcataattgcactgctctttgggatgg

SEQ ID NO: 907403 - DNA, 689 bp, Homo sapiens
caacacatgggaattcaagatgagattttggtggggacacagtcaaatcatatcattccaaccttggccccttccaaatctcatgtcttcacatttcagaaccaattatgctttccygacagtacccaaagtcttaactcatttcagcattaactcaaaagtccacagtccaaagtctcatctgagacaaggcaagtccctttcacctatcagcctgtaaggtcaaaagcaagttagttacttcctagataaaatggtggtacaggcattgggtaaatatagccatttcaaatgggagacattggccaaaacaaaggggctacaggccccatgcaagtccaaaaatccagcagtgcagtcaaatcttaaagctccaaaatgatgtcctttgacgctgtctcacatccaggtcaagctgatgcaagaagtgagctcccatggccttaggcagctccacccctgtggcttcacagggtatagtccccttcctggctgctttcacaggctggtgttcagtgtctgcagtttttccaggtgcacagtgcaaactgtaggtggatctactattctggggtccagaggacggcggccctctgctcacagctccatgagtcagtgccctagtaggggctctgtgtgggggcaccaatcccacatttcccttctgcactgccctagcagaggttctt

SEQ ID NO: 907404 - DNA, 679 bp, Homo sapiens
tcccacagacctcaagaacaatgtttacttgaatattgccaggcaatgaactccagcgaacaagtgtgggatggcttggagcaagctgggattctaggcaaacaggtcagcagcggatggttcctccttcgctgaacattctaaaaagacatgcgtgaaccaggaaacagctagggacactgtgctagccatcctctaggagagggaccccattccctctattgcactctctctttaagcaaagtgattatgaaagtggcaaatggactgcttggacagtctgaacttaattgccagctattttggggagtgctgagaaagctggctgcccaaaatctggagactttgtgggaagatgagtttagatgcagggcctcctgctgcagagagaggggatccctagttctagccattctcatttctgggtctccaaagtcatttatcaagcatatttgtctgcacaaatatccgaggtttaatactctgtatatttgtttgtaattcaggcatcacaaaattctgaacttgctatgtagcatatgaaattgctaatggaagattgtttattttttwaaaaagactagaagtctttaaatttctggcacagacaggcactcaaatatttgttgaatgagtgaatgtaaggataatagaatataataaattccatttgggatca

SEQ ID NO: 907405 - DNA, 617 bp, Homo sapiens
cggccactggggctgaagattcactttcaagattttttttcactgacatttctggtgccttggtgtttcttggcttcccttcctctctacatatttcattatctcattatccagggctcctccatgtggcttctcatgacatggcagtctcagggtagctagtttcccccagagtaaataatcttagagtgagtatttcaagaagcccaggtaaaagctacaaagccagtggggcacggtggctcatgcctgtaatcccagcactttgggaggctgaggtgggcagatcacgaggtcaggagttcaagaccagcctggccaacatactgaaaccccatctctactaaaaatacaaaaattagccgggtgtggtggcacctgcctgtagtcccagctactctggaagctgaggcaggagaatcgtttgaaccccggaggcagaggttgcagtgagccaagaccacgccattgcactccagtctgggtgacagagtgacaytcgatctcaaaaaaaaaaaaaaaaaaaaaaaaaaagctaggaagccttttgtaacctagctttggaagttccagaacatactcctgcattcttatgatcaagcaagtcactgcagcca

SEQ ID NO: 907406 - DNA, 657 bp, Homo sapiens
aaacttgtagattgaaaagtgaagactgccttgcrtcatttaaaaaaaaaaatgtgaggctgggtgcagtggctcacgcttgtaatcccagcactttgggaagccgaggcgggtggatcacgatattaggagagcgagaccatcctggctaacatggtgaaaccccgtctctgtgaaaaatacacaaaattagccaagcatggtggcaggcacctgtagtcccagctactcgtgaggctgaggcaggagaatggcgtgaacctgggaggcggagcttgcagtgagctaagatcacgccactgcactccagcctgggtgacagagcaagactctgtctcaaaaaaaaaaaaaaaaaagaaaaattggcaaaaacatctggggaaagaagaggtgcccaaaccctctttcaggacttgggaatgtgattttatttgaggactggtcttggtactgtccctttgtcattcatggttaagcaccattccaggccaagttgccagtggatggagggagcaaggctctccctgcatggtaccataaaggtctgtggatgtgggaaactcacaaaatccgtgaagttggcatgggaggtaagaagaggaggctggcagagttcgcccgcagcccgcctgtttggttctcccagattctgtcccc

SEQ ID NO: 907407 - DNA, 617 bp, Homo sapiens
ttcaggatattatccaggagagcttccccaacctakcaagacaggccaacattcaaattcaggaaatacagagaacaccacaaagatactcctcaagaatagcaaccccaagacacataatcatcagatttaccaaggttgaaatgaaggaaaaaatgttaagggcagccagagagaaagggaagcccatcagggtaacagcggatctctctgcagacaccctacaagccagaaaagagtgggtgccaatattcaacattcttaaagaaaagaattttcaacccaggatttcatatccagccaatctaagcttcataagtgaaggagaaataaaatcctttacagaaaagcaaatgctgagggattttgtcaccaccaggcctgccttacaagagctactgaaggaagcactaaatatggaaaggaaaaaccagtaccagccactgcaaaaacataccaaaatgtaaagaccattgacgctgtgaagaaactgcatcaactaatgggcaaaataaccagctagcatcataatgacagtatcaaattcacacatagcaatattaaccttaaatgtaaatggagtaaatgcctcaattaaaagacacagactggcaaat

SEQ ID NO: 907408 - DNA, 617 bp, Homo sapiens
ttcaggatattatccaggagagcttccccaacctatcaagacaggccaacattcaaattcaggaaatacagagaacaccacmaagatactcctcaagaatagcaaccccaagacacataatcatcagatttaccaaggttgaaatgaaggaaaaaatgttaagggcagccagagagaaagggaagcccatcagggtaacagcggatctctctgcagacaccctacaagccagaaaagagtgggtgccaatattcaacattcttaaagaaaagaattttcaacccaggatttcatatccagccaatctaagcttcataagtgaaggagaaataaaatcctttacagaaaagcaaatgctgagggattttgtcaccaccaggcctgccttacaagagctactgaaggaagcactaaatatggaaaggaaaaaccagtaccagccactgcaaaaacataccaaaatgtaaagaccattgacgctgtgaagaaactgcatcaactaatgggcaaaataaccagctagcatcataatgacagtatcaaattcacacatagcaatattaaccttaaatgtaaatggagtaaatgcctcaattaaaagacacagactggcaaat

SEQ ID NO: 907409 - DNA, 612 bp, Homo sapiens
cttttttataataaaacacttgatataggtctactctcttaataattgtcaagtgtacaatacaatattattaactgtaagtgctatgttttacagcagatctctggaatatgcttatattgyacaactgaaactttataccatttaaccaactccccatttcccctccctcactctagaccctgataattaccattctattctctgattctatgagtttcaccttcttaggtaactcatgtaagtagaatcatgctgtattcatccttctgtgactgatttatttcactaagcataacatactctaggcttatccaggttgtcacaaatggcagaatttccttcttttaggctgagtaatattacattgtatgtatttaccatattttaactccattcttctgtctatggtcatttaggttgtttccatatcttggctgttgtaaataatgctgcgattaatcttaatcttaggttaaacatcacttgaccattaaattcttcccccacctttgccatacacttctaaaacatcctgtggttcttgcccactgattatacttgcagttactggtctgtatgtagcaacacagatagggaaagaacttcaga

SEQ ID NO: 907410 - DNA, 686 bp, Homo sapiens
atgagttcacagtgggtgtgtgaatttgcttttcggttttatattctgtttcattggtcagtgtgtctatttatatgccagtaccatgctgttttaattattatagctctgtagtataatttgaagtctggtagtgtggttcctccagttttgctctttttgttcagaatagtttttactattccaagtcttgttgtaattctatataaattttagaattttttttctatttctgtgaagaatgtcattggtattttgatacggattgcattgaacttgtgggttgctttggctagtatgagcattttaacaatttttgcttcttccaattcgtgaacattgaatacctttccattttttggggtcctcttcaatttattttattaatgttttatagttttcattgtagagatctttcacttttttggttaattcctaggcatttaattttgtgtctattgtaaataggattacttttgtgatttctttttcctattcactgttggcatatagaaatgctactaattcttgtgaactttgtatcctgcaactttactgaatttgtttataagttctcatagttttttggtagtctttaggattttgcaaatgtaagataatattatcygcaaacaggataatttgatttctgttttccaattttggatgccctttatatctttctc

SEQ ID NO: 907411 - DNA, 607 bp, Homo sapiens
ttctctgtcagttctggatttttagtttcctcttcttccagtgatttcatctaaatcccagggaaacttagagaatatttargtttgggtatgactttggcactgtccactctccctgctgacacctactgagatgggcatcctcctgatatgctttggatatttgtcccctctaaacgtcatgttgaaacgtaattcccagtgttggagtgggacctggtaggaggtgattggattatggggacagatccctcatgaatggcctagcaccatcccttgggtgataagtgagttcttgttcagttagtttgcatgagattgggttgtttaaaagagtctgggacctcccccctccgctctctcttgctcccactctcgccatgtgacgtgcctgctcctgcttcaccttctgtcatgagcaaaagctccctgaggccctcaccagaagctgagcagatgtaagcatcatacatcctgtacagcctacagaacagtgagccaactaaacatcttttctttataaatgacccagtctcaggtacttctttatagcaatgcaaaaatggactgccacacccccattgaccactcatcagcaactttcctc

SEQ ID NO: 907412 - DNA, 607 bp, Homo sapiens
ttctctgtcagttctggatttttagtttcctcttcttccagtgatttcatctaaatcccagggaaacttagagaatatttaggtttgggtatgactttggcactgtccactctccctgctgacacctactgagatgggcatcctcctgatatgctttggatatttgtcccctctaaacgtcatgttgaaacgtaattcccagtgttggagtgggacctggtaggaggtgattggattatggggacagatccctcatgaatggcctagcaccatcccttgggtgataagtgagttcttgttcagttagtttgcatgagattgggttgtttaaaagagtctgggacctcccccctccgctctctcttgctcccactctcgccatgtgacgtgcctgctcctgcttcaccttctgtcatgagcaaaagctccctgaggccctcaccagaagctgagcagatgtaagcatcatacatcctgtacagcctacagaacagtgagccaactaaacatcttttctttataaatgacccagtctcargtacttctttatagcaatgcaaaaatggactgccacacccccattgaccactcatcagcaactttcctc

SEQ ID NO: 907413 - DNA, 455 bp, Homo sapiens
aaataatagtgatgggtattttaatacatagctttactgcttccactctaccttttcttcagaaaacagagaaaattattgttttaacacatgagtcaggattgggactaccagggtggtggtatggaggagcttactggaccctttctccaaccaaagcagcatgtaactgataaaaattacatatatgaaaaagccatttgaagtctctggaaattgttcttagagcatacaatgaataaagaaatgttcaagaaaatctaccaaatctcaacaggaacagtgagtctgtgatgtttgaactagaacttatgcccatcctcccyttccccagccccacgtgacagaaactccactatgggtgctttcctttgggcagatgcagccaagaagatgtgcgctttcttcctgcagctcccagtttagggctattggtgcattcttggggacaggct

SEQ ID NO: 907414 - DNA, 547 bp, Homo sapiens
gacaaatcgagtctcataattgaaaaatgaataaccataagtaaactctgctctaggagacaaaatgtagtttaagattgatacacaattccagtgatttttcaagcatccacttcaggacaagattaatagagactgggcttaccattatgcctaaaacaactaaaataaaaagcaaaatgaaaaccaaagtaagaaaccaaataaaatgtatcaaacatcaattcttaagacattgaatatcagccaatgaaggatactgctctgagaaataaaaaaaaaaaaaattagttgaggctcaagtttgcctgatcttactggctagagattccctaggacatggtgaagagacaacatattaggtaggatcctgaggtatctctgagttgaagaaattcattgttgaaagtcctggaaagtgaaagcagcatgagtttatagggcagagtactggaaatggaaagactgcataggcagagcactccagagatctgaagaggatccctttgagtctttacccracaaaactacctgagttaaggaaaga

SEQ ID NO: 907415 - DNA, 478 bp, Homo sapiens
cacaagatctgatgattttataagcgtctggcattttccctgcttgtaytcactctgtccaaccaccctgtgaagaaggtgcctgcttctcctttgccttctgccatgattgtaagtttcctgaggcctccccagcaatgaggaactgtgagtcaattaaaactctttcctttataaattatccagtctcaggtatttcttcatagcagtgtgagagcagactaatacagtaaattggtactgaggtagtggggagctgctgtaaagatacctgaaaacgtagaagcaactttggaactgtctaacagacagaggttgaaacagtttggagggctcagaagaagacagaataatgtgaggaacttcctagagatttgttgaatggttttcaccaaaatgctgatagtgatatggacaatgaagtccaggctgaggtggtctcagatggagatgaggaacttcttgagaactgggacaa

SEQ ID NO: 907416 - DNA, 591 bp, Homo sapiens
caaaatatactacaaagctatagtaatcaaaatagcatgatactaccataaaaacagactcatagaccaatggagcagaatagagaacccagaataaactcacacatttacattcaattgacttttgacaaagttgccaagaacacacaatgggaaaaggacaccctcttcaataaatgatgctgaaaccctgaatattcacttactgaagaatgaaattggatgtttatctcacactgtttacaaaaatcaatcccaaatggattaaagacataaatgcaaggcctgaagctgtaaaactaacaagaaaatgggaaaaagctccatgactttggtctgagcagtaattttttggaaatgcacccaaaagtgaaggcaagaatgcaaaaatagacaaatgagtttatataaagctaaaaagcttctacaaaggaaaaaaatagagagaagagataatctacagaattggagaaaatatttgtaaaccatacctgtgataaggggttgatacctaaaatatatgagaaamacacaatcaatgacaatataataaataactttattacaaaatgggaaaagcatctgaatata

SEQ ID NO: 907417 - DNA, 535 bp, Homo sapiens
tctcacttgaaaaaactaagattggactgtatctcacttcaaagaactatacccttttgcacctcagtctactgactcaactaaattttctacgtttaccaatatagggtcaaatttccagtgacatgtaataaatgaataaaacacaattccatgcttttaaagtttaatatttcaagcaaccaaatccttttgaatacatatggagcattctattttgctaattcctcatggtttctcatttatactcagtgatgtgcttgactttcactgtaaaactacaaatcacacagaagtcatattcagtcttttatcatccaagattttctgttctcaacaataatatattcacttgtgtggaaagtcttccatcagtaggtcttgaaaagtgcaggatctcaaactctgagtgtacctcagtgaggccactacatataatacatamtggcagtatttaggcttgatgcctccaattgttactagacaatatagaattagaaacatcagaaagaactcttttctaaacaaaggagca

SEQ ID NO: 907418 - DNA, 560 bp, Homo sapiens
tagtctggagtcagtagccactctagttccaggaatttgaggacaaggtgttttattgtgctgttggactactgaggccaaggaggatgagaccatcttaaactgtcaagtcaaatgttttcaatcctgagtatttgacacaatctgtttcataacatgctgtaaatcctggtttctcttctatggtatcttgagttacattgacagctcctgtttgaacttttgttcttttgtggattgatttttcatttcatggcaggctcccttcacgtgggggatgagatcctagaaatcaatggcacaaatgtgacaaatcattcagtggatcagctgcagaaggcgatggtgggtattttctatgctagatgaagaccttccattgtctccataagtgttgatccacattggtatcagtgacctcatctctctgtcaaagtatttgtaccttcttgagggggctcttttcactgctagtctttaatctgtgtaagaaatgataattttctgcctttatttagtraaattctaaagcagggcaaataacccagagcatcaatctg

SEQ ID NO: 907419 - DNA, 612 bp, Homo sapiens
atgcaataaaaaaagataaaggagatatcaccactgatcccacagaaatacaaactaccatcagagaatactataaacatctttatgcaaakaatctagaaaatctagaagaaatggataaattcctggacacatacaccctcccgagactaaaccaggaagaagttgaatctctgaatagaccaataacaggttttgaaattgaggcaataattaacagcttaccaactaaaaagtccaggaccagatggattcacagcagaattctaccagaggtacaaagaggagctggtaccattccttttgaaactattccaatcaatagaaaaagagggaatcctccctaactcattttatgaagccagcatcatcctgataccaaagcctggcagagacacaacaaaaaaaaaattttagaccaatattcctgatgaacatcaatgtgaaaatcctcaataaaatactggcaaactgaatccagcagcacatcaaaaagcttatctaccacgatcaagtgggcttcatccctgggatgcaaggctggtttgacagacacaaatcaataaacatagtctatcacataaacaaaaccaaagacaaaaaccacatgat

SEQ ID NO: 907420 - DNA, 661 bp, Homo sapiens
aacagagcaaccagacacaacaactaaccagcattccttcctgataatagaccactgaccttggagtggctctggccagtctacaaaggatgcacactgagtaccttagtgtcctctgcttcaccttttgacatcagagggcagaaaactccacccatgcctccaggcttccatgaagaggcatgaagctcagtttccgctttcataaatatttatgactcctcctgtagctattaaataatgtatatttgaccactcagttcagcataaattcttattccttttgcccctcccttgaagtgcctctttctgacttctattcagagactgtttcccagtctgttggaatggccactctccaggctgcaaccatttatgagaaataaatctttccagccaggtgcagtggctcatgcctgtaatcccagcactttggcaggctgaggtggctggatcacctgaggtcaggagttcaagaccagcctggccaacatggtgaaaccccatctctacaaaaatacaaaaattagccaggcatggtggcgcgtgcctgtaatcccagctayactggaggccaaggcaggagaatctcttgaacccaggaggcagaggtagcagtgagccaagatcatgccattgcactccaacctgggtgatggag

SEQ ID NO: 907421 - DNA, 661 bp, Homo sapiens
aacagagcaaccagacacaacaactaaccagcattccttcctgataatagaccactgaccttggagtggctctggccagtctacaaaggatgcacactgagtaccttagtgtcctctgcttcaccttttgacatcagagggcagaaaactccacccatgcctccaggcttccatgaagaggcatgaagctcagtttccgctttcataaatatttatgactcctcctgtagctattaaataatgtatatttgaccactcagttcagcataaattcttattccttttgcccctcccttgaagtgcctctttctgacttctattcagagactgtttcccagtctgttggaatggccactctccaggctgcaaccatttatgagaaataaatctttccagccaggtgcagtggctcatgcctgtaatcccagcactttggcaggctgaggtggctggatcacctgaggtcaggagttcaagaccagcctggccaacatggtgaaaccccatctctacaaaaatacaaaaattagccaggcatggtggcgcgtgcctgtaatcccagctacactggaggccaaggcaggagaatctcttgaacccaggaggcagaggtagcagtgagccaagatcatgccrttgcactccaacctgggtgatggag

SEQ ID NO: 907422 - DNA, 695 bp, Homo sapiens
ttttcccagaaatatactgggtaaacacaaacatggtgtgaacccatgaattatgttgaataaaaaaaattaaagataaatgtggaatgtcagttgtgatatcaggtaacactgtttatcataaaaataaccygatagatgaattatgtttgcaccaggtggcctataagtggactacaaatacttgttcagaagcagatgatttggctttcctgtgtgtagtgcaactctcctaactgagtatggcccttggaggaacgcagaagctaagttcatggggtgtttcaagctaccggtttctatggaccatatgtcttacctaagctcaggtgtttctatactacctccattgtctcattcccttacaactaagctgtaacttgatgagtaaaacaaatattccctggatttgtataaagactccactgatactaccctgctagaatgccgtttcctgccttatatcctcccgcaaaaagctaagggaatctgaagccaggttatggattggtgggtgctctgtatgtcagtctgaacttgaggccactgctggtaattatgtagagtgagcactgcaggagagaaaagaggggtctgccatctactcagaccaatgcagagtactatttctttgactatagatagtgtctgactaactaatatcaacaaatttacttggcattctcctactcagt

SEQ ID NO: 907423 - DNA, 554 bp, Homo sapiens
aaattctgctttttcacttgcaagctgtgtggtctgggccaatattttacctctttatacctcatcatttcctccgtcaaacaggaatgactcagccttcatgtagctgcatctgagacagccagctggaatataaactccaggagggcagggacttttgcctgtttagtcctctgctttgtctccagcaccagcaccagcacctagaacagctccaagtcgttctggtgttagttaagcttccttggagaagaagaacctctcacttcaggcttctgttccccagtctgaccagaagatggcagcaaaggaaagcgtgtcccctggacaaggctgttgccgtgctgaaggcctctgcagatttcctgattgcttgtccctgcattaggaagcagagctgtcactgctccttgagcttcagaactgtgggcctgtgcggagcctagttatgaatcctttttatagaggcctggtgctgcttgggtgagaaggggcagcatgtgcaggaggtgccttttgggsctccatctagtagagctgtgtattaatccgtt

SEQ ID NO: 907424 - DNA, 659 bp, Homo sapiens
cctcttgtagacctatgcagaaattttctttgtgatatggatgaatcatagagtgtgcacataygtaacttccatgcacactcccagatatttctaaatcagatagccccaaatggcatctcattttgcacttctaccagaaatgaataagggattatatctttccacaatcacctcccagtctgtcattggttaataaaatcgacagcattctttactaaacagaaattttaaaatacaatataacaaaattaattaattcatttttacctcatactattttattttattttttcatatctggttaagcaagtttgctcttagtccaaggtcacaagaaccctcttggctgaggactaagtgttctaaatgttctagcagggaatttcagctccttgaatgctcttcgtcaaagaactattctcctctctctgagaaggtgatcctcctcaaccacagaggcagtttcaggaagagtgcccatggaggcttgaaaaggagtgtcacgtctaggcagccagagcacacatgttgctatctggacaatcaatgaactgtgagttgtcccagacaaggcatcctgacatgtggttgggaaagttgaaagcagagcgtgacttagcaacacatgactcagctttccctttctgcacctccga

SEQ ID NO: 907425 - DNA, 546 bp, Homo sapiens
ggagtcagggacccacttgatgcagtctgtccattctcaaactccgtgctgggagaacgactactctcttcaaagctgtcggacagggacatttaattctgcagaggtttctgatgccttttgttcatctatgccctgcccccagaggtggagtctacagaggcaggcaggcctccatgaactgtggtgggctctactcagtttgagcttcctggccactttgtttacctactcaagcctcagcagtggtgggcgcctctcccccagcctcgctgccaccttgcagtttgatctcagactgctgtgctagcagtgagccaagctccgtgggtgtgggaccctccgagccaggtgcaggatataatctcctggtgtgtcgtttgctatgaccattggaaaagtgcagtattasggtgggagtgacctgatcttccaggtgtcatctgtcatggcttcccttggctaggaaggggaattccccaaacccttgtgcttcccgggtgagatgatgcctcgccctgctttggctcatggtccgtgggctgc

SEQ ID NO: 907426 - DNA, 546 bp, Homo sapiens
ggagtcagggacccacttgatgcagtctgtccattctcaaactccgtgctgggagaacgactactctcttcaaagctgtcggacagggacatttaattctgcagaggtttctgatgccttttgttcatctatgccctgcccccagaggtggagtctacagaggcaggcaggcctccatgaactgtggtgggctctactcagtttgagcttcctggccactttgtttacctactcaagcctcagcagtggtgggcgcctctcccccagcctcgctgccaccttgcagtttgatctcagactgctgtgctagcagtgagccaagctccgtgggtgtgggaccctccgagccaggtgcaggatataatctcctggtgtgtcgtttgctatgaccattggaaaagtgcagtattagggtgggagtgacctgatctyccaggtgtcatctgtcatggcttcccttggctaggaaggggaattccccaaacccttgtgcttcccgggtgagatgatgcctcgccctgctttggctcatggtccgtgggctgc

SEQ ID NO: 907427 - DNA, 745 bp, Homo sapiens
caagaccaacttttgtctcctggttccaaaacatgtggatcattttttggtccactcctgtcttctgcagaagtcctccttggcactcttcactgttaccccatctgccatctttgtcaattttttatcatttctaggaatttggggtggaatatgagaagaaagcaacatatcttcaggacacaatcttgaatcagtagctatttttcacctgtgcattagagatgggaaacttgcagagcacttaacaggacttccctacgatcaccaactagtatttattgaattgtttattagtaggaaacattaagcaattatccttcataaaaacattatgaagtaagtaagcattactatagtcccagttttaagatgagaaaacacagattaaaaacatcctaaagagcagagccaagttacactccaggtggtccgtctcagaagcctgaactctttactaatacactatacgatggcatatccgggtgattttgggaacacattatacttctaccctgccaggagggccaaatgtatttactttgtcatctctgtgctgtaaggggccacatttctacccatcaactcaatctacattactcaagcatgcttgtaattcataggttatttcctcatgccaggaagaacagtcacagttctgtttcattacgcttytatctttgagactcaaattcccccctccccactataaattatttgcacatactagtctagaaaaatttaa

SEQ ID NO: 907428 - DNA, 549 bp, Homo sapiens
cactttgcttggcatgtgtatgaaaaacagtattttgggttcatctaaatatgtcattgatttggtttggctgtgtcctcacccaaatctcatcttcaactgtagctcccatwatccccacatgtcatgggagggacccagtgggaggtaggtgaatcatggggccagttaccttcatgctgttctcatgatagtgaatgattctcacgagatctgatggttttataaggggtttttcccccacttcgctctgtacttcttgctgctgccatgtgaagaaggacacgtttgcttcccattccaccgcgattgtaagtttcctggggtatccctggccatgcagaactgtgagtcaattaaacctctttcctttataaattacccagtctcaggtatgtctttattagcagtgtgagaatggactaatacagtaaattggtactgggtagtggggcactgctgtaaagatacttgaaaatgtagaagcaactttggaactgggtaacaggcagaggttgaaacagtttggagggctcagaagaagacagg

SEQ ID NO: 907429 - DNA, 648 bp, Homo sapiens
taggcttgaaatggtgcaatagcaacagtgrcaaccactatttgagagtctctgaggtttgactgtggtcaacttccagcaattccactgttcaataatgaacaaataatttcatgtttacaattaatattcacatctactaaaataaaaggatagtatttatatcatttttattgttatcactaagtaaaatgatgcttgaaaatattttggtacaatgccctacacttacatgttcaataaatgatagccattattaagatcatctcaactccacttcatcctttacatgacttgaagtacaatgtgtcattcgctctgcttccactgtcacaactataatcctgatcctcattatatctcctgaacttattacaataagtttccaaacttttttgtcataatgatttctaccactccaatgacatattttcattattttttacattttcctttaaaaaaaaaaccaacaatctgaacctgattgcaaatggtctacctatattataatatttatgcatataatgttcacattataaagtcacctaacacaagaataatttacaaaatatattctttcatgttttgaaaatcacagtaaaacaataatttattttaagaacaagttattaaaatataattaagatt

SEQ ID NO: 907430 - DNA, 586 bp, Homo sapiens
agacatgttaacagacttaacattttttttcaataaatggaagaattgatatacctccctaataaagatgtatatgaaaactcgcaaaagagagttccaaagtcttcacttcttactaagaaaacaaacaaaaagaagccaaaggcttcaaattatattatcctacaaagctctacatgatctgatcctcccattctttacctattttttattattttcctatgattatttcttttgcttgctccaacatagcagtttttgcctttgttaaatacaccaggcattgcgtttaagatagccatttctgttgctgttcccctgactaaaaggctgtcctacagatgtctgcataattttctcttccacaacttaaagactctacttaaatcttagcatctcaatgaggttttccttggctgactatttaaagttgcaactcattcccatcaaacctcaaacaaataccgttagtgtccctgatttattttcytcacaaaaaattataaatctctgatttattgtatttcgcttgtttctcttgtttattttatatctcctcccatccctttataatgtatgctccata

SEQ ID NO: 907431 - DNA, 635 bp, Homo sapiens
tattcattattgtatttgttattgytatttgtttcaggtgcccttaataatactgaggccaggtcctttatttccagtttctcaagagtttttaatcatggcttggttttccattttgtcaagggcatttttagcaaggtttgaggtgatgaaattttgtcgtggttgttttatttagtttgttattttagtctgttgggtgttaaaatacagtcatggctctctcatacagtctgttaatattatgaactacatcaattgactttcaaatgttgaaccaactttagattcctgaggtaaatcacacttttactttctactatgattttaatacagtaatctagtgcatttgtcattctccagtgccttaaaaatgttgtattttatctatttatccaccatttaatattattatcagataaaagggttagtctaaccaatctattcagtgactagattcaaaaccgtgagtagactttgtgtgaaactcagtgaaaaaccattgaagtatcactttcaatagtgatgccatgttatttcagaccaatatcagctttgctaagataggaaaacaagtccttaacttaaaaaaacttatgtttgaatagattttttaaataatattcaatcattaa

SEQ ID NO: 907432 - DNA, 683 bp, Homo sapiens
aggttgattccatgtctttgccattgtgaatagtgctgcaataaacatacacgtgtgtgtrtctttatgatagattgatttctattcctttgagtatatacccagtaataggactgctggattgaatagtagttctgtttttagtctttgaggaattgccacactgtcttccacaatggttgaactaatttacactcccaccaacagcatgtaagcatttctttttctccacaacctcaccagcaagttactttttgactttttaataatagccattctgactggtgtgagatggtatctcattgcagttttcgtttgcatttctccactgatcagtgaggttgagcttttttcatatgattgttggccacatgtatgtcttcttttgaaaagtgtctgttcatgtacttttcccactttttaatggggttgtgggatttttcctataaatttgtttaagttccttatagatgcttgatattagacctttgtcagatgcatagtttgcaaatgttttctcctattttataggttgtctgtttactctgtcgatggtttcttttgctgtgcagaaactcttcagtttcattaaatcccatttgtcaacttttgcttttatcgtgattgcttttggcattttcatcatgaaatcttggcctattcctatgtccagaatggtattg

SEQ ID NO: 907433 - DNA, 683 bp, Homo sapiens
aggttgattccatgtctttgccattgtgaatagtgctgcaataaacatacacgtgtgtgtatctttatgatagattgatttctattcctttgagtatatacccagtaataggactgctggattgaatagtagttctgtttttagtctttgaggaattgccacactgtcttccacaatggttgaactaatttacactcccaccaacagcatgtaagcatttctttttctccacaacctcaccagcaagttactttttgactttttaataatagccattctgactggtgtgagatggtatctcattgcagttttcgtttgcatttctccactgatcagtgaggttgagcttttttcatatgattgttggccacatgtatgtcttcttttgaaaagtgtctgttcatgtacttttcccactttttaatggggttgtgggatttttcctataaatttgtttaagttccttatagatgcttgatattagacctttgtcagatgcatagtttgcaaatgttttctcctattttataggttgtctgtttactctgtcratggtttcttttgctgtgcagaaactcttcagtttcattaaatcccatttgtcaacttttgcttttatcgtgattgcttttggcattttcatcatgaaatcttggcctattcctatgtccagaatggtattg

SEQ ID NO: 907434 - DNA, 681 bp, Homo sapiens
tgatgttcttgtctccctatatagctttagcaagaaagactatctgcctagaaagtcacaagaacctaccaaatgaacacrcacagcaccacacctagcccactgtgtacttgtaccatagagccaaccatctcatcactttgagctcccatttcctcatgtgtaaaataaggataataatagctgtttcctatttactctacaatggtatatggaagattagcaagatactgtttgtaaaagtactttgatctcttctgagatagggtactaagtaaatttcagccggcgttactgccacacgttggcacacatgaaacctgaatggccactgggcaataaagaactggtcatcataaggtagaaacagaaaacaggataaggtgcaaggagagcagaaatccaagatgtgtgattagagtgaaaacagaggacttacatctgatcaacagaagaacccagtgaggaaacagaaatgaatatgtccaaagagagaagcacatggcaggacaacctgacccaattcttggaaaccagtcaccagatcagaaatcaaaataaagtgcactggatgtttattcaagaagctcctaaaatctgaacgtctctagaaaggcttcccagcctcatagaaacatggctagccaattctcccattctaccctttctgttctggggaat

SEQ ID NO: 907435 - DNA, 681 bp, Homo sapiens
tgatgttcttgtctccctatatagctttagcaagaaagactatctgcctagaaagtcacaagaacctaccaaatgaacacgcacagcaccacacctagcccactgtgtacttgtaccatagagccaaccatytcatcactttgagctcccatttcctcatgtgtaaaataaggataataatagctgtttcctatttactctacaatggtatatggaagattagcaagatactgtttgtaaaagtactttgatctcttctgagatagggtactaagtaaatttcagccggcgttactgccacacgttggcacacatgaaacctgaatggccactgggcaataaagaactggtcatcataaggtagaaacagaaaacaggataaggtgcaaggagagcagaaatccaagatgtgtgattagagtgaaaacagaggacttacatctgatcaacagaagaacccagtgaggaaacagaaatgaatatgtccaaagagagaagcacatggcaggacaacctgacccaattcttggaaaccagtcaccagatcagaaatcaaaataaagtgcactggatgtttattcaagaagctcctaaaatctgaacgtctctagaaaggcttcccagcctcatagaaacatggctagccaattctcccattctaccctttctgttctggggaat

SEQ ID NO: 907436 - DNA, 586 bp, Homo sapiens
ggtgcctctcatggcagaaaaagtttgttagcgcaaagataatttattaagattagragaggaaactctggaaggaatactgctatgttaacagcctgatctgtgtgtgtgtaagtgtgtgtgtgactgcacatgagcgtgtatgcatattatgtagtttttgtctccaatatgattatctattgaagatgaaacatactcaagcctgcataatgcacgttaattgcccccactggtcccaggattgagatctccagagacagagcctcagactctggaagggataagtaatgaggaatggggagatttgtggcatgttctacatctgagtaaagcctgaaaggggcctttgtaaagaaaagaatcaaaaggtgccttacttagaggctatttgactcccgggcaacatttaggatatggaattatgggcaggtggagcagtaacttttctgtatctcgaagtccactttgtttcagatgttggtataaaaaggagcataaattttcatgactattttccttcacaaacagctttattattaggcttattagacacagaattaagaaattttgtcaaatagtaatt

SEQ ID NO: 907437 - DNA, 641 bp, Homo sapiens
gctgcaaaagacacagtttcatttcttattgtggttgactagtattgaattgtgcatatgtgctgtgttcttttataaaatcatctgttggtggacactcaggttgacatgtgtgttattaagaatagttttgtggtaaacatagaagcatggatatctttttgaagtaatgatttattttcctttgggtagttaccccgtagtcggattgctggatcaaatggcagttctatttccagtgttttgggaagactccataccattttccatagaggttgtcctagtccacatcctcatctacagtgtcgatgagttcctgttactttccatcctcaccaacatctgatacttttgagtttttaataatagtcactgtggcttttgtaagataatatcttactgtagttttaatttgcatttccctgatggttagtgatgttgagcattgtttatatatttattatccatttgtatgtgttctttggaaatgtctactcacgtcctttgctcattttaatagggttatttggttcttcttcctgttgttgtatagtttaattccttgtaaattyttcatgttagttccttgtcacaggcaaggtgtgcgaaaattttctgtcattctgcaacttgcctgttca

SEQ ID NO: 907438 - DNA, 611 bp, Homo sapiens
aacaatcttcctgtgttaaactattggtttgtcttaagtgatgtcctaagtgaaacacacagtacactagctttgccttcaaagctttcttttacttaagtaatccagccacatagaaaaaaataamtattgaatagtatttttagacagtaagatagctctcccacccaagaccctcagttcttctaaaagaaaactgctattcctaagtcacatatagataatcagtgcatttacaaatatgtgtataaacacatggctttgggcatttaatttttaatttacataatgcataatattaacaggtaatagttttacatatttacaaggtacacgtgttattttgatacaggtatatagtatgtagtgaccaaatcaaggtaattgggatatctgtcacctcaatcatttatcattactttgtaagcacgtttttaaataaattatagcgtactaatcacacatttctgtactttatttcacttagaactacttcttggacatattgcttcttatcaaaatgtatacatctatcttaattcttaatggctgtgtagtttttcattctctaaatgtaacatgatttattgattcagtcacctattaataga

SEQ ID NO: 907439 - DNA, 656 bp, Homo sapiens
tcattatggtgatatgaatactgtccayatcagtgacattaattactgtcagttgagagaatacggtacatattcttgaagtaagactctttcatcaaaggtgacccaatgtctaccctttaaatctatattgtacacacttaataatataaggtcagtgaccacatgaaataaagatatggagtaggagaaggctgcaacagctacccacaatgcattatagaacaaacctagcactgccactatttcaatatgggcatagatgggatatatgattcttcagaactcactagatctgttaccaggctaaccagttattccccataaaactcatgacttcttacaaatcatttgctggaaaatttttatatcctaatttcctgagatgggctctacattgtggcagatggctttttgacctcttaactgtacactcaaattttatctggcttgtaaaagctctatgacatttagcacagactgtatcatacattctatatgcaatagaaaaaaggttcccaaggatataagctataaacaaagcgcttgtagtagtgtaatataagggagtaatagttgttgctatcgttattttttaattttaattgacatactaattatacatatttatgggataaaatatgatgcttcaatac

SEQ ID NO: 907440 - DNA, 597 bp, Homo sapiens
gtccttttccataacaacatagtgacttggaatataacgtggcactaaaaaatagaagaataaaaagggtctttgaagcaattcctttttatcttgctttattcttaacagcagttctctggtcttaattcttttatggttccaggagaattacatttcaaattccgtaattgcacaggagaattggagtcttgtaaaaatttagaatacttcgttcaaaggcaacttttattatgaactgaacctatgctgtgatgcagccaaagaaattgtttagagcatcattaaaataacctttttaataagaccactttctcttgaaaaagtgtagtaccctcttatttaatattaccatattacaattgactgtatgtttgctgaaagtcttagagtatggtatttagtttattgaactagcacaaaatatacatgaactttatcagttttcattttccctttaacaaacsaagaacaatattaaatgacattttatgacatttgataggtatttaaaatttgttattgcggctcttcagtgaaccataaaataacaagtgtcacaatatggctgtgctttcattatgagaaatgcaagca

SEQ ID NO: 907441 - DNA, 632 bp, Homo sapiens
ccagggcaatcaggcaagagaaagaaataaaggcattcaattaagaaatgaggaagtcaaattgtccctgtttgcagatgacatgattgtatatttagaaaaccccatcatctcagcccaaagtctccttaagctgataaagaacttcagcaaagtctcaggatacaaaatcaatgtgcaaaaatcacaagtattcctatacaccattaacaaacagaaagagagccaaatcatgagtgaactcccattcacaattgcttcaaagagaatagaatacctaggaatccagcttacaagggatgtgaagggtctcttcaaggagagcaacaaactactgctcaatgaaatacaagaggacacaaacaaatgggaaaatgttccatgcttatggataggaagaaacaatatcatgaaaatggccatactgcccaaagtaatttatagattcaatgctatctccaccaagctaccaatgcctttcttcacagaattggaaaaaactacttgaaagttcatatggaacccaaaaagagtccrtattgccaagacaatcctaagccaaaagaacaaagctggaggcaccacggtacctgacttcaaactacactacaaggctacagtaataaaaacag

SEQ ID NO: 907442 - DNA, 537 bp, Homo sapiens
ttttgtggcactacaatagcaaagacttggaaccaacccaaatgtccaccaatgattgactggattaagaaaatgtggcacatatacaccatggaatactatgcagccacaraaaaggatcagttcatgtcctttgccggtaaatggatgaagctggaaaccatcattctcagcagactatcacaaggacagaaaaccaaacaccacatgtctcactcataggtgggaattgaacaattagatcacttggacactgggcagggaacatcacacactgggacctgtcagggagtggtgggctgggggagggatagcattaggagaagtacctaatgtaaatgatgagttgatgggtgcagcaaacctacatggcacatttatacctatgtatcaaacatgcacgttgtgcacatgtaccctagaactgaaagtataaattttaaaaaaaggaaaaaaaagagaaacttctctcttcttagttaatagctaatggtctaccaattttttgtctttccaaaaaaccatttttttagtctg

SEQ ID NO: 907443 - DNA, 637 bp, Homo sapiens
gtggtgctgagaagaatgtatattctgttgatttagggtggagagttctgtagatgtctatcaggtstgcttggtgcacagctgggttcaattcctggatatccttattaactttctttctcgttgatctgtctaatgttgacagtgggatgttaaagtctcccattatttttgtgtgggagtctaagtctctttgtaggtctctaaggacttgctttatgaatctgggtgctcctgtattgggtgcatatatatttaggatagttagctcttcttgttgaattgatccctttaccattatgtaatggtcttctttgtctcttttgatctttgttggtttaaagtctgttttatcagagactaggattgcaaaccctgcctttctttgttttccatttgcctactagatcttcctccatccctttattttgagcctatgtgtgtctctgcaagtgacatgggtctcctgaatacagcacactgaagggtcttgattctttatccaatttgccagtttgtgtcttttaattggagcatttagcccatttacatttaagtttaatatggttatgtgtgaatttgatcctgtcattatgatgttagctagttattttgctcgttagttgatgcagtttct

SEQ ID NO: 907444 - DNA, 664 bp, Homo sapiens
ccccactgagataaaaaaaaatgttttctcctgctcttacatagtcactcaatactgaatataacactgaatgtttcacttcttgtcaccaaaatttgtgggaagttctccccaccagcaaccagtcagtcagttctccagtagacactagctgggtgtcctgtaaggccatcagtttctagacactatcttactggagatagcattagatcccacaggttaagggctcagtcccacaagactgcctccacttaagatgctagttgcaagttgtagattgtcacctgtacttctgaccaaccagctataaaatcagggttcccaatacctccttctcatgttcagttaatttgttagagtggctcacagagctcatggaaacacgtaactgttttatctgtgttattctgctctgacagagtaattgagattgggtaatttataaagaaaagaggtttatttggctcatgcttttggagcctgggaagtccaagatcgagtggccacgtctggtgagggccatcttgctgcatcataacatgtcaaaagggcagcaggcacaagagacaaagaaaatcagaccaaacttgtccttttcatcaggaaccccctcccacgataactaacccactcctgtgataayggcactcatgagggcagagct

SEQ ID NO: 907445 - DNA, 638 bp, Homo sapiens
actgatgggcatttggggtgtttccatgtcttcactattgtgaatagtgctgcagtgaacaaaggagggcatgtatcttataacagaatgatttatattcctttgggaatatacccagtagtgggattgctgggtcaaatggtatttctgcctctacatctttgaggaatcaccacactgtcttccacaatggttgaactaatttacactatcacaaactgtaaaactgttcctttttctccacaacctgaccagcatctgttgttttttcacttcttagtaattaccattctgactggtgtgagatggtatctcattgaggttttgatttgcatttctctaatgatcagtgataattagcttttttcatatgtatattggccacatgatgttttcttttgaaactgtctattcatgcctttgctcactttttaatgggtttgttgttttcttgtaaatttgtttaagttccttgtagactctggatattagacctttgtcagatggatagattacaaaatttttcttgtattctgtagggtgtctctttgctctgatgatagtttattttgctgtgcagaagctctttagtttagttagawcccatttgtcaatttttgcttttattgctattgctt

SEQ ID NO: 907446 - DNA, 575 bp, Homo sapiens
tacacgtaccctgaacctaacataaaaattgaagaagaaaaccaaaccattcaatcaataaacaaaaaaaaaagaaaattcaccagcaagacaattattatttaatattcatactkcatcagagagttacaaagacagaaatatgttgaaaggaagtaaacatgacccattgagagcaaattcatcagaaggctaccatcccactatttctggatcattacaataaccttctcttggcaatggccatgccacaaatatctctacatccctgattcaaggcataataactaatactagtaggcagtctgttgtttcttgacttttgatcagaaaatgaaaaattttccagaatgagggttacagtcttctccaatatgctatgagaattctgtactttccaacaacaaccataggagttgagcctggttttgtaaaagaaatcaaccttgaacaagatttgaaatgatgagtaggattgagagagacagaagttttagaaaggatgaaaatgcagtgaggttataattgcctgaaggaaactttaaaaatctcaataagaattctaaacttgatat

SEQ ID NO: 907447 - DNA, 673 bp, Homo sapiens
aagttaatattttacttagacaagattagtaaaattatataggtataaaattaggacgacgatgagtatgtagagcaatgaaaactattacccaccaccagaataatagattggtgcaatcactttgggggagaaaataaaattacctaataaatttgaatattttcatgtcttaatatacaacaatttctccctttagtgcatattctagataaacctaaaacatgtgctctaaatcaggagacaagcagcagaatattttcagtgatagtattaatattagtaaaataccgggtaaaaccctaaatgatcagcccagctgaatgagttaactgtgatgtattcataagacaaaatagtaaccatgggaaacaagaattgatccatatttatagggatgagtctaaaaatataatgttgggtaaaagaagcattattaacctattcaaacaagagtaaaaaccaatcaaaacctatctattaaatagagatacacaagtagatggtaaaatgatagaagaaagcaaggaaagaaagcaaaattcagaaaatycagaggaaaaaaagatgggtaaaaattggatacaaaactgttgggttagtattggctactcagttgtttattttgttataattatttaacccattcaaaatgtgctccatatattaatgt

SEQ ID NO: 907448 - DNA, 556 bp, Homo sapiens
gacagtgaagggtgtggcattgggagtacccatcctgggtcttctctcccttcctgtgggggtaacctggtagtcttgcccactgccccggtttattcactggggatgcagtccagacagaaatggggctttggctcagggacagggaagggcacctggggagaaagaggtttcccaaccaggcctgtcacagtaagcagccaaggacacggagcctcctgtctctctcaggctgggacgagggctgccattctaggcatgagaatttcctcttccagaggccctactcctcaccaccctccagggcaaggattattattaactcagctcctggagggggaactgcagaatctgtgatgctagaaacacaggacaggtcccctggggcggggatgcagctttggccttgagccctgagaatggtagccccaattcttcccaggtcctcctacttggggcttgcctacagtaagggtcccagagcactgccagcaactgcaccaatatcacctctctggctctggaytcttacctctattaatacagccaaaagctg

SEQ ID NO: 907449 - DNA, 628 bp, Homo sapiens
ttcctctaatcgtgccactgtcccagacacttggattatatgtacaagatatatgatgtccttgccatcatgatgtttacattcacatggaccagacattattttaagaaagtatgcatatttttaaaaaatttgttattgctaagtaacattaagaacacaaagcaaggttgggtgatagtcactaagagcttcttttttcaaataatgtagccaggaaagactctctagatgagctgatatttgaagacacccaaatctgagaaggggctattagaatgtatacattagtgaagcatatgccaggctgagctagccaatgtcatgacccctgaagaggacatgagctctctgtgtttgagggataacaaagaacagagtaactaatacaataacatgggagaagcaggcaggagccagatcatgaagaaccttatagataattatatggcatttgataaaatataattcatatttttcaaagtccattcctgctatagagtggaaagcaggatatatggggaaaagggaggaaacaagaagatgatgaagctattgcagaaccaaagaaaagatgatggaggagtgatgamgatgacagaattcaagatatttgaaagattatatt

SEQ ID NO: 907450 - DNA, 611 bp, Homo sapiens
accacagacttgagataaacgaataagatagtgcatctagttgtaagcctatataaaagtacattataaacgacagggaagatatttgagtagataagggcaagcctggaaagaaggacatttaagctttcatcccaatttgaccatcaattatagagacatacgcaactttgaaattgctttccttgatagtgaaataatagatacactgcaaatgtctatatatttgacatattatttaatttataaaatatcttttgatatctttgaaactgatcattaaaatatgaagttgtaactcaaatgttgtaattttctttcactttaatatatactgtcttgttccagacactgtgtttgttataaaagtctttattatacaattgttaaataattacttttataaatggtctctcatttattcctgaaatgcaggtatttttctcctttttgtattattgacgaggagactagggcttagagtcagactagttactgttgtgggttgaattgtgacctcaaagagatacattgaaatcttaatctctggtacctgtgaattgaamcttatttgaaagtaggacctttgaagatgtgatcatataagaatg

SEQ ID NO: 907451 - DNA, 678 bp, Homo sapiens
gagtgttacagcttttgcttggagagtccagaggtctgagyccccaggaagtgttacagttcttgtttgttcctgccacccttagctcagcaaacgggggcctgtggtgtccagcggttttttcactcctgttgctccccagcagaaacgcgtgttacagctcttttcacacctgtcatccagtgggtgttgggttattatcctgcgaccaacaagaatgaggtacacagacactggaaagtgagtgaggtagagaagaattttactgagcgacagaaaagctctccacgatgagaggggacccaaagtaggtaaccctctttgtgagaggaagccccaaaacgagtagtcatttgtgaggctgagtccagggtttttatgggatcagaataggggcatgtgtgctgtgtggtccctgggtgggcctggaaaaagcaccattcgattggctaaaaggcatggagaaagttctccctccggcggtggactctaccccgaaaaggcagctcggttttcaggcttcgggctgtctttggcttgaaggtcgggtttcatcagggacccatccctgtctggctaggaatttgtctgtcttctgctgctatcacattcgtatacaccacctaccaatagtcttttctactagccaatgaagcaattaaagctccaaccataccg

SEQ ID NO: 907452 - DNA, 663 bp, Homo sapiens
catataagccttgatgaacaggggtgatggaagatatttctgacggcctataggcaactcagaggcattttctttcttctagaatcttccctgtttagtggaaattggatgcctggaaacaaaattttcagaatcctggccagcagaattctgggttagattctatcaatgagaggcatctgtatgttatttgaaagactaaagactgcttcagcagcggtggatggattcatgaggagcaaactgagagaggcctttttgtagaggtctctgggcatttacttgaatatcacccaccatggagcaagaagacctatgttcattgccagctatatcctgcaatgcttgtaacctttgaagtttctgaaagacactggtgaccctgagagttagtgctggctttttctgaccttcattccaccagtctttccactgattttgtaatcatcgaagttactggatgtaacatcctattgcttgaaacaggtaaaatgaattttgcttttctggatgaatcctggctgatttgggaaataagttttacaatcaaatatgtgactattttctttttatttgtgtattatttataatatatttaaggcgtaygagtgcagatttcttacatgcatatattgcatagtggtgaagtctggggttttagtg

SEQ ID NO: 907453 - DNA, 553 bp, Homo sapiens
ttctagatgatgttagattttggctstgttctcaacttcttccaacttcatgatatattttttaaaatatacccgacaatgattagatcagaacgagcagagaagcaggagatcagaaatcctcagaagctaattcttataggcagttttaagttaatgctttcatacatattttaatatctgtctcttccattatgttattttttacagaatcagctccctccaaacaccttcttagtttttccccaaatttagggtcatacgtttgtatgattgattgatttttgtgtggttttctcattattgtgccagtatcaaatgtgaggctcttgggtattggataactagtccaggacagaaatagggtcagggaagatttaatggagactgtgaatggcacgttactggaagacctgtgctcttgaccacagagtttgcctgactatctcactgtatggataaaaattccatcagctgagcatgcccttgggttattttcattttctcgagccatcccttatttgagaacagagccctaatagctctgtaagtt

SEQ ID NO: 907454 - DNA, 490 bp, Homo sapiens
aaagtgaattgcccaaagtcacacagctcataakttgcagaaagaggatacatatcaaggtcttatatattccagagacaaaatttatctgctctgtaaaactttaaaaaattaaaatatgactatgtagtaaactgaattttttcatccttttcaataagagtagtacctgttgtagctcagactctgcctatattttagtagaatgtgtttgggacctggatataattctttttttgttaaacatagtatttgaggaagaaaaataactaaaagcgatataacctaatattaaacattttagctgaattaatctaaaagagctatcaataatgattaatttctaaacctaacttttacagtgtctaatttctctggcctgcctagaatatgcctctagattttgttttactctccttttatcctctgtttagaagatatattatctttaaataagaaggcaaatgttatttgagcaaaggctagggac

SEQ ID NO: 907455 - DNA, 669 bp, Homo sapiens
ttgctacttctttctttggtaggcaatatacacagtaaayctaaatcagagaaaagttaatataaggtttccaaaaccacatctgatacatagaagacacttaatacatgttttctagttgaggcagaagagtgatatgtaaataaaaattcctcacgtttttatcatctcatggacagggaccttggagggaagtaaatctggctggtatctcccatagggatggccagcaagaatggtaattaccatgggacataaacattgtgttcaaagatgtttgctttccactttcatatccacaggacttatcagggtgctggtatgtagcaagtgttacacaaatacatattaaatcactgagttgaaaggacacagagaccatgtctcaggaaggccctaaggtaagttgtcatagataaagccctggatctaacacacataatcaaatatggaaccagagaatcagagatgttgagagtgaattaacagttgagtgggcagtacatagcggtttgaacacattccagcaatgcaagcccaatatctgaggtcttacccatcattaatgaacacatgagtatttgagtcatttatacccaaaagagatagaatagcagaagcctaggaattttcaccaggtcactgaatagtaccaccttttagaaaaaa

SEQ ID NO: 907456 - DNA, 568 bp, Homo sapiens
aatttttctttttaaaataagattatgttttaaatatttatatcaaagaaatatgcctcgtatgatcttcacaaaagtatttgatctataactcataaaagaactataaaatgtgtaagaaactcctrttttatctttttattgtcattgttttcagtgttatcatactggaaaaatattatgggcagtatacatatttttccttaaagggagatttgaaaataaataaatcaagcaaaaaagaaacttctagtcatgattgtttctccctatttttttaagttttagaaagctgtaatttggaagaaatgctggaatcttattttacatatagtctcttcctgaagttctagagttttgctatcaatgaaactctggaaaaaaaaaaccaggatgtctaagatggtgtaaaagaaagtctcagctcttgtttcccacagaaaaaacaatttagcaatgatacatagaccaaaatacctttgtgagaattctagaatccaggtaagaagctgaagtaccctaggcaagcaaaaagacaagaataaatatatttaaatggctaagaaga

SEQ ID NO: 907457 - DNA, 642 bp, Homo sapiens
tggtaaaatatgcataacataaaatttaccattttcatcrtttctgagtgtacaattcagtagcattaaacacattcacattgttgtgcaacgtgatctgtctccaaaagtaactctaaaacttttattttcccgtattgaaaatgtatacccaccaaatacaatccccttttccccacccccagtccatggggactaccatgctgttgtctttctctctgaatttgactgtcctgtgtacctcgtataagtggaatcatagtatttgtccttttatgtctggctcgtttcacttagcataaggtttccaaggttcatccatgttgtagcatgtatcagaatttcattccctttaaggctgaatcatatttcattatatgtatatgtcacatattgtttattcattcattgatagccatttgggttgcttctacctattggctattgtgaataatgctgctataaacactggcgtacaaatgtaggtttcagtccttactttcgattcttctagggatatacctaaaagtggaattgctggatcacatggtaattctatgtttaattttttgagtaatggccataatgttttccacagtggccaccacattttgcattcccactagcaatggacaagggttc

SEQ ID NO: 907458 - DNA, 636 bp, Homo sapiens
tggacttcacagcataaaccttgcatgcaagaagcaagtgagacaatacattcaaagtgctgaaagaataaaaacctgtcaaygaaggatactttccaagaataaagactttcccaaataaccaaaagcagaggagttccttgctactagactgactttacaagaattactaaagggagtctttcaagatgaaatgaaaggatgctagataggaaaatgaaagcatataaaagtataaagttcactaccaaaggtaaacatatagacaaatacagaatactataatactgtaacagtagtgtttaaatcacttttaattctggtatacagattaaaagacaaaagtatacaaccatctgatcttttgagaaacctgacaaaaacaagcaatggggaaaggattccctatttaataaatggtgttgggaaaactggctagccagatgcagaaaattgaaactggaccccttccttacatcttatacaaaaattatctcaagatggattaaagacttaaacgtaagacctaaaaccataaaatccctagaagaaaacctaggcaataccattcaggacctaggcatgggcaaggacttcatgactaaaacaccaaagcaatggcatcaaaagccaaaa

SEQ ID NO: 907459 - DNA, 629 bp, Homo sapiens; identical to SEQ ID NO: 900139

SEQ ID NO: 907460 - DNA, 652 bp, Homo sapiens
gcccaagtcccaacacacttaaagttagatacacaatggaggaaagtgaagttgttttttttgtttgtttgttttttgttttttartgagatttagaatttactcacgcatttactttcaatgttactttccatgttcccttagaagaaataatttaatttagagctatttgcttcatttttttacataaagtataacagcctaacaggttcgccttgcccactgcctagacagagccgatttatcaagacaggagaactgcaatggagaaagaataattcacacagagttagctgtgtgggagaccggagttttattattactcaaatcagtctcccagagcattcggagatgggagtttttaaaaataatgtggcaggtaggggcttgggaagttgggagtcgggagtgctgtctggtcaggttggagatgaaatcataaggaggtcaaagtgaggctttcttgttatcttttgtccctggttggaatcgcaaaacttgttgagccagattatgtgtcttggtggtgtcaactgagccattgagtgccatggtctgcaaaatatcccaagcaccgattttaggttttacaatagtgatgttatccccaggagcaatttggggagtttcagactcttgcagccagaggctg

SEQ ID NO: 907461 - DNA, 604 bp, Homo sapiens
tatgtctatgcacacatatagcttaaagggagcactacctctcattttaatcttcaagctaatctacycgttccctgttttcacttgggaatatgtgtataaacaaaatatggaagccttatcagtaccatttgtcaaaacttcaatacaccctgtgacacctgaacttcctccaaatcctctccatctcctttccttctccttcctccattttgttcttttctgtaactttgatggtgattagttcatgtctcccgccaactcaaagtctggctaggtcaaaataacaatctttcctttcttccttattgttattaggaatcaaaggaagggagatgcagcattccttttctgttatgaacttgtctgttgttgaaataaattaacttcattctccttgatgtttttaaagaatctgagtcagtggcaccccacagcccacataccttaatcacatattttattatacttctaaatacataattatctgcagacctggttactgatgtaacagttatataaccttctggttttttaattggttgcctgaaactgagattacaaaggtagagacggaaactaatgtctcaacaaaatggctcat

SEQ ID NO: 907462 - DNA, 498 bp, Homo sapiens
aagagattaaagtgaattgcccaaagtcacacagctcataakttgcagaaagaggatacatatcaaggtcttatatattccagagacaaaatttatctgctctgtaaaactttaaaaaattaaaatatgactatgtagtaaactgaattttttcatccttttcaataagagtagtacctgttgtagctcagactctgcctatattttagtagaatgtgtttgggacctggatataattctttttttgttaaacatagtatttgaggaagaaaaataactaaaagcgatataacctaatattaaacattttagctgaattaatctaaaagagctatcaataatgattaatttctaaacctaacttttacagtgtctaatttctctggcctgcctagaatatgcctctagattttgttttactctccttttatcctctgtttagaagatatattatctttaaataagaaggcaaatgttatttgagcaaaggctagggac

SEQ ID NO: 907463 - DNA, 663 bp, Homo sapiens
attgctacttctttctttggtaggcaatatacacagtaaayctaaatcagagaaaagttaatataaggtttccaaaaccacatctgatacatagaagacacttaatacatgttttctagttgaggcagaagagtgatatgtaaataaaaattcctcacgtttttatcatctcatggacagggaccttggagggaagtaaatctggctggtatctcccatagggatggccagcaagaatggtaattaccatgggacataaacattgtgttcaaagatgtttgctttccactttcatatccacaggacttatcagggtgctggtatgtagcaagtgttacacaaatacatattaaatcactgagttgaaaggacacagagaccatgtctcaggaaggccctaaggtaagttgtcatagataagccctggatctaacacacataatcaaatatggaaccagagaatcagagatgttgagagtgaattaacagttgagtgggcagtacatagcggtttgaacacattccagcaatgcaagcccaatatctgaggtcttacccatcattaatgaacacatgagtatttgagtcatttatacccaaaagagatagaatagcagaagcctaggaattttcaccaggtcactgaatagtaccaccttttag

SEQ ID NO: 907464 - DNA, 510 bp, Homo sapiens
aggtctcaaggagaaggccacagtgagggtttggggagttgttaagtattcattttacttaataacctcctactttatttttgcaatttctctttgaaagtgaaacacaacagaggtgcgattcaggaaaaagtgggttaaaataatttaggagagtgtggctataaagttgctcttgggtgcttttattatcattatcattagccatattgacaacagattcaaatggactcgctgaaatgactataactatagtatcataaacataggcattttaaatggttcatttttagagaacatttgtcttacatttttaaagtgagttgtgtaatatgtctctggtcagccatttgactgggttgtcaatgtgttactastattaatttattaaatttatttcttaaactattgctgagttcatagatttcctctacaaatgctatgtttgtggttggcacgaagaagaaaatacaatttcttccttgagaatatcactgtttaattgggaca

SEQ ID NO: 907465 - DNA, 662 bp, Homo sapiens
ttataatggtgagaaatgagctgaaacatgcataccagctatagggaagagtaaactgtaayagcacttggagcagtgggcaaactctggctgccaggcctactttttactttgaaattccttgtaagcaatgtgtggcttattctgacttcaattttttaagaaaaaataacgtagaccttctccattaatttcctctgagtttgtgatcactgacattttgtgacaaaaaagtactgttttcgccaatgttttccacttcttttatccatcacatttctttatttcactatattttagaggatttgtttctgcagttgacagatggaaaactgcaacctgatgtgtactagagctctaaatagactccttttaaaaacatacttgttattatttttattgctctagaaatgatagataaagcaagggtaaaatagaaagtatcatcttgattgtaaattcttccaccagatcaaacgctggttgaagacagaaaatgagagtcatctttgtttcctcccacagtaccttatgcctaccctgtcccactgtgtacacttattattcagcaaagttattgatacgttgagaaaaagtgcctggattcatacatctaaacattgaggatggagcagtgcatgaagtacagaagatcactgctt

SEQ ID NO: 907466 - DNA, 577 bp, Homo sapiens
tcagaaacaaaggttaaatagagacttttccagttgtataaaaattgaaatgattactcaccagtagaccttctgcactgctgtaattttttacagaaagttacctaagtcgaaaaaaaattatacaacataaaaataagtatcttttcaaagaagaacatgggaaataaaagacataggttaatacacaagcctttattatgtaaatggcagtttaaaccaaaatagtaacaatatagtgctaataataaatatataaagtaaatgaattataaaaaaataacagtatatttctagaaataaagttcatgacaaaaatggcatgaaggctaggagtaatgaaaatatataattgaaaataaaatattactgggaaagtggactctgtcaagttaaaaatgaatactataggccaggcgtggtggctcacgcctgtaatctcagcactttaggaggctgaggcaggtggatcacaaagtcaggagttygaaaccagcctgatcaacatggtgaaaccccgtctctactaaaaatacaaaaaattagctggatgtggtggcacatgcttataatccca

SEQ ID NO: 907467 - DNA, 602 bp, Homo sapiens
tactagccagttagctttaggaaatagaagcatccctcattcagaaagaggagaaagaaacctctttacaaatacttcaattgcccgacatgtgaatataccctttttgttcttctcttattgttgatgagaacaatagttatattaatctgtatagatgttgatatggtttgactctctgtacccacccaaatctcaccttgagttgtaataatccccacgtgtcaagagcaggaccaattggaggtaattgaatcgtggaggtggtttcccccatactgttctccttgtagtgaataggactcacgagatctgatggttttataaatgggaggtcccctgcacaagctctctttcttgctgccatgtaagacctctcttgcttccccttcatcttccgccacaattgtgaggcctccccagccatggggaactgtgagtccattaaaactctttcctttataaattacccagtcttgggtatgtctctattagcagtgtgagaccmgactaatactaatcctaggaaatcgtagaggtaggtggcaggccttgactgctaaaagatcatgtaacttaaaatgtgtaaatagagtgttttt

SEQ ID NO: 907468 - DNA, 649 bp, Homo sapiens
ccaatctttccttttatggttagcactttttacttcttgtattctatttaagaattctttgcctatcccaaagctatgaagatattctcctgttttctggaaattggttgttttagattttatatacagatcaaagtaaaatctctaattttgtatatgtcatgaagtgaggttcatttttttccctgtatgactaccagagcctctactctggccttgaattgaatattcatcccaagcttttctttctgcttttgtaagctctccaatatatccatagaagtcatgccaccccacaatctttgtaaaaattatggttgtcattgtaatcaactgcagctactccaatggaccacctcaagtcttgccctccacagacactgcatcccacactcgccacagagataatttgagtaattgtgaagcccttgcttgctatggtttgccaggcataagtggtcatctgttcactcattaagtatgtaagcaactcagtcccagaatcccaccactatattctatgccytagggacactgtaggtaaaaacactatatcagttttggaccatgcaggaaacgtaattcctctcaggtgttttacctgaagaagctttacagggggactatttgcagagggcagacatagtta

SEQ ID NO: 907469 - DNA, 526 bp, Homo sapiens
catcaggattttgtggtctgtccttattctcaaacaaggacggaccaatagaggagattgtataactgtaaaactgcttttgctgktgaacatcaaggacaaaatattgaggcctgcaaaaccatgctttttgaagttatatcagaaacttcgtcatttaaaatcgtatcagagactgaagatcagaagaaactggagatcagaagaaattttaaactatacaataaaaaatgctgtgtgttaaaaacaacaaacaaaaaaacacagcctctgtcttgtcttggtgacagtgtttttctaatttctgtcagacctaataagatatctccaagtctacctcaatctcaaaagttacccaataatctataatagttcattgttgaggcaatattgagagaaggaaggtaaatcaacaaaatcctgaaggctctcggtcatacccttctaacaagtaagaaggtgtattggtcccttttcatgctgctgatcaagacatgcccgagactgggcaatttacaaaagaaag

SEQ ID NO: 907470 - DNA, 535 bp, Homo sapiens
cattttaaggttctgacaaatcctgtagcaaagaaatctttttgcctaagctgagattgggtctacatgtatttccttgggagcccctcttgctgtgcagtattggaaatactgctcatragtgtggcagtgataactgtaaagccagaagcaggctctgggagaaaagccaggggtcagactcctgctcacttacaggcagtgagaagagtttgtctttggcctccttccctctgtccaatgctcctcccccaccactctttcttcacttatttgctttcctctgccaacctgaaacctacagaaagcaaagttgggctgggcctgtttatgcatcttcccaggttttcctggctctgcatgcccctggcctcggcaacttgctatgtgggtgctcgggcagttgccaccaaagtctatgtcctgacctgtcagctgtctatcttccccagaggtaagagctgggcctgggcatggctgccttgatgccatgcgcatgagtcacagcagctgcagtgccaggttgtaccctgct

SEQ ID NO: 907471 - DNA, 591 bp, Homo sapiens
ggctgtgaatttccacattgacctggcgcaattaacttaactctccgaattggttccttatctgccccggggaggagttttagattaaragggtgtgtgtgtgtgctgggagggaggtggaggggctgagttttctgggtggtgcggttttcccaagtcccgttttgaggttttgtcctagccagctcccgctcaggtccctgggcggtgacggtggtcaagcttagcttggctgttcctcctccgcttggaaaaaggccgccactggggccaactccggccacagcgctgctgccaggagacctagggtaggtcttttcccctgaggtagagacctgggtgtaccctcaggaaggcatcttgaagttactgacagttgagtcaaatcttgaaggtccagcaggagttagtaagaagaggtggaaggggaaaggttaggcgccccctcctccaccccttgaacaaagaaagcttgacggggcttacaatatccgaggaagagctgggcgggtagagaggtctgtagaggcgaaatcacaacttggctttattctaagggcaatggaagagggttttgaaggctttaaaata

SEQ ID NO: 907472 - DNA, 635 bp, Homo sapiens
ccggggaatgctgaagggaaatgttaactctgtcatttactctatgacgtgctacaaaacatcaactatttggaagaaaaagaagtactatgtcyactgtactcttccaagtgacaaatcaactctagcatttattttcatgccacatgatttctccctagtggcctatggcttctcttgtttgtattatgagatgtttccaagcaaaggtctttggatggagcaaatcaaaatttgggttaatttccagccttctcggctcctcccatattttgtgacaaagagctatgacctctcaagtattttcacaaaggacagaagtgctccagctgtattattttgtttttaatggtacaattttcactactcaagaagttattttactatcttataatttaaacctcaagattctctctctgtatttaacaatactaagatgaattattcaacaataattttgaaaattatgtatgaaccacaagagttattttgggtatatgttccactctttaaaaaaattaaagattaaaaagtagagatgtagaattgtgggagtaaagccttccccacagtgcagtacccaaatagaagtaatccctgtaatattttttggatatcaaatggcttggcctact

SEQ ID NO: 907473 - DNA, 601 bp, Homo sapiens
taaagcagcatttccaggatgtctgatatttcaaaagtctcttctratgtgtattatttattcagttgctttctgcctgattgaacattattctaccaggattttctgactgacttggtgatgtctgaggtggatcgttgtggagagcatgatgtcttgatcttcagagagaacactattgccaccaaatccattgaggaatacctcaagttggtgggacaacagtatcttcatgacgcactgggtatgaaagagaaaaacatctattttcttttatttacttttcagttttaagctatttcacccccatgagacgaattgagctcaaattctgcatgttatttagttctagctgactcaggtgttaaggtttgaatcatggctgtaagaagtctgcagtactcaccagtagagaaataataataaatgtagaaacagaaaccttgtcagcatacactgctaccccaggtccccagcttcatgattccaggatgcacagtaatatcagcagtgtccactgatagatctgaggtggtctgttttgcccaaagttttgggtgtttatatgatgatattattacctagtcttgagagtgttacc

SEQ ID NO: 907474 - DNA, 615 bp, Homo sapiens
cagtggacctctcagctgaaaccctacaagccagaagagaytgggggcctatattcaatatcttaaagaaaaaaatcttcaatcaataatttcatatccagctaaactaagcttcctaagtgaaggagaaataagatcttttttacataagcaaacgtttagggagttcattaccaccagacctgtcttacaagagatcttgaaaggagcactaaatatagagaggaaagactgttaccaggtaatacaaaaacacacttaaacacacagaccagtgtcactgtaaagcaaccacacaacgaagcaggcattaccagctaacaacacaatggaaggatcaaatccacacatatcaatactaaccttgattgtaaatgggctaaatgccccaacttttttttttgagacagagtctcactctgtcacctaggttggagtgcaatggcataatcttggctcactacagcttccgcctcctgagttcaagcaattctcatgtctcagcctcccaagtagctgggactacaggtacacaccaccacacctggctaatttttgtatttttagtagaaatgaggtttcatcatgttggccaggctggtctcaaactcttgc

SEQ ID NO: 907475 - DNA, 551 bp, Homo sapiens
tggatagaatgaatacaaaacaatcaaacttcaggaaataatggacacacttagagaaatgcaaaatgtactagaaagtctcagcaatagaataaaacaagaagaaagaacttcagaactctaagacaaggattttgaattaacccaattcaacagagacaaagaaaaaagaactctaaaaaacgaacaaagcctccaagaagtctgggatcatgttagatgatcaaacctaagaataattggtgttcctgaggaagaagagaagtctaaaagtttggaaaacataattgggggaataatcaaggaaaacctccctgaccttgctagagacctagacatccaaatataagaagatcaaaacacctgggaaattcatcacaaaaagagcatcacctgggcacattgtcatctgattatctaaagtcaagamaaaggaaacaattttaagagctgtgaggcaaaagcgtcagataacctataaagacaaaccttctgctagattttgaatttgtttgctcttgcttctctagttcttttaattgtgatgttag

SEQ ID NO: 907476 - DNA, 585 bp, Homo sapiens
atagtaatgtctactatcttatgtgtgattaatgaaatctgctaatataaacagtgagaggacaggcactctgattctgccaatggctaccaattaaggaggtgctgctcattttcaggatgaaaagggaactgctctgtcttagctgtctgtaataatttatcaagaagtgaaattttaaggacatgacccagaaagaacatgagaatttaaaaatctctctttcccttataataataatattaaaaatcatagcaatagtactataatgtactagatgcttctatttcccaggtacaaattaagtactttgcaggcatatcccggtttaatccactcagcagccctctctagtaaatatctatgctgtgttcaactttcagatgaggtaagtagtgttatagcaaacaagggatggagtaggaaaatggcactaaccatgacctagttaaagaagcaagtttgggatttggagaaaggaacatctgtggaattgtccacattttgtgacatgtgtatacggggcactatgcgagtaagggtggcagggaaacckaaaaacacacatgttcccagacacgtgtg

SEQ ID NO: 907477 - DNA, 612 bp, Homo sapiens
cacatatatttctattgcacacaataattgtttacattttttattattatacaacaraaagggtggagataggagggctggagattgcaacattagccaaatctgaattcaaaacacattttcaccagttactagctctgccatcttgggaaaattatgtaatatcatacataataatagtgtctactttgttgggccttttccaggattaaatgagtgaaggtaatacctggtgcttgatacgttttataatttattatttcaggatcaagattataattaaatatgaggaaataaaatattataatgaaataatgtatttaagcatttaatacaattcctggaacccaatgaatattcaacaactttttagggccctagccaaagaaacaatcaacccagtcattcttaagtacattgaatgaaaaacaagggttacatcagctgaacaaacctataatcaggacagaaaacagcagagtttaagccccttcaccaagggaactgaattttacttttgtggcagaacctaaatttcaaactgagttagattggctttgggaagaaaatcaagcagttgtcttgacatgaggattcttcaactgcctccag

SEQ ID NO: 907478 - DNA, 587 bp, Homo sapiens
catgaaaaaacattccagaaatggatagtgatgatgcctatacaacrttatgaaggttcataattccactgaattgtactcttaaaaatggttaatataataaatgctatgttcttatatttttatcgctatcagaaaaataaaaaaaattttaagtatattttatgctcttccagaatttttacaaattctagaggagtggaaaagcaaacttgaaaacagaaaacgtagtaatcgtctagcccctaaacaggatccttatttaacacataagaactacaggcccaagttggtttcctgtaattcaagcagtcagcagcaaaattgattctgattcaatgacatcccaacccaccacctcttcaataggcctaaattgtcaaccagcggggtatcccagcaacatcacaaactgaacattaaaaactgaacaaatgattgtttctccaaatcagctcttccttctgcattccctactttaaccaaaagcaccattctttccctaagtacatatagcctcccacagcttatcatcaagtcctattcttgaattatcccccaagtatcctgactttttccatttcttt

SEQ ID NO: 907479 - DNA, 636 bp, Homo sapiens
aatcagcagggaaggtttctgaaaaggaaaatgactcctacaaacatatttagctgtaataaggaagataaagggagagtttgtcagtaagccgttctgggaggaaaatagggtttccttttgtgctggctccacccaactatgtcggcctgatttcacctactgctccattaaaaatatacaaccaaaactgaaataagttacttaatctttgtaattacatgtctgtaaattctaaaagattctcttctttctgaaagtctcccattaaaatgtaaactccccttggaatggccactgtctcaacattcttgccctcaaagccaaatgtggccctccaatcttcctaaatatagatagtgttccaaagatccacaactaaatgatagctgttgccactgacttatgatctctagcctaagatatcttcagttagcaaattagcattgacaatcaacattttaacacagagaagtgagatttgatatattgtagacaaaggaagctgattttctacttcataaatctgcaaaagaaagtatgttgctaggattaaaatatgtatacaatatggggcaatgttcaagataaagagrtatagatgaaaagatttgtgatccatgcataaaattatct

SEQ ID NO: 907480 - DNA, 551 bp, Homo sapiens
actgcaaatactttcattcagctcccataaaactagtattagtttcatttattttgtcctcacagttaggatttagttatatttattcaattctcagaacttgtattttacaaaatgaacagtttagtctgaatcattacttattcttctagtgcgttaaaaaacagaacaaaaatagcatttctttaaaatgagtcactacttaaaaatttttatttatttctctctaagatatagcttctgaactcaagatcaaagtatgggaagaatttttccaataacttcaagtgctcttaatgttataaaacctgtctactattttaaaaaatagtgttattgcttattgtcctacaggttaaggaaattattacttgtaatggatgttgtggggtgccacctgatcctccccactcccctctcaggacaagacactcattccctcagctcctgyaatgggaattgccctcagctgatgagcacttccttgcccaaaatggtacccccctcccagggagcaccctgcactcaatgacgggcaaatgtggggatag

SEQ ID NO: 907481 - DNA, 566 bp, Homo sapiens
actcaagagatgaaaattatttgccagccttggcattattcagttcatgagtctgggtttgcttcctatggtttttagttacactactctgtgcaaatgtatattttttaaaattttcaactaccwtccacacccatctaactgttgtctagagctttggaataaacctttggcttgttaatgatcagatcagaaactggagagttttggagcaatggttctggaacaaggacaatttctgtagagcagacaagagttcactgggggaatgagtggatcctgagcaagtgatgcatagtggatgaattgagttatcaaatctagcaaatttaggggagggaactgcagtggacagaatggagtagccaacagtttggtttttagacagccagtcaatgactgacaaccagtcaatcctggttctagcactcaatagtgagatgaactcgagaaagttcttttagttttctacatctcagttttcctctccataaaatagaataatcttaccactaatcttaggaggctgcattgtgtgtgttggagctgataaacataaatgccta

SEQ ID NO: 907482 - DNA, 582 bp, Homo sapiens
gggggaaaaacagttttttgtatccctgttagagcctacatgtactactgatggacctcatatggggaatctttgactacagcagagaattgcctttcaaattatgtcctgagtgaragcagaaaaacgactcactaaaggaaacagaaaatctgggaaaataaatcaatctaatacatcatcatgcctttatttccccagcacccatcataatgtctggctcagagttatttactagtaaatgcttgttgaaggttgaacatggagtaaactcataccacaatcctctgttgagatacaacatttccatggcacagaatagcatgaataaaaatcgcctgagtggcactatttaatgtaaaaaataaataaataccctaggctccacgaacattacgtttaatcaatgaccttaaggagaggcttatgtgtaactggagaactccaataatctcttccttagtgtcttaaaatagcccccttttgcaaactgagctatagactgccatttagagtctagcatagagaatgtcagatctgtgagaaacctaattatcactgaaagtacaatgtctggattta

SEQ ID NO: 907483 - DNA, 560 bp, Homo sapiens
atggtgacgcgcgcctgtagtcccagccacttaggaggctgagacaggagaatcgcttgaacccaggaggtggaggttgcagtgagccgagattgtgccactgcactccagcctggtgacaaagtgagactccatctcaaaaaaaaaaaaatatatatatatatatatatatgtctgtaccctataaactgtagctccatacacacatatacactaatatattgtctgtacatatatgtgaatacacatatttccactctgtataaataacagctttagacattgtttacatcttgctttttctcacttcttagatcttacagctctttcaatgtcctaaatgcaagacttccagagatcaatgtcagcatgtctctcttattttatgaaatggctacatgagtttacattataggcatctaccatgattcagttgaacagtctcttcytgatggacattttgttattttcttcctattaaagcaatgctgggataaacacaatacttgatatatttatataacatgagactatatttgtaggagagattctggaaaatg

SEQ ID NO: 907484 - DNA, 565 bp, Homo sapiens
atttattgtgtcttagtttattccaggtgatgcacaaaagtacattttatgcactatyttgtgtattccttacagcaaacctgtacattaaatattatactatcatgctattgaagctactaagctataaaattgtcaaatgactgaacttaaattacacagctcatagtgaatctgtaccgaaacccaggttgttctgacttcaggggtcctgtttttaattagtgctacactgaatttcataattaaggtgctgatattatgggcatctttaatccccatggtttctcaggaatttcagaggtagtcttcatgacaatggcaatcaactgtcattgaggttcctctcatcctcaatcaatgtctattgttgccttgtctctccaaatgaggccacataattaaataaatgaaatatttgtcccttggagcttttgcaatcatgatcatattacaaaataaagttattttgttcagtacaggttcaatttgtataaaaaccaaaaatgggaatttactatttttatttttggaaacttcttaagttatagcagtgaggctgaag

SEQ ID NO: 907485 - DNA, 603 bp, Homo sapiens
tcacccccgttaaaatagcttttatccaaaagataggcaataatgaatgmtggcatggatttgcataaaagggaaccctgtacactgttgaggggaataagttggtaaaaccactgtggagaacagttgggaggttcctcaaaatctaaaaatggaactgacatatgatccaacaatctttctgctaggtatacccaaaagaaaggaaatcagtatatcaaagaaatatctggattcccatgtttgttgcaggactgttcacaataggcaagatttggaagcaagaggtgtccaccaacagatgaatgaataaagaaaatgtacatatacccaacagaatactgttcaactataaaaaggaatgagatcctgtcacttgcaacaacatagatggaactggaggacattacattaagtgaaataagccaggcacagaaagataattttctcatgttctcatttatttgtggaagctaaaattgaaataatggagacagagagtagaatgatgtttaccagaggttgggaagcgtagtaggaggcagggaagtgggatggtaaatgggtacaaaaatatagttcgatggaatgaataagatctag

SEQ ID NO: 907486 - DNA, 619 bp, Homo sapiens
acaagtatcaatagtcgaatccatcaagcagagagagaaaggatatcagagattgaggtcaacttaatgaaatagggcataacaacaagattagagaaaaaagaatraaagggaacaaacaaagcctccaagaaatatgggactatgtggaaagacaaaacttacatttgattagtatacctgaaagtgacagggagaatggaaacaagctggaaaaccctcttcaggatattatacagaacttccccaactagaaagacaggccaacatttaaattcaggaaatacagagaacaccacaaagatactcctcgagaagagcaactccaagacacataatgtcagattcaccaaggctgaaatgaaggaaaaaatgttaaggggaggcagagagaaaggtcaggctacccatgaaaggaagcccatcagactaacagctaatctctctgcagaaaccctacaagccagacgagagtgggggccaatattcaacattcttaaagaaaagaatttttaacccagaatttcatatccagccaaactaagcttcataagtgaagaagaaataaaattctttacagacaagcaaatgctgagggattttgtcaccaccaggcctg

SEQ ID NO: 907487 - DNA, 654 bp, Homo sapiens
atgtaatagttcaatatttatacatatatgtaaatgttctgtgttgcgaggtacagagtatttcttactctaggttgtgataaaacatatttgaaacagtactcaagcttgttataactattgctttatttaaggacatttccccaaaacttaatacttacaattttgtctgacaaagacccaggtagcatacctcttactgggttcttccggggtgatgtttaaaatcttttaggatccatcatctgtgaaagaaatgtacaaagttttcagtgtattttttcttactatattcttgatacttgttaaaagaaaaactttagacaaattaaatttagcacagtttatttgagcaaagaactatttatgaatcaggcagtactcagaagcagaaggggttcagagagctccacccagcagtgagagcagtgagcttttatgggccagatacaggagcacagaagagaaatcacctgagtggctacagctgggcatctcccttatttggggctggtgtgatgagtgsattgcttgcaactggctgaaatctggctgtttgctatattcttagtttgaactaaactatgttagattgcagtttgttatgtaggaattcaaagtacagagtcaacaggttaagggcctcctgcttat

SEQ ID NO: 907488 - DNA, 663 bp, Homo sapiens
caataaaaatctttagttctttagagctgtcctacttacttttaggaaccatgtytatttggggcttttattaatttttgctaatatggaaagtatcatcatttctatcttctttcaaatcgtgcttcatctgatcttgttttggtctgttaaatgctcttagtctttatattttttgtgtgtggaattgtcacgtatttcttcctaatggttttcatttgattgaactctgatcctcaacggaacagagtaggggagaagaaaaaattaagaaaagcttgagataagaggttataagtctcaagtaatattgactgagaaggaacagagagatttttctttgcctttcaaaattgactcaaatttacttttgatgtcattttcagcaggaaattgattagaaactcagcattctcgagagatcatctacttcttttcatcctttgtgcttttcaaagaaatgcaataggtgggtggaacttgctaaacctgaagggctttcttgagtgggagtatgagcctagtaaagaaggttctgcattcctgaaactatctagtgcctaaaagattgtatctttttgaatggagtgtatttaatcttgagacttaaaagtgctgaaaaagagccacttcctaaatacactgccacagcatgagcatggc

SEQ ID NO: 907489 - DNA, 610 bp, Homo sapiens
acttttagttatattgcacgaggtattaatttttaatttggaaatgtttctttttgaaatttctcacatgtatctcagaaattcaacttttgttctactttactgcatgtaatttgcaaattatacattgttgtcttctttttcttctcttgaaatcatgtatctttttgcttggttggggtgctaactctcttcttcaaccttttcatcagctcctgtaactatttttctctggttccaacttttgttgtggtcagataatgaaatgtttatcttaaaggcctagaaatggaatgcttttctccagtataacttgattctatattcgtggcttttcttgatatgtctaaatagtttcatgtaaccaggaaatttcccatgctgttactaaaggtcatgtactccatgctcaatgtaatattttccttgtctgtatttccctataacatggtgtacagtcacaattctgtacacatttttcttgtrtctgattaaattcaagtaccattttcattagttttgacttccaggaaatttaagaaggcatctcataagaataagaaatcatgctgcagaaggtttttcttcacctctttatctttttggtaac

SEQ ID NO: 907490 - DNA, 522 bp, Homo sapiens
accaccgctttctctgaaataggcaaatgttccctgggcaaaagtggccaaaaactgtacctaggacttacattcttttccagttttagcccagaaattcctcactatcacatcagctccttaataccttcagtcaggagactgaggcaggagaattgcttgaacccaggaggcggaggttgcggtgagccgagattgtgccattgcactccagcctgggcaacaagagggaaactccatctcataaaatatatatatttaataccaaatttaaaacttgtccaattaaaatagtgaaatgattattactaatattaaaaatattgacaccaagataaaaataatttcatgttgacatttaaaaagattaagataattaaattttatcataagtattaaactttwaaaacctccttttatagtggttgtcattagtagtgttgatctgaatatttagtctgcctgtataagaagtgttagtgccaagaactgaatttataaatgtttccctttatttatgct

SEQ ID NO: 907491 - DNA, 623 bp, Homo sapiens
aaatggtaaactttcaaatgaggaggattaaaataataaatataaaatgcagagtattcaagtaaaaataggcattcttagtrctatgggaccaaaacacaaaagtgaaaacctacaacagaaaaagtcaccttataacgactatgagttccatgtttaataaaatagagaagaaaaaagaaagtaaataaaataagagataactacaataaaataaaaatatatttatgagtcaaatggtgattttataacaaaacaagcctaagaatgcagtaaataactttaacaatagaatctttgatagtagataaatagaaactcaaatcaatataaaacattcaaactgaaacactgaaaagaccataataggtatagtgaaaaaatctaatttgggtaattggaatcccaaaaagaaaagaggagaatggtacagaagcaatattgaaaaggataataaaaaataatatatcataattaatatttaaaaattgaccaactcatttaaaaagctccttttaataaaatatataagccaataaaatattgaaataatctaaaatgctgaaaaatttatcctcactcaaattgaactatatattcaatgcaatccaaatcataatccc

SEQ ID NO: 907492 - DNA, 492 bp, Homo sapiens
tcaaatagtggcttaaatatatgagcttgtaattcctattgtttactaaattctactttggcagtaggtttcatctcttctaacctacataggactcaggcaattccccctccaccctactctgcaaatcttcaactttctcttctacatgggaccatcagatcggcataaaaatatgttatttctcctaccataaaaagcaaacaaaaaagaacaaataaagccataacattctttttagccccactttcctctccaggtactaccccatagcaaaaccctttaaaaccgttgtatataacaatgattttcaatgttctcctcccattatctctgatacccaccatgctactaacaatgttctcagccagggtgttagtgcactccrtgctgctactactgatgcaaattctcagccctcatctcacttgtctatcagcaccacttggtacagactgtccattctgatgcttcccttagcttccttgatgc

SEQ ID NO: 907493 - DNA, 637 bp, Homo sapiens
cattttagaaacaaaattcagatcatgacaccttccttcctgaaacttcccagtgaatttacgactcactcagaataaaacccatagttatttgctaagtgatctggcaccctgctccctctctgacctcatgttctcttactttatcagcatttcttattccttgctgctgttttatttcttcccatatcaattttcaggtgatgcattatgtatttttctcttgattttgactatttttagttctctctcttctagtatattaattccatgaggtcatctactgttgtaaattttccttttggctctatccctagcactcagagtacttggcacataacaagtctaaaagtatttgctgtgtgattaaaacaaaacaaaataaaacaaaacaaaaaaacataaaataccactctctatgaaaagcctgggaactctgctagttcccttctgggttccttttccctacatttaatcactacctgaaactttgagtaagactccataaccctgaaagtaataagtaagatgagaccattgtcccttcmccttactatgctatcccttcactccatgattaccaccatggaaaatctaggtgaagaggatctgcagtaattttagaaagaaattggag

SEQ ID NO: 907494 - DNA, 616 bp, Homo sapiens
tgcacccctgcctgggcgacagagcaagactccgtctcaaaaaaaaaaaaaaaaaaaaaaaccacactggaggaatcacaaggggtgtccccatattctgggtctccccatatcctgggttcctagaaattcaggcaggaggtcaatgggaccttatctttgaactgcaagcagggatctcacgtgtgtaatttcaagggaggcaagtggtcagcacctctggggagtgaataggaagcatcaaaagttacaaattggcactatttatcactgctcaaaattaagcagaaaagatttcaatgaaaagaattcagaacaaacttggataaaatgcagcagtaaaaatgtcataattctacacatcttctaaaaaccctgcagtacaaatttttccaatctttagcatgcttggaaaatatctaaattacctagagccctatgaaagtgcagggctggcttgttcaagttgaaaatgagtataacaagaatgttcacattttgtgagaaagtaaaaattcaactmaactggacacaaaaagatccttgcttcaaagtcacctataaataatgaacaattgaaaatgcctaaatgtcaagcgatagtttaaatggttaa

SEQ ID NO: 907495 - DNA, 550 bp, Homo sapiens
agggagaaaccaggggtaaggaatttgagcttgaggcagaggcaatgtgaaattattatcaattcttttttttttttttttttttgaggagtctcactgtatcacccaggctggagtacagtggcatgatcttggctctgcctcccaagttcaagcaattctcctgtcttagcctcctgagtagctgggactacaggcacaggccaccatgcctggctacttttgtttttttttttgagacggagtcttgctctgtcacccaggctggagtgcagcggcgcaatctcggctcactgcaagctccgtcttccgggttcacgccattctcctgcctcagcctcccaagtagctgggaatacaggcacccgccaccacgcccggctaatttttttgtattttttttagtagatacggggtttcaccatgttagccaggatggtcttgatctcctgacctcatgatccgcccgcctccgcctcccaaagtgctgggattacaggtgtcagccaccgcgcccagccaccyagctactttttgtatttttagtaga

SEQ ID NO: 907496 - DNA, 673 bp, Homo sapiens
aggtctaaagaagccacttaaaactttmaattgtattaacggaattttaagggagaaaacgtatgaaatgaaaacatccctgaatttggagaatttgccaaaatattaggactgttatatctgtcctcaattttaataataatgttataatatacatagataactatatatccatgtaattatttatatgctaactatacaaaactttaatattcatctgccatagcttagaaatagggtaaaattaaagatttaattcattgacaatgtactatatcaaacaaacatggcaataacattaattcgactagctgaagaaaagttgacagcaaataacaaacagagtgctaaaatgcagagcaatcacatccttggataatatcttcatacaagactcacccttcaagaaaacctaccattccaggaccgcagtctgttccatctgctggtggcacgtgttgagtgaaacagcctttgtgaagcttttctgtgcttgtgcaccacagatgcatgcatatattctcctgagtaacaaaaggcaggcaagccagtgtaaagataacaccacaacactggttcaattcagtattacacattgatttataaattgatctgttacctagttccatggtataagctgaaactaatcagcaaatttttttactaagttcta

SEQ ID NO: 907497 - DNA, 593 bp, Homo sapiens
agaaccttgataaaagattagaggagctgctaattagaataaccagtttagagaggaacataaatgacctgatrgatctgaaggacacagcgcaaaaactttgtgaagcagaaacaagtatcaatagctgaatcgaccaagtggaagaaaggataacagagtttgaagaccaccttgctgaaataaggcatacagacaagattagagaaaaaagagtgaaaaggaacaaacaaagcgtcgaagaaatatgggactatgtaaggctgaacctgaaggagataggaagaatggaaacaagttggaaaacacacttcaagatattatccaggagaacttccccaatttagcaagacaggccaacatgcaaattcaggaaatagaacactactaagatactccatgagaagatcaaccccaagacacataatcatcagattctccaaggttgaaatgaagaaaaaaatgttaagggcagccagagagaaaggccgggccacctacaaagggaagcccatcagactaacagtggacctctcagcagaaatcctacaagccagaagagattgggggccaatattcaacattattaaaga

SEQ ID NO: 907498 - DNA, 432 bp, Homo sapiens
cttgcaagcctactctggattgagcagctgaccccttcttccaccacccttctcacaatctcttttgcctaataaatatggagagctgtgtaaagctcagggcccttgtccactagaggcaacgtgccccctgaccccttcttccaaatatactcttttgtctcttgtcttttatttccgtgtttgccccctttgtttaatccccctaggtctgtgcgggttacatagtggcgcccgaacagggatggaatcgggtgctcaataagtggtgcctgaacacgggacttcaaggatgtgaacgaagaaggtctactgaagcagaggaactgaaattggcaaggcagacagggaccctgggacaagtctgcyggcagtggatataaggtccctaaagatgtgctgggagcagtgctttaaagaagtactgggaac

SEQ ID NO: 907499 - DNA, 579 bp, Homo sapiens
ttaggaatagtaatagagttaatattgtacatgaactgaaattctacttcctatcaagataaacaattactcaagatatgcttatgtcttcaattctggttattttacataatgttgattaggtcatatttttgttttaaactatcgcttttttatgattatctgtgcagggatttttgtgtttttttgttcttgcttgtcaatcatataagaaaagaagattcagtggctcacgcctgtaatatcagcactttgggaggccgaggcaggaagatcatgaggtcaggggttcaagaccagcctggccagcatggtgaaaccccatctctactaaagatacaaaaaattagccgggtgtggtggcatgtgcctgtaatcccagctactcgggaggctaaggcaggagaattgctcgaatccaggaggtggaggtttcagtgagccaagatcacgccaytgcactccacggggtgacagggcgagactccattttgaaaaaaaaaagattcaaagactctaagtcctataatagtaagattagggagtataacgggagctaaggatttgttccatttggaa

SEQ ID NO: 907500 - DNA, 580 bp, Homo sapiens
ccaggcatggtggctcatatctgtaatctcagcactttgggaggccaaggcaggtggatcacttgagctgaggagttcgtgaccagtctggccaacatggtgaaacccagtctctactaaaaatacaaaaattagccgggtgtggtggtgggcacctgtagtcctagctactcgggaggctgaggcaggagactcacttgaatctgggaggcagagattgcagtgagccaagatcataccactgcactccagcctgggcaatagagtgagactccataaaaaaaaaaaaaaaaaaaaccaacaacaacaaaaacaactaaaaagaagctggtgaaatttattttcctacaatattttactaatcactatattgaaagtattatcatgtcaacatgtgatcaatccataaatgaacagccaggtactttctgttctttttcctgccaaacccttgacgtcgtatgtattcacacccacagcacagctccattkggacacatcctgtgtggctggtttcccgtgttggcagcacagaactagagtaatccagagccctgtgcccagaggctattccatcagg

SEQ ID NO: 907501 - DNA, 714 bp, Homo sapiens
cctgtcagataaaatcctggacagttcctacagcattttcagttacttcatgatttggaaagccccagtcaagtttaatattaaactttcaaaccctcattcaatataaagtctctcctgttgccaagctttggtttgtcccaggctcagaaatctacatcctacatcagcagagttggaggggtgtggacaatttcagatttggtttgcttcacctcctccctcactgaccatttctgccttctccatagtcaggtgaagggaagggaaaagagataaggaaggaaagaaaaggcctctcttgtcaggcagagttgtaatctagtgttggtaccttgagtgtagtaattgtccatatgttggacttgatcctttctctcccaggttgcttttgtgggtatttagaaattctcctccaccccccattctctgactgcagttccctagtacaatctctagctaaccccgcaggatgctccatggcttctacagctaatagtgcagtccttctgcagagcccacctcacccctaagcaggacgcctcatggccaaggttcttttgcaagatggcccacggcctcctctgtccatcagactctacatctggcccacagaaaacaagcacctttgccccactgtggtgggagggcagctcactctatggtagccctgtccctgctctgccaccrcaaggaactccagccagctgctca

SEQ ID NO: 907502 - DNA, 619 bp, Homo sapiens
aagccagtgtgtgggtctgtgtgtctttggatgtttgactttttcctcagctaattacctgctaaaaagtttgtgcttttacaggtccttacaaagttgcccaaattcaaagggtacagcgataagagcttgaaccttagagacagaggtttgctcaaacatgtagctaaaaaacatcagtaatttatttaagccttctttgttccaatacactagaaaatgggctcaataagaacaagttctcagagtatgaaatcagtgtgaaagtgctcaaagctaatgcttagaatatagtagggattaagtaaatattaattaccatattttctcacataaatgtccagaacaattcttcacctcttggactgacccagttatttcccctttcccacttgtacttttccacaatagttgcagaatgtgctggaaacaccacatcctgtgataagctggaactggccaaaataggccaggctctgttccagtccttcctataacaagacgtcctacaaygctttagtccaacatttcaccttaccctgaggtgtaaaatccaaggcaggctgctttccgaggtccatcagctgcagtgaaatagggcacacagagatgagaatcc

SEQ ID NO: 907503 - DNA, 632 bp, Homo sapiens
ggccccatgatggaattagtatctttgtaagaagaggaagagagactcatctctctccctgtgtgaaagatttctttgaaawaaaaaggttttcctattataacatataggccatagtgcactaggaaaattgctctgtttcatgccactccaggcttttaatgtatgcagatgtggtatgtgcacctgttaaagttttgagtatgaaaaaagtgttaggggaaacacagagatgttaacataaagacatgatgttactgagtcacaaatcaatgtttaaaacagcttacttccagatttcttgttatgtaagagaagttattccctcttatttaagaaactattatttggatactatatttatttcattctattgatttatatctgaaatcattcctctgatataaaagatattcaaaatgcttacataaatgatgaataacctgttcataggtagtaagatcctgaacagtatagcaaagttaaatgtctaacaacatcaagtttattgagtaattttatgttgcataacaagcatccctaaactcagtgctttaaacaactatcacttgctcacagtactgaggatgagcaatttgggctatgcgcagataagaagttctgttcttctt

SEQ ID NO: 907504 - DNA, 639 bp, Homo sapiens
agcaagcatttggatgataatcaaaggacaaacaattttgtcatcataataattcctgagtccaasatatagatatgacctaaaatatcaccaggtaggttgcttaacctagcaatgctatgtacatcagtgtcttattagggttatcagcaaccatcccagcttttttagtcacattttatactgaatggaagcaaacatttggatgataatcaaagaacacacaattttcttttaatcaaaagactaagataattcctttccatatggcttatcactgaagaactatttaaaattcattgatatgaaaatgattttaaaatatgttacttcagtatattatgtagcaggataaaaatatgcatgaaatttttaaattaaaatagtaaaatgaattctatgattcagatatatatatatatatatatatatatatatatatatatatctcgatatagatttctatgtatgaaagttctaatcagccacaatgcaattacaagactaactttttggagttaagtcaaattttacaggttaatggcacagtcctccacaagtctcctctcacttcagacactggctgcaaggtctagggttcccaaggtaccttcacttctgaccaactgaatatagatc

SEQ ID NO: 907505 - DNA, 562 bp, Homo sapiens
accttgctttatacagtttcttccattattagtttagacctcatamtaaaaacgcagtcacacatctttgtgccacaattccaaaggaactatcttcaaatttgtttctttcccatgttctctcgctcaagaattgttaccttcatcagccccttcacccacgccagaaaccctgggaatcatccctgagtctttcctcacacccaatcagttgccaaatcttgctcatcctactgccttacaatctcttttataatttccacacacacacggcttctaccctagttaaggcccttagaactcacctacacctagttaaggccctaaaagactcactcacttatcttttactctccaaatttaatcttagctaataaaccttttgtattgctgacaaggtacttgtttgaaaattcttacagttgctcctgcctatctgtggtacaaaatgcaaaatcttcatgatctggtcattatttgaccgtccatcctcatatcttacccctacacatagctcctctgtgcagtagtgattctttttgaacttggcttattctctcct

SEQ ID NO: 907506 - DNA, 562 bp, Homo sapiens
accttgctttatacagtttcttccattattagtttagacctcataataaaaacgcagtcacacmtctttgtgccacaattccaaaggaactatcttcaaatttgtttctttcccatgttctctcgctcaagaattgttaccttcatcagccccttcacccacgccagaaaccctgggaatcatccctgagtctttcctcacacccaatcagttgccaaatcttgctcatcctactgccttacaatctcttttataatttccacacacacacggcttctaccctagttaaggcccttagaactcacctacacctagttaaggccctaaaagactcactcacttatcttttactctccaaatttaatcttagctaataaaccttttgtattgctgacaaggtacttgtttgaaaattcttacagttgctcctgcctatctgtggtacaaaatgcaaaatcttcatgatctggtcattatttgaccgtccatcctcatatcttacccctacacatagctcctctgtgcagtagtgattctttttgaacttggcttattctctcct

SEQ ID NO: 907507 - DNA, 654 bp, Homo sapiens
accaaatttaacaacacattaaaaagatcatttgccattgtaagtgagatttattccagggatgmaaggatggttcagcatgaacaaaccagtaaatgatacatcacatcaacagaataaaggattaaaaccatatgatcatttccttagatgctgaaaaacactcaataaaactcaatatccttcatgatataaaacccttaaaaaattgggtatagaaggaacatacttcaacttaattacaactatataaaaaagcccacagctaacatgctgaatgggggaaaattgaaagcctttccactaagatctggaacaagacaaagatccactctcacttttattcaacgtagttctggaagtcctaggtagaacaattaggcaagagaaagaaataaaaggcatccaaactggaaaggaagaaatcaaattatccttgtttgcagatgacattatcttacactttgaaaaacctgaagactctgccaaaaaactcttaagactgataaacaaatttagtaaagttgcaggatgcaaaatcaacatagatttaattgaattcacctcatgcaagtactgacttaggagaacactattcatatgtacagaatataaattctgggccacaaattcaagcatgtgagaaataatcaa

SEQ ID NO: 907508 - DNA, 581 bp, Homo sapiens
tcttctttcctataaactatcttccaaataaacaaagcgtcaatgtctcctcagcttagaaactcttcacttctttttatatatgcctgggatatgtttaatgkctaaagaatcataatttttgtctataggcataatatggactcttcacctaaaatcaacaacaacaaccatcagaacaacctcagactgataataataattaagaaaaagacaactaccaccacactcaaaagatggggtttgtcgctgtccctattgggaattgctgtggctgtttctaggaggaaataacaattttatgaatggggcttccttcttttaaatattctatctttagttgaaatggttttctaatactatgtttaagaaattaagcatgtaaactgcagaaagagtaaagggaatactgtgaatgtgcttgagtaaagataaatgatatgaatgtttgactctgggcctctgtctgttctcaggaacaaaactgtagtgaagaggatagatacagtctaattagttttcctacttataatctgagaattgaaatgagtcttttaagcacaccctgtgaagtttgtgag

SEQ ID NO: 907509 - DNA, 653 bp, Homo sapiens
tgacttgatcatcgtggatttttgatgtgctgttggatttggtttgacagtattttactgaggatttttgcatagatsttcctcagggatattggcctgaagttttccttttttgttgtgtctctgccaggttttggtatcaggatgaccctggccttataaaatgagttagagaggagtccctttttttctattgttcggaatagtttcacaagaaatggtaccagctcctcgttgcacttctggtagaatttggcagtgaatctgtctggtcctgggcttttttggttggtagggtattaattcctgcctccatttcagaacttgttattggtctattcagggatttgacttcttcctggtttagtcttgggaggatgtatgtgtccaggaatttatccatttcttctagattttccagtttatttgcatagaggtgtttacagtattctctggtggtaatttgtatttctgcgggatcggtggtgatatcccctttatcattttttattgtgtctatttgattcttctctgttttcttattagcctaagctagcagtctgcctattttgctaatcttttcaaaaaactagctcctggattcatttgattttttgatatattttctttccaaatttttctactggttattt

SEQ ID NO: 907510 - DNA, 630 bp, Homo sapiens
aattcttggcaatactatggtgttgttttcccttgggaagaggtccagggctgacattgtactacacaaacataggcctccaagtagaagtacaattcctaggttaggacaatagatttagttagctttcctggacacaaatctgttcttttttattttcctcattggaatagatttttaggaatttctataataggttcagctctattttgtggctaaagggacataatggagtgcaagttaacacaagatttcgacattcaccaagatgatgctttattggttttttttggtgtttaactaaaccatgagataaggaagaaaatataaacttggagaaaaagctgacccttaaccagaaattatagtggttgacattggtgacttgctaatagggccgatatagtaggtaataattaatatactggtgtgtttgtgtgtgtgcctgtgtgtgtaagggaggggttagctcagctatatgagtgatgccaaatacaccatgcttcaaggatgctgtattaaagatattacttatttyaacaaataaatgcaacttgagagggagtcaattctgcagtgtattaattccttaacatcttatccttaatcaggttctcacctcactgaagc

SEQ ID NO: 907511 - DNA, 579 bp, Homo sapiens
tggaaattattttctttaagaatgttgaggccgggcatggtggcttacacctgtaatccaagcactttgggaggctgaagcaggtggatcacttgaggtcaggagttaaagaccagcctgggcaacatgatgagaccctgcctctactaaaaacacaaaaactagctgggggtggtggcgcatgactgtaatctcagctactcaggaggttgaggcaagagaatcatttaaacctgggaggtggaggttgagtgagccaagattgtgccattgcactctagcctgggtgacacagtgagactctatctcaaaacaaaacaaaacaaaacaaaacaaaacaaaacaaagaagttgtatattggcccccaatctcttctggcttatagagattccactgagaggtctgctgttagtctgatgggcttccctttgtaggtgacctggcctttctctctgcctgcccttcacattttttctttcattttgaccttggggaatctaatgattttktgtcttggggatgatcttctcatggagtatcttactggggttctctacatttcctaaatttgaatgttg

SEQ ID NO: 907512 - DNA, 616 bp, Homo sapiens
aaggtttttatttgcattttaatatatgttttgaccagatgtggtggctcagggctgtaatcccagcactttgggaggctgaggcaggtggagtacttgaggtcaggagtttgaaaccagcctggccaacgtggtgaaaccccgtctgtactaaaatacaaaaattagctaggtgtagtggcgcatgcctgtaatcccagctacttgggaggctgaagcatgagaatcgcttgaacctgggaggtggaggttgcagtgagccaagatcacgccactgcactccagcctgggccacagagtgagattccgtctcaaaaatatatataagtaagtaaaataaaaatttaaagatgtatatatgtgtatatgcacacagacacacacacacacatatatatgttttgatgagcctctaataaggcacttaagggaagtttaatgatttagttatatggttattttcttggaaaaaaaaatcgaggttcctaatcattaagggatattagttgtcttgaagattgacrtatgttaagcacacctggaataacaaacaaatttggctgttaggtataacccaatgagtaaaagacaaggatgtgcattatgacatagccac

SEQ ID NO: 907513 - DNA, 774 bp, Homo sapiens
tgtggttgtgtttttgtctagttttgagaggaagataatggtgacmtcataaaatgaattataataaaaagaactccctcgtcttcaattttttgggatagctcaaaagaattggtatcattctttttaaaagtttggtaaaatgtttcagtatagccatctattcctgggcttttctttattgaaatactttttattactgatttgatcttgttactcattggtctgttctgttattttttaaaattagtttgttttaatctttatcatttaaaaaaattttaattatattaaaattttttaaatgtttaaacaattttttaaaaatttactttgttttaatctttacatgtcctgaatttatccatttcctctaggtttttaaatttgttggtgtatagttgttcatagaagtctcaaataattatttatatttctgagttatcacttgtaatgtctccttttttatttctgattttatttatttaagtctctctttttttcttggttagtctagcagtttatcaattttatcttttcaaataaacatcttattgtttcattgattctttatattttttgtgctctattccatttcattctgctctggtctttattatttctttccttctactaatttttggtttggtttattcttgcttttgtagttccttgggatgcattagtttggtggctttctctgtttcatgatggtagatactgtcctttcacttacagatgtaggactctgttaagtatagtttgtaggtctcg

SEQ ID NO: 907514 - DNA, 660 bp, Homo sapiens
cattattcacaatagacaaaatgygaaaacaacataaatgcctgctgacgaatgaaattttaacaaagtggtacacacacacatatgcacacatacaaatacaatgaaatattattcagcctttaaaaagaaggaaatttgcaatgacttgaatgtacctagaggacattatgctaaataaagtaagccatgcacagaaagaaaaatactgcataatatcacacatatgtggaacttttaaaagtcaaactcataagaacagaaagtagaatggtggtaaccaggggctggagggtgggaaaaatgaggagatgttggtcaaagggtataaattttcagttataagatgattaagttctgaagatctaatgtacagcatggtgactacagttaataatactgtattctgtacttgaaatttgctaagagagtagatcttatgagttctcaccacaaaaagggtaactatgtgagctgatagagatgttaattagcttgattgtggtaatcatttcacaatgtattcatgtatcaaatcatcatgctgtacaacttaatatataacatttgtattggtcaatcgtacctcagtaaagttggggagggggcgggaagaaaacaattctgtgtgcaagatcatcaaaaagaataagaatattt

SEQ ID NO: 907515 - DNA, 626 bp, Homo sapiens
tacttctttgcgtcaaaccatatgtcattgtccaggctacggaatggcctctaggtagtgtgtccatccagggacaatcagtgatggccacaggaatcttagatggtgtaaaacgaggctacctaggccttccctgggtcttctatccaggctgtgggcaggcaggtactgtaactatttgtcatgtaggaactagcccaggtttttcacagaatactggagcaaacttgtactagtttggaagggccaactgttacattttcaggaattttcaggaattctgtgagctatctcttaatccactgctggtctgaaattggccactgtgggagtatttacaccacagatattggtgaatgctacaaactcaagttttttcctcccactctacagagctagtttaccagcacactattgcagcatgaatggttaaagaggaagaaaaaaaatcaaggtaaacaagtctccccataatctgacaaaatctatatcatttccctcttttccactttacccaccctttgcttcagcaagaatggacaacttcctcattatccacttgccacaaataactgcgttagggccagggctcaygctgtgccaggtccccagccttcccaaacctg

SEQ ID NO: 907516 - DNA, 599 bp, Homo sapiens
aggtctcccaaggcccccacaaatggcctggaactgaatgcagcctcctttccctgcatgcactcagctgtgttttcagcactggcctcctcccaccccgcacgccctcgcatctactggtactctttcttaraatccttcaaggttgagaacctagactctgcagtcacactgactcagtccaaatctgggctcacaccactttttaaatgtagggaagttatttagcttctctgagcttcaatttcatctatacaataaagaaaagtatagcagctaacatttactgaatgtttaccatattcaaagcacatagtatcagactgtattatctcatttatttctcctaccagtgccaggaggaagttcctatcaatatattcaaaatggggaggggggcaggttaggtttacatgaccagtaagtgataaagccaggactagaagccatcagtaaaacatcagcatcttcacattattctgtgcctacctctcaagttgttgtataacatgagatatgactttgcatagggcttggacatgaaggaattgctcatttaatgctagctattattgtaatcatcactatcattattgatc

SEQ ID NO: 907517 - DNA, 603 bp, Homo sapiens
aataacaacaaataagctgtcttgatccattcttcaagttactaatattggcrggtttgacgtttagattactgagaatccttaacattcaatgtcagtgaagcgtgtgtccactggcagattattcaactagcagtgaacactagcatagctgcatccaaaaacagcatgcttacctatgatatacatagtgaccttttattaacagcaaattcttttgagaagcatattgggaagaagtccatgtaatcatattgaaaatacttttggttaagttctggaatgctgaaatggaaaaaaaaaaagtattctggttaagaaaaccaactgcatgcaatagctattaaccaggatggtagtggtttagtgagttagaaccatttgcagatattggaaaaacaagttaaatatttccactctaaaaagggcaaccagggcagagaccatgcaggtcaatttgcaattccaaagtggagtattttcatctaagatactgtccatgggtggaaggctagcatgaccctcacctgctccattttgtcagttggtcagctacaatctcagccattccactccaactattgttattattaaggcaggaga

SEQ ID NO: 907518 - DNA, 673 bp, Homo sapiens
acctgactgaaaagagagtaagcttgttgacacttggaggaaaggtgtctcagagagaaggaacrgcaagtctaaccctagccctgaccctgagggggcatgtgcttgagaaacagctaggagaaacagctggagcagaggtgaacaagggagaaaactggagatgagatccaagtaggagcagcgaccctgtaagccaaggtagggagtttacaattcattctgaatgaatgaattggatggatctgaacagaggagaggcaggatgcaaaactgtagtttgagatgaatgcatacatgcatgcatattatgcttgaaacagatataagcaaatactttggttatttagaggttccaatttatgcagatctgatgggcatttgtatttcatgagacagtgttgaattacaaccattttggtcagaactgatttgcttacatgcttagatagccctgaagctagttgctttcaaaagttgctttgctttggtatgtctgtgtaagactgagaagtatgaagtgaaggagggcagtaagaatttgaggacagttggaatttcaccaggtaccaagaattttaagaatgatgtttcaggctgcaaagagatcccagagtactttatgctttgtgatgggtgaatttaagtccgagtgtctcctacctagcaatgt

SEQ ID NO: 907519 - DNA, 604 bp, Homo sapiens
ttttttattagtaattttgaaatagtaacaatctatttgtttaggttttgttttgattacctttctccgctaattccrggtgctacaagtagtaatgcttatctagaattcagtaaaactttgatattctggatattctattatggcaccatctgggttaatgatgaagagaaaatagacttctaactaatggattttgagttcaacttaaaactctattctttgatattctgtgttattttgtagaactgtgagatgtgtgtacagtttggtagcagtaaaatggtattgagtgaagactagactgctgttttttattaaagtaggtgtggaaaagtagggtagaattgtaaaagctacaggaccattttctggaattaatagtaagtaatagagtcattgtcctatttacagtatattaatgtttttaacatttgagtacaaatttatgcttatattttgtctgccgtaataggtaactgtccaatgatacatatacctggttttacctttccggttgtggaatatcttttggaagatgtaattgaaaaaataaggtaagtaaacattaggaaataaaaaacattaaaaagtactaatatat

SEQ ID NO: 907520 - DNA, 621 bp, Homo sapiens
ccacgaatctgcttttgtgtctctagatttgcctattttgsacatttcatataaatggaatcatacaatgtgggatattttgtgtctggcctctttcaattaacataacgtttccaaggtttaccctcactgtagcatgggtcaatgcttcattcctttctatggctgaatcatattccattgtgtggatgtattgcatgttatttacccatttgtccattgatggatgttagattgtttccactttttggctgttataaataatattactatgaatattcacattgaggttttcgcatagatatatgtgtcatggtttggatgtttgtcacctccaaacttcatgctgaaatgtaatttctaatgttgtaagtggggcctggtgagaggtattgaatcatggggcggatccctcatgaatggcttagcaccatcaccttggtgaagagttctcatttagttagttcacatgagatctggttgtttaaaagagtgtggtgcctcccacctcctctttcttgctcccactttcaccatgagatgctagctctccctttgccttctgccatgatcgtaagcttcccgaggcttcaccaaaagccaagtacatgctggtgccgt

SEQ ID NO: 907521 - DNA, 561 bp, Homo sapiens
aatggtatcaatatccttattttacaaaagaagatattgcccctcagggacrttaaataacttgtaaaaaagccacataagtacatgataaaaaaagaacttaaacataggacaaatttgcttcaaactttattctcataaagaacacagcatacatgttcttgagatattcacttggttcaaaggtggggtgaaggcaatctatgaaaccctgcttctatacagtttaggattatattttctactctgtgatcagccacaaattgccctttggactctctgctgtgtacaaaagttgatatttctacaaacctcactcttttttaaacactcaaatttctttaacaaagcatggatgccagtggtaatctaataaatacacatatcaaggttaaagatcagaaaataaatctgacaagaaagctattgctctcggagcagtatcccagggaataaataaagcaccgtcataataatttgattgacttcatgaattgaggtccttttttcattttatttcacaacttggaatgcacacaaaaaacttgagagctacactga

SEQ ID NO: 907522 - DNA, 651 bp, Homo sapiens
tttttcatacatttgttggctgcaattcatcaatggtgaattggataaagamaatgtggtacacatacaccatggaatactatgcatccgtaaaaaagaatgaaatcatatactgtggagcaacatgaatgcagctgaaggccattatcgtatgtgaattaacttgagaacagaaaagtaaatgccacatgttctcacttaaaattggagctaaataccgagtacatatggaaataccgagtacacatggacataaagaaggaaacaatagacactgggggtactagaggcagagtactgaaaaactacctgagaggtactatgctcactacctaggtgactgaatcatccatatcccaagccccagcatcacgcaatatacccatgtgacacacttgcacgtgtacactctgaatctaaaatgaaagttgaaattacttaaaaaattaggatctctaacaaaaagagagaaagtacagttagatatttgaaagcacaatttccagtgaagcagccgagttgtggctagctgggaatccataatatatgacgaactaagctggcatcctgcaatagtaaaggtatttgtccttggcttgagaaaaaatataagaaaaaaatgttataagatgcttcaaaatagcagaatag

SEQ ID NO: 907523 - DNA, 593 bp, Homo sapiens
tctaagatgatgttcactgccaaacagatcttcaaagggagagatccaaaaacataaatctgagtagaagtcaggcatcctgagcctggctcatggtagaggacatcttctttgtctacragtggtgttgcatgattaggaaagagatatttgtggtagttcataaaatgtctcaaattacactttccaggcttgcattttagcttatatgaacataaattcagccctttatgttgaattatgtaaactctcataaaaaacattcagtcacttgtgcactagtgaacattgcaaattccagtttcctcaaatctctatactttcaccacatatcgtcatgtactgatgggattgatttgtttgaatgaagataaaaacatggcttcagtactttcatttatacatgctataggtgttttttgttgttgttgttgcatagcatgtcagtttgaagaaatacaaattttgtttcttaaataagtaaagcctgcttattgagattgatgagaaatacattatcttttgaggattttttttttttaccaacagtgaactgtacagatatagagtcattttgtgtaaattgaaataaa

SEQ ID NO: 907524 - DNA, 564 bp, Homo sapiens
ggtaacaaattcccttagctttttaaytgacctgccccttctctctagctgcctttaattttttttccctcagattgaccttgttgaatatgatgactctgtgtcttgccgatggtcattgtgcacagtatctcacaagggttctctaaatttcttgaatttacatgtcaacctctgtagtgagattggataatttttcatgaactgtatcttcaaatatatattttatgttgcttggtctctctcctctttctgaaatgccaatgagtggtagctttgggctctttatataattctgtatttctcagcagttttgttaatttattaaaattattttttctttatttttttctgcctgtattgctttcaaggagtggtcttcagactctgaggttctttccgcatctccgtctattctgttgttatgcttcaaattttactttgaaactcctgtagtaaatgtatttccaaagttcagcttggttctttcttaaaatgattatgtcatttttcaactcctggatcattttcatattttccttgtattgggtttcaaccttcttt

SEQ ID NO: 907525 - DNA, 597 bp, Homo sapiens
ttaaatttgtcatttaaaggctttcaaataggaggaagtaactgtacctagcaaaggttattagtaaaaactatcctagttggttacttgccaactcaattaactgcattacccctctcttgcaacatatgttattgtctgcttatatcatctgctcatatgccaagcagagattaggtctgcattataacaatgtagtttcttagaaacatgtcacaagaggcaacatcaagatctctttctaaagacttactgcatagctagggaagacctctatctaagctatcattgaatataaattttatgaatgtttttaagaaatgaggagagcaccatagcagtattgtgattgcaatcacattccttgaaaggctgtggttgcaaaaagctcacccatagtctccagtttttagaggaagttgaattgccctcttttaagcagactgtgttttcttctccatccaacatgcaggggtgtaatacaacctcacctgggtgtagagggatttgcaaacacaattccaattacaaggaacaggatmtgcacacgtaagggcctgcccagagagctgcgaattcaccttctaatttgcagtg

SEQ ID NO: 907526 - DNA, 598 bp, Homo sapiens
tgatttagctcttggcttgcctgtttttggtgtataggaatgccactaatttttgcacattgattttgtatcctaagactttgatgaagttgcttatcagtataagaagtttttgggatgagaccatggggtttcctagatataggatcatgtcgtctgcaaacaaagataatttgacttcttttcttcctatttgaatacactttatttttctcttttgcctgattgccctggtcagaactttcaatgctatgttgaataggagtggtgagagaggacaaagttgtcttgtgttgcttttcaaacggagtgcttccagcatctgcccattcagtatgatattggctgtggctttgtcatacacgactcttactattttgagttgtgttccttcaatacctagcttatagagttttaacatgaatgttaaattttatcgaaggtcttttctgtgtctattgagataattatktgatttttgtctttagttctgtttatgtgatgaatcatgtgtactgatttgcatacgttgaatcagtcttgcatcctaaggattgaaacctagttgatcatggtggataagctttttgatgtactg

SEQ ID NO: 907527 - DNA, 598 bp, Homo sapiens
tgatttagctcttggcttgcctgtttttggtgtataggaatgccactaatttttgcacattgattttgtatcctaagactttgatgaagttgcttatcagtataagaagtttttgggatgagaccatggggtttcctagatataggatcatgtcgtctgcaaacaaagataatttgacttcttttcttcctatttgaatacactttatttttctcttttgcctgattgccctggtcagaactttcaatgctatgttgaataggagtggtgagagaggacaaagttgtcttgtgttgcttttcaaacggagtgcttccagcatctgcccattcagtatgatattggctgtggctttgtcatacacgactcttactattttgagttgtgttccttcaatacctagcttatagagttttaacatgaatgttaaattttatcgaaggtcttttctgtgtctattgagataattatttgatttttgtctttagttctgtttatgtgatgaatcatgtgtactgatttgcataygttgaatcagtcttgcatcctaaggattgaaacctagttgatcatggtggataagctttttgatgtactg

SEQ ID NO: 907528 - DNA, 631 bp, Homo sapiens
cttgtaaatagagccactgactgtctttgttytggattattttttcaagaacttgtttggtatatcaaacagtcctgttagaccaagagagctttttatttcgtttatggtttttggtttttttccattggagcaaaggtcaggcatgcttactgcttattataaaagattcatgttcccaaagctcaggtttcttctcctctaatgcaacccactgcatgtacgtctttgacatggttcactttgtgtcactctgagaagattgaggctagggcaatcagtgcattctggctactgctagtgttatgagtaatgagctattttatttttttaatttctgaccctatattttagcgtcttctgccagcatcaatacaattgtggtaggctatcatattaacttagaagtaggagaaaatatcaaatattcattcagctatgtatgttattgcccttttatacctgccctaaagggaacacattaaattcaattttgttcatatttactgtgtgtgggcggctattgagtaggccctaacactcaataaatgtttgttgagtaaatgggtaaataatttaatagcaatgtgattataattcccaaggcatactgattaagttctcacagatg

SEQ ID NO: 907529 - DNA, 652 bp, Homo sapiens
tggagatgatactgtatgcctagtgcctttgagatcccctgtgtgacggctgccctaaatgaggggccattgccactttggaggtatttaggtagaccaaagtggggagttatttcattaactaacacttttattctcagacgacttttctgtatagcatggaaatgcttctacccagttagtgaaagtatctacccataccaggaggtattgaatgtccttcatctttggcatgtgggtaaaatctatctgtcagtcttcccctggatagcttcccatcctttggatttaaggaggaaggagctgcctgttgaggtgattatttttaagacagacttcacaagcattaacatatttgactattcttaataagttctcccctgtaaacaatctctgggcacactgataagttttatcctttcccaagtgaaaagcttggtagaggagagggtcttaaggactttctattgactacaggctggcaagtggagtttgccatcctctgactgtagctaccctgagggctggaaagtgtaccctcaagaaatggccattctatttctggaggggagtactggggcttaatttctsttacagagccttcccagattagagaggttttgagtgtgttaagaacctgaggcttaattgc

SEQ ID NO: 907530 - DNA, 629 bp, Homo sapiens
tccttgtgatagtttgctcagaatgatggtttccagcttcatttttgtccctgtaaaggacatgaactcatcattttttatggctgcatagtattccacggtgtatatgtgccacattttcttaatccagtctatcattgatggacatttgggttggttccaagtctttgctattgtgaatagtgctgcaataaacatacatgtgcatgtgtctttatagcagcatgatttataatcctttgggtatatacccagtaatgggatcgctgggtcaaatggtatttctagttctagatccttgaggaatcgccacactgtcttccacaatggttggactagtttacagtcccaccaacagtgtaaaagtgttcctatttctccacatcctctctagcatctgttgtttcctcactttttaatgatcgccattctaactggtgtgaagtggtatatcattgcggttttgatttgcatttctctgatggccagtgatgatgagcattttttcatgtgtctwttggctacataaatgtcttcttttgagaagtgtctattcatatcctttgcccactttttgatggggttgtttgtttttttcttgtaaatttgtttaagttctttgtagattc

SEQ ID NO: 907531 - DNA, 591 bp, Homo sapiens
cctgtggaagaggccatctctcttttcccttgggtgttgtgacatgtgaaagacagccacagattttcgtttgcctaggacagttccagtttatgcccactgtcctacagtaagtattaattacattacctttcactctccagaattttccaggtaagtgataaattagacagttgccttagaaatatagatataaaacaaaggattgcattggatatttttccagtatgaaaaaagaagaaaaaaagcaatgctaaggaaacagccaagggagaacacagccagggaggcacttagcctgaaatcattctctagctggattactgcagtagatttctattccaatttatttccttacttttgaaatcagtttgaatttggatctctagtatctgcagctaaaggcaacctaactgatatactccgtcacctcaagtgatacgtgataagagcttgatgtgtattcttccacatttctycttggtcatacaacaagtacattctcttacatacatatttcacacaataggtttttgggtttttggttgaagtttgtttttatgagagtgaagttattacacatgtatttaa

SEQ ID NO: 907532 - DNA, 615 bp, Homo sapiens
cctctctcttgtctttttctacctggcctcggttaattccttctctgccaattgtcatcacatacactgaaagaatcatagtgtggtggctaaaagtataactctagagctmacttctcctctccacccctcaccagctctgtggccttggacaagctgcttaacattttgtccttcaaatgcctaatttgtaaaacgatagtaataactcctacctcctaaagttgttttagagaatgagtcatgtaattcatgtatgtactgtgctaaaaaatctagtggctagcatacaaaaaatgctcaattcatgctaacaaatggcagctatcattatacacatgcacacatcctttgtagctaccttcatacttcccctcttctcttccaattttggttatttttccacctccctcaaatcaatccaaatcatatctgacaaatgtcttattattgcaagtgataagaaatatgactatttcagtgaaaaggaaattgatttgcttttttttaaaaaaaaaaaaatttgtgttttgagagtcttgttctgccgctcgggctggagttcagtagcgcgattatggctcactgtagccttgaactccctgcctcaagcaa

SEQ ID NO: 907533 - DNA, 615 bp, Homo sapiens
cctctctcttgtctttttctacctggcctcggttaattccttctctgccaattgtcatcacatacactgaaagaatcatagtgtggtggctaaaagtataactctagagctcacttctyctctccacccctcaccagctctgtggccttggacaagctgcttaacattttgtccttcaaatgcctaatttgtaaaacgatagtaataactcctacctcctaaagttgttttagagaatgagtcatgtaattcatgtatgtactgtgctaaaaaatctagtggctagcatacaaaaaatgctcaattcatgctaacaaatggcagctatcattatacacatgcacacatcctttgtagctaccttcatacttcccctcttctcttccaattttggttatttttccacctccctcaaatcaatccaaatcatatctgacaaatgtcttattattgcaagtgataagaaatatgactatttcagtgaaaaggaaattgatttgcttttttttaaaaaaaaaaaaatttgtgttttgagagtcttgttctgccgctcgggctggagttcagtagcgcgattatggctcactgtagccttgaactccctgcctcaagcaa

SEQ ID NO: 907534 - DNA, 612 bp, Homo sapiens
ggggcacaccaactctaatcttacaggttactaatttcttgtgggctacccaatcgatwcttgggtctgtttcaagggagggccaaggttgaggttaatttcttgtagaaatttatgaatggtgtcttggttaataaatgtttgattgaaagtaacataaaccaactcaagccagcttaaacagaaaaaggaattttctggaaggagagtgaggcctctcatggaaccctagaaagaaagaaaagtcacatctctagaaaaggctggagcaggacctctttggtgaccctgagtattgttattttaggctacccaacattcattcctctttctaacaccattccaaccttccttttgaaaaagtattatttcccttttgaacacagtctggtggaattataaacagaggccctagttaagaagaagccatatcacacaagatagtccaattggctgtttaatcctgaaatttgaacactaatcagaaatttaagagactcaaaacagttgagatttatctatttgggctgtagtgcctggaacagcttgttcttaccataaaactattcccaaagttaccacttattaaagggtcacctgggttctgtgcct

SEQ ID NO: 907535 - DNA, 561 bp, Homo sapiens
ctcacccagtcttgggtaatttgtactgtaagttctaggccttaggagggcccaagaggaagcaaaagacaccgccttgcaacagccagcaccaaacctgcacaaagargactgtggacttgctggtgcattctctcccctaacttacggcttactcaacatttcggggaattttaggaacgtgaccagccagagttgggctgagattttctctcttgtggcagatgtttccaaaattgatgattctcacaacttcttgaacttcatagtcatgcaaggagtttgttcaacctgaggttcctggtgccatgcctgagtctgatctgtatgtgaagctgttcccactctcagcgttcactgaattgtatttcttccttccatccaacatcagtttctctgggggcaggttaacataacccagtgtttccagaccttcctcatcctcacattccctggggaaggctcgataaaaatgcagatagcctgccccagctctactgaacctgaatctgcaagaagaggtgctaggaatttgtatttttaaaacaaatattgcaggag

SEQ ID NO: 907536 - DNA, 618 bp, Homo sapiens
agtcacgtagcatccccagctgagggtgaggcagaggtgggcaggagagtgctggagcctggctggctcattgactrtccttctcctcatgccacatccaacgtggctggcaaacaagactgcctttcaatgaggagcagaagctgcaggttcgtaggtgtccaggtgcctgagtggccaacacgcccaagcaaagaaagtaagcttgtgcttttatggacactaggtaaacgccttcagtttaaattttttgctaaatattttagcttattttattgttatcttccaggtgtctaaatctccagtctgtctgttgtactggtaatttaactctgtaatggaatggtttgctgccaactatttatattaaataattttaaaatatttgtaatattattgactaacaaactattaagttattggcaaaaaaaaaaaaaaaggaagcttgagggaataaaacatttttgttttaggccacagaataagaccttctggaaactgtctctattaggatagtttctgccaaggcctaagagatacttacttagtttttaaaaattaaagatgatcttttcccttctctagtttttcctgtcttaccggacatggaagttccag

SEQ ID NO: 907537 - DNA, 581 bp, Homo sapiens
tacatttttctcatggccccatggcacttactctaaaattgaaaaagtaagcagaagtaaaatactcctcagcaaatgcaaaagaactgaagtcrtaacagtctctcagaccacagtgcaatcaaattagaactcaagactaagaagctcactcaaaaccatactattacatggaaattgaataacgtgctcctgaatgacttttgggtaaataacgaaattaagccagaaatcaagaagttctttgaaactaatgagaacaaagatacaacatactagaatctctgggacacagctaaggcagtgttaagaaggaaatttatagcactaaatgcccacatgaaaatgctagaaagatctcaagttaacaacctaatgtcacaactaaaagaactagagaaccaagagccaacaaaatccaaagctagcagaagacaagaaataatcaaaaccagagctgaactgaaggagattgagacacaaaaaaccattcaaaagatcaacaaatccaggagctgtttttttgaaaaaattaataaaataggtaaactgctagctagaataataaagaagaaagagag

SEQ ID NO: 907538 - DNA, 645 bp, Homo sapiens
gaccttttcaaaaattccacatataagtgagatcatgcaacatttttctttctgtgtctgacttatttcactcagcataatgtcctccaggtacctccatgttctttcttaaggctgaataatattccattgtgtatagctacattttctttatccatttgtctgttgacagacacttaggttgtttccatatcttggctattgtgaataatgctgcaatgaagatggctgtgcagatacctttccaaggtggtgatttcatcttttttgggtatgtacccagaagagggattgctgggttgtatggtagctctacttttaatttctttagggacttccatattgttttccataaaggctgcaccaatctacattcctgccaaccatgtactggggttcccttttctccatactctcaccaacatttgttattatatctcttgtcttttttggaataaccatccttatgaagtgtgaagtgatagctcataacgattttaatttgcttttatttgatgcttagtgatgttgagcatcttttaatrtatctgttggccattttttaaatgtctttggagaaatgtctattcaggtcttttgcctgttttctaaatcaggttatttgcttttctgctattgagttgt

SEQ ID NO: 907539 - DNA, 642 bp, Homo sapiens
taaaagtatgatttgtttaaactattgttcacgttctagacaatgccaactaacatcatsaatgttagtagcttggtaaatgtagcttatctgactgagcaataccaaccattctggttttcttgggactgaggggtttccccaggacaagagacattcagttccactgaaatggccactaaagtagtatagtcccagaaaaatggtggttggtgaccaccataataagacaaagtattttagtttctgtcttatatgccaaattcatatgaaatttaaaagtgcaaaggaaaacaaaaaccttgctctattatttttaagccacaaacttatgttcaattttttaaattacaagtttattgaaataatttaagtgattgttttaaaaagtaaaataacacaataaaatatttctttagtaaactgaagatgtttttatagctcgtaagaaacagtggaatcatttcatcactctaaagagtttcaaaacttttgctttaaaaataaataaactaacaaaaaaagcatgaaataaaatgactcctgaaaatgaatagagcaaaggagaggctataatgatatgagccagagccaacgcattggtgatgctagtggtaattttgattggggctctgacctgag

SEQ ID NO: 907540 - DNA, 521 bp, Homo sapiens
tcacgagatctgatggttttaaaagaaaagggagtttccctgcaccagctctctatttgcctgcygccattcacataagacgtgacttgctcctccttgccttctgccatgattgtgaggcctccccagccacatggaactgtaagtccaataaacccctttcctttgtaaattgcccagtctcaggtatgcctttattagcagcgtgagaacagactaatacagtaaattggtaccaggagagtggggcactgctgaaaagatatccgaaaatgtggaagcgactttcgaactgggtaacaggcagaggctggaacagtttggagggctcagaaggagagaggaaaatgtgggaaagtttggaactccctagagacttgttaagtggctttgaccaaaatgctgatcgtgatatggacaataaagttcaggctgaagtggtctcagatggagatgaggaacttgttggaaactggagcaaaggtgactcttgttacgttttagcaaacagactggcagca

SEQ ID NO: 907541 - DNA, 658 bp, Homo sapiens
tagtggctccttcaacaaaaatcttacaattgcatttttgaaattatactcattagagtttcatttttcatattatgtgggggttaggtgcagaaggatttgtatttacttcttcatgtgtctcaggtagacttgataactttagcataatttccagttttaggtaactaaatcaagtagctaaagtaaaattaaaccctaacctcatgaaaggaaatgtctgagatcattaatgtttaagggagattatttcccattcatacttcaggtccagaaagacacatttcctatgttgagtaagctttatgtgttcatcagtccattactcccttagttaaggtgaaagacacacaatcacacccagatgcccatatataaatataccacatgatgttattataaggaggttacaacttattttgtagacaagactattaattatttttaaaaattaaagcattatagagaaatgctgtaatcatttatagtatatgtaatctttagatgtagtgatattgactgagtgaaaagaaagttgtcartacaggaacgtttaaaaaatactttatagaaatttggagtattaagttgaaaaataaatatgatcaggataagcttgtccaagaagtaagaattccaggagatagtattctaagag

SEQ ID NO: 907542 - DNA, 658 bp, Homo sapiens
tagtggctccttcaacaaaaatcttacaattgcatttttgaaattatactcattagagtttcatttttcatattatgtgggggttaggtgcagaaggatttgtatttacttcttcatgtgtctcaggtagacttgataactttagcataatttccagttttaggtaactaaatcaagtagctaaagtaaaattaaaccctaacctcatgaaaggaaatgtctgagatcattaatgtttaagggagattatttcccattcatacttcaggtccagaaagacacatttcctatgttgagtaagctttatgtgttcatcagtccattactcccttagttaaggtgaaagacacacaatcacacccagatgcccatatataaatataccacatgatgttattataaggaggttacaacttattttgtagacaagactattaattatttttaaaaattaaagcattatagagaaatgctgtaatcatttatagtatatgtaatctttagatgtagtgatattgactgagtgaaaagaaagttgtcaatacaggaacrtttaaaaaatactttatagaaatttggagtattaagttgaaaaataaatatgatcaggataagcttgtccaagaagtaagaattccaggagatagtattctaagag

SEQ ID NO: 907543 - DNA, 627 bp, Homo sapiens
ttaaatgtaatgatgagtggaattaagtaccagytttcccatttaaagccccagctgcttattaatttatagattctgtagaaatttttttaaagatttatctagtctattgtgtagcctctatctcaggagtgagtttttattttcctatgcttatagagaaaaaaacattttcaaggttttaaaattttacaccatttataaaatattagagtgtattttttcagtacaaatgtttaaaatatgaagttttttttgaactaaactacaaagagtactgaatttaaagaaaagacctttattaaggggcaatatgtgatccattccaaattattttgaaatattaaatttcagttattctgtggtgttttctgtcatcatcatgtttttgttgtcactcccaaaataaaggggaggagggaatcacagagtatgttatcttgatagtgaaacctctgcttttcttgaccatttctgtaaggaaaactgctactcctttggtacttgccctaagttttaacaaaattagtagaaaatattaccatgtcatttgtatatatcatgaaaaatgaaaactacatgaaaatctgaaacaaaatataacaagttaaggttgaaaaatttcca

SEQ ID NO: 907544 - DNA, 638 bp, Homo sapiens
gaatgtatgttctgttgatttttgggaggaaagttctgtagatgtctgttaggtcygcttggtgcagagctgagttcaattcttggatatccttgttaactttctgtctcgttgatctgtctaacattgacagtggggttttaaaatttcccagtattattgtgtggaagtctaagtctctttgtaggtctctaaggacttgctttatgaatctgggtgctcctgtattgggtgtatatatatttaggatagttagctcttcttgttgaattgatccctttaccattatgtaatggccttctttgtctcttttgatctttgttggtttaaagtccgttttatcagaggctaggattgcaaccccttcctttttttgttttccatttgcttcggagatcttcctccatccctttattttgagcctatgtgtgtctctgcaagtgagatgggtttcctgaatacagcacactgatgggtcttgactctttatccaatttcccagtctgtgtcttttaattggagcatttagcccatttacatttaaggttaatattgttgtgtgtgaatttgatcctgtcattatgatgttagctggttattttgctcattagttgatgcagtttcttcctagccttgat

SEQ ID NO: 907545 - DNA, 554 bp, Homo sapiens
ccatcatgctttctgtacagcctatggaactgtgagaaaattagttattgctctataggtcacccagtctcaggttttttatagcaatattagagcagactaatacacatttactatttggtaatcaaccaatagaattttatatgctgaaagatgcatccaaatgttctgctttgttgccaggttagcttaaaggatgatgcctggtcccctttacctgtgccaggagacatgttcagaaacctgggacaggatttgaggggaaagacctgaagggtagtaagggaagtataagctatcatgagttggttctttataggcttgggatctttccacaggttctactcctttctgattctccataaaacttcttagagcctggttgctgcctaaaatcaatcaggactttatccctttagttgaaatattattttctgttataacacaactccccaccactgtatcactcaacaaaattaacatgaaagtttgaaagtccaatcctactttcatattcaagatgaagtatargttagtaggaaaagtgctgtaat

SEQ ID NO: 907546 - DNA, 502 bp, Homo sapiens
cacaaatactgctgcctgatcgttcctctggaagttttgtctcagagaagtacccggccgtgtgagatgtcagtctgcccctastaggtggtgcctcccagttagctactggggagtcagagacccatttgaggaggcagtctgcctgttctcgaatctcaagctgtgtgctgggagaaccgctactctcttcaaagctgtcagacagggacctttaagtctgcagaggttattgctgtcttttgtttgtctgtgccctactcccagaggtggagcctacagaggcaggcagacctccttgaactgtggtgggctccacccagttcaagcttcctggccactttgtttacctactcaagcctgagcaatggcaggtgcccctcccccagccttgctgctgccttacagtttgatctcaggctgctgtgctagcagtgagtgaggctccgtgggcataggaccctccaggccatgtgtgggatataatctcctggtgtgccgt

SEQ ID NO: 907547 - DNA, 687 bp, Homo sapiens
gggagaagaggataccaggcagaagaaacaacatctattaagtctcagatgtgaaaaagagaatgaaactaccagctgtaggatctaacagtgacttagtgcagctkgagggaaaagtatgagaatgagtggtaagagatgggttttgagatgtcagcagatataagattttgtaagctatgcatattattaagagttctccagagaaacagaaccaataggaaatatatgaaaagatttattatgaggaattgattcatgcagttgcagaggctgagatgtcccatgatctgtcatctgcaagctggagactcaagagggccaacggtgtaagtcccagtctaagggcaggaaaaaactaaagtttcagtttagtagtcaggcggaatgggcaaagtctcctttcctccacgttttgttctttttaagcactcagtagattggatcatgtccactcacattggagagagcaacctgctttactgggtcactgattcaaatgctaatcttatctggaaacttcctcacagacacaatcagaaatcatatttagtcaaacatctggataccctatcatccaatcaacttgatgcatgaaattaaccatcacaagtccatcctttgtcagtttggcacttatactcatctccttaaatcatacttagcctccaaataaagacaataaca

SEQ ID NO: 907548 - DNA, 648 bp, Homo sapiens
ctgaccatctacagcagccctcatagcctggaaagataaagagctgtaggatggcaaatggttgctatacattatggatacacccctgtaatgactgtgaagtaccataaacaacactcagggtgccatttaactggtttcctttatcttcgattccttgtttaaaggcactgaagttcatcagggtgaatctgtggctggcagttaccaggataaaacagtagtattatgtttcagggtcctgatgaaatgaacgagtgggctttagcctccgcagaatctggaggaatatagcataagcctcattaagcataacaggtgaacaatcatgttattgtgggcctcattacccttcatcatttgcctatattttcagagggggcatagattattagaaaaatgtcaagggaacaggacttactgggaaggagaatcaattcgattttatcattcacatcatttggctttgattgaacaaatctgagtacctagaggtattagaaagccatagagaaatcttattagaatatacaatagataaatatgagtcatatattaaaaactttctcctgaatcctgcacagagtttttgggaagwtgtctcccatcaaactgaggaaaagcatattgttattttgttgttgctgt

SEQ ID NO: 907549 - DNA, 649 bp, Homo sapiens
atcattctgtctcctctccatgtctatctttactataaatctgtacttaaaataaatattttggaatgctaaagatttaaataaatgtatttacatgaatggaaaagctcctacaaattattttgtctctatttctttttttttccaacattttttgtctttgcttttcacttctttgagaggcagcattgtataatgattggaaaggatgatatcagatggtcagagttaacctgcagaatatacttgttaggtatgttatttaaaagtcagctggtcgcagtagctcacgtctataatcctagcattttgggaggctgaggtaggtggatcgcttgagcctaggagttcaagaccaggctgggtcttgagcctaggagttcaagaccaggctgggcaaatggcaaaaccccatgtctactaataatacaaaaaactatctgggcatggtggcgcatgcctgtggtcccagctacgcaggaggctaaggtaggagaatcacttgagcccaggaagtgaagtctgcagtgaactgtaattgtgccactgcactytagcctgggtgactgaagtgagatcctgtctcaaaaataaataaataaataaataaaacaatcttcacctcaccttacttaaatgaaaaatgaga

SEQ ID NO: 907550 - DNA, 581 bp, Homo sapiens
cagacaataatcaataagtatttaatacaagaatgcatacattggtcaggtgcaatggctcacgcctgtaatcccagcactttgggaggccgaggcaggtggatcacttgtggtcaggagtttgagaccagcttggccaacatggtgaagctccacctctactaaaattacaaaaaaattagctgggcatggtgacacacacctgtaaccccagctgctcgggaagctgagacaggagaattgcttgaactcgggaggcagaggtttcagtgagccaagttctcaccattgcgctccagcctgggcaacagagccagattccatctcaaagaaaaaagtgcatacatgaatgaaggtgaagtcaacacatgagcaaagtacaagagaaaaacagagtgatctgcattgctataaaatgatcagcagctaatttccttccagagaaaataatttttwaaaaaaaactcaaacacagattacagttttaaaaggctgaatttctcttttctaaccactatagtttttgaaggctgaattttctctcttctgactactacagtttttaaagactgaatttctct

SEQ ID NO: 907551 - DNA, 559 bp, Homo sapiens
acgcacaggcactaaaatggcactactttgggctcgagaaacacagagtgaacacaacacacaaaagttgctatcatggagtttacaagctagtgtcgggaggcaatcaacaaaaagaagaaaaaaatttagtgttatggaaaaataaagcaggaaaggtgaatggaaagtgctggggtggagagcaattttaaattgggaggccaagtaaagactcaataaacagatgtcacttacaccattacctgacaaaggtgaggggatgtaccatgtggagatctagggaaaagacagttcgaggcaagagagaacaagttcaaggggcaacggtgtggccagggcatggcgcagaatggactaacggaaggataccaagaatgaggtcagagaggcctgggctagattgtgcaggaccttgccactataaagagttctgctttcactmtgagtgacatgggaagccactgaaaggttctgagcagtggaatgacatgaaatgacattttaaaagtctcacagtggccactgtgttaataatggggaggggggagtggaagca

SEQ ID NO: 907552 - DNA, 669 bp, Homo sapiens
caaatatagatgtcatggatcaacagatgttagatgttaaaagggacagtgcaaaattgtcttctaggraagcttatcatttgtactaccactaacatcataagaaaataaatatttctaagcagtaacagaatggattttgtatatattttttttaattttgtcagtcaagtaacaaaaagtagcatcttagtattgttttaattagtattttggttgctagtgaagttggatatatttttatgtgcatattgacaatgtgcattattttttagtgaaatgtctcctcacagttttattcatttatgttggagtaattaagcttttagacggctctgatgaccaagattttattgaaggcaaactataaattatgatgttttccattgatataaggtagacgtggaggacattcttgagcgaagatgatgagttttgttttggacaaatgatacatttgtgggtacccatggatgtcatttatatgacatgggtagatggatgggtagttgattatacagtatattagagcttggtaaagagttttgtactgtaaatataaatttgtgaaagttcagagtacataaaatataaataatctaaatgattagtgtgtaaagtgattttttaaaagtacaatattataaagaataccaacttaatggcttt

SEQ ID NO: 907553 - DNA, 638 bp, Homo sapiens
gagaaaaatggacaaagtaagaatttcaactgatagaaaatataaaacagaaatcttgaagctgaagaatacaacaactgaactgaaaaatctactagaacagttcaagagcagactggatcaaatagagaaaagattgataaacactggtcatcagaaattatccagtcagaatagcaaaaagaaaaaagaataatgaaaacttaagagacttaaaggactccatcacatggaattccatgatggaattctcagaagaagagaaagaaaaggaagatattttattcaaagaaataatgaccaaaacttcccaaatctggggaagaaaatgagcatttaaatccacaattccaatagacccaaataaggtgaagacaaagaaatccacactgaggcacataagtgaattgtcaaaagtcaaagacaatgataattttcaaagtagcaaaaataaatgatttgccatgtactggataattccttaagactatcagtgcatttctaagcagaaatcttgcaggctagaagataatgacrggacacagtccaagtgctgaaagaagaaagctacccaccaagaacgtaatacatagagacactgtccttcaaaaatgaaggggagataaagatgaaaggta

SEQ ID NO: 907554 - DNA, 623 bp, Homo sapiens
tttccagtctgctgcttaactcagtatactatatgatactctgttttatttaaattttagattatgacttgtattaatgttatttatgtgttgatataattttatattatttatatatacatagtttttataatttttttctccaattacctaatcgaaaattcacaaagactattcgataactaatacaattagttatcaaacttaatctaatggttccatctagaatatggaatgcagaaactgcccagtcaatgtgaggtagaagtctgaatctttgtgttgttttcaaatttgataagaatgtttatagcattttggcatcgagtttaacatttatattactatttagaaaatacttgatattactacaataacttgtgttctattcttagcttgcaaacttgtgtaatgaatgattgccgtgtttctcacttgaatatattttcagatgtagacgtaatcttgcatattgaattcctgattaagttatagcattcttttaaaatatcaataaatgtaatttgtggccaggtacrgtggcttatgcctataatcccagcactttgggaggctgaggtggacagatcacctgaggtcaggaattggaaaccagcctggcc

SEQ ID NO: 907555 - DNA, 663 bp, Homo sapiens
gtgaacttactttaatctttgattggctttgactgggaatatccttcaacagtcagctcaacaagattctgggcaggccacttggcttgatgctggaattttagggcagggtttcctagtgcctgagttaacatgtgggtggggctggtgcctagatctgcaggactggacctgagtcctggagccaatgggatagacctcttgattgagcctttgtggttaggcctggagcctgggtccataagggctggcctaaagccatgaaggctaggtccaaagaagctgacccagtgttagaattagccttgaatctgaatcttcatggtcataccaggcactgggataagctaggcatcttagtccactaagataggcttggagcctaagtccatatgggcaggcctggggctggggactagatctataggggtagacctggagccttggactgtgagggctggcctggcacaagagtccagtggaatggacctggattctagatctgctacagccagcctggactctgggtccactgaagtctgaggttgcaggaactgacccagacctgggaccagtctggtactggrgcaaagtaaaggctgggcctgtgggggctattctggagcctaggattttggttacttttctaatgcatggagccat

SEQ ID NO: 907556 - DNA, 608 bp, Homo sapiens
ggctggggaagcctcaggaaacttataatcrtggctgaaggggaagtaaacacatccttcttcacatggtggcaggagagagaagaatgggaaccatcaaaggggtaaaaggcccttataaaatcattagatgtgctgaaaactcacccactatcaccagtatcacgagaatagcagcatggggttaactgcccctatgattcagttacctcccactgggtccctcccaggacacgtggggattaagggaactacaattcaaaatgagatttggatggggacacagccaaaccatatcaacatatatatgcataagaaataggcacaaacatatatctcacaaaacctatcatatagagtatctataatttgtattatagatacagagtatctacaatttgtattatagatatagatatctatatctgtatctataatttttattttatatattgtatataatactccaatttgtattatggagtatctataatctgtattatagatacagagtatctatagtctgtgttgtagatacagagtatctgtagtctgtgttgtagatacagagtatctgtagtctgtgttgtagatacagagtatctata

SEQ ID NO: 907557 - DNA, 615 bp, Homo sapiens
tacatatttcaacaatgatgaagatagtcaataatcgtagttctgaaataaaattcagaaactaagaatacatttcaaaaatgtacagatacacacatgtacacacatattcacagaaagattgagagtagcaatgtagtaataaataacactgaaataaagaacagttaaagaacccattatttccctgatgagtttttaaaagtatataaccttgtcttgcagataaaagtattttatgaattaggtgacatttaatttgaacagtatgttcataaaaattagaaatttgacctctgaagacaatttcactggctttatttcttagctctaccttttactcctcatgaaaccttgtgatatttatgaaactcttcatgcctcagctcgcttatctgcaaaatggggataataaagtccctgtgtcgtgagaattaaacaaatatatatgaatgtggcacaggctagtgaaatgttcaccagtcccattgtttcttctcagtcttggaagattgcatctccttgtttccctttcagtgagcttgaggcaacaccactgtgttcctgcyggaggagtatggtttgaagtgatgtctgccccttccatgtctgcca

SEQ ID NO: 907558 - DNA, 593 bp, Homo sapiens
aatgcagattaatagtccattagcttgttcaacaagcacttctaattgggacaggatgacactgaggtgggagggactggaattagtcataaggaagactttcctagcacaagggctttagggccctggaatgaatggtcagaagaggggttcaagcttccttctctgaaaaatcctttaaaatcaggtagatactctcctgtgcaaggcagttttgctggagtcctacctgacattggctgttatgttacagacttaggtttacaaagcagcactcaaaaaagtctgtttgccttcaaggtatttttcatgttacacaaggtagcaccacagactaaaaaggcctgctttagagcagacaaaccatctcagttgcaactcttcttctagtggttttaactcggacaaatttgaaaaatagctgttaaaaaacaacaacttgtttttcaaatttatatgggttcacatacgtaaggtttccagtacagggagaccttccataaacagtagctgcmaccactccaggtacgaggcagctacgtggcacaaacaaccaggcctcacttcacacagttatagtgaaccaggagtca

SEQ ID NO: 907559 - DNA, 600 bp, Homo sapiens
gaggataataatagtatttatggggttgttctgagaatcagagaaggacaatgcagatagagattttagaattgaacagaggggaaagagaacatgaacaaagagaatatatgtatctagataatattagagatttttttcaactttcatattgattatttcatgttatccctctgagattcactgagattagggacttggataaagtcaaactagtggatcagttgggcctgaaacccaattctggaacagtccaggatggtcttgtttggagcataatgcttccaaatagagaatggccaatatatgtattttttctttttctttcttttttttttttttgtaaagattattcctaaattaactggctggccttttggaggggaagaaagtaagctttggcactcagacaaaaatgacaaacatgtaggtctatgttttagccctgggaacaacgaagggtggctcttcctttgaaatcatgcagtacagtctatggccacaccaccctgaatgtgcccaatcycatctgaaatcacacagtatggtaagacatacattcattagtcctctatatttaaactgagctattttagttct

SEQ ID NO: 907560 - DNA, 605 bp, Homo sapiens
ggtatagaattgaacatgctcatattgaacattatggttttggcttgagtgttccattcgtaagagtggaagggtgacaaaatagtgtacaaatttatgatggggaaaattccacatctagtggttgttctgcaactgtctgtgggaccatgtgattgtcatctaacttctctttttctcggcttcttcatcagaatgtagcaggagtcctgacctgcttgtacctcatgggctgtatgtgcaacagacaagatatagagacagtaaatccccatgaactgtgaggaaagacatttctttctcaagcctaggatgctttaatacagggcttcattttatagtcaacttacagagatataaaaagatgatagagttacaaaggattcctgaagatcatgaaatatgattaaattacaggaaaagaaaatggctttttcttgctttcaaagcttccaagggaaaggggagtgaggatttcccgccttcatgcccccaytgtaatttgcactttctgtgccctttctatttactacatcatatcacttccagctttagtttttaaatttatgttttaaaaattgaaaaataaaattgtatgtatttat

SEQ ID NO: 907561 - DNA, 575 bp, Homo sapiens
ttaaatgtatgtagaagtaaaagatatgatgacaataatgtaaatgtggtagaggtaatttgggattgttgtatgagtagtagtagtaaaggtattataaagtcttataattgtaaaaaaagttagtcaaatactaaattatatcagggtatacgtgaggtatgatgtaatctataggtaatcactgaaagaatagtagaagtgtatataaataacaagcaattagagggtgaaatggaataataaaatatttggttgattcaaaagaaggcaagatgaaagggaactagattatagaaaatactggataaatataaagctaatggcaagattacaatttaaacctaagtatattagtaattacattaattgtagtagattatgcactccaatgaaagaatagttgagaaacccaggtgcttgatacaggaagatgttagcatttacaagaatggtccactgaagttgtaastgaccttgtagatgggcccaaggcatataagctagagcctcagcaacatttgatatactaacaagtgcactccttgttatatgtacccatatgcaaaccaaaa

SEQ ID NO: 907562 - DNA, 717 bp, Homo sapiens
gctgaataggagtggtgaaagagggcatacttgtcttgtgctggttttcaaggggaatgcttccaggttttgcccattcagtgtggtattggctgtgggtttatcatatatatggctcttattattttgagrtatgttccttcaatacctagtttattgagcatttttaacatgaagggatgttgaattttatcgaaggccttttctgaatccattgagataatcatgtgggttttgtctttagttctgcttatgtgatgaattacatttattgatttgcatatgttgaaccagtcttgcatcccagggatgaagcctacttgatcatggtgaataagctttttgatgtgctgctggatttggtttgccagtatcttattgaggatttttgcattgatgcttatcagggatatcagctggaagttttcctttttgttgcatctctgccaggttttggtatcaggatgatgctggccttaaaggagttagggaggagtacctccttttctattgtttggaatagcttcagaagaattggtaccagctcctctttgtacctctgatagaattcagctgtaaatctgtctggtcctgggctttgtttgcttggtgggctatttattattgcttcaatttctaatttaatatttttaaatcttgggttaaatggttgaatgaatgtgtgaaaagttagatatcaatgaatgaatattctta

SEQ ID NO: 907563 - DNA, 460 bp, Homo sapiens
tagttgaattaggtacatgagctaagcaaaggtgtactttaggtacttttaccaagagtaatgtgtaaataatgagagaaggaaagaattacgaaatgtactttgaaaaactatacaattatacatggaaaaagtaacaaatgaaagtaatagaataaagatgtgagagactgaggtagaggaagaaatgataggtttttttgtttcaatcatgaatttatctgagatttttaaggagatatataatacatctataaggatttaattttggattatggggaaaatactgacacaatatgagaaatattaaattcaagggaagaagaatgactgggaatggagaagatatatctagttttttgacctgaaggcgggatagcaataccacactgtgatgacaaagcaaasctactgtgagcattttaggctataatttgcatgtgggttatatttaaagatg

SEQ ID NO: 907564 - DNA, 634 bp, Homo sapiens
cccacagccagctgtagagggggctcagtcayagaacatgcatgcaggcatgtgttgggtaggtagggagaggggcaggaggaggcaagatatagttcttttttttaaaatctttcaactttcattttagatacaggggcatacatgagtaggtttgctatttgggtatattgtacatggacagtgagcttagtacccaaaaggtagattttcaaccaccctcccctccttccctctcccctctaatagtgtgcagtgtctattgttcccatgtttatgtccgtgggtgctaaatgtttagctcccacttataattgaaaatgtggggtatttggttttcttttcctgtgtattgtggttgctattatcgttaatattatcctagcactacctcctaatctgtctagttttaaggtgaaggttatctgcagaaaatcttaataactttattgaaatcttgattccttttcaatgtctcctgttaggaaaaaagtatagaatcatctgtcaaccaatcaatcaatcatcatagtataaatattatatgctgattataaatttagcttaacatattggccacaatttatcaacataatagtagagaaatacactttctcagtggagccaccctaca

SEQ ID NO: 907565 - DNA, 558 bp, Homo sapiens
agcaaggctgaattctctcaccaccagataggcagcatctcctctccaacagacaagggatagaaggagtcygcttagggtctgctgctgagtgtcccctcaagcaaatatttgattattcataaattatgtattagtaacacagaagagactgctcaatttctcaccctaataaatattgtgtcatctcctgtgtcctctaaacattaatgactaaatttttttattctgcctaccatatatgtaaccctttatgacatgcttattggttttagccaatgaacatgcttcactacgctcctcagaccaatgaagatctctttacaggctacaaaggtgacttttctatgagcgaaatcttataacctgagctgtttggaaaggaagaacaatatatacgtgtgaatgtcaaattatcttttaaatacttttattttcaggctcttcagagatgtgattaagagaagttgttctatcccttacattcctttatataagaaaagcaacatgcaacgcgacttgatctttgatcaaaatataaagttccctttggtgcag

SEQ ID NO: 907566 - DNA, 566 bp, Homo sapiens
ttggaagaatgatatattttgttttggatgtttacctagtaatggggttgctgggttaaatggtagttctgttttaaggtctttgagaaacctgaaaactgctttccacaatgggtgaagtaatttatgttccyaccaacagtgtgtaagcgttcctttccccctgcagccatgtcagcatctgttgttttctgactttttagtaatagctattctgactgatgtgatgtggtatctcattgtgcaatcatccatttaaaaaatatgtttgatctgctgtggattgaatccatggatgtggaacccagagaaatgaagggctgactggatagagtaaaattaaatgagtagtgaagataaggttaaaaaaaggcaggttggaaatatttatgaaggaagttgaatacaaggaggagaacagtgttcttaaatagtgaagctttttaattaagtcagtgatacgttcaaaaagtaataatgtgattaatgctggtaagaaatggaagccatgaatcaatttggagagtattccaacattgaggaattatgtgaaatgtctgaattta

SEQ ID NO: 907567 - DNA, 658 bp, Homo sapiens
gtgtctaattcagttcttagttgtaaacaagaaaatccaatctggctagtttccctttcaaaacggtaattatgaaagaacattaagtattttgcagaatctctgggaggattggtgaacaacgttctgaagttatatttacagaaacaatgcccacacacatgcagccatctctacctaaaagattgctgtctcagtcacacagcaatcatcacatctgggattgggctccaaaacacctgctaccacccagagaaccttcaccatcatgcttatcagaatacaaattcccacacatggccacctcaaaatgttgctaatctctgaatcatattgatttcacagaaaattggtcacctgcttgcatcccagcaacaaaggcattagaagatgtgcatttgcagaaggtgggactcactggggaaagtatcaaaatgtaaggagaacattccaagatgacggctggtcacaaacaatcaatgtccatccaatatgggactagttcgatttttgtctttatatgaargagtgactgtgtagtctttccagggtttgtagagtaccacagcaatgggaataggaaattaatagccaatctctctttcttaaccaaatgtttactggtttttttcctcctctatatgcccacagaaagtag

SEQ ID NO: 907568 - DNA, 620 bp, Homo sapiens
ctccaatcttttcaactgtgaatttatttgttattgattctatttcatataacagagataattcaggaatctaaacatccagtgaggtgttacagagcagcattaaataaattggcatcagaaagaatacctagatgaggccctccaacagaggttgtcagacaccctatacatgaacggtcctactggcatcaggttggtcccccttgaagtcagaggtcccagaataaggagcagacatgcatctttgctcctctccagcctccttgagtgacacctccaggcatgggagtgaatcagatgaataggacctgaagtgaacccccagaaaactgctgcagccctacagaagagggacctgactattgaaagaaaaacaaacaagcagataggaacaatagcaccatcaacaacaacaacaaaaaggtgtccacaaaaaccccatccaagtgttagcaacctcaaagactgaaactagacaaacacacaaaatgagaaagaatcaatgaaaaaatgctgaaaacccaaaaggccagagtgtctcttctcctccaaatgattgcaacagctctccatcaagggcacaaaactrgatggaggatcagatggatgacttggca

SEQ ID NO: 907569 - DNA, 667 bp, Homo sapiens
gaactgaaggaaaaactgtaaagctcagccasagagaaaggccaggtcacccacaaagagaagcccatcagactaatagcagacctctcagcagaaactctacaagccagaagagattgggagccaatattccacattcttaaagaataggattttcaacccagaatttcatacccagacaaactaagcttcagaagcaaaggagaaataaaatcctttccaggcaagcaaatgctgaggaatttcattaccatcaggatttccctgcaagagcttctgaaagaaacactaaatatgggaaggaaaaactggtatcagcaactgcaaaaacacatcaaagtataaagaccaatgtaaagaccagtataaagacaccacaaagaaactgcatcaactcgtgtggaaaataaccaaatagcataatgataacaggatcaaattcacacataacaatactaaccttaaatgcaaatgggctaaatgcccccaattgaaagacaagaactgacaaattggataaggagtcaagacccattggtgtgctgtattcacgagacccatcttgcatgcaaagacacacactggctcaaaataaagggatggagaaaaatttaccaaaaaattggaaagcaatgaaagcactggttgcaatcctagtttctgacaa

SEQ ID NO: 907570 - DNA, 576 bp, Homo sapiens
tggccaggcaccgtgtctctcacctgtaatcccagcactttgggaggccgaggyaggcagattgcttgaggtcaggagttctagaccagcctggccaatagggtgaaaccctgtctctattaaaaatacaaaaattagccaggcatggtggcacatgcctgtagtcccagctacttggaaggctgagacacaagaatcacttgaacctgggaggcagagattacagtgagccaagattgcgccactgcactctagcctgagtgacagagtgagactctatttcaaaaaataaaaataatttctgtatatgctatcataatcacaatgaaaaataatattctatttttcaagcaagtctaaatgttaagaaccaacccaaaataactcaaataagtataataaaaatgtatatattatattctcaaaaaacaaaagaataattaattaaaagtaataacccttgagcatactaaaagataaagatcacactgactcttaacgtttttttctaatttctgtggcatatccttacttctatgtttctcaactagccattaatgattgtgatggaagaaa

SEQ ID NO: 907571 - DNA, 576 bp, Homo sapiens
tggccaggcaccgtgtctctcacctgtaatcccagcactttgggaggccgaggtaggcagattgcttgaggtcaggagttctagaccagcctggccaatagggtgaaaccctgtctctattaaaaatacaaaaattagccaggcatggtggcacatgcctgtagtcccagctacttggaaggctgagacacaagaatcacttgaacctgggaggcagagattacagtgagccaagattgcgccactgcactctagcctgagtgacagagtgagactctatttcaaaaaataaaaataatttctgtatatgctatcataatcacaatgaaaaataatattctatttttcaagcaagtctaaatgttaagaaccaacccaaaataactcaaataagtataataaaaatgtatatattatattctcaaaaaacaaaagaataattaattaaaagtaataamccttgagcatactaaaagataaagatcacactgactcttaacgtttttttctaatttctgtggcatatccttacttctatgtttctcaactagccattaatgattgtgatggaagaaa

SEQ ID NO: 907572 - DNA, 576 bp, Homo sapiens
tggccaggcaccgtgtctctcacctgtaatcccagcactttgggaggccgaggtaggcagattgcttgaggtcaggagttctagaccagcctggccaatagggtgaaaccctgtctctattaaaaatacaaaaattagccaggcatggtggcacatgcctgtagtcccagctacttggaaggctgagacacaagaatcacttgaacctgggaggcagagattacagtgagccaagattgcgccactgcactctagcctgagtgacagagtgagactctatttcaaaaaataaaaataatttctgtatatgctatcataatcacaatgaaaaataatattctatttttcaagcaagtctaaatgttaagaaccaacccaaaataactcaaataagtataataaaaatgtatatattatattctcaaaaaacaaaagaataattaattaaaagtaataacccttgagcatactaaaagataaagatcacactgrctcttaacgtttttttctaatttctgtggcatatccttacttctatgtttctcaactagccattaatgattgtgatggaagaaa

SEQ ID NO: 907573 - DNA, 607 bp, Homo sapiens
acatatgaccacaagcaggagattaccttctatagtctcttatcagtgattaattttgatcaartataacatgaattatattatgagcataaatttaagttaatctccataaagacaaagccggttgtttttacatctcttcttacacattttactggctggaatgcagaagtattgctgaacttagccatgaggatgaaacactaagataggattataaagagaatacaagatgaaaatctcctggggcccgggatgaactcatggaaaaaacatccccaccaactctcttaattgttggagagaaatataagactacaataagggtcactccttatactcatcatttttgagttagagatattgacaagtgtatcaaactatatattttctcccacaagacattgaggggcacacttcttttattctccaaaagtaacaaaaaatgctttggtgtctaatttttagcctgcaagggctctcatagtgttgttttcaaagacttacatgttttatttccttacctcactgcaacattataaatttatcttctgtgctaacatcatgatagcatctaaaggttccaagagtgaagattatcactagt

SEQ ID NO: 907574 - DNA, 338 bp, Homo sapiens
tttaaaactcacactgccttagaattttaccatcaatgaaagagagggtcactataggtcctaagaagagaagtgacaygctcttttatgtaaaaatgatgactgtggatattgtgttggtaactgactgtaaggggacacttttagaaaaagtcccctctttagatattgactttatccaagaggaaagcagtagtaattcacacgtcagtagacatggtgagaagtagtagattctagatattataaagtctttgagtttaagcaaccagaggaaggacttgccatcaaatgaaatggataagcataaacaggtttggtagtggctgggagatgga

SEQ ID NO: 907575 - DNA, 338 bp, Homo sapiens
tttaaaactcacactgccttagaattttaccatcaatgaaagagagggtcactataggtcctaagaagagaagtgacatgctcttttatgtaaaaatgatgactgtggatattgtgttggtaactgactgtaaggggacacttttagaaaaagtcccctctttagatattgactttatccaagaggaaagcagtagtaattcacacstcagtagacatggtgagaagtagtagattctagatattataaagtctttgagtttaagcaaccagaggaaggacttgccatcaaatgaaatggataagcataaacaggtttggtagtggctgggagatgga

SEQ ID NO: 907576 - DNA, 628 bp, Homo sapiens
gcccattgacatcccctagaccttacagatttgctccatcccagaaacatccargactgtggctttcccaatccacccactaaatcagacccatgtcattattttagaggaaatttggatctatatgtttctgtggtcagctagtcttactcagtaaaaccaaaatcatttccttatagtgagtgctctccaaatcaaggtgcatcttacttctcttgatgcatacttcagaacctacagagtacacaactagaacacacttcttatcctcaaaccttgctctccaccagggaactctctttcaaaagtattattattacattacccagtgtactctctttcatagaggccctggctttcttccttcatctttccttccatccataatctttatgccagtgttaaccaaaactccactccaaaagcatttattcttttctaaaacaaccttcagctaaagttttagtaactaaatctactaaaaagccattgctgaacaggaagcagatatctggaaggccatttctggtagaagaccatatttggtatcattctcatggcttcattctagctaggctttcttaatcctgaacagtaagaggttatgactattctgcataacttttat

SEQ ID NO: 907577 - DNA, 602 bp, Homo sapiens
aaatatctgaagagatttattctgatccaaatgtgaggaccatgacctgtgacacagcatcaggaggtcctgagaacataygcccaaggtggatgggttacagcttgattttatatgttttagggagacataaggcatcaatcaatatatgtaatgtacacatttgtttggtcctgaaaggtgggaaaattcaaaatgggtgagggagtgattttcttattggcaattgcttgaaagaattaagtttttatctaaagacctggaatcaatagaaagaagtatccaggctagaataagggcttgtagagaccaaggttcttattatgtagatgaagtctcacaggtggccactcttagaggcaatagatggcaaatgttttctattcagacctttaaaaatgtgctagactctcagctaatttctttaggatcagaaaaagacctggaaagggaaagagattctctacagaatataaatttctcccttggcagggcaatttaagagtatctcaaagaaatatattttggggtaaaatatttttatttctttcagggcctgctatctgttatgtgatgctatactagagtcggattggaatttg

SEQ ID NO: 907578 - DNA, 552 bp, Homo sapiens
atacatagttacttatagaatgcaaaagaaaaatggaacgataaaccataacattgagggggaaatatttctatataaagggaaagmataataaggggagggacaggcatagaaactaaacttttctcaatatatacttattgttttgactttggaatagtggacatatttgacattaaaatggttatcttctacaataaaaagtaaactaagacaaatcaactttattctattttattttaattattgtggtaagaatacaacatgagatttgcccagtaacaaatttttaagtgtacctcacgttattgtggacagtaggcataatgttgtacagcagatctctagagtgtattctttattcatcttgcttggcagactttacacttgttggtaccccacagagaaaaactcttctaagttactttgaaacacagtagtctaactgcatatcttaatgcgaaatgaattaagaacaaaaagaatttccaagcaactttaaaaaaaattcatgcaattatagatacttctataaatttcattctcagccag

SEQ ID NO: 907579 - DNA, 590 bp, Homo sapiens
tggatcaaatggacctgacagatatctagagaactctacatccaaaagcaatagaatatacartcttctcattgtcaatgcacttagtgtaaaatcactcacataatcagaaataaaacactcctcagaaaatgcaaaagaactgaaattataacaaagtctcccagaccacagcacaatcacattagaactcaagactaagaaattctctcaaaaccttacaattacatggaaattgaaaagcctactcctgaatgacttttgagtaaataatgaaattaagacagaaatcaagaagtttgttgaaatgattgagaacaaagatacaacacactagaatctctgggacacaactaaggtagtgttaagagtgaaatttatagcactaaatgcccacatcaaaaaagtagaaagaactctattaacaaaccaacattacaactaaaagaactagagaaccaagataaactgaacttcaaaggtagcagaagacaataaataaccaatatctgagctgaactgaaggagactgagacacaaaataatttaaaagatcaacataaccaagagttcttttttttttaatggct

SEQ ID NO: 907580 - DNA, 588 bp, Homo sapiens
tgcagctctcagcagagaggaggctctagagtgggtagctcctctctgcaggcaggtcatcccatcatttctgcagctctcagcagagaggagaccctagagtgggttgctcctctctgcagctggtcatcctgatgtatgctcagctctgagcttgggcttttatgggcctcagaggggaggaagttcatgccatttggcccatgggtggtcacgggcaagcccaaaaaaggcaccacaagttcccactccagtccacgggactggcagcctggcccccagccttcaggccctccctgacctgaaggtgagagcctcactggggacctgcccccttccacccaggaactgtctgccttctgccgctgttcatggcatccaggctgtaggtgccaaggggtgcctgcaggccagcgctgagatgccctcaaactctcctcggcttccctcctatgcttgtcagtgcccaaagtctggagygggctgaggtggcaagaaggagctggtgtgtcagcactgctccaagtgtgtgcacacccagccaggctgcagcagtgcctaggctcagccccaactttgctctgagat

SEQ ID NO: 907581 - DNA, 604 bp, Homo sapiens
aaactataaaaagttgatgaaagaaattgaagaggacagaaacaaatggaaagacattccatgctcatggattagaagaattggtattgctaaaaatgaccatactaccyaaagcaatctacagattcaatgtgttccctatcaaaataccaatgtcatttttcacagaaatagaaaaaaatcctaaaatttgtatagaaccaaaaaatatcttgaatagccagagcaatcctgagcagaaagaacaaagtggaggtatcacactatccaacttataaatacatacaagtctatggtaaccaaaatagcattgtataggtataaagagagacacatagaccaatggaacagaatagagaacccagaaataaattaacatatttacagctaatggatttttgacaaaggcaaccaagaacatacactgaggagaagacaccttcttcaaaaaatggtcctgggaaaatctgacatttatttgcagaagaatgaaactggacccctatattttatcaaataaaacatcaatttgtctgggcgtggtggctcatgcctgtaatcccagcactttgggaggccaaagagggcggatcacctgaggtca

SEQ ID NO: 907582 - DNA, 559 bp, Homo sapiens
ctatttccttcctaaatccacattttgacactccctttagataacctttgaattagaaaaagttatttyttctcaataaaagacatttttttctcttattaaacacaccttactttggcatactttatatacagaattatatatcaattggaatttttagcttctggtaaccttaaattttattaaaaacataggaaacacaaaatcttgatttgcctgttacatatcattatttaacagataacaaccattttatttttattatttttcatttttttactttttagagacagggtcttgcccttttgcccaggctagagtgcagtggcatgatcatggctcactgcagcctcaaactcctgggctcaagcaatcctctcacctcagccccccaagtagctgaaactccaagtgtatgtcaccatacctggctaattattttatttttttgtagagatgtcttgccttgttacccagggtggtctcaaacttctggcctcaaacaatcctcccaccttagcttcccaaagtgctgagagtataggcttgagtcaccatg

SEQ ID NO: 907583 - DNA, 572 bp, Homo sapiens
ggcataactcactagttaaaagggatagttagattcaaacttcgtcactgttaaactaacaattttagtttaaatttttctgttccacgtggctgaagccccttactgaattttagagaaaccagagtagcaaagtagtcgggcggaccggcaggaagagaggagctagttgaagaaggttagctctagaatcaattagaaagccaataagtctcttttctacattagattacctaaggttcctagatcatagaggatccccagtcccattatttttaatcactatcagaaactggtatctggtgggctgattaatgggcagcttctttctctacctgccaggatgattagggcactcccatttccaatggtcctcttgtttataatatgcacattgtggcctcaagagtgtacggccattttggccagcagtggggtccctaagggtcttacccatggccatttgttttcctagcatgctccatcttgtgcctcgactggtkgtggccaagagccacagcaagcagcatagcttgttgtctcatgtcgcattgcttttgcccttcgtggag

SEQ ID NO: 907584 - DNA, 590 bp, Homo sapiens
tttagccttacacataggctgaaagtgaagggatgaacatgaatttctataaaaatggaagctaaaatagagcagaggtagcttaattatatcagaagagaacagactttaagttaaaaactgtcataagacaaagaggatcattaaataacaataaagaagtcaatccatcaagaagatataacaactatgaatacatatgtgcccaatatcagaatacctaaatatgtaaagcaaatattaacacaactgaagggagatacaaatggcaattcaataaaagtagggcatttcaacactctcactttcaacaatagatacattatctagacaaaaaatcagtaaagaaaattggacctgaactatatgttagtgcagatggatctaacggacacatacagaatattccattcaacagcagaagaatacacattcttctccagcacatgtgagacattcttcagaamagataacatgttagaccaaatcttagctgattgaaatcatatcaagtacctttcctgatcacaatagtataaaactagaaatcaatcacaggaagaaaattttaaaatggacaaatatctcct

SEQ ID NO: 907585 - DNA, 633 bp, Homo sapiens
aggtaaaatgggacagtggccaatatctctcctctttttctacccttctcttctctccaaagagtcacccttcaatttargatgtcagtaattttctgtgatcacagtggtctctcaggaaaagctcagctaccagtaattttaactttaataaaaatctaattgaaatatagactcttctaggaagatttatgttttaagttttgcttttcaaattctgttatgtaataaaagattgtgttgtgtgtagtgggattttaaatatggaactttctggagtcaggaagacatttttggagctattaaaaatatgccaaatatggaagtatctcctcctttaaaaaaataaatgttgtgtatatttaaggtatacaacatgatgttgtgggatacatatagtaaaaaggctactggaataaagcaaattaatacagccatcatctcacatatttatctgtttatttgtttttgtggcaggagcagttaaaatctactcaccatgaatcccaaatacagtacacttttatgtcctatagtcctcatttgtacatttgttctctagacttgtttgtcctacagatctgctacattgaattccctgacctgtatttccccattttctctccacttccc

SEQ ID NO: 907586 - DNA, 579 bp, Homo sapiens
caattgccataaaaattataaaatacctaggaatatagctaattcgggaggaaaagatctctacaaccagaattacaaaacactattcaaagaaatcagagaagacacaaacgaatggaaaaatatcccatgctcatgaatagaaagaatcaatatcattaaaattgctatactacccaaagcaatttatagattcaatgctattcctatcaaactatccatgacattcttcacagaacttgaaaaaacaattttaaaattcatatggaacaaaaaaagcctgaatatccaaggcaatcctaagcaaaaagaacaaagctggaggcatcatgttacctgacttcaaactatactgcagagctacagtaaccaaaacagcatgttactcatataaaaacagtcatatagactggtgaaacagaatagaaagcccagaagcaaggccacacatctatgaccatctgatcttcaacaaagctgacaaaaacaagcaattgggaaaagactyccttttcaataaattgtgctgggataactgtcttgccatattcagaagattgaagctggacccctccttac

SEQ ID NO: 907587 - DNA, 609 bp, Homo sapiens
ccactatgcccaggccatcatcataaagatttaatagaagcaaataacctcaggagcacagatataataaaatgtagtaaaataattaggaagtgatgacttttgagtatttattacatttgtttttcatrtcatgtatttaattataattgtatacaatttaatttttaataatggttaaaaaaataaggcatttaaccaccagctttcagaattactgaatgtttagcagtaagtttctacaaaccagtgctagctggctccagtatgtcactggaacttatatatccttcaacttctcaagatgttattatcatcttaaacatttatgctattcatgtatttactctttttgatgacttttgtttattactgtattgtcatgcttattttaaagaataatttctcttcttcctgaagatctgcttttggtatttattttagtgactgttggtgaaaaattttcacaattttgtctatgtgataggcagaataatggtcccagaagatgatcacaccctaatcctcagaacctgtgaatgtgttacctttcctgacaaatgggactttgtaaatgtgattaagaatatttaccttgagataaggaga

SEQ ID NO: 907588 - DNA, 556 bp, Homo sapiens
aaggatgtgcctgcaggcctgcactaaactgcctcagcctccacctcagcctccctcccatgctcgtcagtgcccaaagtccaaaggagtctgaggtagcaaggggtggtgtgtcagtgctgccctgagtgcttgctcacctggtcaggttgagacagcacctggccttggccacaattttgctctgaaatcgaagcaggtgccaggagcagggagaggccagggatgggagcaggcacttcaaagcctatgtggggaagggggattcctgggcccctgagaacacagggatgcctgagttcagagccacatctaggcagctacagctgttgccctgccaactcagtaggggacagggctcctgcctattcccggtcccgcactggctttgtggagcacacagccatggccacacctctcctgctgcagccagcatcttcacagcagctgctccagatgggccaccactgcmatcagtatctccaatataccctgtagtatttcttaataatcaagcctgatctttgaatatcttatgataattaagtaccctctt

SEQ ID NO: 907589 - DNA, 562 bp, Homo sapiens
tctacccaagtgagaatgaaccagaaaaacaactctggtaatatgacaaaacaaggttctttaacatccccaaaagatcgtactagctcaccagcaatggatcaaaatcaagacaaaatctctgaattgccagaaaaagaattcagaaggtcaattattaagctaatcaagtagtcactagagaaaggtaaagttcaaattaaagaatcaaaaacatgatacaggatatgaaaggaaaatgcttcagtaaaatagaataaaaaacaatcataacttctggaaatcaaggacacacttagagaaatgcaaaatccactggaaagtctcagcaatagaattgaacaagcagaagaaagtacttcagagctcaaagagaaggttttcaaattaacccaatctgtcaaagacaaaaaggaaagaatttcaaaaaaaataaagcctccaagatgtttgggactattttaaaatgtccaaacctaagaatggtgttcctgaggaagaagataaatctaaaagttcagaaaacatayttgagaatataatcaaggaaaacttatctgga

SEQ ID NO: 907590 - DNA, 483 bp, Homo sapiens
gtcttatgcagatcagagatgacaatctctaaaacttgtctagtttttcctattacagcatccatggaagacacyactagatagtcagagaaagtatgatcagccatctactgtcaatggtccaaattggcaccaagttgaaacccattttcaatccctattataaacaaaagagccccggcttttaggtcagaggacctgatttctaatgctgactgtataatgctttggccagcctatcaattccccaggcctccttggcatttctggtaaaaaagacattttaactaggtaccctccaaggctactatcagcttaatgatttgtaattctaatatacacagatggttttttaattgccctactagaaaatccatctccactactattatgtttgttaacattaatgtatgatattacacaactatcatgtagtttttggcccacataacaccactgccaccacaaaaacaaccctttcag

SEQ ID NO: 907591 - DNA, 597 bp, Homo sapiens
catcaaaagtgtctagtccaatcaaatcatttgcagatagataaatgatggccaggaagccaagtgacctcaccaaccctacacaacattaggctagaacatttttctcccctccacrttgtcccctgcacctccctctacccctttactaggggaacacataatttatcatctacactaggacacttttaagagagaaaaggactgctgttaataattatactggggaacaatagacacaaaccccagcacaccaagatgtattgtcacccaacccttcacccctcggctgttaacttatgaacctcctcctgagagagacccactttttcaaggtggcaactctgcctctgcagccttaatatagctcagtatttgcctggaaaatcaatatgcattgattaatgacaataatatgatgcaacctccaccctctgaattcgcttagtattcccactgtctgtcttaaattaaatgtttcagttcacccagtatcttttcccaactcatttctcaactattcttttatagaatgtaacttaattgtactcaataccctaacctaattaggttggcctaatggttaaaagtaaccca

SEQ ID NO: 907592 - DNA, 642 bp, Homo sapiens
tcttcaaggagagctacaaaccactgctcaatgaaataaaagaggacacaaacaaaggaagaacattccatgctcatggataggaagaatcgatatcgtgaaaatggccatactgcccaaggtaatttatagattcaatgccatccccatcaagctaccaatgactttcttcacagaactggaaaaactactttaaagttcatatggaaccaaaaaagagcccgcattgccaagacaatcctaaggcaaaagaacaaagctggcggcatcacgctacctgacttcaaactatactacaaggctacagtaaccaaaataatttaatacaagttttacactgttctaaataaatagtttttaaggttgaacactacatttaatataaatttacttttaaaatactttttaaattactggcattttaaaatggatctggcaatactatttctgacaattgtttttgtagtagccctaaaaaaattcttcttgacatatccagtatttaaagtcatggttaatctatcatgtttttattctttcatgcattattttrcccattgactttgtggttataaagcgagattacatagaggataaaattaatgtatccaaaataatagagtaaaaaatgtattcaaattt

SEQ ID NO: 907593 - DNA, 598 bp, Homo sapiens
tgtagttcctttaatttgcaaatccgaaggaaaatatctgaatattgtggttccttttatttgagaatctgaaggaaagaaaatgtaatcaccattatggtaaacactgttatggttaccctatgcagtttttaaaaatgtttgctataaccttgttggagaggtatcatttttattttaaaaataggaaaatataataatagattatttgactaagtcaagtcatacttccaggaactgaaaaaaaatgaaattgacattgtttttttttctttttaatttaaacatcactgatttttttttcctcagggaaagactagaaaaatgattagtctgattataattttctaccttttttgaaatgggtaaacagtctacctgattgagtgacataaaaatagctcttcatctttttttttttttttttgaaatttccttcattgttccataaagcaagaggatcaagttctcttagaacttatctgaaactccttctgttttgggagaactcactcacctagggcataagaatctaaagmggaagttgttttcaaaatgtaaaagaaaaggtcaccttttttaaaaaactatttctaga

SEQ ID NO: 907594 - DNA, 603 bp, Homo sapiens
aacccacaggaatattatttttttataaaatagacaagcagattgactcagacctctttcctctgggcccctctctagtttccaagrtagaattctaaggtggatggaatggtggatacctccaagtaggagacccctagacccttcttactatgctagccacatgagagaagacaaagagtatgattctacaaaactaaacgttaaaaagaagaatcagatggattactcttcatgaccacagaagactttttaccttttcacagatcacatggtatgtgaaagggttagtcttttagctttgtggcataattttagcacagcttgtctttggtatgagtagttagtattgtaatatagaacacatgttaacattatgcactgaaagagtaataatattgtattagtctgttctcacattgagagaaagaactacctcagactggagtaatttataaagaaaagagatttaattgactcacaattccacaggctgtacaggaaacatggctgaggaggcttaaggaaacttacagtcacagcagaacacaaatgggaagtaggcatgtcttacatggccagagaagaaggaagagagagaag

SEQ ID NO: 907595 - DNA, 572 bp, Homo sapiens
aaataggagtactttttttctattgagattgctagaaatttctagtatatctctttgccctactttttgagttcgtgtctggaattaatgctttaacagaagaaagcagagttcagaaatgaacagtggcagatttgtgacaacattacttaagtacctagatccagttatgcctaaagtccagccctagagttttccagttacctgagctaatgtgtcaatttttaagaaactaaagccagttttactaaagtcaatagtacagtgccttatgctatttatttacttattcatttattcttaaatctgtttcatgaagaacttaaagatgtttacagaggtacatacaactgtaaaatcaagagtttaaaaaatagtcgaagaaaacaagataagggagcaaaagagaggaaaaaaatatattagtctgcaaagcatctgctgggaagttctgtacattttcatggtaggccacacatttagccctgatatttcaagagccaaggttaaaagtacagtgaagttggttayaatcccagcactttgggaggccgaggcgggtggatcacgag

SEQ ID NO: 907596 - DNA, 618 bp, Homo sapiens
acctgccagtgagaaaggagaagraaaaacatagaggggagccagttttcattgtaaggctgggacctggatgtggtgcccatcacttctatgagcctgagctgattggcgtggccactcctagctgtaagggaggctgggaactacactgccctctccaactgcctgccctgctcctgctccaggatgccccgtgttactgaaaagaagagggtaaacggggatgggggcaattagaagtctctgccactgcttatcataatggtaactagatccttagtgtgtaattattaatgactcccctccccatctagactgtaagctcccagagggcaggggtatccagctagtccaccactctatctccaggacctatgaccctttctagaaacatttcataaatgtccgtggagagaagagaggaaggggtaaagcaagaaaaagggaatgtcttccccctctttgccctcaactctttgtgcttaaactagagctctatgaggccctcccctggcttctgcccactgctctcatctgaggattcagctctgctctactctcctccctccctgtctctgggtcctggaggacggcttctgctctcagctacataggccc

SEQ ID NO: 907597 - DNA, 657 bp, Homo sapiens
ctcatcatcaggtactaacaaacagttctgggacccacatagatccttggtccccactttaagcaacactgatctaaattcttgtagagttggccatggaaatccaagcacrctaaagattttgcagtatccagagagaaaggataacaatactcaaataagcactataaatgatgacttcaaaaggctccgtgacaaggattgacactcttcttatctatgaaatgatttttctttgtgagttgaggaaaaacacatattctaagaatgaggttaatcttcctttacccggcacgtgttactcctgcttaacatgaactttttattccctacagctccccctcctcttctgaaaccactacacaccttatacacgttatgtacagagagccatgggcatggatcaagagagagagacagaatgcttttgcctaagccaggcatcccctacaatgttaaggttggcttcaaaaatggaatggaaaacaaagttttatgttgaatgaaatattcttttcgaagattttattctctctactcttgggaaagttcctgaataaaaaatacagaggtagccgtcactcacctctataaattggcattgaacagggtaggtaaaacacaggaagcaaagctatgtaagaaggaatacttaga

SEQ ID NO: 907598 - DNA, 657 bp, Homo sapiens
ctcatcatcaggtactaacaaacagttctgggacccacatagatccttggtccccactttaagcaacactgatctaaattcttgtagagttggccatggaaatccaagcacactraagattttgcagtatccagagagaaaggataacaatactcaaataagcactataaatgatgacttcaaaaggctccgtgacaaggattgacactcttcttatctatgaaatgatttttctttgtgagttgaggaaaaacacatattctaagaatgaggttaatcttcctttacccggcacgtgttactcctgcttaacatgaactttttattccctacagctccccctcctcttctgaaaccactacacaccttatacacgttatgtacagagagccatgggcatggatcaagagagagagacagaatgcttttgcctaagccaggcatcccctacaatgttaaggttggcttcaaaaatggaatggaaaacaaagttttatgttgaatgaaatattcttttcgaagattttattctctctactcttgggaaagttcctgaataaaaaatacagaggtagccgtcactcacctctataaattggcattgaacagggtaggtaaaacacaggaagcaaagctatgtaagaaggaatacttaga

SEQ ID NO: 907599 - DNA, 671 bp, Homo sapiens
ttttagtggtagtagctaacatgtgygatatggttttgttgtgtccccactcaactctcatcttgaattgtagcttccataattcctttgtgttgtgggagggacccggtgggagaaaattaaatcatgggagcagtttcccccatactgttctcttggtagttaataaatctcatgagatttgatgattttataaggggttttccctttcacttgtctctgattctctcttgtctgctgccatgtaagacatgccttttgccttccaccatgattgtgaggcctccttagccacatggaactgtgagtccattaaatattttttttctttataaattacccagtctcaagtatgtctttatcagcagcataaaaacagactaatacaatatgttatgcatttatctgtgcctggcttttttctgtatacctaattaatataaccttatgaggtcataggtattacaagtgtacagttttgctgaaatgattaggtacagatgtgtttaaaaaattagaggttttaagcattcagaaaaataatacagtgcatatattatagatatatatcacccccagaagggtctgggggcagcacaacacaatcaaacagattaacatttctatgaagaaacttgtaaatgttcacactacatgagaaaatattgcta

SEQ ID NO: 907600 - DNA, 661 bp, Homo sapiens
ctgtgtttgtaatcccaacatacaaacagaacagtttcatttattttttttatatatttttattatactttaagttctagggtacaggtgcacaacgtgcaggtttgttacatatgtatacatgtgccatgttggtgtgctgcacccattaactcgtcatttacattaggtatatctcctaatgctatccttcccccttccccctaccccacaacaggccccagtgtgtgatgatccccatcatgtgtccaaatgttctcattgttcaattcctacctatgagtgagaacatgcaggtgtttggttttctgtccttgtgatagtttgctcagaatgatggttaccagcttcatccatgtccctacaaaggacatgaactcttccttttttatggctgcatagtattccatggtgtacatgtgtcacattttcttaatcgtgtctatcattgatggacatttgggttggttccaagtctttgctattgtgaatagtgccaccaaaaacatacatgtgcatgtgtctttatagcagcatgatttacaatcctttaggtatatacccagtaatgggatggctgggtcaaatgctatttctagttctagatcctcgaggaatcgccayactgtcttccacgatggttgaactaatttacagtccc

SEQ ID NO: 907601 - DNA, 606 bp, Homo sapiens
tattttcaggcttaaaaaaaagttaactctaacctaagcagcagttgtacagccatttcaaatggtggtgcagcattttttaatttctcggaaaatcttttgggagcaatataatatagttctatgaaaaattaatcaatgaaattattatgactgtaatctcataatttcattgtccttctcctttcagtttttacttattctctttaaaattcaaatgcccctaaaaagcatatcatacataataatgactgaaaatagttgcaaaataaaaattgagtaggagagacatttcaaggtttcttttatgagaatgctacgttaaccatgtgacatacacatgctaaaaacaattgtggaaaaaaatgactaatatttgtgtagcacttgacagtttacacaataatatcaaatattctcatttgaccttcaaaaggatttttaaactcgtgtttcacaaatgaggaaaatgagattcagtaatacaaatcagagctgttacatctcyttatgatcatgtcacccaataaagcagaggcatttgttttcttgagaagagatgaagaaggcaaaatttattaaaattatgagtcttttttgtagttt

SEQ ID NO: 907602 - DNA, 607 bp, Homo sapiens
cctttgcctcgatgccaaagtaaaatggatgagggtgtggatatttgagttgtatcttatatcttcaaaatcctggaacaatacctgtccaagagaaaacctgaaggcctttcctaatcgcttccaaaatgttcaactcttggaaatgaagctgtgtgtgtcctcttatttgccaattttttcagcccatttcctatttaaggctgcagaggaaagcaggcaattaagaagacaggcagagaaggactatccatgtttccatcaacaaagaagcttcttaaataggccaatagttacctcatgctttccagaaatcttctgttgttcttggcgtaatgaaaatttaagaaataggctctatttgttggatatcctctattggtaactctgctattgaagtgtttatgcttctgggctcattatgacatagattctgtggatgaatattgagaaggcttgaatgaaaaatatttaggacccaacaacagacacagtgtgtggctcagatcttcacagcaatttcagtggcataataagaaacagagtccagagctttcaccattagggttagtgccctgyctagatcaagcttttcccctttctttga

SEQ ID NO: 907603 - DNA, 584 bp, Homo sapiens
ggtcttgaactcctaggctcaagtgaccccccccacttcagcctactgagtagctgggactacaggcatgtggcactgtgctcagctcaagaartattttaagttgaatgaaaacaagaacccaatgtatcaaacatgtgggatgcatctaaagaagtagtacatgtgtaatttatagaattaaacacttacattaggaaaaaagaaagatctgaaatccatgatctagatgttaagaatctagtaaaagaggattaaattaagtctcaaagtaaacaaagaaaagaaaaaagtaaagataaaagtgaaaatcaaaaaattaaaaaccagagaaaaatagagaaaatcaatgaaaccaaaaatagattatttcttaagatcaataaaattgataaacctcttcccagactaaggggcaaaaaaagaaaacacaaaattatgaatatcagaaatgaaagaaggaacatcactattaattctatagacattaaaaggataagggattattacaaaaactctatatatgtccacgtatttgataatttagatgatatgggtaagctccttgaatgacaaaaactatt

SEQ ID NO: 907604 - DNA, 671 bp, Homo sapiens
ctgccaaaagcaatctacagattcaatgcaattcccttaaaacgccatcatcattcttcacagagttagaacaaaaaattctaaaattcatatggaaccaaaaaggagcctgcatagccaaagcaagactaagcaaaaagaacaaacaaatctggaggcatcgcactatctcatttcaaactatactataaggccacagttatcaaaacagcatggtattggtataaaattaggcaaataaaccaatggaacagaatagagaacccagaagtaaattcaaatagttactgccaactgatcttcaacaaagcaaccaaaaacataaagttggggaaaggacacgtttttcaacaaatagtgctgggataattggctagccacatgaaggagaattaaatgatcttcatcccttaccttatacaaaaatcaacttaagatagattaaggacttaaacctaagagatgaaactataaaaagtctagaagataacattggaaaacccttctagacattggcttaggcaaggatttcatgaccaagaacccaaaagcaaatgcmataaaaacaaagataaatagctgaaacctaattaaactaaagagcttttgcacggcaaaaggaacagtcagcagagttgacaacccaccacacggaatgggacaaaaatctg

SEQ ID NO: 907605 - DNA, 517 bp, Homo sapiens
agtcacagtaactggaaatttcacagttaggatttcttggatttttacaatttctcactcttctmttgatgatatgactggtgaacttggatttcagatagtcccatttcccctttgcaaggtaagcctgtgatgttgttaggttattgagggatttgagttgtttttctgtatatgactatagactatcacaaggacatctctccagagtatattcctaccatgaagaaagttgcaggaagggaagcagcaagcctaaaccaaacttggaattaactgattattatataaaaataaggtcccctcttcagggtttaatacaatatattttaaataaaatggaactctgttaaccaagcctgtttcttttcttgtcatgaaaaatgttaggatagacacagaaagaggggaaaggaaacttcttaatccaaaacatttaacatgatggttgttagaaccatcatcacatgggtcagtctggaaaataattcaagtccgcagtgaagtccatttttca

SEQ ID NO: 907606 - DNA, 673 bp, Homo sapiens
accaaagaaagacacaatgagaacacttggacccagggtggggaacatyacacactggggcctgtcatggggttgggggctgggggagggatagcattaggagaaatacctaatgtaaatgacgagttaatgggtgcagcacaccaacatggcacatgtatacatatataacaaacctacacgttgtgcacatgtaccctagaacttaaagtataataataataaaaaaattgatataccttttaataaaatataaatagcaaaaaatttttttcctcccattctgtaggttgcctgttcactctgatgatagtttcttttgctgtgcagaggctctttagtttaattagatcccatttgtctattttggcttttgttgccattgcttttggtgttttagtcatgaagtccttgcccatgcctgtgtcctgaatggtattgcctaggttttcttctagggtttttatggttttaggtcttacatttaagtctttaatccatcttgagttaatttttgtacaaggtgtaaggaagggattcagttttagctttctacatatggctggccagttttcccagcaccatttattaaatagggaattcctttcctatttcttgtttttgtcaggttggtcaaagatcgtgtggttgtagatgtgtggtattatttctg

SEQ ID NO: 907607 - DNA, 669 bp, Homo sapiens
aacctgtctagcaaaaaaagaaaaagaaagaaaagaaaagttgagcattaatatgatttggctctgtgtccccacccaaatctcatgttgaattgtaattcccagtgttggagttggggcctgatggaaggtgttttgatcagggaggtggtttctaatggtttagcattatccccctagtgctgtctcgtgatagatttctcaagatatctggttgtgggaaagtgtgtagcacctccttcttcactcactctctctctctctctcctgccagccatgtggagagatgctttcttccccttcaccatctactatgattgtaagtttcctgttctatagccatgacttttgtacagcctgtggaactgtgagtcaactaaacctattttctcataaattactcagcctcaggtagttctttatagcagcgtgagactaatacaaaaaattggtaccagagaagtggggaattgctataaagataactaaaaatatggaagcagctttgtaactgggtaatgggcagaggttggaacagtttggaggacttagaagaagagaakctgagggaaagtttggaacttccgagagacttgttaaactgttgtgaccaaaattctgatagtgatatggatgatgaagtccagaatgaggtgatctcaaatgaag

SEQ ID NO: 907608 - DNA, 572 bp, Homo sapiens
aaaagtgagatacggagatgttgaataatttgtcgaagtttgcacaattagcaagctyaagagccaggatttgaacctgatgtggctctcttccactgtcagtgtctgttgcctaaataatacatacacatgctctctttcttactttaaataatcgtggcttattttaattgcaatgtttctatgtttcctgctgctgatgaaaacgaagcaaaaagataaaaagaaaaatatggcaatgaaattgtttaatttattcatttactcaaaaaatatttattatgtacctacaatgtactttgtacatttttggtgatgaaataccacgaaaaatcaataagcacaaaaacctatgtcaatttttgtaagagattaccttccagtgggcaataaataaatagataatttatattttcaggtagttgaaagttctatgaatacaaataaagtactgtaagggtattgagtataatatgtggtctgagaaggtctttctaagagatgtttaatgaagtgaggatgcaagccatgaaaatatctgcaaagaatttcttgacaaagggaagataaag

SEQ ID NO: 907609 - DNA, 626 bp, Homo sapiens
cagatggtcctgcacaatatgcagataccagacaaaaatggacagctgcagcactatagcctattttttggacatccctgaaggacagaggtgaagggaaatcttccttgtgggcagaactttgagcagttcacctggtagtgcactttgcatggaaggagaaatggccagatgtgcgattatattctgattcatgggctgtagctcatggtttggctggatggtcagggacttggaagaagcatttttggaaaattggtacaaagaaatttggggaagaagtatgtggatagacctctctgagtggtcaaaaactgtatatttgtatcccatgtgagtgctcaccaacaggtgacctcagcagaggaggattttaataatcaagggaatgggatgacctgttctgtggacaccactcaacctctatccccagccacccctgcatcacccaatgggcccatgaacaaagtggccgtggtggcagggatggaggttacacatgggctcagcaacatggactcccactcaccaaggctggcctggctatggccactgytgagtgttcaatatgccagcagcagagaccaacactgagccctccatatgacactgttcctcgggttgat

SEQ ID NO: 907610 - DNA, 618 bp, Homo sapiens
tgtatcccctcacctagccccattcctagccaagtgaatacttgaatgaattaatgcacaatttaatcatggctcaaatcaggcacaaaagcaacytcattgcttatttactggcatacttagaaataatgcattatataagtggtatgtatacgaataaggtctatctaatgcattttttcaaaaaatagctatagtacctacaatctcagtgcctatagcagatgtcacttggcaagttcaatcttagaccaaagacaaatagggaatctaatattgcatagcagtgctccattgtatggtgattatttaaatgactatgaattagcttatattaatttttatatgagcattaaagttaaagccagaaaaaaattaaattgaattaaatccccaaagctagtatatttaagaatttcctagaagtcagttagcccatttgggagatactggtatacaatatctatgcataatgttggtctttgaaagaaaaattctttgtttccttcaggaaatctatagattctgctcaacagaagtttcatggggtctacagatagggctcctggggttccattaatcccagaaattatggatatacaactcagtaaaggcaag

SEQ ID NO: 907611 - DNA, 624 bp, Homo sapiens
ttagagccaggaaaggagttggaatagggttggggccagtgggatgcatccctttcccagccgccrgactccttggagctctagttccacctgaaaatttgatcattgtcttgctgcgtgcaggcaggataagatccatgaagagcagcaaggatccaaatttccatcattctcaggaagtcagaatccggggtctgactccttgcccgtaggtaaggcatggcaggtttatttcccaggatgatctctgaagtatcaggaaaaaagtccagtgcaggactaaagctttaaagagagtgaaagccactgccagttttaaaacaaaaaagaaactgattgtcatgagcagtcacgggtttatgggtttattgatttctgctgaagatctgggtgacctgggttcatttgcagatttgaagacgatactctcattttgtcctacttttatacaagagataataacatttgcaaatggctttgactcacctgatctgaatatcctcaaatatctggcaagatgaaatcatgcctttttcatctaaagaaaaagtagagggagtgaaggattgtgttttaagtacagagtttacctaaaaaccaatcacctccccttcaacttatttc

SEQ ID NO: 907612 - DNA, 560 bp, Homo sapiens
tttttaaaaattctaacttatctcctttgttttggctcaaaaatttatatttatccctcatctcaagcaatgtagatttttgtttttgtttttgtttttgagacagaatctcactctgttaccctggctggagtgcaatggcatggtctcggctcactgcaacctccacttcctgggttcaagcaattctcctgtctcagccttctgagtagctgggactacaggtgcatgccaccacacccggctaattttttttttgtatttttagtagagacagggtttcactatgaaggccaggctggtcttgaactcctgaccttgtgatccacccacctcggcctaccaaaatgctgggattataggcgtgagccaccgagcatggccacaatgtagaatattttaagatcttagattcctgcttttcaagctggtctgcagacagcaacatcagcatcacatacatgcttacacaaatctcaggccccataccagaactgctaaattagaatctasattttacaaggttttctagtcattcatttaacattatattttgagaa

SEQ ID NO: 907613 - DNA, 587 bp, Homo sapiens
cctgacaaaaacaagcagtgggaaaaggaatccctatttaacaaatggtgctgggaaaagtggctagccatctgcagaaaattgaaactggactccttccttataccttatacaaaaatgaactcaagrtggatcaaagacttaaatgtaaaacccaaaactataaaaaccctagaaaaaaatctaggcaataccactcaggacatagacatggggaaagattttatgatgaaatcaccaaaagcaattgcaacaaaagcaaaaattgacaaatggaatctaagtaaactaaagagcttctgcaaagcaaaagaaactatcaacagaacgaacagataatctacagaatgagagaatatttttgtaatttgtccatcagacaaaggtctaatatccagaatctacaaggagcttaagcaaatttacaagaaaaaaataaacaacctcattaaaaagtgggcaaaggacatgaacagacacttttcaaaggaagacataaatgtggccaacaaacacatgaaaaaaattttaacatcactggtcattagagaaatgctaatcaaaaccacagtaagataccatttcac

SEQ ID NO: 907614 - DNA, 640 bp, Homo sapiens
gtcatgagttaagtcatggaygtgagtaagccaaagccatgagggagagaaaggatacctggggtgagggagagaaactacttcatgaaggaaagagaagcagatcaaggggaggccaacacttggagagtggtattaatagtcacatgggtggtgagcactagagtaaagatccacacattcctgccctggggcccagttccagtctctgaaaggcccccatgccctgctccgcagaatggttcctactctcagctttcatgggatgcctaaccctcatgaggcctcatcaaaacctcattaccagagtgagcctaaaagagtctctgctccatgggaccccagggacagtgttcccatgtccagataaagaaacagattcagagagggaaagtaacttgcccaaattgccacagctaattggcagagcagaaacttgaactaaaattagtgtgattctttttttgagacaggctcttgctctgttgctcaggctggagtgcagtgatgcaatcatagctcactgtagcctcaaactcctggactccagatatcctccctcctcagcctcccaagcagctgagaccacaggcgtgtgccaccacacaggctaatattttcttttagagatgagttctca

SEQ ID NO: 907615 - DNA, 578 bp, Homo sapiens
tcccttctcatgggggattacccagagaggtgtrtgtacatgtggcttgcaacacatgcaatcccatcagacatatgtgcccatataagggaatatggaacagaagaaatgactttttaggaatgtgaggactggaatgggagaacaaagaaatactgctgccttcctccaatatctgttaggcttttctttttttttcttaaagtatggaaagtttattcttttcaccataaaagcctctggcagtgataagcatgatttccaagattgtacgtagcaccagaagagctccaactaacgtgctcagcttcgatttcagcattgctcattagagcaacaatgcaaaccagctgtcccctggtgtttggcgaagaaagatccaattaactggccgtcatccacctggttccagatttagccctctccttatgagtctgtaagagcagccagtttgcatgaatttttgtcattaaattcaagccagggggtgaggagccatggggggtggggatggatattctctggactgctgtggagggttaaaataaagtgtaaggccctctagagtttggacatct

SEQ ID NO: 907616 - DNA, 621 bp, Homo sapiens
ttcaaagagtgaagtagatctatagacactgatgtggaaagacattatggttatgttgttaaaagtaaacaaagttttataacagtttatagtatgatyccattttgagaaagttctgtatatcaaactgtaattcaaatatacatcaaactctataatgcagtgattatttctgtaagagagatgagtttactggagacaagcattctgcttggcgtatattgctgtattgattgagttttataagcatgtgttagctttatgataaaaaactcaacacatctgaaattatgtcaaaatatggtgtgttctcatttcattaaatgaataaatgaataagctatggttcatacatagaaatattccttccatatacagagaagaggtctctgaaaaaccagtgaaaactgggcatgttgagttgttgtatcagttagggtttttgggtgaaagtaacaaagacccaccttaaatgagaaacaggaatgtattgggagaaaactgaaggaagggttgagcaacctggcctcagggagaactggactgaggtcagttgctgggatctcagtataggagcccacagaccatcactatgtgtctagggtagtaggaaccatggga

SEQ ID NO: 907617 - DNA, 642 bp, Homo sapiens
aagttctgtgtctctgattaggatccaaattcccaggaaagagaatctgcttggccaagattggatatttccaccctgttaacccaggtgggtgaagaggactgtgatgtgtggcccgccatgggacttcacgcatcagaaagggagttccactgaggaaagggctgctgtttccttaaggtgagatgagatgtagagcagataaaaatcaacagatttctactgtaattactattttgagcaatggcataaagttgtactgaatcagccatattctcttgcctgttgtgacccatagcaagtatttttgacagaaaaatgaatagagaatagtaataatatcatccatgacaaaatgatataactgatgtcaattagctcatgagacttagagccacgacattggcatcattaatgttgtgcttgaactgatctagttaatcatccatggataatatgccccactcacatgctccctggtggtccctgctccccacaggtctagcggaacagggcagtgctctaacactggtgtcaagctggtgagaggctacctcccagggtttccttctgaccatttaatgtcaggcagtgctcaggagtatgaaaraaatcaggcaattttcacagctataaagtaat

SEQ ID NO: 907618 - DNA, 637 bp, Homo sapiens
atagcaaaattaggctggtttaggaaggatttaatttaaatataaggagatttctcagggacagtactcaaatagtagagtaggttaaggaaggaaaatatagaattggtttctctagaacatgcagaaattacctttagttagcaatttttgcatacctttacctacatttcataatgttgcagccttcttcacctttttagacatgcttaactttttctgttgttttggatataaaaaataaataatatataaatatgaagttgttaaaaaaacaaaattataatagacatgtacatttttaatgtttgtaatataaccctttggtaagtgactaagtgactaatatgaaatttattttcaaattagtatttcttgctaatatgaaatttcatgctaatatgaaatttattttcctattttccatttccctagagatggaaaaaattaataattccgatgtataggaatataagaggcagcttctctattctttagacttttcttttgtcttttagctttgtactgctgggtgatgcttttcttgccttggccaagtagagccaagtaaaatttgcygaatcccctaaattatttacaagtcataggttgtagaggttcttactttttatagaag

SEQ ID NO: 907619 - DNA, 644 bp, Homo sapiens
atatggagtgacttgaattggtcctgtcctgttttcagttaatctgggtaactggagtaaccaaccaaaatgtatttgctaagtcaaagagatcaacatakagagtccatgtttactaatgcctttacagaggtcccctgttatccactccatatggaatacaccccaagacccccagtgggtgcctgaaactacgaatagcatcaaatcctttatgcactatgttttttgtttgttttattaagtcaagaatagttacctttcttcttttttttttattatactttttaagttttagggtacatgtgcaaattgtgcaggttagttacatatgtatacatgtgccatgctgctgcgctgcacccacccactaactcgtcatctagcattaggtatatctcccagtgctatccctcccacctcccccgaccccaccacagtccccagagtgtgatattccccttcctgtgtccatgtgatctcattgttcaattcccacctatgagtgagaatatgcggtgtttggttttttgttcttgtgatagtttactgagaatgatgatttccaatttcatccatggcccaacaaaggacgtgaactcctcattttttatggctgcatagtattccgtggtgtatatgtg

SEQ ID NO: 907620 - DNA, 644 bp, Homo sapiens
atatggagtgacttgaattggtcctgtcctgttttcagttaatctgggtaactggagtaaccaaccaaaatgtatttgctaagtcaaagagatcaacatagagagtccatgtttactaaygcctttacagaggtcccctgttatccactccatatggaatacaccccaagacccccagtgggtgcctgaaactacgaatagcatcaaatcctttatgcactatgttttttgtttgttttattaagtcaagaatagttacctttcttcttttttttttattatactttttaagttttagggtacatgtgcaaattgtgcaggttagttacatatgtatacatgtgccatgctgctgcgctgcacccacccactaactcgtcatctagcattaggtatatctcccagtgctatccctcccacctcccccgaccccaccacagtccccagagtgtgatattccccttcctgtgtccatgtgatctcattgttcaattcccacctatgagtgagaatatgcggtgtttggttttttgttcttgtgatagtttactgagaatgatgatttccaatttcatccatggcccaacaaaggacgtgaactcctcattttttatggctgcatagtattccgtggtgtatatgtg

SEQ ID NO: 907621 - DNA, 647 bp, Homo sapiens
acagtggaaaagtactgagtatacgggcataccctggagatagtgtaggtttggtttagactactgcagtgcaggtttggtttagactactgcaatgaagtgaatatcccaataaagcaagtcagacaatttttgtagtttcccagtgcatataaaagttattatgtattcactatgccatagtttattaatgtgtaatagcattatgtctaaaaatgtatacatgcgtatttttaaaatattgtttaaaaaactgacacagagacatgagcatgtgctattggaaaatagcaccaatgtaggcttgccacaaaaaccttcaatttgtaaaaaacacaatatcttcaaagcacaataaagcaaagcataataaagcaaagcacaataaaatgagatgtgcttgtactgtcagggtggaggcaatttcaagtttccctctctcacccagtaataaggtctcctcaggggctcccaaggaaggccgtggccagcagaaagctccagatacaaagccttctgaacccggctcttaggttaggaatgcaaatatgtgtaaaaggaagggcaaccagggacacccgagtccttgactgcaacttccttctgagactacaamgcattggctgaatcctttggggtgggaaggg

SEQ ID NO: 907622 - DNA, 603 bp, Homo sapiens
tgaatacctgtgataataattagaggaaaatgatttgattacttcatttaaaatagtcccctaaatttgaaaaaaaaaaaagaaaaaataactgaaacraaaacttagttctgtttcaagtcacttttggcaatatagtgtattagaaaggtgaactactcactgccttatattatctttatatcagagttggatattaccttccttaaaagagtaaactgataaaattgctttaaaatctaattatcatttactaaatgtgagtcataaaatccaagattgtatttagagcaatattggatcaagtggaaacatagactccaatacaatttaaaaaaccagccacaagggtggaatttttactaaaccttgactcatttacataaatatttacacagctgtcgtcctggcccagcttttaagacaagttccttagtagagtttttatactgtcctgatatggagttgcatagctgacatttatgatatcccaccctgtatctcttttatataatgagcttataaaacagccctagagaaaagcatgcataaaagtgaggccagaaaaatgttgtcccctctttatttaaccctggagtcagg

SEQ ID NO: 907623 - DNA, 603 bp, Homo sapiens
tgaatacctgtgataataattagaggaaaatgatttgattacttcatttaaaatagtcccctaaatttgaaaaaaaaaaaagaaaaaataactgaaacgaaaacttagttctgtttcaagtcacytttggcaatatagtgtattagaaaggtgaactactcactgccttatattatctttatatcagagttggatattaccttccttaaaagagtaaactgataaaattgctttaaaatctaattatcatttactaaatgtgagtcataaaatccaagattgtatttagagcaatattggatcaagtggaaacatagactccaatacaatttaaaaaaccagccacaagggtggaatttttactaaaccttgactcatttacataaatatttacacagctgtcgtcctggcccagcttttaagacaagttccttagtagagtttttatactgtcctgatatggagttgcatagctgacatttatgatatcccaccctgtatctcttttatataatgagcttataaaacagccctagagaaaagcatgcataaaagtgaggccagaaaaatgttgtcccctctttatttaaccctggagtcagg

SEQ ID NO: 907624 - DNA, 408 bp, Homo sapiens
tactctctaccctatattctgctcagtatagagcttaaggagataactatcacagctttaggttttttttaattgtgttaatgttgratcaaaacttttctttaggtgtgcatataaaagggaataagaaagggaaccaactatgttgatagaggaataattcttcaaatgaatgttacattaagaaattgtcaatgaaacactgctgttaataatataaaaggttttatgtgttagattcctctgaatataactttcacattttgtcctcttttgtgctaatagaacattctagtatgccagtagaaaaaaatatcactttagaaaggccttctaatgtaaatctcacatgccagttcacaacatctggggatttgaatgcagtaaatgtgacttggaaaaaagatg

SEQ ID NO: 907625 - DNA, 598 bp, Homo sapiens
actgcttaaatgcttaatgacataagagaaggccatatgaagatggaggcagagattggagtagcatagctttaagccaaggaacttttgatgctaccagaagttataagaggcaagaaagaatttacccccggagatttcagaaggagagctgccctgctaacaacaagattttggacttttggtttccaggactatgtaaggaaaggtatatgagtgagaagcagctagcatatcccatctgaaacatcttgtcaaaattcgtttccaatatggcttggcatggcactgctactgatccttccaacatccccaggaggaatggtctagacttgaaaacactcagttgtgttccacacagaatgtccagcaaaagatttaaaactagacttctgccaccatggcacattttatagagacagaaacaaacaaaccaaaattattggcaaaaataaagcttccaagaatrcccatcacaaaacagagcttcttttagaagccaaagcaggcattcaacaggagctaaagtttttccgtttttaatctaagcccaagccactgggactccctaaacctcagccccaaatcctccaaagaa

SEQ ID NO: 907626 - DNA, 620 bp, Homo sapiens
tctctttatcctcctaccaccctttttctctgggccacctataggccaggactttccttacttcgagaaataggcaggagggcagaggtgcccctagctgccaacatcttacaattctctgcatggtagccattccctaccgctgttttcttggccaattactctccagattctctaaagtaggaaacaaaggacagttgctttcaagaaggaagggactgagcaactctatctcctgcagtgtgtcggctggccgtatggcttgtgttcataaataagcctgtcctccctcctaagttggtctcatcttagccaggtggttcacggtgtttcagaagacacagcacgtattacaaagggtccatcatccaggagtttgcaaaatgctgagatccgtactgcctcctactcccctgtcaaagttctttttcttcgatttttttttttttttttgccacaacaacagcgacaataacaatgacaacaraaacaattggcataagaatagcaaacccaaagagaatcacagcataaaaccctttccatagcaacggcatttctgagccagggatttacaactagtccaggagtgagcaagactggtcagaggaatgcagtat

SEQ ID NO: 907627 - DNA, 609 bp, Homo sapiens
tgaaggagtttgttagagttaattaaaaattcattctttatcttgtactttgttttttatcaaactatatttatatattattcyaagcataacaaagggtaaatattaataatgtgattaaggaataaacagatgtttcaatttagactctattttgaattaatcagtcttgaactgagaagattttaatgttaattgagttttttcaaaacctcatgtccgtgcaagattgattttttaaaaatcctgttttggctttggtttattgtcgtattaatctgaataacacatataatcatagaatattattatttggcaatagcattttgcaatttaataaatattccttgaattacttcagtatttaatacagacagataaaaagtggaagctggtatggaaaaacagcttcacgtttttaaagtttctgtgttgcaagtggatagaatacttgcagtaacgaaatattcatatcaaatcaaccctcaattataaaattggcttaaaatactattaaaattgggacttctatctatggagcaatttgattaaatggctggaacactattaaaaagtaaggctcctcaaatagaaaaatatcagtggggc

SEQ ID NO: 907628 - DNA, 635 bp, Homo sapiens
atacattacactaaaatctcaataatagagaaaaaacattactcaataaaaatgggcaaatgatttgaatgacacttcagcagagaaaaaaattagatgggaaataaacacatgcaaataggctcaacattattagtcattagatatttgccaataaaattatgatgtgatactacatgtctattagaatagcttaaaaaaaacaaaaggcagaagcccaccaatactaagggctagcaaacatgcaagcatgcagaggagctggaactctgacacattgcttttgagaatgcaaaatgttatagttgttttggaaagcagtttggcaaatgacatttttatagaattagaagaaaaattctaaattcatatggaaccaagaaagaacccaaacatacaaaataatcttaagaaaaaagaaccaagccaaagatatcacactacctaacttcaaattatactacaaggctgcagtaaccataacagcatgatactggcaccaagaaagacacatagaacaatggaacagaacagagagcccagaaataaggccacacacctacaaccatctggtctttcacaaagctgacaaaagcaatggggaaacgactccycatttaataaatgatgctggg

SEQ ID NO: 907629 - DNA, 515 bp, Homo sapiens
aactgatacaaatttaaatggaattgcaaaggagctagaagagccaaactattttcaaaaatataaacaaagttgagtaaattttactataatatttcaaaatatgttagaaaatgatagtgaccaagacatgaagtactggtgtaattacggctatatagatcagtggaacagattacaaagaacttcagaattaacctcttacatatacagtcaattgagttttctccaagatgccaaagcaattcaatgaggaaagaataattttcaacaagtagagataaaaaaatagataaccatatgaaaacgatccaaagaaagttaaacttgattatcacaccagttaacaagcaaaaattggcttgaaatgaattacagacttaaatgtaagatgtctagaagaaaattgtgttgcaagctgactgtgcagattgcaaagatytctaaaatagaatttttttaaaagcttaaactataaaagaaactgatcaataaattggactattccatcaaaa

SEQ ID NO: 907630 - DNA, 455 bp, Homo sapiens
tcatgagatctgatggtttaaaagtggtggttacccstgcgcacatgctctctctctctcctgctgccttgtgaagaaggtacctgcttccccttcaccttccaccataattgtaagtttcctgaggcctccccagccatgaggaactgtgagtcatttagacctcttttgtttataaattacccagtctcaggtgatatcttttagcagtgtgaaaataaacaatacagagaattggtactggcagagtgaggtactgctataaagacaacctgaaaatgtgaaggcaactttgaaactgggtaacaggcagaggttggaacagtttggagggcttagaagataggaagatgtgggaaagtttgaaacttcctagagacttgttgaatggttttgaccaaaatgctgatagtcgtattgacaatgaagtccaggctgagatggtctcagatgga

SEQ ID NO: 907631 - DNA, 617 bp, Homo sapiens
gttaaatccttcttccttggcaatacwcattgtttcagtgactggctttctgtgtggcaagcagcaggacctagactgaacccctgtgctttggtagcaacaggaattgcactaaatctgtagcttgctttgattaagatggtcattttaacaatattgactgttccaatctgaacatggaatttttcttttttggtgggtgtgtccttttcaatttttctcatcggtgttttgtagttttcattgtagaggtcttttatctccttggttaaatttatttctaggtactttatttttttgtagctattaaaaatgggattgcttttttgatttcttcagctagtttgttattggtatatagacttgctattaattcttatatgttgattttatattctgcaactttaccaaattcactgatcagttccaagaattctgtggtgaagtctttaggtttttctctatataagattatgtcatctgcaaagagggacaatttgattttctcttttccaattttgctgtattgtattgctttctcttgcttaactgccctggctaggaattccagtacagtgttgaataagagtagtgaaaatgggcgttcttgtctggtt

SEQ ID NO: 907632 - DNA, 626 bp, Homo sapiens
atttgctttactatattgtaagttatgtgtgtccttatatatatcagattaacagtatgcttgcttgcttggctgcagtgctaacctctgaaaacatgtaytcagcctgcatccataatatggtagtggcaaggtattaacagaaccaggtataggtgaaatgttttctgaattttcctcttgtttcctctcaagattgtgatccagcttccctcatctaatttatttgctccactcattcatatggatgagaaatctttatttattttttaagcctatacatggctgattatttgtaaacttaaagaaactgtcccagaaactcttctgctcagtgtaagggtcagataacagctatgaaaacattactgactgcaaaaaaagtacatgtttcctgcccaagagaaagagcatagtggccccaattcaatctcctaatacagctattagaaaaagaagaatgagttttctgctcagaaaatattctttcttctcaatagctcactccatggctaactgtccactttgtacagcaaaagttagttctgtccaagtatttcaatttggcagaacagactttaaggccaaaataatttagtaaaaaattcactaatcttccatttcat

SEQ ID NO: 907633 - DNA, 607 bp, Homo sapiens
ccccagcccttgggattttttagtctatagcttgactttttattttcttaaraatgtctttgaggaggagaaagtttgaattctgataaagtcaaacttaccaatttttaaatgattaatcctattttatgtttgtccctctctgagaaattattgtctacctccatggtatgaaagatattcttttgtaagttttcaaaagtttttggttaccttttatattcatatatataagccatattgaattaatttttataaatgatccaaactagtaattgaaatacattgtttcactttttaatataactgtcaaattattataacaagatttttgaaaacttttctcattaaatttactcagaaccattaccagaattcaatgatggcatacatgtgcatctatttctagactttatttgatttcatggtctatgtgtctcttcttacaccaaatgtccttataaatctagctttatagtaagccttgaaatcagatagtgcatcagctaaaggctgtagcattggtcaatttgaatgcttcctttctatctttagcttttaaaatggcttccttcctttagcatcatatcatattgaatggagcatc

SEQ ID NO: 907634 - DNA, 577 bp, Homo sapiens
acagctaagctgtttgcttatgttcaccaaaactgatagcctatttcgtgattgtgtaygctaagagttgcttgtaagaattccactgcagaattattacttatggtcatcatttctgaatgggtgaagctgaaagacttgcattattatcctgaacagacaagaaatggtatgtgacatagacaaaatagctggcttttctaggtctctgttaatgaaatagaaataagatcagttcttcttttttctggctccatgtttatctcttgcaaccagcaactagcccttttagataaggaggttttcgtttcagcatttactgaggccagtaagtgactctgtcctgacatggatgttaggctttgtctgtccatggctagaaaacttagcaggtccatggtagagaaaatagaatgtgtccaagtcaatctgatgcagtctaatttcttctagcttctttaagaaactctatgtcatgattaacccttggaaaaatatgcaaaggtatgaattcactgagagaaataagcattgaactactatgaaagaaaatctgtgaccatgtcagcttccttac

SEQ ID NO: 907635 - DNA, 632 bp, Homo sapiens
accaaagcagaaagcaaactaagttttctgtattaaaattttctggagcacagcattgtttaaccctagggactgccaagggttatacctgaaaactaaacgacaggccctcggtgcttatcattatctggaaaagaatgaggatcaaccccttctgttgaatgtctggggtattgtaagctacataaacttcctgaagaggaaacaggaaaaataaagagaataaaaggaaactaactacatttcctttcctttccctttaaacctttcttttctttccattctgtcacctggaatttcacacctggctggtgcactcctggacaagtctttgatctttatctctcaaagccgactcacataaaaatgtgctgaagcatggggatcacggctgtccacacagcatgtgctgctctatttcctttgttttcttggccctaaatgccacacttcccaaggccctggacactcatccccaggttacatagagtcttcattaaatgaactctgggatcatgaaaagctctagaagtaccaccgacttccacagagcccggaaaaaccaccttaagtatagaaccatgactatacctaggacagggataaacrcagacccttcatacctgaggttt

SEQ ID NO: 907636 - DNA, 717 bp, Homo sapiens
aatgatagggaaaggttcggggagctagatggccattccgatttactgaagcagaaaaagaaaggcttccaagtcttcttctagtcaattggactggtgcttcagaggcagcacctaagtcaggctctgagtacatacataaaaggcacttgaggccaggtacagaggctcatgcctataatcccagcactttgggaggcctaggtgggcagatcacttgagaccaggagttcgagaccagcctggccaacatggtgaaaccccgtttctactaaaaatacaaaaattagccaggcatggcagtgagtgcctgtaatcccagttactctggaggctgaggcaggagaactgcttgaactcaggaggtggagtttgcagtaagccgagatcataccactgtactccagcctgggcgactttgggaggctgaggtgggcaggtcacttgaggtcaggagttcaagaccagcctggccaacatggtgaaaccccaactctactaaaaatacaaaaattggcgaggtatggtggtgtgcacctgtgatctcagctactcaggaggctgaggcaggagaattgcttgaacccgggaggcrgaggttgcactgagctgagatcatgccattgcactccagcctgggcagcaagagcgagactccgtctcaaaaaataaataaataaataaagcacttgaaagaagtgtatgtgtgtctatggg

SEQ ID NO: 907637 - DNA, 632 bp, Homo sapiens
tatgaatcttgagtgtgctacactttctatgctggcacttgaccttcatggcttatggccattgacttttagctgctctgccctctgagatgttcaagattttgccctagctttgataatcaggtccttaggttattctccaccctccaggtcctttatccaggcttattcagatttttcagcccaatttcagtccttccaggtctttcctatagggttgattgttgtccctcatctttaggagcaccacaggagttgcagaattactcttccctaaccccttactcccagctctatatgactaccaatgaccatagtttgaaacagaatagacagaggtccaatcctttctattatcaggttcccaaattaaaagccattgtgaggcagttttccctctccatcataggatttattccagggagagatgatagaataaatcaccctggtactgtgtcttttctcttgtaatctaaattcttttgtccatctgcagctcagaggatcttttgtagagtcttggggcaggaagaaaacattttttttacttgtttgtccatttggaggctaaggatgtcacacttagctgcggactgtctcttctgcaatacrtgttcatccatttgggtgtc

SEQ ID NO: 907638 - DNA, 542 bp, Homo sapiens
tgaataagtaacagggcagatttgaaggggaagaaagaggagagggcaagaaggaggagaaagaaaaggaagagaaggaggagagctaatattgctttagctcctccatacacaaggctctgtgctaagcgctccaaatacctatctcatttaaacctcatggggccagtacttataatcagtatattacagataaggaaactgagcatcagtaacttactccaagtcacatagtcacatagcttggaagtgggtttcatatcttagaattcaaatccgagtctgtctattcccagagcccttgaacttatccattataggtatttaagaccaaataagaaggtggcaggaaccttttttaaggttggactctgaaagttagctaggacttcagcagatgaaggcagaagggacattttagctggcagcaacgtcygcgtgaagtcagagagttggggcgcatgggtggaaagagctgcttagccaggaggcagagtggctccttgtttataacacaacctttgacgttttaagtttctatg

SEQ ID NO: 907639 - DNA, 625 bp, Homo sapiens
actgcctggattctgagagcaagcatccccaaagaactaagaggaagctgcatcatttrtattacgtccttgttctggaggctggaaatctgcagggtactggcatggtcaggttctggtgagagctctcttcctggcttgttgaaggctgtcatcaccctgcttaccaaacctcttctttgtacatgcacagagagagggagtgagtcttagatttttgccacaggtctaggtaaaacactgcagagagagaagaaactttctttcagcttacagttacgttttctttcctttaagctttcatcaacacctttcttatagcttttaaggcttccacaaatccatccttccttggcccttttggcttgacaggcactggctttggggctcttccagcttctgtctgctgcccaatctcggtgctaatgccacgtattttaagtttttgttttggcagcaccccatatccaactatcaaaatctcttctggttattgtcactgcataacaaaccactccaaagcttagtgagtgaaaacaacagtcatttgttttgcttttaaatctgcaatttggggagggcttggcagggatagcttgtctctgttccatgtggtgtcaacggg

SEQ ID NO: 907640 - DNA, 606 bp, Homo sapiens
ccgaatatctgagacaggtctcaggtaatttaraaagcttaccttgccagggttgaggacacgcacccgtgacacagcctcctcaggaggtcctgacgacttgtgctgaaggtgatcagagcacagtttggttttatacattttagggagacatgagacatcaatcaacatatgtaaaaaaaaccttgatttggtctggaaaggcgggacaactggaagcaaaagctggaagacttgaagcagggatgggacttccaagtcataggtagagaagagacaaatggttgcattcttttgagtttctaattagcctttccaaaggaagcaaacagatgtgaatttatcttagtgagcagaggggtgactttgagtagaatgagaggcatgttagccctaagcagttcccagcttgacttttccctttagcttaatgatttgagagctccaagacttgttttctcttcacattactttcagaatttttcttgatctctagttttcttgtttatggtattgttcttcttactgcttaaacaatggttagatggtagttcatgataagggaacaaacattaaaaaaaataatgccctgtatccaatagtaaa

SEQ ID NO: 907641 - DNA, 566 bp, Homo sapiens
ataggatcagtgtaccccaaacctcagcatcatgcaatgtacccatgtaacaaatcttcatttgtactccctgaatctaaaataaaagttgaaattataaaaaattaaataaatatataaataaataaataatatctcagtgataataatatttactttatcaggttattcacctaaaagttctggcattgggatgggtgtggtggctcacacctgtaatcccagcactttgggaggccaaggcgggcagatcacttgaggtcaggagtttgagaccagcctggccaacatggtgaaaccccatctctactaaaaatacaaacattagccaggcatggtgacagccgcctgtaatcccaactactcaggaggctgaggcaggagaatcacttgaacccaggaggcagaggttgcagtgagctgagatagcaccactgcactccagcctgggtgacagagtgagccttcmtttcaaaaaaaaaaaaaaaaaaagttctggcctgacaaagaggtcactcagcacatattcatttcctctcttcaaagagaatcaccaaaatgtaact

SEQ ID NO: 907642 - DNA, 629 bp, Homo sapiens
gagttgcttttttcttgctgctctccaaattctctgtttgtctttgtctttcaacagtttagacacaatgtatctcrgtaggggtctctttgggttcttgctacttggatttcattgagtttcttggatatttatactcatggcttttatcagatttgaaaagttttcagtcattattttttcaaatactctatgtggccctttctcttttccttttgaactcttataatgagtgtgtttgtctgcttgaagatgttccatgggtcccttggtctctgttcaattttctttagtctttctgttctcagactcaataattttcattgttgtgtgtttaggtttcctgattctttattccacctgctccaatctgtctctgagttcctctagtgaattttttatttcagtttttgtacctttcagctccagaaagtttcccaaaagggaggaaagagaaaaattgaagtggatggggagaaggaaaagggccccagccttttaaatcccctagaagtcacttcaatccaagagaaagtggcttagaacaatgagaggaagtgtaacaccattagctgccaccattttgtctgcttttgtgtgatcagaagcagcaatcagtgatcagtgca

SEQ ID NO: 907643 - DNA, 538 bp, Homo sapiens
ccaaggaattgctaggtccaacacaagtaaatctctgtaaatttgacttttagcaagtagcacactatacaatctaataatgacagggtgttgttttttggatgttcttcttctgtaaatttactagagagggaaggaatgaaaagagggctcttgtctcccatgactttatacatgcagtagtacagtagagttgcaggatcaatcattgaggactattagaggcagaaggctctgggtgtgttgtcccagttctgccctgccatgtgatgtcaccttgtttttctccctgctgtgtcaaatcactcaacctatttctaccccaagagcagaattaggtgattttctgttgagccaaatgtagcgggacttggaacctagaaaatgtttctctttttcacctgcctgctttaaacagacctcaaatgaaatgaatctcaaaaacaacctggtctctagaaatagcagcctctggaagaacttagtgtgtaatttttgtcatttgtaatcagaaccaagygtccaatgcagatctcac

SEQ ID NO: 907644 - DNA, 655 bp, Homo sapiens
acttgactgtattaagggatatccagatagctcataaagcattatttctgggtgtattagtccagtctcatgttgctaataaagacatattcgagactgggtaayttataaagaaaagatgtttaatggtctcatagtttcacatggctggggaggcttcacaatcgtgatggaagatgaaggaagagcaaagccatgtcttacatggtggcagacaggagagagcttgtccaaggggactcccatttatgaaaccatcagatcttgtgagacttattcactactacaagaacagtatgggggaaactgcccccatgattcaattatctctacctgtccctgcccttgaaatgtggggattattacaattcaaggtgagatttgggtggggacacagccaaaccctatcagtgggtatgcctgtgagggtatttctggaagacattggcatttgagtaagtgagctaagtaaggaagatccacttcacccattgtgggcagcaccatccaatcggctgaggaccagattggaacaaaaagaggaaagaggaattagttatccctacctctctctttctccctctctctcctggagctgagacgcccaccctctcctggcctgagagatcaaaatttcacattttccagacttcag

SEQ ID NO: 907645 - DNA, 656 bp, Homo sapiens
tagcatgagagttaaaattcctgggggaagcccacaaggttctcactgggaaaattagagacaaatgtccaagtactacggaagggggagaaagaaaggtacccattttgaaatataccaagagtgttctgttttctgaaacaaaggcctcccctgaagcaaaaactacagatgttcctgaagttataatgaggttatatcccaatagacctatcataaattgaaaatatcataatatgcctaacctacaaagcttgatagcttagcctagcttaccttaaacattctcagaacactcacattagcctactgttgggcaaaattatctaagacaaagactattttataataaagtttttaatatctcatgtaacttattgaatacagtactgaaagtgaaaaatagaatggttgtatgggtacttaatgcagtttctactgaatgcatattgatttcacaccatcataaagtaaaaaaaaattgtaagtcaaaccatcataagttggtatattagtctgttttcaygctgttgataaagagatacctgacaccgggtaatttatacaggaaaaatagtttaatggacttacagttccatgtggctggggaagcctcacaattatggtggaaggcaagaaagatcaactcacatctt

SEQ ID NO: 907646 - DNA, 571 bp, Homo sapiens
aggtacagcttcctgagggacgcagctcaagagaaggaacacttgcttgctgaactgttaygtagagcaacttctagagcatacatggagactttctaggaggttttttgaaaacaacatggtaccaaattccttgtaattataaaaaatcacaaaatgacagcatcctgggaagcaaagtctatcaaatggcaaaggccaaatctcagaaatgccaacagttccataacatttgttttcagacattgttagctcatggatcggctctatcggaaatgcctgttgcagcaacatgcacgtggtgtgctctcagtaaatgtgaatggagagaaagactaaaatgcattgctaacctacggcggtttctgcctctgtggaacgtacatcgtggttcatgggagagaggcttcttttaggaatcgagtcacctctacatgccaatgaattctaaatgatatggtcttggttgatattctgaacctgacagttccagagaggtttttggtgaatggaatgtaaaggaactctctctggggaaatttattgcaatgtgcttccttctgcccattgt

SEQ ID NO: 907647 - DNA, 634 bp, Homo sapiens
ctcttcgtatcctggacttcacagatagcagtttggatacctctaggggggtccaatatccttattttgtgcatggggtaactaaggcccagggaggagatgggatttattagaagtcaaacagggaaataagggaggagttggggttctccagggactttcttggccttctaggcttccttctggtaacctgtattagatcccatgtcaaccctatgtaggcacagtcttgccctaggttctgtagccagtaaatgctgtttttattaaggaaaacatcagtggggatttaggaagccctgggtcagtagctccaggaaatgagcaccaagccagcctggccacttgcccccttggccctggtgctgtggctcctctccctgtacttggaacctgggcccaattccattcctccttttcctgagccttgcctttataaaatctcttggaaggggccctactacttgttaatgtatacttaactttcttctcctattccccatccaaccagggcctggcctgccctgagcctggcccaggtatgagaatgtgtacctgctcctaggccccctgaccccaaattactgcttgaatctctactcacctgcctycaaccatgctgaccatgttcagc

SEQ ID NO: 907648 - DNA, 557 bp, Homo sapiens
tgccagtctgtgtcttttaattggggtatttagcccatttacacttaaggttaataytgttatgtgtgaatttgatcctgtcattatgatgttagttggttattttgcccgttaatttatgcagtttcttcatagcatcgatggtctttacaatttggcatgtttttgatgtggctggtattggttgtttctttccatgtttagtgcttccttcaggagctcttgtaaggcaggtctggtggtgacaaaatctccgcatttgcttgtctgtaaaggtttttatttctccttcacttatgaagcttagtttggctggatatgaagttctgggttgaaaattgtcttctttaagattgttgaatattggtccccactctcttctgacttgtagagtttctgccaagagatccactgttagtctgatgggcttccctttgtgggtaacctgacctttctctctggctgcccttaacattttttccttcatttcaaccttggtgaatctgacaattatgtgtcttgggttactcttctcgaggagtatctttgtggtgttc

SEQ ID NO: 907649 - DNA, 625 bp, Homo sapiens
aggatggtctcgatttcctgacctggtgatccgcccgcccaaaccttccaaagttgaatcagtgtattctttttcycatagtcacataacaagaacatgacggaggtgattagggaaggaataaaatgactaaagaggattctggcactgttccatgcctcactttccccatttctaaacgagagtgagttattcttattctttaattagtggcaatctaaataaacaaactcctcccacacactacaattaaataggatctactccaggtaaagaagttcttaaagaagtttgtgtttttttcttatctctgaattttctagaactgatcctactgaaaaatgcagtgaaagaatagccaaccctagcaaaaacaccaaatgaccctacaggatcactgactacaaagtctggggaaacactgaggagtggttctgaccttgatcagatttactcaagagcacgtcttacagttaatagagagatggactcaaatccaaagcccagaggtttaccttggactctgacacagtagctatgtggcttgggtaactaacttcggttttctaagcttgactcctcatctggggtcttggcttttgccttgtctgcttcacagggtggc

SEQ ID NO: 907650 - DNA, 599 bp, Homo sapiens
aaattactgaaactgattttcttgaaagtttcaaaaacatgttttctcagttgtcttagctaacagtaactattatttgttctgtttttgttaaaatctaggaaaaacagatttaaaagatatgttagaaactcttgcttatgcaaggatgggcagatgagaaacaccagaaagaatcaattagaaagacaaaatattatttatttagatttgtgaaattgttgctactggaattaaatatttaattaataattaaattgtatttaataattatatttatttattaatttatgtatttattacttatatttataatcataattacataatttattatttatttatttaataataaatattattcatttaatttggtgaattattctttttcccccctccctgacataaaactaaataatataagtctacaaaatgggacagcagtagttcattgctttctctactgaaatatactatttccttasccaaattatgctactactaatctataaattttaatgaatagtaccaaaatattttagagttagaaggaatattgaggactacctgcattacattctaatctacaaatgagaaaa

SEQ ID NO: 907651 - DNA, 607 bp, Homo sapiens
catctgtctatgattagtgatattgagcatttttttcatatgcatgtcagtcacgtgtatctctatctcatctgtgcatatgcttgttggccacatgtatctcttctatcttgtctgttcatatatttggcccattttttagtgtttgtttctttgcttgttaatttgcttaagttccttatacattctggatattggacattcattggatgaacagtttgtgaatattttctcccattctgcaggttatttgtttactctgctgattgttcttttgctgtgcagaagatccttaatataattgaggccctttcactaatttttggttttgttgcaattgcttttggtgtctttgtcatgagatctttgccagggctaatgtccagaatggtatttattcagtttacttctaatgttttaatagttttaggttttacatttaagtctttcatccatcttgagtttaattttgtatatagtaaaaggaaggggtccartttcaaccttctgcatatggccaggcaattatttcagcaccatttattgaataagacatattttccacattgcttatttttgttgaattcatgaaagatcagatgtttgt

SEQ ID NO: 907652 - DNA, 621 bp, Homo sapiens
ccacaaagtcatttttcccttctaagtctctgggcctgtgatgggaggggttgctgtaaaggtccctgacatgccttgagacattttccccattgtctyggtaattagcattcagctcctcattacttatacaaatgtctgcagctggcttgaatttaaccccagaaaatgtggtcttgttttctatcaaattataagccttcaaattttccaaactttaacgctctacttcctcttgaatgctacgccacttagaaattttcaccagaattcacctaaattatctctctcaagttcaaagttccatggatctctagggtagggtcaaaatgccaccagtctctttgcatagcaagagtcaccattactccagttctcaacaagtttctcatttgcatcctagatcacctcagcctggacttgattgttcctatcagtactggcattttggtcaaagccattcaacaagtctctaggaagttctacactttaccacattttcctgtcttcttctgaggcctccaaactgttccaacagaggcagagcctgttacccagttccaaagttgctgccacattttcctgtatttttacagcagcaccccactctctgtggtacca

SEQ ID NO: 907653 - DNA, 598 bp, Homo sapiens
gtatgttttgtattagacaaatacaatcttgaaattaagaataaactgaactttctatcatgttctatattcaagaaaaggttcaagtgtgtgtgttttcacctggcagaccaactccctcttttctgtgctgtttgaattttcataaatcattttcacaatcaggaaatatattgagtgctttgtttagttgtgttgtgttttttgagacagagtctcactcactctgtcgctcatgctagagtgcagtggcacgatctcagcttgctgcaacctccgcctcccaggctcaatgaattatcttgcctcaccctccccagctgggactacaggcgcatgccaccacacttggctaaattttttttgtagttttagtagagatggagtttcagcatgttgcccagactggtctcaaattcctgacttcaagtgatctgccctcctcggtctcccaaaatgctgggattacaggtgtgaaccattatgcccagctaggaaaaatattgatattttcattgtgaccataacaaggtcaatggattaggttaggaaacagctgactraattcaatgaatgggaaatgaatggaggattttgt

SEQ ID NO: 907654 - DNA, 608 bp, Homo sapiens
tgggtaacaggcagaggctggaagagttgggaggactcagaagaagatggcaagatgagggaatatttggaacttcttaaagattggttaaacggttgtgaccaaaatgctgacagagatatgaacagtgaaggctgtgctgatgaattctcagatggaaatgcagaagttattagaaattacagtaaaggtcgcccctgttacatccctgcaaagaacttggctgcatttatgtccatgtcccagagatctatggaagtttgaacttaagagtgatggcttagggtatctaatggaataaatttataaagagcaaagcattcaagatgtggctggactgtttctaacaacctatgatcagatacagaagcaaagaaatgacttaaagttggaagcagagcataaaagttcagcctagccatgtggcacagaaagtaaaaccattttcagaaaaggaatgtaagtaggctatgtagcaaccatttgctaaggagattcgcatgactaaaagagagtcaagtgctaatatccgaaacaatgggaaaaaggctrtggaaacatttcagagatcttagagacaacacattacatcacacgcccagaggcct

SEQ ID NO: 907655 - DNA, 638 bp, Homo sapiens
atatacctcttccatatgacaaatttacctgttagtgrtgagctctaattttttattgttttggtaatatatgctattagcatatatgtatccattgcaaagtggctaaaaacaaagactgagtccaaaatacctgtgtttaagtcccaactctaccaattttgacctgtaagactttgaatgagtaacttatctatacttaaatttattcctctctaactctgtacataattttcagagaagttgctagtagtacattcacattcacataatcacttacatatcaatatgtgtgtatactataattgtgtatatgtaacatgctatataaatgtttgccattattattatacttaattacaggatatccttctcttaatattttttgatgagaaattttctctgaacttattttactttttgctttgtaaataatgtctttaaccataagtatagtttttaaaaattacaattttttagaagtaaagttaatataataatttcaataaaattcttgatatgataatctcagtatggtgaataataattattgcctgttatttcttccacattgttttagaatcattttgaaatgacttttaaatttttatataaatttgagaggggtggagcaagat

SEQ ID NO: 907656 - DNA, 653 bp, Homo sapiens
ttctcccttataagaattatctgatctgatgtccaaatttaaaatcaatacagaaggacttttcacaaatactgcctccatatggctccttttccaaatgagttctttgagctttcaacagtgaaagttcttccacattcattatatttaaagtgtctttgctatccaagattaactcttatttgtaaaaaaaaaaaaaaaaaaaaaaaggctgcctcctcatagaagccttgtccatttttattatactcaaaaggttggtcaaaaattatctgagtgagagcctggtgatgattaatgacatccctcttttgatcatatttatacaatttctctccaataggaattttctcaagcctaataccaaggagtaatttctcacgtacattaaatgcatcaggcttctttctggaacagttcttttgatcaataattaaacgcaaagtatctttcaaactcatttcacacaagtcacatattttattaggaaatgttcttgaagaaacagggtttgtacccaaattggaagtttttcttactctattaccactttctatgcttactgttttgtttttggygaacacaagctcccaaaaatacttgtcttggttttcctggctgctctctgacaggtcatcaactttccagttcct

SEQ ID NO: 907657 - DNA, 537 bp, Homo sapiens
ctaggtattattccaccatgcattagccattttycctaatgctctccctcctcccaccccaccccacaccaggccccagacgtgcattgttcgcctccctgtgtccatgggttctcattgttcagctcctaactataaccttttttagtatactattattgcaagggcatttttttatagtttcctttacaggcaaacttttaataaactatgttaacttcttaaatgtgtagtttaaatctgagaagactgaaaagatttaacatgatgttgataaatgtaaaaaatagtaatatgttcatggaggataggaggaataaatatcatgaaaatggccatgctgcccaaggcaatttataggtttaatgccatccccatcaagctaccaatgactttcttcacagaattggaaaaaaactactttaaagttcatatggaaccaaaaaaaaaaaaaaaaaaaaaaaagagcctgcattgccaagtcaatcctaagccaaaagaacaaagctggaggcatcacgctacctgacttcaaac

SEQ ID NO: 907658 - DNA, 664 bp, Homo sapiens
cagtagaaattatgagacataaacaagcaagggggggaaaagtcccatcgttaagagataaagcaatcaacacagacagcttagagatgctgggattatcacaargggacttaaaaataactaggattcctatgttgaaggtgctaatagaaaaggttgactgcatgaatgaatagatggaaatggactatttcagtcaagggaaatgggattagcattattctttgaatagttatagatcatttcttgtggctggaggcggggccttcattctatcagcacaaactgcctcaattatcagagaaaaatatgagggttcggctaggaaggaaggacgagggaatgactattaggtaggcaaccagcagcagtattgtgagggtacacatagagcatggaaatcattgctctttacaggatacttttcgaagacctaaggaaaactctgttcttatcttaccttaaccagctaggagtatgtatgtgtcatggttagggtaacctaagaaaggctggccacaaggacatcaaagccacatcactgatttccctggaccaagtcagatttcatcatacaatagatggacaggacaggcctctatagactccaggaagaaacagagcaaggaagaaaaactcaaaaagaaaattaaatcaagtagaa

SEQ ID NO: 907659 - DNA, 664 bp, Homo sapiens
cagtagaaattatgagacataaacaagcaagggggggaaaagtcccatcgttaagagataaagcaatcaacacagacagcttagagatgctgggattatcacaaagggacttaaaaataactaggattcmtatgttgaaggtgctaatagaaaaggttgactgcatgaatgaatagatggaaatggactatttcagtcaagggaaatgggattagcattattctttgaatagttatagatcatttcttgtggctggaggcggggccttcattctatcagcacaaactgcctcaattatcagagaaaaatatgagggttcggctaggaaggaaggacgagggaatgactattaggtaggcaaccagcagcagtattgtgagggtacacatagagcatggaaatcattgctctttacaggatacttttcgaagacctaaggaaaactctgttcttatcttaccttaaccagctaggagtatgtatgtgtcatggttagggtaacctaagaaaggctggccacaaggacatcaaagccacatcactgatttccctggaccaagtcagatttcatcatacaatagatggacaggacaggcctctatagactccaggaagaaacagagcaaggaagaaaaactcaaaaagaaaattaaatcaagtagaa

SEQ ID NO: 907660 - DNA, 665 bp, Homo sapiens
tgaacacctaacatggataatagaattctataatcctacaatgaaggaggtattttgtggaatttattccatatgggagagtaaaaagcagagttaacaggggttgtcatccatactcatgattgcattttgtatttttcaagggctcactagagccacaaccttcaaaatagatcaataacattactcagcaactgatatgtaggaggcacttgcaataagaatttctgagtctttatactaactctgtgaggtacatcatattatttagaccatccctacgaggaaactgagactcataattgttcaacggaatgttcaaaatcagaaagctactatattgcaaagtctgaccaggttttctgatctcaagactgatgtaatttctacttgagcaagatgcagcagaaagtgaatgggtttttggagtttggggtcagatgcacctgcttgaaaggctgtctcacttatcacctgtggatctaaggattattctcttaatccctctgaccccatcttcctcttacgtaatttaaattgagtaggtaaaaagttaattttttataaaagcttaaaaattacaccacctgtactatgtaaaaaccctattgaattcccttcctagtatattgaacatmtattatagtacagtaattaaacccata

SEQ ID NO: 907661 - DNA, 571 bp, Homo sapiens
taattccttagggttgtctcaggtaggcaaagccactagtcctattgctgccctgcttcccattagaaataatgctattgtttgtttatttttggtattattgggccttatggggttatagacagtgaccctcagaggagcaatggtgaccaacatacatttttgttttgatatacaaaacattttgtttttatgtacaagtttttgatatacaaaagaaaactactcctaaaagaataggtagctctccagggagtcaggagtagttagttgcagggtcggatttctttccaatcaaccacagacaaaagtgagcccagttagggcacaaatagaggccatatgtggtgtaacatctgttctctgctgccaaggtggatctatagaggtattttccccaaattccaatggcagtggtcagacagctcctattttccagaaggggggatacttccgtcttcctaaatcaggcagttgctttttctttgcatgtattggccttggacatggcatcatgtacgkcttccttacttagaagttggatcccatttattttagtgcagccttggga

SEQ ID NO: 907662 - DNA, 576 bp, Homo sapiens
ttgctcttaacatactttttccttcttgatttctttcttcttatttctctttctctctctgtcctttaattttgatgtgttcttaatctttaaagttgtacttgatactgaaggcatttgatgacaagtgatactgtaaaaccagctgcactctggcagggatctagaatcaggaggatgggtgggccaacccattaatcactgtctttagaccacagatagtcttcaagtaagccactgtggagatctaagtcattacacatacatagtcacacattgtagaggatatgaagcatataatgcaaattttgactatatttattttaaagtctttcccaatgattaaatggtataatcctatgtccttcacaaccaaatttgatcttcttgaccttggatgtgccatttgcacacagcatgtggatcatgctgaaaaaggagttactaaatcagaatgaacttagccaatggaatgagctcaaccaaccatttactgtaatggcaattgckgtagtcaggaagtatgtttcagggagcccatggaagattatcaattctcttcccatctttggaaat

SEQ ID NO: 907663 - DNA, 604 bp, Homo sapiens
gtatctgcagtccatgttggccactaactgctacataattactttcaatttcctccaggcatgactaggtataaacatatatttacatgattaatccacattttaaaatgacttgcacttgtgcatatacatagtactttgaataatgtatattttaaattggacctcacaaatcttgtattaaagtaggtagagagtagagtcacactttttttgatgaaatgagtcacagagaagttacatgacaaagataaaatcacagggttggaaagaactttgaaaggtcatttttcaataatctcaccttaaaagtgaccccttttcaaacaaagcataaacaatttatttgtggcttattttacccatgagctggccaatacttcctggcctagaaaaatatctccactctccccattcctgttcttaatggtcttctcttctcaatttgtaaatattctccagtaaaagacaccaggtgtggagatgggtcacttaatttcaagttctgagtgtcttgtggttttaaacaagtctcttaacctctctaagacwgattcctcatttataacagggaggaggtggattatgtaatatctaagagctt

SEQ ID NO: 907664 - DNA, 557 bp, Homo sapiens
caatggcagggatggaggttaaaagcatggtctcagcaacattcacttccactcactaagacctagttgtctatggccattgttaagtgcccaatctgtcagcagtrgagaccaccacttagccctaaatataatgccattccttaggtttattagctagttacctggtggcaggtagattacattggattatttccatcacagaaggaacagtgttttgtttacatgagaatagacccttactctgattacaaatttgcattccctgcatgcagagcttctaccaaaaaatactacctgtagacctacagaatgcttaatccaccaacctgatattctatacagcattgtttctgatcaagaaactgatatcacagcaaaagaagtgaacaatggatccatgtccatccattcattggtcttaccgtgttccttaccttcctgaaacagctgccttgttaagaggtcaaatggccttttgaagattcagttacagtgctagctaaatagcaataccttacagggttggaataaggttcttcagaaagctgcatatg

SEQ ID NO: 907665 - DNA, 770 bp, Homo sapiens
tgcttttgagaaatgtttgttcaaaattttaaagacacttacttatagactctcactaattaaacttgtttatagtgaagtgtttcagaaatgtgtgttctatttattaaaaatygcatttgattaaaaaattacttttaaaaattttttcaagcatcagcaatgatcgttgctctaaataacttgattagaatacttcaatatgtgtgactgttttatgatttttttatgtttttgtctttgatgagagggactcttgctgttacaagtgtgatagtggtatttagcttacataaaactgttttactggcttcatcctatctaattctcatttgtaacattggggcattcaaaatatcccaagtgccgacatgtgaaatacttccaaattactcgacattatttccagtagttttttttttggcctttaccatgaataaacagcaaatttcagcagtgttagagataaaaattgttgatttgtaatcttctacaggagaactgatttgtgagtagatcacacaaataaacaactttacatagcaaagtcatggattgatagagctcacctacttgcctcttactgttgttgttgttgttgttgttgttgttgttgttgttgttgtttgagacgaagaaatcttgctcttttgcccaggctggagtgcaatggcatgatcttggctcactgcaacctccgcctcccgggttcaagtgattcgcctgtctcagcctcccaagtagctgggattacagccaggaatcaccac

SEQ ID NO: 907666 - DNA, 580 bp, Homo sapiens
aaagagcttcaatcgattgtgtttactgctagacatattccaacatatagaacagattctgacacatatgttcaatgaaaaagtgacagccaatgaaagaattctttgagctattcaaggcaatcagcacaggggattcgaggatagctatgctaaactgagttctgaagaatgggtaggccttatttagatgcaaaggagatgaaagagtgtgtcaggcaaagggaaatgctatgaaaaaattaggaataagcacagtgaatatgaaggatttaaaaaggccagtgcagacatgaagggaggagagcaggcacgctgctggagacaaaggtgacaatagatcttctccaagccttttgcagacaatgctaatcaaatttttcttttttcttagagcattgaaaataactgaataaacgtaagcagtggtgtgagataatcagatttgtgcttaaaaaagatatctctgttggtaattgttcataatgaaagtggcacaaacactcatagagaaaatatagataaaaaagagaggccctartataaagcttagataattttatcatttatgtccatgaaa

SEQ ID NO: 907667 - DNA, 604 bp, Homo sapiens
tctccccaaataactgcacttccaccttccagagcaggtgccgttttctggaggcccctgtgagatacccacaagctaccctggagggatggtgcagccacgcattgccatccgtggcatcacacagactgctttatgctattaggtgcaaacctccttcagagatcagggtctgaggatgttggcattttggccattgtcagcacatttcaagacactaaggaaccccaacaggtacggtattttctgaacagtgaggggacagcctgtgagcactgaagaccagactctggtgctgaaagggaggtgatggcatggagagagggcaaggggagtgacaatgaggctcacttagctcatacaggaccccaggaagactactgaggagggctcagaggaggctgaggcccacagtgttttctctgtcactactgtctaaccctgggtgagttactgtgcttccatctgtctgagaacacacacacactttctctctctctctctctctctctcwcacacacacacacacacacacacacacaccagccatgcacagggctatgttccccataggcatggctgttcgacatggtctcacccccat

SEQ ID NO: 907668 - DNA, 627 bp, Homo sapiens
actttatcagggctataagttgtggaataatgagaggaaggtatttagcattatattaatgggaccaaaaattgcaatgaaagcaaagcrtcaccagtgagactatattagaggagaaagcaagcatgttctgaagatggtcacaaaaaattctaagatgcaaagccaaaaaaattacatattatatttcacatcccaaattatgggtcagccacatttttcaatatattcagcagaggttttgcaatttgattcagcacaaaatattatatattccactaatcaaatgtgtagaagtcatgacccaaacttgaatgaacctactcccattatcagattcttgggaagaaacaaaagtgctaaagttgaattgcttttcaggtgcaatttcaaagatgtgaaaggccaaatttcgtcttccctgatatttcatctgaacagtctcaagcaagagaggttttgtactataactcaaagatttggtctttgccatttcaatccatgcttttccaaatataacatactacaaaactatggaccttaattttaacatcatcttctaattttaaagaaatatatgtattgttttatttatttctactagcatttatcttacaaactagtgtt

SEQ ID NO: 907669 - DNA, 615 bp, Homo sapiens
aataagaaagaaacaggtatgtctgggtgagactatttctaatatctcaaagttgaattctggggcccaaacttgtacatagtgtagcccgagtaccctacattttaaagacagcaagaaaactgacaatcattaatatgtgacaccttggccaggtggggtggctcacacctgtaatctcagcactttgggaggccgaggtgggtggatcacgaggtcaggagttcaagaccatcctggccaagatggtgaaacccgtctctactaaaaatacagaaaattagatggatgtcgtaatcccagctacccaggaggctaaggcagagaattgcttgaatccaggaggcagaggatgcagtgagccgagaacgcgcaactgcactctagcctgggctacagagcaagactccttcttaaaacaaaaaaaaaaaagttacaccttttttgagtttaccaaatgggcttagaaccagaaagtttaagacaagtgcctccaaacataagaaatgttctacttttttagaggatggagtcagcagttctgactggggtgatcattccttcattcaytaatttatatgttcattaattccagaaatatgtattgatcatctc

SEQ ID NO: 907670 - DNA, 581 bp, Homo sapiens
gttttttttttcttgctaatttatctgagttccctgtagattttggatatcrgtcctttgtcagatgtatagactgtgaagactttctcccactctgtgtgttgtctacttactcactctgctgactgttatatttgctgtgcaaaagctctttagtttaattaagtccaacctatttatctttgtttttgtttttaataaaatatatactctaagtaggtttttaaaatatatttcttcacttaatattttaaggcaagacaagtatatcataccaccaaatgcattttaaagcaccactttaaatatctatatagaattatcttgtttcattttactgattccccatttttctactgtagataacactctgatgaacatctttatagacaaatacttggtaaaatttcacttctgttccagaaatgtattatgttgaaatacgtgaagacataaggcaaagcaataggcaactgtatatataatatttttaattattggtaccaaattatcttctttattatattaattttatattaatattatatgctattatgccagtacaataccaatttttatca

SEQ ID NO: 907671 - DNA, 566 bp, Homo sapiens
gcctgttcactctgatggtagtttcttttgctgtgcagaagctctttaattggatgccatttgtcaattttggcttttgttgccattgcttttggtgttttagacacgaagtccttgcccatgcctatgtcctgaatggtactgcctaggttttcttctagggtttttatggttttaggtctaacatttaagtctttaatccatcttgaattaatttttgtataaggtgtaaggaagggatccagtttcagctttctacatatggctagccagttttcccagcaccatttattgaacagggaatctttccccattgcttgtttttgtcaggtttgtcaaagatcagatggttgtagctgtgcacaggctgttctttcaggagagttttctcagtcatgattcatctaattcatacctaccgagcacttagcatgtgccaggtactggaccaagtgctgctaaacaaaagagacagggtcccccctggcsctagcagagtttcagactaatcgaggaggaagcatgaactattaatatgtaaataccaataatgatcagtaagagaa

SEQ ID NO: 907672 - DNA, 685 bp, Homo sapiens
ttgagacatctgtcctggacaactgtaatagctcctaactggccttttcctgtggtcgcaccagctctcaacccatggctggatgaacagccacagaactcccctgtttgccattgccagtagcctcagtgttctcatccttagaagtctctttcatcttggtcctaaggacaaaatggtgcctctttatgccacctattaatgccttcataccagcacagaatcctttattcacaattccaaaacagaaagagctcagaaggtgaaaaaactggggggaattatttgatgataaaacttgtcatgaggctatttataatgtttattttcctcacttagaattttcattcatatcactacaaaaatattattatctttgactatggaacacttcttcagaccccactgggggtgttatgaattatatttgatatgcatcataatatcttgctaaatctgaaaaattctgcatttgaaacacataaggcccaaagggttttagataatggttttggggactatattaatgtgcattagagtcattactctccatgttttatgtgtasttatcaatcagtgaatcctcaaattgagcacatgttatacagaaggcgacttcccaggcaatagaggcatacaataggttaaaatacttgatccttgactacaggtttgtatagccata

SEQ ID NO: 907673 - DNA, 648 bp, Homo sapiens
aggtcaagctggtcatcttgaagaacaattctctggcgatagatctgtgcctgaaaaaaaaaaaaagctgrtgactgcttttcagaatccttatgaaccaactgctacaggtgccctgttgtctgccattttgaatggaactacatatttttgtcgttgtcactggctcaacattttattttgtatttctggaaggcagattaattttctcctaagttcactggccattaagtcaaaagaatctgtgattgaggaactttctctgatacctgtacttgatttagataatatcacaggcctcaagctggagctgatgccataacgaaatggtactttgaggatattggaaagaaggtaagaaaaacatgaatcattaggggctgtatcttagcctgaaataaacttgttttgttggcccctaaggaaacatgcttcctggtcttcacacaatagtttaaaccatcccctggataagtgacttctttaaccaatagcaaatagcacaaacaatactgtacaagtttctaaagtaagtcttaagaaagacttacttagaattagttagtccagcagcttgtttttgctttctatgggcaaccacttaatataagtttagttatccagagacaattaggcagtgagaatctc

SEQ ID NO: 907674 - DNA, 599 bp, Homo sapiens
tattgcattccacaaatatatagttattatctgtatatatacatggaaacatagagccacaaaatttcctaaaaaagaaaaatccaggaccagacrtcttcagtagttaacaaatatcaaaaaaagaaaaaaaaagtatcaaactgttagcaaaaaaacttgacaataaagagatattttaaaattcagtttatgagcctagcaatgccaaaatcagataaaagcatcacaagaaaagaaaaacatggaacaatatcccttataaatacgtatgcaaaaatccttgggaaaacattagcagatcaaatcaaacaacatatacgagctatacactatgaccaagcaggatttatcttcacccactagattttaagtaggcataatatagcaaaaaattatttttaacaaatttatgatatctcagagtaacatcagcaaaatggtagagtaggcaataccaatctctccttcatccccagaagaagcaacaaataagcatgaatcgttagaaacaactttgacaaaattctaaaaaacagtcaaatgtttgtgtcaatcaagtgaatgttaaattaagaaaaggcaagttgaaattgaca

SEQ ID NO: 907675 - DNA, 707 bp, Homo sapiens
tcttcctcattctctctttgccattccacgtaagatgtgccttgctcttccttgccttctgccatgattatgagscctccccaaccatgtggaactgtaagtccaattaaacctctttcttttgtaaattgcctagtcttgagtatgtcattatctgcattgtgaaaacagactaatacaggaaattggtaccagtagagtggggcactgctgaaaagataaccgaaaatgtggaagcaactttggaactgggtaagaggcagaggatggaacagttcggagggctcagaagaagacagggaaatatgggaaagtttggaacttcctagagacttgttcagtggctttgaccaaaagcctgttagtaatatgaataaagtccaggcggaggtagtctcaaatggagatgaggaactttttgggaactggagcaaaggtgactcttgttatgttttagcaaagagattggcacaattttgcccctgccctagagatttgtggaactttcaacttgagaaagatggtttagggtatctggtggaagaaatttcttagcagcaaagcattcaagagttgtcttgggtgctgttaaaggcatttagttttataagagaagcagagcataaaagttcagaaaatttgcagactgtcaatgtgatagaaaagaaaaacccattttctgaggagaaattcaagctggctgcaga

SEQ ID NO: 907676 - DNA, 573 bp, Homo sapiens
aagagggccaccatcctccagaccccagaatggtagatccactgacagcttgcaccgtgcacctggtaaagccacagacacttaatgccagactgtgaaagcagccaggagggaggctgtaccctgcaaaaccacagggtttagctgcccaaaatcatgggaacccatttcttgcatcagcatgacctaaatgtgagtcatggagtcaaaagagatcattttggagctttaagatttgactgccctgctggattttggacttgcatggccctgtagcccctttattttggccagtttctcccattaggaagggttgtatttacccaatgtctgtacccccattgtatctagaaaataactagcttgattttgattttacaggctcataggcagaagagacttgccttgtctcaaataagacattggactgtggacttttgagttaatgctgacatgatttaagactttggggcactgttgggaaggcmtgattagttttgaaatgtgataacatgagatttcagaggccagaggtggaatgatatgatgtgtctctgtgtccccactcaaata

SEQ ID NO: 907677 - DNA, 581 bp, Homo sapiens
cttgaaacatcttgtgtaaagatgttctyaaagaatggaaacatgattagaacatgtaaggaacaggagccaagttaaagggtctcccatttgaaaaattgagaagaatttaagcatcaaaatagagtaactgtaccccattaaataccataagaagccatgagtccacacaaactggaaaatataaatacatacataaatacatatatacataaaaataaagaggagatggtaaagctcttccttatattagaaggctaacaaatgcagaaggaatgatggagttgttaacaaatcaccactttgcaaccaccagaggtataacataagccaaggattatcaatagaagctaaaaagtagtgagtgtactgtttcaacaaaaacaggatatttacatagtttcaaactatcttaccacaaattactcattagttacataggaaaaaattagttactttacagtagagaaatttggcagacaacacttaaagcaattgattaaattaacgagacagttatcacgaacctcctctgataactgaaaaggacacatcatttctatagaattcctactaaaaac

SEQ ID NO: 907678 - DNA, 605 bp, Homo sapiens
ctcacttccttgaaatcagagttcccccaacccaaaccccactaggattctctcctaaagcctttggcagttttgttgcctgagaaacaagaaggcccttctcagcagttcccccatcatcctatgcctagggacttggggctggaggcctgaacagccactcaggagcaagctcttcatctatcatttcctctaatcttcatagcaataaaatatcagaattgtgattcctcattaacatttgcagaaactaagcctcagggcttgaaatttgctcaagctcttatagctagtaagtggcagaattcaaatctccctgtctccaaaatccatattcttagagacaagactgcaaaagtgaccttggacaagccccttctcctgcgtgaaccttggtttcccctctgggtaatgaggctgcgggtcctcagagggctcagctatccatttccactcagatagtccaccataataaaatgtcccaactcatccttccccagcytccctgcgttactggaagcagcctgtaacctaccggaatgtaggactgcaagcttgccaagcgaggccatgttcacctggctggagaagagctcctgtttctc

SEQ ID NO: 907679 - DNA, 621 bp, Homo sapiens
tttctttttttcctcaaggaaggacttccagagttagcaaagagagacaaagaacaactcttacagccatgtgttaaagtgccttagggcacattacagagatragccattatctgtgtgtgtgtgtgtgtgtgtactgggggaaccagcccccaatatttcaatgtaggttctttctattttccctaagtgtcgactggtctgagacataaagagaaagagtacaaagagaggaattttacagctgggccgcctggggtgacatcacatatcggtaggactgtgatgtcccctgagctgtaaaaccagcaagtttttattagggatttcaaaagcggagggggtgtacgaacagggagtaggtcacaaggatcacatgcttcaaagggcaagaaaggagaacaaagttcatatgcttctgaggccagtaaagaccacaaggcaaagggcaaagcaagatcacaaggaaaaagggcaaaattagaattactgatgagggtctatgtttggctgtgcacgtactatcttgataaacatcttaaacaacagaaaacagggttcaagagcagagaaacggtctgacctcaaattcaccagggcgggatttttttccccacccta

SEQ ID NO: 907680 - DNA, 608 bp, Homo sapiens
acctcagctaatgataatgtagccagatataacataaggcaacttaaaaacacaaagaaatacagattgaggcctgctacctaatggaaagaaagacaaasaatttccaagcatttattcattattcaacatatcgagttcctacttggttaggagaacaacttttaataagactgaccttgtctctgccttcatggagcttattaggtttcgtagtctacaatcttcagggtctactatctagaggaaatcaggtaaactattggaacaggattttgccatttatattactctggccacttgagcaatttcttgcactctcaaaagaactgagccatggatgtcaccaaaataatcatgctagttgagccatggattccaacaccatgcaaagcaaaagtctctatatatttgatatattttctatgggtatatgtgtgcatgtgtgtgtatgtcatttgctcctgtttcaactgtcatctcccttctctaacttgccattccagcctttctgattgattcaaatgtcaactttatcaaatagtaaattcctatatagacttgagtttactcttaaactcccttatttgagttgtgtcaacaccaaa

SEQ ID NO: 907681 - DNA, 608 bp, Homo sapiens
acctcagctaatgataatgtagccagatataacataaggcaacttaaaaacacaaagaaatacagattgaggcctgctacctaatggaaagaaagacaaacaatttccaagcatttattcattattcaacatatcgagttcctacttggttaggagaacaacttttaataagactgaccttgtctctgccttcatggagcttattaggtttcgtagtctacaatcttcagggtctactatctagaggaaatcaggtaaactattggaacaggattttgccatttatattactctggccacttgagcaatttcttgcactctcaaaagaactgagccatggatgtcaccaaaataatcatgctagttgagccatggattccaacaccatgcaaagcaaaagtctctatatatttgatatattttctatgggtatatgtgtgcatgtgtgtgtatgtcatttgctcctgtttcaactgtcatctcccttctctaacttgccattccagcctttctgattgattcaaatgtcaactttatcaaatagtaaattcctatatagacttgagtttactcytaaactcccttatttgagttgtgtcaacaccaaa

SEQ ID NO: 907682 - DNA, 632 bp, Homo sapiens
ctattgttaactcttggaaaagcaagatttgtgggttttgttttgtttttttttttacaagaaaggaaacaataactatactgtttggctcaccacagaatacatttacacatacataagagtgtaaatactgaatagggatgtaataacaatttgttgtaaaactatgtaaggtttacaacaaattgttctgggacaattggatatacacatataagagaataaacttggacctccttcctaataccatatacaagaaaaattaagtggaaattgttcatagacctaaatataagggctaaaattataagctcttacaatcttggattaagccaaggtttctaagatataacacaaaagcacaaacaacagaagaaaaaatagataaattggattacatcaaaattttaaaagcttgtgtgcctcaagaaacaacaaaataacattattatcagataaattatttacaaatattttctcccattctataaattgctatttacagaataagacaatttacaggatgggagaaaatatttacaaataatttctctaataacggacttgtaactagaatatataaagaagtcttacaactcatacaaytcataacaaaacacaagtaatccaat

SEQ ID NO: 907683 - DNA, 569 bp, Homo sapiens
aaagagcttctgcacagcaaaagaaactaccatcagagtgaacaggcaacctacaggatgggagaaaatttttgcaatctactcacctgacaaagggctaatatccagaatctacaaagaactcaaacaaatttacaagaaaaaaacaaacaaccccatcaaaaagtgggcgaaggacatgaacagacacttctcaaaagaagacatttatgcagccaacagacacatgaaaaaatgctcatcatcactggccatcagagaaatgcaaatcaaaaccacaatgagataccatctcacaccagttagaatggcaatcattaaaaagtcaggaaacaacaggtgctggagaggatgtggagaaacaggaacacttttacactgttgatgggactgtaaactggttcaaccattgtggaagacaatgtgacgattcctcaaggatctcgaactagaaataccatttgacccagccatcccattactgggtatatacccaaaggattataaatcatgctgttataaagataaatgcacacatatttttaytgtggcactattcacaatagcaa

SEQ ID NO: 907684 - DNA, 698 bp, Homo sapiens
gcattctttattagctttgaaagtatgatgcttactgcttctgccaaaattacttggaaggattcctcaaatcctggaatgatgacttcctatatagaatcattttctttatctttactaggtatctckgtagattactttaagaacaatataaattaaattagtagcttcctgctgtgacagccagactgtggactatccttcaaaatcacaacttttcccatttctactatttaacctggtttattcattttcaggaaagcaatccacacattttcccggaagtggagggacaagggtcagtaattgtttgctttaaacatactctgatatttcaggccttcaaaacaatagcacaggttttaggaagtggatttccaagaaaacttcccatttttgcctgacatttctactactgccttctcacttatccaccattgagtttcttctggatcaaacaaccttctcgaaaaatatccagatacttgagccctaattaattctcatacttttttttttttttttgagacagagtcttgctctgttgcccaggctggagtgcattggcgtgatcttggctcaccacaacctctacttcctgggttgaagttattctcctgcctcagcctcccaagtagctgggactataggcatgcaccaccatgcccagcaaatttttgtatttttagtagacatgg

SEQ ID NO: 907685 - DNA, 591 bp, Homo sapiens
ataaaaaactaggcaagagaagttcacatttgcatagcctatcaatagtgtctgccaagatatttccattttttagtgtatcagaaaattgggcacacatgactaacgtacttttttcattttaaatagaaacgtgtgtgcatatatatatataaaatatacatatttatgtgtgtaaatatgtgtgcgtgtatatgtgtgtgtgtaaaaccaatcaacttctgctgaaaaacttctgtaaaactcatttttttttctctagtatgtttcctctgaaggcaatcttcacatctagggaatattaatggtaataataacagcattgatttattgagagttttcctatgtaacaattactatataagcttattttcattcagtatgccatttaatctatttctccagtttcaatattaatattggtacttaataaatgagtaaactgaaaataataagtttaaaatcttttttcacagctaatcagcaatacaamtgggatttgatatcagattcatgcgattccgaagaccctgaccaccaaatgcaaaaggtacatggcaatagctgattgcaatgagagaaaaacaacta

SEQ ID NO: 907686 - DNA, 635 bp, Homo sapiens
aacacactaacaaatacacaaaattgtggaaataggatttgctgctcctgagtacaatgctaaaaatattccaaagctttttctatgtgtgagtacttctaatacaggtctccatctgttcatttctctcaagagttgaaacagacaataaaacaatgcctccagccagccagcaaatgccttcactatgactctactaagggacatgcatctgagaatcatctcaattattctattacatatttgaaaatatgatttttactttatgtttgccttggaatgtatacaaagtctgtctaataagaagtggaccaattcataatttataacaagaaaatgtaaaggattaaagaaaaaaaaaaaaaaaagcccgccacaggtacatattaaactggggctaacttaatcaagattttgcaatctgccagaaaattcctcccaaatataagtagataaagccttaatttcaccactcaaattgactgcccagaccagctaactggctgcacaaaggcagcctcccttcatmtaaatttctaagttctttgacttaacaaaagtcacaactgaccagtataaaaaatagaagcaaagcttgctgacagctccctagactctacctttctagtatcttt

SEQ ID NO: 907687 - DNA, 673 bp, Homo sapiens
ataccactatacctgtaactaataaataacggtatccagccttctaattcaagtccagatgctatgtctactacaaccaattgtcccctcttcataaaccctcagaggtaccattgttctaagtaatattttcttcacacaattatcatacttaaatgtaaattactacttgagtaatcattttatcagattgttttttaatgaaacacaggcgttgaggatagaattactgatatagtttggctgtgtccccatccaaatctcatcttgaatttccacctgttgtggaagcgacaagatgggaggtaatcgaatcatggggacaggtctttcccatgctgttatcatgacagtgaataagattcacaagatttgatagttttataaaggggagtttccctacacaagctccttatttgcctgccaccatccatgtaagatgtgacttgctcctccttgcctaccaccatgatcatgaggcctcctcagccaggtagaactgtaagtccattaaactttcttttgtaaattgcccagtctcaggcatgtctttatcagcagcatgaaaayggactaatacaataaaatggtactagtagagtggggcgctgctgaaaagatacccaaaaatgtggaagcaactttggaactgagtaaaaggcagaggttgcat

SEQ ID NO: 907688 - DNA, 628 bp, Homo sapiens
tgcctggatatcaccagcagaggctacagaacagcaaatactgcagagcagcaaatattgtttcctgatccttcctcttgaagctttgtctcagagggacacctgcctgtatgaggtgtctgtcagyccctactaggaggtttctcccagttaggctacacggggttcagggaccctcttgaggaggcagtctgtttgttctcagagctcgaccgccatgctgggagaaccactgttcttttcagagctgtcagacagggacgtttaagtttgcaaaagtttctgctgccttttgttcagctatgccctgcccacagaggtggagtctatagaggcagtaggccttgctgagctgcagtgggctctgctcagtccaaacttccaggccactttgtttacctactcaagcctcagcaatgttggatgcccctccccctgccaggctgctgccttgaaggtcaatctcagactgttgagctagcagtgagcaagactccatgggtgtgggacccacagagccaggcacaggagacaatctcctggtctgccagttgctaagaccactggaaaagctcagtatttgggtgggagtgtcctgtttttccaggtgcagtctgtcatggcttcc

SEQ ID NO: 907689 - DNA, 625 bp, Homo sapiens
tccagagattgactacacaagtgyattaaatatgcgtaaaatatttataacatccatatgtacctatatgggtccaaagtgaggagaattgaaatgtctgttgatactatagcaactaaaatgaacactattttgctacattggtaacttacatgaatctcacaacataatgttatgtaaagaaatcaaacaaaaatataaatactatattactctaaataagttcaaaaacagataaatttttaatgtactcttagaagtttctaaattcagtcacttttaccctatcttgtattaaaatattctataataatttttctgtcaaaaatttattttaaaatttggttgacttttatacttaaaatatcattgccattcaccaaataccaacttttctcttcattttagaagacaatgtaaatacatgctgtttcattttaacacataaaaataaaaacctaaatattataacaattgagtaataacaaaattatagtaatattttattaaatatataaatgataaattataacacatttataatcatttaaaataattttaaatgatttttaatccattgctaaaattacttattataaagaacaattgtttcatcatttaatat

SEQ ID NO: 907690 - DNA, 584 bp, Homo sapiens
ctccctagtgattggagaatgaaaagttgkaaggaccacgagtctccaaagattatgccaagtcccacatgctagtcccacacagtcacctcctaggttcttctacatgagagacacattttttttgtatctataactgaacctacccctagctgatataaaatcaagaaaagcaaggcagtattagtgcaagagttgtttcaaagtgagccagacaagtttttgtcacaagaacagactgtgtctaggaccctgcccgctggaccagttctagtccctgggaataaaaaagctggaattagccatttcaaggctagtcctagaaagcctgcaaaactagctttttcttaaaactagcttggaaagactggacaaaaaccatgttatttctactttcaattatacaaaatctatttaaaaataaatttaaaatttattttcaactgagaatatggtttgataattagaaaacgaattgtgaagttgaaataactttggagaatatgacagacaataaggtggacttcccaacaaccagatgtcatgaagtaccgtaactgacttgagcataaagattacagaag

SEQ ID NO: 907691 - DNA, 650 bp, Homo sapiens
gaatataaaggagctattttcartaattattcaaaactaagcagttctgccttcacttcaggtcagtagagataattctcataaggtgctaagccttaggaatcaaatccatttggggtcattacacacaattgggaaaataaatacctctatggcagctccccagacctacagattgcaggtctgatcagaaggctgacagagaaatttattttttaagtagcaacactacaaaggacaagggaacgtgttcaagtgctcagtggcagatattggctatagttaacttggtagatagtggctgctccttcaccactctcctattcttatcctagtgatttacccatctgctttttacccatgggcttccaaacagcacggtaagtgttctagaaactcaattaagctagtggaatcagatggcaggaggtagatactctctgaaataggccaaacattttccacattggtcagctctacaaaactgagaaagaacttttgtttttccttctacatacagtaccaaattaatggagccttgtaatttaaattgtgttcattagaatcttctcatttaaaacttcacaaagtcaggttgcctgtggggcagagaaactgtaatgagccggcgtctgccaaagttagggcaa

SEQ ID NO: 907692 - DNA, 629 bp, Homo sapiens
  misc_feature 512: n = A,T,C or G
ttcgacaagtctctaggaaattccagactgttttcatatcttcctgtcttcatctgggcactccaaactgttccaacctctgtctgttacccagttccaatgttgcttccacatttttgggtatctttacagcagtgcccactactgctggtaccaatttactgtattagtctgttctcacactgctgtaaagaaatacctgagactgggtaatttttaaaggaaagtggtttaaattgactcatggttctgcattgccagggaggcctcagcaaacttacaatcatggcagaaggcaaaacaggcacctttttcacagggcagcaggatgaagtgagtgagtgcaagcaggggaaatggcagatgcttataaaaccatcagatctcatgagactcactcattatcatgagaacagcatgggagaaaccattgccattatccaattacttccctcaggtccctctcatgacatatgaggattatgggaactacaatttaagatgaaatttanagtggggacacagccaaaccatatcacagacttaggtgttttcttgtaggcctgagtggtgaagatataatatatgacttggaatactaaaatscactctttttttttttttttttt

SEQ ID NO: 907693 - DNA, 599 bp, Homo sapiens
tattgcggatattcttagaccctcttctggatgtgcttatgaagtttagtaccaatgcctacatgcccttgctgaagactgacagatgcctccagctgctgttgaagctgttgaacacatgcaggttgaaaggttccagtgcccaagatggtgaggataagttgtttctcttggtatcttgcttgatatagcattggtatttagagttctagagaggaaacttccgtctttttaaaacaaaaagaaaactttttatataatttagaaattatatatatttaagaaattatataattatatattaagaaattatataatttaagaaaaatatttattgagtatctcccagtggtgctggggatacagtggtgaaggagcaaccatctgttctcgtgagttgacattctagtggtttccgtgtgttggttactataatgtaatttcatttgctttttaaaaatatttatgmatgcttattgatttctagaccatttaaaatgatcactgtcttgtatatgtttaagcaggatccatttctgtttgccactctgctaaagcatgagaatggcagtaattttataattacttgtttttaaata

SEQ ID NO: 907694 - DNA, 599 bp, Homo sapiens
tattgcggatattcttagaccctcttctggatgtgcttatgaagtttagtaccaatgcctacatgcccttgctgaagactgacagatgcctccagctgctgttgaagctgttgaacacatgcaggttgaaaggttccagtgcccaagatggtgaggataagttgtttctcttggtatcttgcttgatatagcattggtatttagagttctagagaggaaacttccgtctttttaaaacaaaaagaaaactttttatataatttagaaattatatatatttaagaaattatataattatatattaagaaattatataatttaagaaaaatatttattgagtatctcccagtggtgctggggatacagtggtgaaggagcaaccatctgttctcgtgagttgacattctagtggtttccgtgtgttggttactataatgtaatttcatttgctttttaaaaatatttatgcatgcttattgatttctagaccatttaaaatgatcactgtcttgtatatrtttaagcaggatccatttctgtttgccactctgctaaagcatgagaatggcagtaattttataattacttgtttttaaata

SEQ ID NO: 907695 - DNA, 571 bp, Homo sapiens
gtgtgtgtgtgtgtgtgtgtgtgtctgtgtgtgtgtgtgtttagtttcaaaaccaccaggtaaatttgacctacattactaattactgctggcctccaaataaataagttcttgacaatatcaatagggcttacctccttgaaagaaaccaagatgtttatcaaatcaaacttttttattttataaaagatataaagtaaaaccatccctccatgggggtaaaaaaaatgaaatagtagagaaatgtacttaatctacataagttcctctatgattctgattgtttcctttccaatttctttcatgttaggaaagtctattctcctaaattttggaacagaggaaaatacaacaaaacaaaacaaatgagttgtgtgagggagagaaagagataaaggcacagaatagttaatctggaaatgtcaactgtgaggtgcctaattrggaatgttcgtatctctatacagaagcctgaattagagacatacaacacagtcttcatcatagctttattctccagcactctcattgtaaaggaagtctacaaactgaacacactgtactggagatc

SEQ ID NO: 907696 - DNA, 502 bp, Homo sapiens
gtcaatcttaggaaaatccttttttaagtaatttgacccttttctccagctgcctttaaaattttttatttcttgttgattttggatagttggataactrtatgctttggggatggtcatcttgtatagtttcttacaggagtttctgaatttcttgggtctgcatgttgacctctagcaaaattggggaaattttcctgaattaaactcttgaatatattttccaagttgtctactttttcttcttctctctcaggaatgccaataagtcataggttttgccatattacataatccaatgttcctcaaaatctttgttcagtttttaaagttatttaaaaaaaatttgtctcactggtttggttcaaaggaacagttttcttgctgtaaaagcctttctctttctttgtctagcctattgtttaggcttccaactgcattttgaaattcccgtagtgaatttttcaattccaacagttcttttttgttcttttttgtttag

SEQ ID NO: 907697 - DNA, 543 bp, Homo sapiens
ttgtccagcctatcattgatggacatttgaacggttccaagtctttgctattgtgaatagtgctgcaataaacatttgtgtgmatgcgtctttatagcagaatgatttataatcctttgggtatattgccagtagtgggattgctgggtcaaatggtatttctagttctagatccttaagaaattgccacactgtcttccacaatggttgaactaatttacactcccaacagtgtaaaagtgttcctatttctgcacatcctcttcggcatctgttgtttcctgactttttaatgatcgccattctaactggcatgagatggtgtctcactgtggttttgatttgcaattctctaatgaccagtgatgatgagctttttttcatatgttttttggtcacataaatgtcttcgttttaaaagtgtctgttcatatccttcatccactttttgatggggttgtttgtttttttcttataaatttgtttaagttctttgtagattctggatattagccttttgtcagatggatacattgcaaaaat

SEQ ID NO: 907698 - DNA, 543 bp, Homo sapiens
ttgtccagcctatcattgatggacatttgaacggttccaagtctttgctattgtgaatagtgctgcaataaacatttgtgtgaatgygtctttatagcagaatgatttataatcctttgggtatattgccagtagtgggattgctgggtcaaatggtatttctagttctagatccttaagaaattgccacactgtcttccacaatggttgaactaatttacactcccaacagtgtaaaagtgttcctatttctgcacatcctcttcggcatctgttgtttcctgactttttaatgatcgccattctaactggcatgagatggtgtctcactgtggttttgatttgcaattctctaatgaccagtgatgatgagctttttttcatatgttttttggtcacataaatgtcttcgttttaaaagtgtctgttcatatccttcatccactttttgatggggttgtttgtttttttcttataaatttgtttaagttctttgtagattctggatattagccttttgtcagatggatacattgcaaaaat

SEQ ID NO: 907699 - DNA, 584 bp, Homo sapiens
tgaatgctttgctccttagaaatttcttccatcagataccctaaatcatctctctcaagttcaaagtttcacaaatctctagggcaggggcaaaatgcctccagtctctttgctaaaccaacacaagagtcacctttgctccagttcccgacatgtttctcatctctatcggagaccaccttagcctggactttattgttaatatcattatcagcatttttgtcaaaaccattcaacaagtctctaagaggttccaaactttcccacatttttctgtcttcttctgagccctccacactgttccgacctttgcctgttacccagttccaaagtcgcttccacatttttgggtatctttttagcagcaccttacttctggtaccaatttactctattagtccattttcatgctgctgatcaagacatacttgatactaggaaatttacaaaagaaagagatttattggacttatacttccacacagstggggaggcctcacaatcatggcggaaggtgaaagacctgtctcatatggcagcaaagaagagaacagagatagtgcagggaaactcccctttttaaa

SEQ ID NO: 907700 - DNA, 584 bp, Homo sapiens
tgaatgctttgctccttagaaatttcttccatcagataccctaaatcatctctctcaagttcaaagtttcacaaatctctagggcaggggcaaaatgcctccagtctctttgctaaaccaacacaagagtcacctttgctccagttcccgacatgtttctcatctctatcggagaccaccttagcctggactttattgttaatatcattatcagcatttttgtcaaaaccattcaacaagtctctaagaggttccaaactttcccacatttttctgtcttcttctgagccctccacactgttccgacctttgcctgttacccagttccaaagtcgcttccacatttttgggtatctttttagcagcaccttacttctggtaccaatttactctattagtccattttcatgctgctgatcaagacatacttgatactaggaaatttacaaaagaaagagatttattggacttatacttccacacagctggggaggcctcacaatcatggyggaaggtgaaagacctgtctcatatggcagcaaagaagagaacagagatagtgcagggaaactcccctttttaaa

SEQ ID NO: 907701 - DNA, 592 bp, Homo sapiens
tttaaaatcaatctgttgaggtgaaagttatgttaaagtaattagcataattactatttcagtgacatggcacaattaaatctatttcattttaaaagaaaatccrttgaggcccaggaaattcttccaggcatatgtcctcagtgtgctcagaggtgcaggctgctttgctgtggtgtcacttccatctcaacctaggctttcctaattgctgcaacgggaacaagcaagtcttgaaccagaaaatacatgttccagttctgcagcacagacatcactccctatcacatcccattgccctgacatacttagatggtcctgcttaactaaaaaagggcaaaagagtactactgtcatgtggaagaagaagagagataatagcagataagcactacaagtttactagttttcaaagaaaattgcttctcccagtaataatagcaaatattgctagtgtaagtatttactttaaacctttgaaagatatgtaagtaggtagtgcagtagggagaagtcttcctcagcttgatgatgattttttgttaaatgacttccttagtgataaatgcacaacttttgatgagtgattggt

SEQ ID NO: 907702 - DNA, 598 bp, Homo sapiens
ttgcagaaatagaagagcttattctaaaattcatatggaattgcaagggayttcaaatagccaaaacaatcttgagaaggaagaataaacttacagaacttcatttgttaatttcaaaacttactacaaagctacagtaatcaaaagagtatggtattgacataaggacagacatatagaccaatgaaatagaattgagaatctttgaacaaaccaatacctgctcaattgatttttgaccagggtgccaagaaaattcaatgggaaaaagtagtctctttaagaagaggctatttggtgttgggacaatttgatactctcaagcaaaagaatgaaattgaagcatttttcatacaacatacaaaagttaagcaaaaatgaaacaaagacctaagtgtaagagctaaacctataaactcttagataaaacagaaataaacattcatgaccttggatttgaaagtcttagatatgacaccacaaacacaagcaaccaaagaaaaaataggtaaattggacttattcaaaaatggaaacatttgtacattaaaggacagtatcaagaaagtgaaaagacaacctacataatatgagaaaa

SEQ ID NO: 907703 - DNA, 637 bp, Homo sapiens
ttaatcagaatagcttattaatcattcagcaaaatatcctgtatgctcaccatttttgtataatgtatttgaggcaagaagaatggatagatttatgttaatgctgtattgaggcagtaggtgttaatgactcataacactctacaatatactattaatatatcatgcatagcaatttacatctgcatactaaggaaaatattatgtaatgcacaaaaaaatcctagacgaaattatatgacaaaataaactctcttcctatctcgtaagagtataaagaaggaacctggtaaaaggtgttccacttgttcattgtctcagggaaggatgaacgacagctagaaacatcataacaaaacttcctctcattcttgggtggggcaaaagcctgacttggtctgatgatatccccattacaccagaatcaaccgcagcaagaaagggtaatgaagacagaaaataattcaaatctgtaagaacaaaagatttactattactacaagcactaacaaatttcaaagaggatatttttaaggaaggcataagtcataaaaaaattcacagacccagaaacattataaaagctaamcattaggaaaaaaatattgaacaaaaatccccctaaggatcaaatata

SEQ ID NO: 907704 - DNA, 727 bp, Homo sapiens
atgtgatatttcattgtggttttaatctgcattttcctcagatttgtaatgctgagcattttttcatgtacctgttggccatttgtatatctgaataatgattgttaatgtcatttgttatttttaactgggttgtttctttcttgctgttgagttatttgaggttcttatatatattggatattaacctttaatcagttgtatagtttgcaaatattttctcccattctgtggttgtctcttcactttgttaatggttttctttgctgtgcacaagttttttagtttgctgctgtttgatttgtctgtttttgctttgttgtttatgctttatgtgtcatatcccaaaaattgttgcccagaccagtggcattgagatttcctctgtattttctaccagtagttttacctcttcaggtcttatatttgtctttaatccattttgagttggttgttgtatatgcaataagacaaggatctagtttcattcttctgcaaatggatatctaatcttctcagcatcatttatttgaggctatccttttctcattgtgtattcatagcactattgtcaaaaatcaattgaccagaaattcatgagttcatttctggatttcctaatagtaccatgctgttttaattaccatagctttacaaatatgctttaaaattagggagtttgatgcctccagcrttgttctttttgttcaaggttgttttgtttggg

SEQ ID NO: 907705 - DNA, 658 bp, Homo sapiens
gataccctaaatcatctctctcgagttcaaagttccccaggtccctagagcaggggcacaatgccaccagtctctttgctaaagcatagcaagagtgacctttgctccaattcctaataagttcctcatctccatctgagagcacctcagcctggacttgattatcaacatcactatcagcattttggtcaaaatcattcaacaagtctctaggaagttccaaactttcccccatcttcctgtcttctgagccctccagactattccaacctctgcccattacgcagttcaaaggttgcttccacatttttaggtacatttatagcaatgtcccacttctggtactggtttcctgtattacattacattcctgttttcactgctataaagaactatctgacatttggtaatttataaagaaaagagatttaatttactcacagttctgcatggctggtgaggcctcatgaaacttacagtcacagcagaagatgaaggggaaaagaggcacgtcttacatggtggtgagagagagagagagagagaatgagaaggagaaagaatcacacttttaaatcattatatcatgagaacagcatggggaarctgttcccaggatccaatcatctcctaccaggttcctccctcccttgatata

SEQ ID NO: 907706 - DNA, 649 bp, Homo sapiens
aacagtagttggtatgaaaaatcaagcttaagatagctcaacaatgtgagacatgagctgacgaatggtcacgtgtcctgaacgcacgagtaccctatcataatgagaagtcatagtctccttttctcagggccaccagtgccctctcccagctctatcagctgtgggccaggagtcttaaggttgaatgatcagtccattagggttctgagtccaactcaccatatcacacttggatagaaatacaagagcgggacattctttatttaggcttagtcttgacctttttttttttttttttttttgagacagtctctctttgtggcccaggctacagtgcagtggcgcaatctcggctcactgcaagctctgcctcccaggttcacgccattctcctgcctcagcctcccgagtagctgggactacaggtgtccgccaccatgcccggctaattttttgtacttttagtagagacagggtttcaccgtgttagccaggatggtctcgatctcctgacctcgtgatctgcccacctcagcctcccaaagtgctgggattacatagacttgacattttaaaacctgtatttgtgctgtyggtatgctgtaaatttgtctatgcaggagcctctgatgtgattttgtatttg

SEQ ID NO: 907707 - DNA, 635 bp, Homo sapiens
ccttatcatttctgattgtgtctatttgatkcttctctcttttcttctttgttagtctagctagtggtctattaatttttaaaaaagaaagctcctggatttgttgaatttttgaagggtttttcgtgtctctatctccttcagttctgctctgatcttggttatttcttgtcttctgctagccttggggtttgtttgctcttggttctctagttcttttagtagtaatgttaggttgttgatttgagatctttctagctttttcacatgggcatttagtgctataaattaccttcttaacactgctttagctgggtcccagagatcctggaatgttgtctttttgttctcactagtttcaaagaacttcttgatttctgcgttaatttcattatttacccaagagccatttaggagcaggttgttcaatttccatatagttgtgtgactttgagtgagcttcttaatcttgagctcttatttgattgcactgtggtctgagaaactatttgttatgatttcagttgttttgcatttgctgaggagtgttttactttcaattgtctgatcaattttaggtaagtgctatgtggtgatgagaagaatgtatagtctgttgtttttgggtggagagt

SEQ ID NO: 907708 - DNA, 669 bp, Homo sapiens
ctcggccattttggcccctcctgtattatcattttatataaaactagattctgttatctaaggttrtattgagtgtaatcataactatattagtaaaaaatattggtacatattttcttttcttatgaatcttcttcaggttttttgtatcaagggtttgatggcttcataaaatgagttggaagttggcctatttttctattctttggaagcacatgtaagattggtgttatgtcttctttaaatagtagaaagaattaatcagtaaaatcatctacacctggagattttatgagaagattattttttataacggatttgatttatttaattgatataggactatacagatgttccactccttttgagtcagttttggtaatgtgtacactatatctaagttaataaatctattggcataaagttgttaataatctcctcttatccatttgatgtacttgagatctgtagggatgcccccttatattggtcgtttgtgttaccttcctcttgctatttattaattttattaatattttcaaaaagtcaaagagaaaaccttgttgacttttctgttttattgatttcaccatttgtttttattacttttatccttctactttctttgaaattattttgctttcctttctccagattcttgagttagaa

SEQ ID NO: 907709 - DNA, 644 bp, Homo sapiens
ttgaaccaagtggagtccaagctatccagatctccttcagctctaccatcctgggaaactttgaagaagagttcctggtcaatgtcaatgggtcacctgagcctgtgaaactgaccattaggtaaggtacatttataatgaatgtagaaactaacagaagttttaacctgttgcctttttagctttttaagtagatcctgtcttggatgctgatgactatctttgttgatatgaacacatcagcataatagagtgtgttaaatttccatcagtgtttccctagtgaacatgtataagttattatagatacagatgctgtttggagatctagtttttctacaagttatagtcttataaaataaggatttagacattaaactagcttctagttactctctatgtcttaggatgtttagagaaaataagttattacagtaacacctgaataaaatcatctgggctaagctttggccattatcacagtttctctaaacttttgtcttttgttcttattttaaggaaattacttacatgatctcactattatgtctccaagcattgtaaacacattgctctgactctrtttggattcccacagcagcaggttgttaattaccatggcagtttctcttattctggtaact

SEQ ID NO: 907710 - DNA, 678 bp, Homo sapiens
tgaatgactctttactctaaatgttggtctatttctctctcagtgtaaggctttatgatcttggagagatgctgtagcttaaaataaataatagagagattctatgacttctagcttagaaggtattgtaggtagaataatggctcccagagatatctatgtcctaattcccagaacctatgaatatattaggttacatggcaaagaggaattaaggtagcagatggaattagggttgctaattaactgaatttaagatgaggagattatcctgtcttatcctagtaggcccactgtaatcacaagggtgattttaaaaatagaggaaagagacagaagaggaggtcagagtgctgcaatctgagaactcaacctggctttgaacacagaagaaggaaactttgaacacagaagaaggaatccaggaatgtgagcagcctcagaaagccaaaaaaggttaggaaatggttcccctctagagccttcagaaggaaacacagccctgccaacactgattttagcctagctagacctgcattaagtctataaaactgtaaaatattaagtatgtgttgtttgaagctactaaatttgtgataatttgttacaacagcaaaagaaaactattcrgttatcttgtttaccttcagagcaataatatttttctccatgatccat

SEQ ID NO: 907711 - DNA, 678 bp, Homo sapiens
tgaatgactctttactctaaatgttggtctatttctctctcagtgtaaggctttatgatcttggagagatgctgtagcttaaaataaataatagagagattctatgacttctagcttagaaggtattgtaggtagaataatggctcccagagatatctatgtcctaattcccagaacctatgaatatattaggttacatggcaaagaggaattaaggtagcagatggaattagggttgctaattaactgaatttaagatgaggagattatcctgtcttatcctagtaggcccactgtaatcacaagggtgattttaaaaatagaggaaagagacagaagaggaggtcagagtgctgcaatctgagaactcaacctggctttgaacacagaagaaggaaactttgaacacagaagaaggaatccaggaatgtgagcagcctcagaaagccaaaaaaggttaggaaatggttcccctctagagccttcagaaggaaacacagccctgccaacactgattttagcctagctagacctgcattaagtctataaaactgtaaaatattaagtatgtgttgtttgaagctactaaatttgtgataatttgttacaacagcaaaagaaaactattcggttatcttrtttaccttcagagcaataatatttttctccatgatccat

SEQ ID NO: 907712 - DNA, 658 bp, Homo sapiens
catttttctcagtggggtagaaagaagatgggaattttgaggatgtttgctttaatttttctgtattcttgagtttatatgtacacayatgtacatatatatgtacatatatattttatttttgagacaagatgtctgtctctgtcacccaggctggaatgcagtggcatgatcagagctcaccgcagccttgaatgcctgggctcgagtgaccttcccacctcagcctccctaaagtagccaggactgcaggcgtgcaccaccacacaccctggagtctcgttatgttgcccaggctggtcttgaactcgtggcctcaagccatcctcctgccttggctcccaaagtactggggttacaggcgtgaaccactgtttctggcctattcttgagttttctatgacacgcatctttgaaaatagaaaaagaagaattaatatttaaaagacaaatattttatatactcacacatactcattctaaaaaatttttaaaatatagaaagctccaaggaaagaaataaaagtccatctcaggttatactgtagataaatattattatatatatgtgtgtatatatagtgtattatgtgtgcatatatatttgtattctgatttttcagttgacctaatatgagtgccatcttcccatatgact

SEQ ID NO: 907713 - DNA, 653 bp, Homo sapiens
gcctctttcttttgaccaatttctctctttcggaaggttcttacttacccagtgcctgtatccccttgtatcttggaagtaactaacttttttatttatttatttatttttattttttttaaattttacaggctcataggcagaagggactatccttgtctcagatgagacttttgactatggacttgagagttaatgttataatgaggtaagattttggggactattaagaaggcacgattgtatttcaaaatgtgagaaaggagatttgggagagaacaggggctgaataatatggtttggatctgagtcccaacccaaatctcatgttgaaatgtaatccccaatgctggaagtggggcctggtgggaggtgattggatcatggtggtttcttatggtttagcgccatccctctagtgctattcttgtgacagttatcatgagatccggttgtttaaaagtgtgtagcacctccccactccatctctttctcctgctttggccatgtaagaggagyctgcttcccctttgccttctgccataattataagtttcctgaggccttctcagaaaccaagcaaatgccggaatcatacttcctgtaaagcctgtgggtctgtgagccacttaaaccttttttcttcataaaca

SEQ ID NO: 907714 - DNA, 601 bp, Homo sapiens
catgaaaaagccaggaaaatgacacttttaaaggaagatatactatcatactggtctttaagaaaaaaaaygtaaataaattttttaaaaaaggaacacaataattctccagaaacagatctcaatcaaaaagcaattaatgaaattccagaaaaagaatccaaattagattctaaagaaggatagtgagatacaagataattctgaaaaacaatacaaagaaatctgaaaaacaattcaggatatgaatgagaagtttaccaaagacatagatgtcataaaagaatcaaacagaaattctgcaactgaacaattcattgaatgaacaacataacacatttgaaagcttcaacaatagattagttcaagcagacaaaagaacctctgaacctgaagacagttcaggttcaacttttgaaataacccagccatgaaaatataaaggaaaaaaaaagaattaaaaaaagctaaacaaagccttcatggtatatggaacaccatgaagtgaccaaatatacaaattattgatatcccagaaggtaaagagatattgaaatagttaaacatatataacaaaataatagataaaaactttccacat

SEQ ID NO: 907715 - DNA, 673 bp, Homo sapiens
caggaaatcaagaccaacctgggcaatgtagtgaaaccccatctctactaaaaatacaaaaaattagccaggcttggtggtgcaygcctgtaatcccagctacttgggaggctgaggcaggagaattgcttgaacccaagaggtggaggttgctgcgagccgagattgtgccactgcactccagcctgggtgacagagtgagactctgtctcaaaaaaataataataaaataaaaataattcaaaaatatatattaagtatctataatatagaaaggattattacagcatctgggaatacaacaataacaaaagcaggaatatgattcagttccagttaatggtgaaatagcatgtattgaactagccatcatactgttaacaatgataaatctgggggaaaaaaatatttgaagctatctgaaagcgcaggagagtgaccaaaagcagacagaaactgaagaaggcttgaaagaaagtaagagattcatgtttataagttattcccccaggaaatccctcagtcagcagagggatatagagcagctagaacttaaaaagaaagctgagatctcactagtttaatgatggaaggatggattttaggctgccaaagtcatttcaactttcgagagaagacgtggtcctggaagggagggagtcacaaagtagat

SEQ ID NO: 907716 - DNA, 673 bp, Homo sapiens
caggaaatcaagaccaacctgggcaatgtagtgaaaccccatctctactaaaaatacaaaaaattagccaggcttggtggtgcatgcctgtaatcccagctacttgggargctgaggcaggagaattgcttgaacccaagaggtggaggttgctgcgagccgagattgtgccactgcactccagcctgggtgacagagtgagactctgtctcaaaaaaataataataaaataaaaataattcaaaaatatatattaagtatctataatatagaaaggattattacagcatctgggaatacaacaataacaaaagcaggaatatgattcagttccagttaatggtgaaatagcatgtattgaactagccatcatactgttaacaatgataaatctgggggaaaaaaatatttgaagctatctgaaagcgcaggagagtgaccaaaagcagacagaaactgaagaaggcttgaaagaaagtaagagattcatgtttataagttattcccccaggaaatccctcagtcagcagagggatatagagcagctagaacttaaaaagaaagctgagatctcactagtttaatgatggaaggatggattttaggctgccaaagtcatttcaactttcgagagaagacgtggtcctggaagggagggagtcacaaagtagat

SEQ ID NO: 907717 - DNA, 604 bp, Homo sapiens
gtattttattctctttgaagcaattgtgaatrggagttcactcatgatttggctctctgtttgtctgttcttggcaatagatgcagaaaacgcctttgacaaaattcaacaaccttcatgctaaaaactctcaataaattaggtattgatgggacgtatctcaaaataataagagctatctatgacaaacccacagccaatatcataattaatgggcaaaaactggaagcattccctttgaaaactggcacaaggcagggatgccctctctcaccactcctattcaacatagtgttggaagttctggccagggcaattaggcaggagaaggaaataaagggtattcaattaggaaaagaggaagtcaaattgtccctgtttgcagacgacatgattgtatatctagaaaaccccattgtctcagcccaaaatctccttaagctgataagcaacttcagcaaagtctcaggatacaaaatcaattgaaagaatattttcattgaaaagtcctgaattaactacgactggcttgtgggtaaatgaatatggtaggttttttgaattttcataggaattctacttcagaaaaggctactactgtttt

SEQ ID NO: 907718 - DNA, 610 bp, Homo sapiens
ggtcaataaatgttttatttttttatcttcttttgcagtccagaagccttttttatttaatacctattatgacatgaagcatagggaataggttccagcagcccagaccccattccactggctctcacaaagtgtgcttccctgggtggagcaggctggcgcttcgttaaacacaggtatcttattctttgccttccttctttttctaatcattttccttcatgcatttctggtgcctaatatgctcaatatgcacattaattctctggtccttaacttgtttgtttacaacaatgctaacagcgtactgggggacactgtagactttctggttttgccatggtaacatttttggggcattcccattttttaacagtgcgtattcccttgatgtctacagtatcacaattttttgtagagtcacatgtatgtggccaaaggaacaactccatgttttctttctttcctttttttttttggagwtggagtctcactctgtcacccaggctggagtgcagtggcgcaatctctgctcactgcaatctctgccttccgggttcacgccgttcttccgcctcagcctcccgagtagctgggactacaggcgccc

SEQ ID NO: 907719 - DNA, 617 bp, Homo sapiens
aaatcattttttatctgttttatttctttatctgcatgaaccatattctatcattgctcgtttatcctttcttaatatcttaatattaagggatttgcagtagatttgtsgtaatattacgaggactcagtccataaaactctgcagcattttctaaaaatgtataatattcttattaagcacatatgtatgtttttaaatcagagctttattctcttcattcttgcttcttccatttggaatatctcagggaactatgtctatagataatttaggaaaatgcctctttccttcatggacaaaatagatacacgagaaataaatgatctgatgatgactttttgttcccacataggatgtggaagtaatttcactggcccttcaggttacatcatttctccaaattacccaaaacaatatgacaacaacatgaattgcacctatgtcatagaggctaatcctctgtcagtggtcctcttgacttttgtgtccttccacttagaaggtaagtttattcttttaaaaaaattacgtttaattgacaaacaaaaattgtatatttatggtgtacaacatgttttgacatatgtacatgttgtagagtggctaaatccagt

SEQ ID NO: 907720 - DNA, 619 bp, Homo sapiens
agataatgttagattgatttctgcttccgctaatggatttgccaatcctcactcagttgaagactgattcttttctaagatggtatccttacaacaatgccttgtgacatttccagtgtttaagtgttcagcattttcaaactgctgcctgagtaatttctggctatagattcatctaattatgatgattccccaaaagggtgactttaatcaaatttattttataattagcttcttatccttaaccatatcaatgctgacatttattgaataccatcaccgagctacagattcgctagctacagtaaaagtaacctttccccagcccttctaaagtgagcctgagggattcatgtgcaatatattgggatgaaaccgagaattgctctgaaggaaggtcatagctttattgagggagccttgccctttctagctgctataggcacttggaactgtttctgagagactctgttcaaatgggctaagyatttctgagcccaggatcccagcagagccagtgttgacttaggtggtgatgaaggttctagatctgtcatcttggtggaccattagcacaaaaggtgggattggcaaggaaaagatgtggtatcccaggcta

SEQ ID NO: 907721 - DNA, 625 bp, Homo sapiens
gccaacaaatatatgaaaaagaagccgatcgtcactgatcatttgagaaatgcaaaaccacaatgtgataccatctcacgccagtcagaataatgattattaaaaagtcaagaaacaatagatgttggcraggctgtggagaaatagtaacacttttccactgttggtgggtatgtaaattagttcaaccattgtagaagacagtgtgttgattcctcaaggttctagaaccagaaataccatttgacccagcaatcccattacctgggtatatacccaaaggaatataaatccttctactataaagacacatgcacacatatggttattgcagcactatttacaatagcaaagacttggaaccaacccaaatgcccatcaatgatagactgtctaaagaaaatgtggtacatacacaccacggaatactatgcagccataataagaaatgggaccatggtcttgcagggacatggatgaaactggaagccatcatcctcagcaaactaacacagaaacagaaaaccaaacaccacgtgttctcacttataagtaggagttgaacaatgagaacacatggacacagggaggggaacaatgcataccaggggatggggagctaggg

SEQ ID NO: 907722 - DNA, 607 bp, Homo sapiens
gctctgtcctcccaatacctcttttcatcgttgcaagatggctgcaacagttttagcatctcatctagacatgacaaaatccagaggctgaaaataaactggtgttttctatgtctccagagtcctatagctgactttcctgcatgtctctcattggtcataactgagctgcctgctcatgcctagaaaaataagaaatcattatcaatttagatcactcaggatgctttccagagatgggactgggccaacctttcttaaagtctatggcactgcagaggaggataggaacttcacaaaattgaagtcatgtaaataaggaagaagggaatagctgttaagaagataatggtcttagtttgaattatgccagaggcaaatgcttaaacaatgtacagttgaccctcaaacaacaaggggtttaggagtgccaattcccccattgcaataaaagaacccatgcctaatatttaacttccccaaaacttaactaatagcctcctgttgacccgaagccttatcratgactaaacagtaagttaacacatattttgtatatcacatgtattatatactgtattcttacaataaagtaagctagagaaaa

SEQ ID NO: 907723 - DNA, 634 bp, Homo sapiens
tagagttaggtaagcacggtactttcctggaggtagcacataaaacccagaatagtcaacagtgtggttgcttcacctgttttcccaggaaattggcaatggcacctcaggtgacttaactctttatttcttcttcttgtttcaattttttaaagtatataaacacacacatgcatgcacacacagtatgtaccaggctactatgatcttcttcacattttgcttccaaaatttgaataaaaaaaaattaaatgtcaaatgtatatgttaaatgtgaggagagtttgacaaagcccaagaccttgctccaaacttttcctgttctctaattttgattcatttgagaatcagaataagtaaagcaaatacatatttaaacctcccctttattaatgagaggtcagcttttagggaatgaatgtagtttatacaatgagctccacgacgcgaactccaaggttaggcagtgcagggcctgagcagatctttcaccacaggaacaaacattttttctytctcagtaggtaaaacagggccctgtctgctgggcagctcacttccaatagggagaaaagagaggaagggccctgaacacacatgctaattctccccctttttaattcttcagtcagac

SEQ ID NO: 907724 - DNA, 604 bp, Homo sapiens
cttctaaaatttaaaatactggcttctaatttttcatgagaattattccaaagyttgtgagactgcatatcctaaggactcagttgtcaaaatttcaataaagaagtcatttaaggaaggagtatcaggggtgctttgaaattgtgtgcagactaatatgcatacaatctgggagccctgttagaagaaaaagcacacaaatttacaaatacaaatttagagccatggaagatactcattcaagtgagagtccatacagcttaaagtttattagcttcatggtaagtccaattttactaaagaatatatatttcaaaaaacttcccaggtgattcaaaggtgtgaattctataaaccatgcttttgaatttttttcttctaacttcgcatgatcaagttcagatagttgctataagtttttacacatgtatatgtatacacatggtttggacatgggagaaattattcaaaaatagttatttctggatacaaaacttgacttctcactttatgttaaatactacatctccaaatttaaataaagagctccattaaatgttatttcatgggaatgccatatgtttggtaggtaatacacattaat

SEQ ID NO: 907725 - DNA, 568 bp, Homo sapiens
aaaagaaataaaaataggcttaccctaccacatattaaattatatcatagtaataccacaaagtcttaaatataacagtgtgkttagagggaaagtattaagagatttactggcaaaaatgtataactcagaaatagacttacagacatgagaacttcttgtacttgatatgctgctgactcttatctcatgggtgaagaaacatagattaatcaataaatggcagtgggatcataagttaagttcctggaaatcaaaattttaaagtaatatttattcatttctacatagtctattaggatatatttcaaatgaattccatatttaaatctaaataataaaagcaaaagttgaaaacatgaaataattattttatatcacagacatatcaaatcatcacactgtacactttaaagttatacaattttatttgtcaattatacctcagtacagataggggaaaaaaaatctgatggaattcttaaaagaatgccgatgaaagagtgggtctcttctcagaagcagcccccaggagtgcctcactctcacaatagcccacacctagtct

SEQ ID NO: 907726 - DNA, 577 bp, Homo sapiens
ctacatgattggtggctatattgatacaccatttaataaaattagaatttgttaatataaatattacatttatgcatgatcaatatttattttccataattgttgcttaagwtccatttttataatgcaaagattcacatacaatatgtatatttttattaatgtttcctgatttttaggtgataattattgtcctcatgggtagaagaagcagctgaaggatattctcattggttgtgtattcatatgcaccacacaactttaattcctatttcaaagctatacaaatagcaaaagctgctcaagaacataccaacaaatccttaaatcgggtaatgcaccaaaaaaagacatattagtcatggttgacaggtttaaaaagaaaaagaacataaactgattatttatgcaggcagtgctgctctttctactgtaactgactactttgcaactcacaatttgattatgcatccatcggtatgttatacaactttttaggttgatatttggaaacacttgttaactctacacaaaagcaaaattaacaacttctctttttcttttattgtggtaaaac

SEQ ID NO: 907727 - DNA, 662 bp, Homo sapiens
gtggctgatctgacagattcttataggagcgtcaaccctattgcaaactgcgcatttgagggatctaggttgtgtgctctctatgagaatctaatgtctgatgatttgtggtggaacagtttcatcccaaaaccatccccccaccattcgtggaaaaactggcttccatgaaaccggtccctggtgccaaaaagattgggggcgactgaagtaggggaatgacaaggccaggtaccaaagtctttgaagttctagcaaggatgtgaagggccaccccaggttctcctctaaggtttgagaatgggggttatatatgccccaagagctagaatccagaaggtaacactgcagaaggtatttctggacaatctttctgtagggtgcacagcctcccagacccatctcgtggtgaggggcaagtgtcctaccatgggggcaggtgcatggtgcatcagatgcctcaggccatgaggtcaggtctcactaggcccccacccagaggccctcacagcattcagaaagtaagccctggctcttccatgctccctggctgcctttcaaaagcagagttgctcctcgaacctaaytattttactagagcttagagactatgagttggaaaacacattttttctacaacataagaaaatgtgctgcttcct

SEQ ID NO: 907728 - DNA, 639 bp, Homo sapiens
actagctttaagactaagatataaaaatacacatacgcacacaaacatacatctacagtaaacatacacagtgctatacataaagtatatacagcacagaatatgtacatgtacatacatatctatatctgaataaaagtatacatatatacatgtattgttgaactattccacagtttctgttttcttagtgttttatcataaataagtgttaagttttggcaaaagacctctacacaactttggagatgaccgtatatttttccttagatttattaatattacatatatataactgaatttctaatattgaactgaatttgcatttctggaatgcaagttggtcatggagtattattttttcatagtgatgatggattcgaatggctaaggttatgcttaaaattattgcactgatatttataaaatatattggtctgtaccttcatttctttgtactggcttcatctggtttaggtatcagtataatatttgcctcataaagataagttacaaaggttgtcttctcttttattgctctagagtaattttagaccattgggaatatttgtgttttaagatttggtataaatcstctttgaaactctataggtcttgctttctcatttctgtatagtt

SEQ ID NO: 907729 - DNA, 670 bp, Homo sapiens
gctcattaatttgcaaagtatgttatctatacaatagcattttatcctcatactaaacaccttctcagaaggaaaatattttgattttacaggaaactaagattcagtgcagtgttgtgatatgagtgacatgagtaacgtggtttgtatttaaaattcaaatgtacacatgtggctttgttcatcatttagaactagtttcaccttactctatataaatttgtggtgccatttaaaatgatccttatcagactaactcagcttcttttgagaaatgctcattctgtcaacgtgctgtctttcattgtctgcctgaacaagttcatgtgtaaatgtagatgacggcatgagacagggtaaaagtaaactcatgggcactccccagatgggtgagtgggggtttctgagtctaacggctctcagtgtgctcacctctcatatcgagcatgctgagagaatttaatttatttgcaccttcttgggttacacttactgtacctgcagtttctcttggtgtcttcaggctccctcccctctgctcctctccttgccagggccagaagggcatccatgctccrtctttgctcagggacccatcacttccctttatcctttctggggtattatttgaaaactactcttcaatcttcgatattttcacatgatatgt

SEQ ID NO: 907730 - DNA, 553 bp, Homo sapiens
ttcatggctcatttttttctcttatttctcttattctctcatttaaaaaattagttatatttttatttattttatttaaatttatttttaatytttgtgggcacatagtagatgtgtatatttatgtagtacataagatgctttgatacaggcatgcaatattcacatcaggataaatgaggtattcatcacctcaagcatttatcctttctttgtgttacaaacaatccaattataccctttagttatcttaaaatgtacaataaattattgttgcctgtaatcaccctattgtgctatcaaatactagatattgttcattctatctaactacatgtttgtacccattgaccatccccacatttccctcccctgctactatcctttccagcctctggtaactgtcctgctctctatctccatgagtttaattgtttaaaattttagcttccacaaataagtaagaacatgcaaagttagtctttctgtgcctggcttatttcatgtaatgacctgcatccatgttgttgcaaatgacaggatcttatttgtt

SEQ ID NO: 907731 - DNA, 584 bp, Homo sapiens
ctgaaattgttctatagaatcagtcccaatctcagcaaaatgttaatggaaactgaaaaggtaattctaagagttacataaaaatgtggaaggcagagtagccaagatagtcttacagaataatactataggatgtcaagagtttttataaagctacagtaattaagacagtataggactgacacaagaatggacaaacggaccagtggagcaaaatagggaatatattaaacagaaacaccccaacatatgtggatacttgatttaagataaaaataacacttaagagcagtggatagaagatgttttttcaataaaggatgctgggaaaaattaatcttgacctattcccattgacctatagatctatatgtaaaaggttaaaacaataaaacaataggtttgttattaaggttaaagcaaataagcttaaaacaataaagcttctagaagataagagaatgtctycatgaccttgaggtatagggaaagatttcttgggataggaaaaacattatctataaagtaaaaaattgataaatttagaacttctgtatatcaggagatatcatcaagagagtaaa

SEQ ID NO: 907732 - DNA, 641 bp, Homo sapiens
ccttctcttgcatgattttatcatctacagaagaatgctggcttcaaagtggccaaatgggttgcagttaactcagagagtgataaatcctggcaagagaagggacagtttggtccttacatatggaagagtacgcttgttgctgagaaaaattctcttactttgcctaccagggaacatgttcctcagttgccaagtagccaaagatagctgtattacttgttctctatgtaataattaacttgggaggacaggttgctttagaaggcccaggtagtccataataaatgaaaaaatcctcttttgctttattttctgtggttcctgcattccttttgggagagtgactaaaggtattccttacagaaacaaatctgggtccaaacaaatttccttacagaaacttactgcctgacagtagtttccaaatgtagactagtagaacattgtgttttatcaccatcacttaccaaggagccatggagttaagtgagccttctacttgagtagacatcactttgmtcatgtttctgtcgctatgtaaattgactactatatagtagtcatttgttgcatttaagtactgaccatgatttctttccttgactgtcttagtattgcaggaagtgtagctgagagct

SEQ ID NO: 907733 - DNA, 371 bp, Homo sapiens
ttattccagaaatacttccttgtatgtcctacattatcaattttgccctctctgtggatgatttccattggcatgcaaacatgctgttattttttctcttcttatagaacattaaacacarcgatcttgactctacttcctctacaattacttgccttttctccattcctttttttgagtgaagcttcttgaaattgttgcctgtgcttactgcattcaacccctctactttgttctctcagaaatcccttttggtcaagctttctccttatcacttcacccaaaggactcttgtgaggtcatcagggctagccactttactaaatccaatggctgtttatcaggtcccattttatgtcaactttcagcag

SEQ ID NO: 907734 - DNA, 486 bp, Homo sapiens
tcatgccttcccaacagtcccccaaagtcttaactcatttcagcattaacccaaatgtctgctgtccaaagtctcatctgaaacaaggcaagtctcttctgcttatgaccctgtaaaatccaaatcaagctagttacttcctagatacaatgggggtacagatagttgagaaaatacagctgttccaaatgggagtaattgtccaaaacaaaggggttacaggccctgtgcaagcccaaaatccagcaaggtagttaaattttaaagctccaaaatgatctcctttgactccatgtttcacatcaaggtcatgctgatgcaagaggtgggctcccacagccttgggtagttctgcccctgtggctttgcagggtataacccacctcctggctgttttcatgggctgatgtcgagtgtccgcagctttcccaggcycatggtgcaagttgtcagtgaatctacaattctggggtctggaggagtgtg

SEQ ID NO: 907735 - DNA, 600 bp, Homo sapiens
atcaataaaattgatatacctctaggtagactgatctacaaaaaaagaagaggcacaaattaccaatatctggaatgaaagaggtgatattactgcagaatctacaaacgttgraagaataataagagaatattatgaacgactttattcctgtaaatttgacaactttgataaatggtcagatttcttgatggacacaaattatcaaagctcactcaagaagaaataatctgaaaacccctattaaagtctatagtggactttaatatgttttttaaagaaattggatttatagctaaaaacctttcgtgcaaagaaaactgcatggcttaatggtgaattaattaatgttcttccaaatatttaaggaagaaataatgaatgccaatttcatataaactctttcagaaaacagaagagaaaggtaacacttctcaactcatgaggccagcattactagaatgctaagacagagacattacaggaaatctgtaggccagtgtcccttagaaacatatgcagaaatccttaataaaatattagaaaatgataaaataacaaattgaatccagcagtataaaaataaaaggttaatacctg

SEQ ID NO: 907736 - DNA, 550 bp, Homo sapiens
aatttggaacctactagagatttgttgaatggctttgacaacattgctgatagtgacatgaacaataaggtccaggctgaggtggtctcagatggagatgaggaacttgttgggaactggagcaaaagtgactctcataatgttttagcaaaaagactggcagcattttgcccctgccatagagatctgtggaactttgaacttgagacgaatgatttcaggtatctggtggaagaaatttctaagcaggaaagcattcaataggtgacttgggtactgttgaaagcgttccatattaaaagggaaacagagaataaaagtttggaaaacttgcaacctgatgatgcagtagaaaagaaaaacccatttcttgacaagaaatttaagccaactgcactaatttgcgtaagtagcaakgagcctaatgttaatccccaagaccatggggaaaatgtctccaggccatgtcagagaccttcatggaagcccctcccatcacaagcccagaggcccaggaggaaaaagtgatttcatgggccaggcccagggt

SEQ ID NO: 907737 - DNA, 484 bp, Homo sapiens
tccataaacatttactgagtactggaacttctatatgagcaaatccatctttattaaaaatgttcttccttgaaatgaatatatattactgtttaaatwgaatacatactatgattttttttctaagtatatattgtccaggatagcaagctatactgattatgtaaattaaccataatgaatccattttaaagaccaggaattctcttttttgtcctcttttatcattttaagattgttctgagatcaaagcaaaacgactcctaaattacctagacttgctttttgtccctatgtatttcagattataagaaaatacctgattccacaaaactggcatactgtgtaaaaacacaggttttaatttttaatatgtatatataattaaatgtaattatatgtgtacaatttctaaaggaataaacaaaaaagcaaagaaagtcataaaaaattggaatatttcattctactgtaaaagttcatt

SEQ ID NO: 907738 - DNA, 611 bp, Homo sapiens
aaaatgaattaggaagtgacaatttttctatattctcaaaaaatatgtagtattggtcttaattcttaaacatttggtaaaattatccagcaaaaatatgtgggcttgaagatttttgtgggtagaaaattctttaataaaaatttaattttcttataggaaaattcctatttcagttacatgcattatttgacttcccttgagacttcctctttgaaccagcaattacttaaaagtatgcagtttcggccgggcacagtggctcacacctgtaatcccagcactttgggaggccaaggcgggcggatcacgaggtcaggagatcgagaccatcctgtgaaaagtgaaaccccgtctctactaaaaaaaaaaaaaaaaacacaaaaaattagccgggcacggtggcaggcgcccgtagtcccagctactcaggaggctgaggcggaagaatggcatgaacccggaaggcagagcttgcagtgagctgagatcgtgccactgcactccagcctgggraacagagtgggactccatctcaaaaaagaaaaaaaaaaaaaacacacacacacaaaaagtatgcagtttcatttctaagtatacggagatttccc

SEQ ID NO: 907739 - DNA, 651 bp, Homo sapiens
ggggattattctggattatctggctgggcccaatgtaattacacacatctttgaaagcaaatcagggaataggacgacagggttagaaattggcattatcagaaggacttggccccatgttactggctctgaagatggtggaaggcacccatgagccaaaacaaaacaaaacaaaaacaaaacaacaacaaagtggtttctagaagctggaaaaggcaagaaagtggattctctcacatgtccacaggaaattaactcagtcctactgacatcttgatttctgtacagaaagacccatgtatggcatctgacatcctgaaatgcaagattataaatttgtgttgttccaagttacttggtgataatttattagagcaggaatagaaaactaacagaaaatgcagacaaaatttaagtaatttttttctcggtatataaaatattaagtgccgtcactaaatttttcaatcaaaaatgtgttcatttattttttaaagcttttcccaatttaattttagtacaatatttccaaaataagaagttatattatgcctaacaccaacccaattgaaatagatttcttttctgctactacatccacagatgacacatctttcagcaaatattgttwatcatatgtataatttcata

SEQ ID NO: 907740 - DNA, 520 bp, Homo sapiens
caaagccttgataaagtaatgatggtattgtctaagtgtgcttatagcaataaggggaaaaagaacttcatttgaactgcaggaattttcctacagacaattctcattaacatttaaattggaaggtcattctaacatctaggccagttctatgctcaaggaaccatggtgaaattcttaagtctgatctttagttcttctattaatgtatatgcactactctgtctttctgctctctctgtctctcttgctttctctctctccttcaatcagatgcttttcatatttcttagcatatgctcttgaaaaaaagtggccttttaatttttttaactaatttaacacagcatttttcaccaaactaattcataaatcaaagattagtccagagttgccaccttgcaaattttctggaattatgccactaatagtgatacttgataaccaatcccattcccatcatctatgtgctggttatagacaawacacagccccattttttttcattaaagacacttgt

SEQ ID NO: 907741 - DNA, 627 bp, Homo sapiens
atccctgatatgaaacccacctgagcatggtggcttagcattttattatgctgttaaatttggttaactagtattttgttaaaatttttgcatctatgttcatcagagatattggtctgtatttttcttgttttgtttttctctggtttttctcttgtttttctctggtttaatctagaagggttgtatatttccaggaatttatctatctcctctaggttttctagtttatgcacataaaggtgtttatggtaggcttgaatgctcttttgtatttctgtggtatcacttataatatctcctgttttatttctaattgagtttatttggatcttctctcttcttggttaatcttgctaatggtctatcaattttatttatcttttcaaaaaactaacttttcatttcatttatcttttgtatttttttgttttaattttatatatttctgctctgatcttggttatttcttttcttctgttgggtttcgttttggtttgttcttgtttctctagatccttgagatgtgaccttagattgtctatttttgctctgtcagactttttgatgtaggtatttaatkctataaactttttgcttagcaccacatttgctgtatcccagagg

SEQ ID NO: 907742 - DNA, 593 bp, Homo sapiens
tttgatttccaattttattccactgtagtctgagagagtagttgttataaattcaattttcttaaattagttgggactgttttgtggcctatcatatgatctttcttggagaatattcaatatgctgatgaaaagaatgtcaagccaggtgttgcggctcacacctataatcccagcactttgggaggccgaggtgggctgatcacctgagatcaggagttcgagaccagcctggccaacatgatgaaaccccatctctactaaaagtacaaaaattagctggtcgtgctggcacacacctgtattcctagctacttgggtggcagagccaggagaatcactagaacccaggaggtggaggttgcagtgagctgagatcatgtcattgcatcattgcactccagcctgggcaatagagtgagacttggaaaaaaaaaaaaaaaaagaacatatactctgcagttgttgagtagaatgttctgtaaataactattaagtacatttgttctagggcatagtttatgtccaccrttcatttgttgactttctgtcttgatgacctgtctaatactgtcagtgaaatattgaagagc

SEQ ID NO: 907743 - DNA, 596 bp, Homo sapiens
acaaaatcctccattcatttcccattcattgaattyagtcagctgtttcctaacctaatccattgaccttgttatggtcacaatgaaaatatcaatatttttcctagctgggcataatggttcacacctgtaatcccagcattttgggagaccgaggagggcagatcacttgaagtcaggaatttgagaccagtctgggcaacatgctgaaactccatctctactaaaactacaaaaaaaatttagccaagtgtggtggcatgcgcctgtagtcccagctggggagggtgaggcaagataattcattgagcctgggaggcggaggttgcagcaagctgagatcgtgccactgcactctagcatgagcgacagagtgagtgagactctgtctcaaaaaacacaacacaactaaacaaagcactcaatatatttcctgattgtgaaaatgatttatgaaaattcaaacagcacagaaaagagggagttggtctgccaggtgaaaacacacacacttgaaccttttcttgaatatagaacatgatagaaagttcagtttattcttaatttcaagattgtatttgtctaatacaaaacat

SEQ ID NO: 907744 - DNA, 553 bp, Homo sapiens
gatatggagaaagttttagtggtctagaaagaagatcaaaccagtcacaacatttccttaagccaaagcataattcagagcaaagccctatctctcctaaattctatgtaggctgagaaaggtgaggaagctacagaaaaaaaaagtttgaagctggcagaggttggctcacaaggcttaaggggggaaaaaaggcacttttgtaacatagaagtgcaaggtgaagcagcaagtcctgatgtagaagctgcagtaagtttttcagaagatcctaactataacaagatcattgatgaaggtgactctgctaaacaacagattttgaatatagatgcaacagccttctgttggaagaagatgccttctaggactttcatagctaaaaagtagaagtcaacgcctgacgtgaaaacttcaaaggacagactgacttccctgttagggtctcttgcaaaacattrctactcactgacaacacatctggtcacccaagagctctgatggagacgtataaggagattaatgttgttttaatgcctgctaacacaacatc

SEQ ID NO: 907745 - DNA, 566 bp, Homo sapiens
agagagcagaatcccaggctagatggttgcagaccgagaatctccccctagaaatcaattaatgaagtctggaactaagactgcagcaagtgaaagaaaggctaggctgggcgtgggcatggggagacttccctgatgttgagactgagtgaggggatctatggaatctgtttgttgggaggcttttagaacaggcatgagaggagtggagaatcctgcctggaggtagaggtaggatgctgcccaaccttgaagcggctgatgaggttatgccgagtcagcaactcaaaaacaatggtcctcagggcatggtcatctgctgcctggttcaaggaaaagacatcaaagcaccagagatccaggttctatggagaaacaatagattatgtggctttccagcagcagcaagggttgaagttagacttcaagaaggacttcccatgagtacaaagtcttggtaaataggaaagcaaagaaatggtraagtgtgcctctttcttcccatatatctctcagtatgggagagacaggaaggcaggagtttgctcctatactgggcaaaagca

SEQ ID NO: 907746 - DNA, 664 bp, Homo sapiens
atcaggcaagagaaagaaataaagtgtactcaaataggaagagaggaagtcaaattrtctctgtttgaggatgacatgattgtatatttcgaaaactgcatcgtctcagcccaaaatctccttaagctgataagcaagttcagcaaagtctcaggatacaaaatcaacgtgcaaaaaatcacaagtattcctgtacaccaataaaagacagagagccaaatcatgagggaactccaattcacaattgctgctaagagaataaaacacctaggaatacaacatacaagggatgtaaaggacctcttcagggagaactacaaaccactgctcaaggaaatgagaggacacaaataaatggaaaagcattccatgctcatggataagaagaaccaatatcgtcaaaatggccatactgccccaagtaatgtatagattcaatgctatccccatcaagctaccaatgactttcctcacagaattagaaaaactactttaaatttcgtatggagccaaacttttttaatgtagctacgctaatttgtatttcacttctatcatcaatctttgagacttctatttactctacaaccttgccaacaatttattatcagtcttactaattttagtcattccagtgggtatgcagtggtatccctttgaggtt

SEQ ID NO: 907747 - DNA, 665 bp, Homo sapiens
ttgtcagaaactaggattgcaaccagtgctttcattgctttccaattttttggtaaatttttctccatccctttattttgagccagtgtgtgtctttgcatgcaagatgggtctcgtgaatacagcacaccaatgggtcttgactccttatccaatttgtcagttcttgtctttcaattggggcatttagcccatttgcatttaaggttagtattgttatgtgtgaatttgatcctgttatcattatgctatttggttattttccacacgagttgatgcagtttctttgtggtgtctttatactggtctttacattggtctttatactttgatgtgtttttgcagttgctgataccagtttttccttcccatatttagtgtttctttcagaagctcttgcagggaaatcctgatggtaatgaaattcctcagcatttgcttgcctggaaaggattttatttctcctttgcttctgaagcttagtttgtctgggtatgaaattctgggttgaaaatcctattctttaagaatgtggaatattggctcccaatctcttctggcttgtagagtttctgctgagaggtctgctattagtctgatgggcttctctttgtgggtgacctggcctttctctstggctgagctttacagtttttccttcagtt

SEQ ID NO: 907748 - DNA, 623 bp, Homo sapiens
tgccaagtcatccatctgatcctccatcyagttttgtgcccttgatggagagctgttgcaatcatttggaggagaagagacactctggccttttgggttttcagcattttttcattgattctttctcattttgtgtgtttgtctagtttcagtctttgaggttgctaacacttggatggggtttttgtggacacctttttgttgttgttgttgatggtgctattgttcctatctgcttgtttgtttttctttcaatagtcaggtccctcttctgtagggctgcagcagttttctgggggttcacttcaggtcctattcatctgattcactcccatgcctggaggtgtcactcaaggaggctggagaggagcaaagatgcatgtctgctccttattctgggacctctgacttcaagggggaccaacctgatgccagtaggaccgttcatgtatagggtgtctgacaacctctgttggagggcctcatctaggtattctttctgatgccaatttatttaatgctgctctgtaacacctcactggatgtttagattcctgaattatctctgttatatgaaatagaatcaataacaaataaattcacagttgaaaagattggaggta

SEQ ID NO: 907749 - DNA, 605 bp, Homo sapiens
aaatagtgagacatcctgtttctacaaaagaaaaaaaaaaaagccctaaggaggtaaaaaatttcaaaaattcaattgcaaaacaacaaagccaagtgtgactcctggcaaaagcagcacttgacttgttcttcagctgaagaggaatggtttgttaattcttgcgtttgactttactaccgctccttctagtctgcaaaacaatgtagcagcagaaaactcctcatgttctcatatgttaaagcatgagggaaacaaagtcttgcctttggagtctgttgtcaccaaggcatagcaaaggaaagcaatgttcatgcttccagacagtgctaaatatggagttggcatcctgtagactcctgagtgatagggcacctgaggctgcctaaatcaaggttaatcttttcactctccttctcaatacatccttaaggcagtttagtggcgacacgctctacttcttttcctcttttgaggctgcctttgatgtgcatataaagccaattcccgcagttatttatcctggaccacatattgccagacacagctctgctgcttgcagaacaraagaaaacaaaaccccattgtctgttaacagaggtaaa

SEQ ID NO: 907750 - DNA, 657 bp, Homo sapiens
ggtgcgcagtaaaactgcttcacagttgaggatgtccaaattggtgttggagctggtggagcccatgttaggtaatgaaggaggatggaaggagatggaagtgtgattttgttgtygtttatttctcctctattagactctaagctctaaactttacagcagtggagaagagggtcagaagcttataagttatgtaatttgatgcttaataaatgtttgttgaatgattgaactacttcttcctttctctaaacatagagcccatgtaacctaaaaagctcttgatctactaagcttttagaaaacctaccatagttaaaggcataaaagcatgagtagtgatgctgtgtggctgatatattttgaggataaatcttctgctttgtagattttgtcaggtaaaaccctactcagtttagaaatcaacatcaaaacttttttatttaaatttgtttattctcatttaaataatctcattttaactaaaaggatattcttgatggtaaaacatgaaaacaatcacatttctttgttttaatcttccttttctttcatcctagtcatttctgtagaaacagaggctgaaatgactgggtagcattatggaggatttctggtaataataacacctacacagtgtgctgcaggaaatagcga

SEQ ID NO: 907751 - DNA, 585 bp, Homo sapiens
tttgtagccagtgagtatcaaaagccttggtagatccacagcaaagaattaaaaaaaaaaaaaaatggagggtggagccaagatggccgaataggaacagctccagtctacagctcccaacgtgagtgacgaagaagacaggtgatttctgcatttccaactgaggtaccaggctcatctcactggagagtgtcagaaagtgggtgcagggtgcaggacagtgggtgcagcgcactgagcatgagccgaagcagggcaaggcattgcctcacctgggaagtgcaaggggtcagggaattccctttcctagtcaaagaaatgagtgacagacaacacctggaaaatcaggtcactcccacactaatactgtgcttttccaacggtcttagcaaacggcacaacaggagattatatcccacgcatggctcagagggtcctatgcccatggagccttgctctttgctagcacagcagtctgagatcaaactgcaaggtggcagcgatgctgggggaggggcacctgccattgcaccraggcttgagtaggtaaacaaagcagcccagagctctaactggggggagccc

SEQ ID NO: 907752 - DNA, 615 bp, Homo sapiens
gtgcatgtgcacgtttgttacatggcagtattgagtgatgctgtagtttggggtacggatgatcccrttccccaggtcatgagcataaaactcattaggtagtttttcagcctaggcctcctccttctctcccctctctaacagttcccagtgtctatggatgccatttttatgtccatgtgtactcatagtttagctcccacttataagtgggaccatacagttttcagttttctgttcttgtgtcaatttgcttaggataatggtctccagctccatccatgttactgcataggacatgatttcattcctttttggccacatggtattccatggtgtcagtatatcatgttctctttatctaattcacgatggatacacacctaggtagattccatgtctttgctataaataataattttttaaaagcttaaaatttatttagaaggaatttgaaggaaataatttcatacgatacatattgcttttaattttaaaaatcatttattattctctatcactatatatgtatgtgtgtgtgtgtgtatatatatatatgatacattttagttccaaatcagaacacattcctttactgatttatttacactaata

SEQ ID NO: 907753 - DNA, 533 bp, Homo sapiens
ttgcagaattcaccttattgctaattatatgatgaggtgggaaatccaaatagctcctttgtgcacagactgcagattttctagaacatttagtaaaatataaaaatagtttttttttttaagtttagtttcccaatgctgatcagacaatgacctctattactgtttggaacaacaaaaaaaaaaagtctgacagcttatgagtgaagtctacaagtcactaaaaccctaaaaagagcatctcatgagaagtctataattgcactctgggaagtttaaaaactctagtgatgtttttaagaaaatagacctttttgtatatcttagatcttaccaacttggctactaattttggtctgcttgcacaccaagctagacaagcagttaattgcacttaaattgacattttgattgattcaaatggtattcctgatgaattttactatgttgtaaagaaagaagttcagaatgctcaataagaaaggcttggggaaagcttttratgtttaaattttagagttgagaaaattaag

SEQ ID NO: 907754 - DNA, 524 bp, Homo sapiens
aagtgtgtgtcacatcccctttgctctctctctctcttgctaccacaggaagaaggtctttgcttcccctttgccttccatcatgattttaagtttcttgagacctctcagtcatgctttctgttaagcctgtggaactgtgagttaaataaaactcttttcttcataaataactccatatcaggtagttcttttatagcagtgtgagaacagattaatacaaaaaattggtaccaaaagaatggggcactgctataaagatagctgaaaatatggaagcaactttggaactaggtaacaggcagaagtttgaacagtttggaggactcagaataagacgggaaaatgtaggaacatttggaacttcctagagacttgttgattattttgagcaaaatgctgatagtgatatgaamaatgaagtccaggctgaggtggtctcaaatggagaaaaggaatttattgggaagtagactaaacgtcacttttgctatgatttagcaaagagactggtggcattttac

SEQ ID NO: 907755 - DNA, 668 bp, Homo sapiens
ctatagaaattattttgttttccaactaactgtattgacagattagagaggaaattaaatattyaaattgatttcttactcgaggctaatctttccagttgtcatatttttctttttatttgtaaacttcattgaagtatagttaatattaaatgaaacacatcaattttaagagtacattttgatgtctttatatgtctgtctgtaatcatcatcccaattaagatatagtacatttcatcatgctaaaatgtttcctcctgctcctttacagtaaattataattttcatacctgacacagccaactactgatctatttttttctattccagaatttcatttcaatgaaaacatacagtatgcatttaatagtgcctgaatgcttttattaaaaatatatatctgagcctcatgcaagttgttggatgtgtcagtagattgttccttttcattcccaaatgtgttttgatatttaaagtattttttgtgaatagaatataattagatcttgtttttttaggcagtctgacaattgctgtcttttggtttgtatgtttaatccatttatatttaatgtaattattgatattgtattgcagtctatatcttagtatttcttttctgtttgccccatctattttgttcctgtttttcatcttcccttttt

SEQ ID NO: 907756 - DNA, 627 bp, Homo sapiens
caatatgcaggcaagatgaagaattgtttgtacccascaattgaggcttatggtgggatttaagtctctgaggaacaacagtgatcggagtgagactactatgtcttcattaatctcacaagtcatcctcctctgttctttaccttaaattgttgcactccagctcccattcccaggctgtttctcatttgctcccatgagttcaagctcacctttacactgatgtcttccagcaacttttctccagcccacctggctgtctaacaagcacaaaactaatcaaacactgaattcatcacctccatttttacccccacccaccactccagcctacctgttcctgcccctcttgttatagtctcaacaaatgacaggagccaagacccacctttccaacctagaaatctgagtggcaacctctatgctttcttatccctcactaccatattgaatccatcaccatgtcctgcttcttttcctgctacttatctctaaagtccatctcccctcaaagtccctgcctcatatggttaggatatttgttccctccaaatctcatgttgaaatgtgatccccagtgttggaggtgaggtctggtgggaggtgtttgggtcatgggggcagatt

SEQ ID NO: 907757 - DNA, 632 bp, Homo sapiens
agtgaacaggcaacctatccatctgacaaagggctaatattcagaatctacaaggaacttcaacaaatttacaagaaaaaaacaaacaaccctgtcaaaaagtgggcaaaggatatgaacagacacttctcaaaagaagacatttatgcagccaacaaacatattttttaaaagctcatcatcactggtcattagagaaatgcaaatcaaaactacaatgagatatcatctcatgccagttagtatggtgataattaaaaagtcaggaaacaacagatgctggagaggatgtggagaaataggaacgcttttacactgttggtgggagtataaattagttcaacattatggaagacagtgtggcaatatctcaaggatctataaccagaaataccatttgacccagcaatcccattactgggtatatacccaaagggttataaatcattctactataaatcattctactataaagacacatgcatatgtatgtttattgcagcactattcatgatagcaaagatgtggaaccaacccaagtacccatcartgatagactggataaagaaaaggtggcacatatacaccatggaatactatgcagccataaaaaagaatgagttcatgtcctt

SEQ ID NO: 907758 - DNA, 611 bp, Homo sapiens
ctttttagtcttgcccaaataagcccaagtaaatgaataaggaaagaatttctatggctatgactcaacattagccatcatttcatgggcagatacaagctgaatcatacagaaatgagtagcttgaacttacaagacatttgtcctcttgaatgaaataggaattgctgtgtaatagacagttttaaggattacccttttcccccatcatgcacagacacacatgtacactatacctatgtatgtagacacaatgctcattttaaactattagaataattcctacatcatttaaaaaatggtcatgtcaatctaaatattacatgaattgctaacagtgcctgcttttacattccctcactataagtagctagttcacacaaggtagccacccatcaccgttactacatagtttagaaacatatggtatagctttgccatgccaacttctaggtattcactttaccattctgacaaaagaagaagaaaaagcaaagaactgctttccaaactgtcatttmtgagctactgaaacatacattgttacattctggtggggagatttttgttttggtcataaattatttcgccatgttatatttcaattcaca

SEQ ID NO: 907759 - DNA, 684 bp, Homo sapiens
agttagtgaccctcctgattctctgactttctggtggaaattaaatgagctgttttctgaggctgtggatggcrgttgatggataaagcacaggagtagaagggcactggacaaaaacgtttaaacacaaatggaaaaatattccatactcacggattagaagaatatcattaaaatggtcatattgcccacaacaatctacagactcaatgctatttctatcaaattaccaaagccattttttacagaattaaaaaaaaactattttaaaatctatttggaatcaaaaaagggcccaaatagccaaagcaatactaagcaaaaagagtaaatttggatgaatcacattacctgacctcacactatactacaagcccacagtaacctaaacagcatggtactgctacaaacacagacacataatccagtagaacagaatagaggacccagaaataaagccacacacctacaagcatctgatcttcaacaaagttgacaaaaataagcaatggggaaaggactccttgtacaataagtggtgctgagatagctggctaaccatatgcagaagaaccaaactggacccctacattttacatatataaaaataaactcgagatgtattaaagacttaactgtaagtcctaaaattattaaaatcatagaagaaaacctaggaaatac

SEQ ID NO: 907760 - DNA, 573 bp, Homo sapiens
aggaaaggccactgttgccaggrgcgattctgggtagaatagggctgagttgggtgagaggggtgagtgactgagagagagaggaaatacattcccattatgttgaaggacagcccttatttatattaatgtttaattccactgacctagtttagactcactagctttatgaatttatttttggcttgttttttttcttttgggaagaggttcatcagagatgagagctgcagtaacaacatgtttcaatatgttgctccctggcgatttgaaacaccccgagaaatagctctgtattgtgtattgttgttgccttgcaaatctatagcacgtatttgacataagtgctttaatattgggaggctgtagttcagattacaacgtatcacagtgatttatattttatctttatttatttatatatttgtttatttacttcaaatggtgaaaagacaaaatcacatagtgttgaagtgccatagacactgtatgtcctgaccttataatgggaagaggaggacaaaaatctcaaatttactgagagtgaacaaagtataaataatcaaggatttt

SEQ ID NO: 907761 - DNA, 573 bp, Homo sapiens
aggaaaggccactgttgccaggggcgattctgggtagaatagggctgagttgggtgagaggggtgagtgactgagagagagaggaaatacattcccattatgttgaaggacagcccttatttatattaatgtttaattccactgacctagtttagactcactagctttatgaatttatttttggcttgttttttttcttttgggaagaggttcatcagagatgagagctgcagtaacaacatgtttcaatatgttgctccctggcgatttgaaacaccccgagaaatagctctgtattgtgtattgttgttgccttgcaaatctatagcacgtatttgacataagtgctttaatattgggaggctgtagttcagattacaacgtatcacagtgatttatattttatctttatttatttatatatttgtttatttacttcaaatggtgaaaagacaaaatcacatagtgttgaagtgccatagacacwgtatgtcctgaccttataatgggaagaggaggacaaaaatctcaaatttactgagagtgaacaaagtataaataatcaaggatttt

SEQ ID NO: 907762 - DNA, 623 bp, Homo sapiens
actaacatatgctggatgttggaagatttgtttataaagtggtgatgggaaaggtagtcttggtctaaactaatctgtctggatttcgaaagtgctttattataaaaggaaratatagtgagtcctcaaatagtagtgtgtgtttcattaacataacaaaaaatgggcttcagattgcctcagaaatatgccataaaacctaagctttttaaatttcactccagaaacttgaaagaaagtctgctctcacctctattattgttctgaattagaaattctttttgaacggttgatattttactatgaatatttcaaagacatggttactaaagagttttcctaacctggagaggtatttggagggtcaaacagggtgattatttttaacagaaaggaaggcctgaattagtcaaataattttttttataatttcaagaagaccagaggagagctgtgcatttgagtggtttgcttcagtaaaagagaacagattttcttttgctatgattttgtaggtttaaatttctcagtgtaattttcctgccacctgaccttattttcttttgcaaaggcaaaacaaataaacttgaaaggaagagggaaggaaaacaataatctatgtt

SEQ ID NO: 907763 - DNA, 640 bp, Homo sapiens
tgcctaaatgacattattctctacctcagcactcagcctgtcctttatagtacttgccactgtttctagttgttttatttatttgctgatttaaaatgagtcgatctcatgactacactgtaaattacctaarttgaggagatcatgtttctcacgttcactttttcatcctagtgctagcaatgacctgacatgccacatagtagatgtacaactaacatctacttaagtgaatgcaccaatgaatgatgcctgggttatcaatgtgatgtacacctcttcattcactattacctgctctgaatcccataagtaattagaggttactaggtttttatcagagaaaagagaaaactcttaactttcataaacacttgaaatatttcttttcctttggtactactgctgataatacctatgactgctgagtggttggagttttccaggcaacttgctttatgagcattcctctatttaatattcgcaacaaacctataacgggtacttttattatcccactttacaggtaaagacacagagagttggcgaggttaatgaatttgcccatataggctattaatcaaggacagactgtaatttaaactcaagcctatctggtgccaaagctcactgtcttacc

SEQ ID NO: 907764 - DNA, 528 bp, Homo sapiens
taatatgaggcggagaggggcagaaagttgggcaacatataccctattcccaaccttgatgaaactaatagcatctatacacatagtagtcatgacagtaactttttgataacaacttccactctcaggaaaagtagcaaaaacaaaacaaaaataccatcaccaccaccacaacaaacaaaacaaaaaacaaccctgttttgcattttcgagtataatacatggttatcttttgaacagttagatgtaacatggtgtaaagaaaatcagatatgcaattcttgcctttgttactagctattggcagcctagacaagtttcctaaattttctgagcccgaatttccttgtcttcaaaacaagcagctgagtagacgcactcactagataagtggtcttagttgagtcacttatccagccattctgtcaatccctcaacaaatgcacttggtgagtttctatttgctgtcaagcactgcagtaacctttyctaggcttctctaagagggagatgatcataactgcctta

SEQ ID NO: 907765 - DNA, 569 bp, Homo sapiens
tacccacagatttgtctggacctaacctkgatcagtgtattcacctaaattcaggagataccctagtgttggtgtgctttgactccctcagttaactaatttcagtgggtatcagaaggtgcctccacaggccgttattacctcctcagccattgtcccttacctgggaacagaggatctgaaagtcttcattcgtaatgtcccctgacttcacttatgcactgtcttgagtcctatttgagatattcatttttccttcttagattcccaaaggtcttcaggtaatatattggagccacttcttcatcatattgtctattccttttattgatactgattgactattttgaatcaaaggagtgggaggcaggttgatgtgatgggaaatatttgctcttaagcagagctactaacttgcacatgaagaaagggtaaaaaagattttctgaagccaacttgctttctgaaacagtgctatttctgaggtattgcttttagaggttaaataattttggcaaaggcctaattggattcttaataactcccttggataggtcttctcaaaaacc

SEQ ID NO: 907766 - DNA, 605 bp, Homo sapiens
aaacggaagcaatttcattttcttatctgaggtggacttgaacttcaccttgtctcctggggataataaatcaaaaggaattgattttttttttttcacattaaagttggtggggttttcaaattatgtgttctaaaattttgccctgtaaagtaggcaagtagctccttcaagaagcttgggcccaaagactgaagaggtgtgatccttggggaaatctctcttttaaagccagaatgagaaacgctttctactctcagcattttgaaatgtgatgagctgaagatgatgagacctgagccacatgtatacacaaaactgagtgtagcacaatttctggaactctcagttttgcaactgctgtccaaagatgcacgcagtgaacctggtggactggcgcctgacgtggaggctttaagggaggtgggagggacagccacagcacgggtaggcagcctctcacctctcctmtgcatgctgcccagggatgctccacaaggcagttggagagggctgtgcctcaccaagttcaggaatcccttctgaaagcttgtcgaggactcacatgtcactgagcagggaaagaaatgtgcctccacctgaaa

SEQ ID NO: 907767 - DNA, 622 bp, Homo sapiens
ccagggaggacatgacccactgcgacaccagccaggctggctaaggaagtgctggcmtcatccctccccaaccccaggctgtacagctcaagactccaaaaaaggccccttccttcctcttgaggaaaggagagggaagagtggggaggactttgtcttgcctcttggttactagctcagccacagcaggatagggcaccaatcagattcatgaggccctagctccagacaacatttctagacacatcccaggccagaagggaacctgctgccttgaagggaaggacccaatcctggcaggattcatcacctgccaactgaagtgccctttggccctgaataatcagcagtgaaactcaggtactatgtcaggactttgggtaagactctgagacttgctagtttcaggtaagactctgagacttgctagtttcaggtaagactcagcacattgtcagctatggtggctgtagggtgaggctccttccacttaagaaaagcagagggaaaagtaaaggggactttgtcttgcatcttaggtaccagctcagccacagtggggtaaggtgtcaagaagtttcttggggtccctgattccaggacttggcttttggacagtatt

SEQ ID NO: 907768 - DNA, 563 bp, Homo sapiens
catctacattgaaaatgttcggtacaaccaccttcctcaatgatcttagctacatcttctgaataacttgctgcagcttctccatcaacatctgctgcttcatcttgcacttatatgttacagagatggcttcttttcttaaacctcacgaaccaatctctgcaagcttcaaacttttctttggcagcttcctcacttctctcggccttcacagaactgaagagagttagggtcctgctctggattaggtttggtttaaggaaatattgtggctgcttttatgttttatcgaaacctttcaaactttcttcatatccacaataagaatgttttacttcttatcatttgtgtgttcactggaatagcacttttaatttcaagaattttttctttgcattcacaacttggctaattgtttgaggcaagaggcctagccttcagcctatcttagcttttgacrtgcattcctcagtaagcttaatcatttctagcttttgacttaaagggaaagacatgcaatttttcctttcacttgaacacttaagaggccactgtagggttat

SEQ ID NO: 907769 - DNA, 622 bp, Homo sapiens
tattgtcagctgagcacggtggttcatgcctgtaatcttagcactttgggaggccaaggtgggaggatcacctgagaacaggagtccgagaccagcctggccaacatggtgaaacccggtctctactaaaaatacaaaaattagctaggtgtggtggtacgcacctgtagtcccagctactcaagaggccgaggcaggagaattgcttgaacctggaaggcagaggttgcagtgagctgaaatcgtaccactccacttcagtctgggcaacaaagtgagactctatctcaaaaacaacaacaacaacaacaacaaaaaaccaaagcaaaactgtctgggtgtggtggcacatgcctgtaatcccagcactttgggaggccgaggtaggcagattgcctgaggtcaggagttcaagaccagcctgaccaatatggtgaaaccctgtctctactaaaaatacaaaagttagccaggtgtggtggcaggcgcctgtagagaggagaagcacttggacccgggaggcagaggttgyggtgagccgagattgtgtcattgcattctcgcctgggtgacagagtgagactccatctcaaaagaaaaaaaaaaatactatattgtcatc

SEQ ID NO: 907770 - DNA, 622 bp, Homo sapiens
tattgtcagctgagcacggtggttcatgcctgtaatcttagcactttgggaggccaaggtgggaggatcacctgagaacaggagtccgagaccagcctggccaacatggtgaaacccggtctctactaaaaatacaaaaattagctaggtgtggtggtacgcacctgtagtcccagctactcaagaggccgaggcaggagaattgcttgaacctggaaggcagaggttgcagtgagctgaaatcgtaccactccacttcagtctgggcaacaaagtgagactctatctcaaaaacaacaacaacaacaacaacaaaaaaccaaagcaaaactgtctgggtgtggtggcacatgcctgtaatcccagcactttgggaggccgaggtaggcagattgcctgaggtcaggagttcaagaccagcctgaccaatatggtgaaaccctgtctctactaaaaatacaaaagttagccaggtgtggtggcaggcgcctgtagagaggagaagcacttggacccgggaggcagaggttgtrgtgagccgagattgtgtcattgcattctcgcctgggtgacagagtgagactccatctcaaaagaaaaaaaaaaatactatattgtcatc

SEQ ID NO: 907771 - DNA, 622 bp, Homo sapiens
tattgtcagctgagcacggtggttcatgcctgtaatcttagcactttgggaggccaaggtgggaggatcacctgagaacaggagtccgagaccagcctggccaacatggtgaaacccggtctctactaaaaatacaaaaattagctaggtgtggtggtacgcacctgtagtcccagctactcaagaggccgaggcaggagaattgcttgaacctggaaggcagaggttgcagtgagctgaaatcgtaccactccacttcagtctgggcaacaaagtgagactctatctcaaaaacaacaacaacaacaacaacaaaaaaccaaagcaaaactgtctgggtgtggtggcacatgcctgtaatcccagcactttgggaggccgaggtaggcagattgcctgaggtcaggagttcaagaccagcctgaccaatatggtgaaaccctgtctctactaaaaatacaaaagttagccaggtgtggtggcaggcgcctgtagagaggagaagcacttggacccgggaggcagaggttgtggtgagccragattgtgtcattgcattctcgcctgggtgacagagtgagactccatctcaaaagaaaaaaaaaaatactatattgtcatc

SEQ ID NO: 907772 - DNA, 639 bp, Homo sapiens
ggagaaataggaatccttttacactgttggtgggagtgtaaattagttcaaccattgtggaagacagtgtggcaattcctcaaggatctagaaccagaaataccatttgacccagcaattccattactgggtatatacccaaagggttataaatcattctactataaagatacatgcacacgtatgtttattgcagcactgttcacaatagcaaagacttggaaccaacacaaatgcccatcaatgatagactggattaagaaaatgtggcacatatacaccatggaatactatgcagccaaaaaaaggatgagttcatgtcctttgcagggacatgtatgaagctggaaaccatcattctcagcaaactaacacaagaacagaaaaccaaacaccgtgtgttctcactcataagcaggagttgaacaatgagaacacatgaacacagggaggggaacatcacacactggggcttgtcagggggtggggggataggggagggatagcattaggagaaatacctaatgtagatgatgcgttgatgggtgcagcaaaccaccatggcacatatatacccatgtaacaagyctgcacgttctgtacatgtatcccagaacttaaagtataataataaaaaaa

SEQ ID NO: 907773 - DNA, 568 bp, Homo sapiens
caaactcccccaagctaaaggagcatgttctaaaccaatgcaaggaagctaagaaccttgaaaaaaggttagaagaattgctaactagaataaacagtttagagaagracataaatgacctgatggagctgaaaaacacagcatgagaacttcatgaagcatacacaagtatcaatagccgaatcaatcaagctgaagaaaggatatcagagattgaagatcaacttaatgaaataaagtgtgaagacaagattagagaaaaaagaatgaaaaggaatgaacaaagcctccaagaaatatggtactatgtgaaaagaccaaacttacatttgattggtgtacctgaaagtaatggggagaatggaaccaagatggaaaatatcttcaggatattatccaggagaacttccccaatctagcaagacaggtcaacattcaaattcaggaaatacagagatgaccacaaagatactccttgagaagagaaaccccaagacacataatcgtcagattcagcaaggttgaaatgaaggaaaaaacgttaagggcagccaaagagaaagatcgg

SEQ ID NO: 907774 - DNA, 683 bp, Homo sapiens
gaaacaggagactcagatatcctgtatccattgagaaaattatcattactgtgaatcttttttctctagtggcgattggacttttctgtaacttggtattctgcagtttgttttatttgcttgctcaggacttaaggtgcttctttaatatgaagaaatatatttctttaattttgtaaaaatttcagttattatacatttgaatactgccacttcccacccaccttgttctttacttctggaacttcgatttatgtgtgttgagcctctaattccatagagtatttgcgaagtcagaaatgtaacatatactcatttaacatgatctcgggttcatcgaggaataatttatacacagtaaagtgttctctttaggtgctctgttcgatgagttttgacaaatgtatgcgctcatgtgagtgctaaaaagatgtagaatattcctatactcagataatttcgctaatgcacctttgtatttaatccccttcccccacatccagtccctggaaatcactgatctgatttctgtccctatagttttacctgttctagaaggtcatataaatgaaatcatagaggatatagctgttatttggcttctttcactcagtgtaatgcttttgagattcacktagattgtggcatgcatctgtagttcattctttttattgccgagtagt

SEQ ID NO: 907775 - DNA, 665 bp, Homo sapiens
cagcttaagatgaaagaaaattccaaatggctttgggcatttttctggctttatctccagtttgatttttagtgatctgctcatagctcttagtcatagatattacatatattcttttgtatagatattttagtacatttccttgtagaggtgttttgtgatttaaaaaaagtgttagtgctatatctttttattaaaagatacatagtacaaaggaaaattggcactgactgcagacatgttgattggaaacatggtcaggctattatttcaaagacgaaggtaaaatctaagtagatgttttatagactgtcacttgccaggacatgttacagctcctcagaaaaaaacacatgaaactgaaatcacaattctttgtttgttcaaaaaagatagaaaatatatcaaagtacattttttactgtgttatttcctaaacacaggaagtagaattattctgtcacagaaaatataatcctcaatatatttatttgcaggttaaaattcttgctaactgcttataacagcacacatatcatttaggttcttcaaaaagttcatggaaatkcatattatgaaaaaactatgcaaagatttcaaaacttgtttacactgaaataaacttgtgctaacttgttatacatatatgaataggatctagtttg

SEQ ID NO: 907776 - DNA, 604 bp, Homo sapiens
ctgtttggctgagtaacaaggcatttccaaaaaatatgtcaggttcccctaayttacaaatgacctatacttataaatggctgttctaccctacgataaaccatgaactatgacctcagacgccaaaaaacaattaagctataaaaagcaacaactgtgctttgtaggacacaacaaagtttaataaccaaatactagactgccttaagtagtcacctattgatcagcttcggcctaattctccctaatgtgttaacttatggatgcctgtttccgctcaagtgctaaacagcattggctggaagcagctgctggagcttgggctgaggacaccattccttcttttgcaactcttcttactgatgtcatttttttacctctggttacttctccatcacagaagatttgaacattggctcagtctttcttgtcattagcttcaacatctacatggacaaccaatccaacaccttgatgtcaaaatccctgattctaaccttactgcccccagaaaccacatcatcctagccccacccctgaagaacaacaacaaaaaaaggtaaaattcagacaccttattctgtgacaattaccttttaacctt

SEQ ID NO: 907777 - DNA, 615 bp, Homo sapiens
cctttgaactcagactgaattatactacatagtttcctggatttccagctgcaaatgacatattatggggcttctaggcctgaataatcatgtgagctaatttccatagtaactctcctcttgawtttgtttttctggagaacgttgactaatacaatatactagacatttttctaagtaattcataactaacgaattatttaattaatataattatgctttgcattaggttttattattattcccttttcaccaatgaagagattgaggtatagagaggttaagcaacttgcccaagttagcagagccaatatagaatccagacagtcccacacttaagctcttgtacttactactatgcctcgcagtcctttgtgggttcaagtacactctaatttcttaaaaaactgcatttctgtggagtttgagaaaatagtaatttttattcatccattttaggaagaaattttaaaatactttcttaattattaaattgacataacatacagtatagtgtcggttcagtgctggacagaatattctcctcattttaccactgtgactctcatatcttatttactttatctgtttggggtttggtgctatttgatgagc

SEQ ID NO: 907778 - DNA, 699 bp, Homo sapiens
agcaaatgttgagggattttgttaccaccaggcctgccttacaagagctcctgaaggaagcactaaatatggaaaggaaaaacaggtacyggccactgcaaaaacatacagaaatataaagaccaatgacaatatgaagaaactgtatcaactaaccagttaaaataaccagctagcatcatgatgacaggattaaattcacacatatcaatattaaccttaaatgtaaatgggctaaatgccccaattaaaatacacagactagcaaattggataaagagtaaagacccatcagtgtgctgtagtcaggagacacatctcacatgcaaagacacacataggctcaaaataaagggatggaggaatatttaccaagtaaatgaaaagcaaaaaaaaaaaaaaaaaaaaaaaagaaagaaaaaagagtgggggttgcaatcctagtctctgataaaacagaatttaaaccaacacagattttttaaaaaaataaaaagacaaagaaaggcattacataatagtaaagtgatcaatacaacaagaagagctaactatcctaaatgtatatgcacccaacacaggagcacccagattaataaaacaagttcttagagacctacaaagagacttagactcctacacaataatagtgtgagactttaacaccccactgtcaatattagatcaacaagacagaat

SEQ ID NO: 907779 - DNA, 608 bp, Homo sapiens
tttgacagctccaactttaaaacactatcatatcctaccgtattttctacccatgattcccattctgaggcaatatcacgtctcctgtggaaattacagcagtctctggcctagagcactcataggccttatgcagtcctctccacccaaaagctagaaggaattttttttccgaatataaatcaggtagttcatgtcccttctctggtcaataccttccaatggaaacacaaacccctaccctggctcacaaggccctgagtgatcagacacaaacccacttctccaagtgtatcttctttcacttcatgtttgactaattcccttctagcctcatgggcttaagcacatcccacaggtccctatccagaaatactcttctccctgttaacccctggctcacttggtccatgagtcagcttaaatgccacacctcagagaggattcttggaccactgtatctaaaaccacagcacactctctattcttttccctatattactttttcttcaattatctctccctcaacacaatgaataaatcrctctgggtatttttgtttacatttattaaaatgtaggtgttatattgcttcatttttatgaaaa

SEQ ID NO: 907780 - DNA, 619 bp, Homo sapiens; identical to SEQ ID NO: 906831

SEQ ID NO: 907781 - DNA, 602 bp, Homo sapiens
tccaaccttctccagaagcaatgatcagttttcaatggtaaagaacagaaaccagcatcatgggaggcctcatgcattaataaagatttgttaactccagtgtatcttttttggggcctaacatccttagtctttcatttttcagagcctgtatttaatatattttgcaactgatctagtttttcttcttgtaaaataatagattataaaatatactgttcaaccccgccatatatctccattaacatgaggtttaattattggaatgtaatttgtatacagaagatatttgttttaaaaattatcattgtaataaatagtaatatttagcatctatgtacaacagctgaaagtacataaacttttttgcttcttttccatcattataagtgtctatcagggagtaatgcactctccatatctccatatattttgccaagaaattacacaaagcccaaactcatggcaacaaaaacatctaaacagctattgacatcatcttggatcccccatacccttcatcaagacgcaagataaatggagaacactytaaattaattgaagacaacaggtaaaaaaaattaaactttatgtacataatc

SEQ ID NO: 907782 - DNA, 575 bp, Homo sapiens
ctcagacaactctgagaagccatcccagcrtcagggcttccggtggggtgggttaaggcctctgtgacaactgcactgcagttcaacttcccctctgcccagtgctactcctctcacagcatgtcagatctggttggtccccaacatatgatggttcaacttacaatttttaggcttcttgacagtgcaaaaactatctacattcagtagaacccgtaattccagtagccatacaacttttctgtttctcactttcagtacagtatttaataaactacatgagatactcaacactttattataaaataggctttatactagatgattttccccaactctaggctaacgtgagtgttttgagcacagttaagggaggcaaggctaagctatgatgttcagtaggttaggtgcattttcaacttaagatagtttcaactcacagtaggtttatagggacataaccccataagtccagatcatctgtatggttttcgagagcattccccaataaactgcctacatgaaaatctctgcctcagaatgtatttcctggggaatttgaccctagaaaatac

SEQ ID NO: 907783 - DNA, 650 bp, Homo sapiens
tgtttgattggtatacctgaaagtgatggggagaatggaaccaagttggaaaacacttttcaggatattatccaggagaatttccccaacctagcaagacaagccaacattcaaattcaggaaatacagagaacaccacaaagatactcctcgagaagagcaaccccaagactcataactatcagattcaccaaggttgaaatgaaggaaaaaatattaagggcagccagagagaaagggtgggttacccacaaagggaagcccatcagactaacagtggatctctcagcagaagccctacaagccagaagagaatgggggccaatatttaatattcttaagaaaagaattttcaatgcagaatttcatatccagtcaaactaagcctcataagtgaaggaaaagtaaaatcttttacagacaagcaaatgctgattttgtcacctaggcctgccttacaagagctcctgaaggaagcactaaacatggaaaagaacaactggtgccattcagtgcaaaaacataccaaattgcaaagagcatcgacactatgaagaaaccgcatcaagtaatkggcaaaataaccagctatcatcataatgacagattcaaattcacacataacaatattaagcatatacgtaaatggg

SEQ ID NO: 907784 - DNA, 722 bp, Homo sapiens
ggtatacagctttcattttcagagtggaattacatcaacggagaaatgcagatgtaggaaaatttggatcatgggcgaaatgtacaaggataactggaagaatctgattgcatagttatacrtttaattcaatttggtaatctaattttggaaaaagggcatataaacacagagcattaaaagcgttaactgaacacacacttctgtcttccaacttgttttaacaaaatctctaaggtggatggggcagaaataaaaagtacctcttttgacatctaagttagaataaatgatccaatatatttgaggatttcagctatatatacagctaaaatccagctatatatacagctaaaatatggttcatttatatatatataaatatgtgtaccagaaactaaaaggaaaatattatgagcagttcctttcttggacaaaaaatactgtcttttatctaaccaattcacacttcacttaccctgaagtatcactaacttaaactcgtgatagacatggtcaggagagcagttggctaaatgtgatgctccatttgttcactgctgccccctgtctattattccagtcatttacccaagtcttatcttgcttgacatttaaatagtctgttctagtggctgctacttaatctctcataccctaggctgaagaacttgattcagcctttcattcaccatatggttaaagctccttataatgaacaa

SEQ ID NO: 907785 - DNA, 612 bp, Homo sapiens
ataaccatgaggatagacacagcccaggtaagaaagaaaatactaaattaatagttttttaagcaaacaattatgattggaaatatggacgaggagacaggaccattgctttaaactatcagaaattttcttgcctctcaacaattacctgttgctctaacactgtttctaaactatcactggtacccaaggaaattataaaacccaatgttcagcaaagtattcaaagtggaaaaaacaatgcctccataataatagctcagactctgaaggttgtgtaaacagaacataatgtgtattctgtagattcaatgttctttttgttatttgttatgtaggagaagaggatggtacaatagtaatattgaagattttgaaatttaatcttcttgtgggaacacatttgttaggaagattttttagataaggtacactgtggtcacatggtttagttaatctgaagatgtgtttggcttcccatcaaaactgataatttttctaggtatgtgattttttatattggcaaatattatttcttagcactttgatgctattgttgtatctttgtgctattaggaaaagcrctgtcagtctaatatttatttctttgga

SEQ ID NO: 907786 - DNA, 622 bp, Homo sapiens
gcataaaacacatactggagtttgaagacggtagaaaaaaaaaagaatgtaaattatttcataatcatttaaaaattgataacatattgatcatattttgggtataccagttaaataaaatatattattaaaagtcatgtcacctgttcctttttacttcaaatgtggctaatagaaggtataaagttacacatgtggcttgcattagtttctactggacagagctggtctggatggaagattatttttttctttggtttgttttctcattccatttccccgccaccctccgttggtttggaagttaagctttctctgcttctgattttagtatagtagttgtagttctcaaagtgtggtccctggactagtagcatcagcagcatctgggaatttggtagaaatgaaaattctagaactgtaccccagatctcctggaacagaaactctgggggtggagcccagtggtctgcttcataacccaccagataattctgaggtattctcaagttctagaaccacggycttaatgattacccttgaaaagtcactatacctatttaccttaataaaacctagggttgttcaatatcctaatgccatcctaaatagtaagaattat

SEQ ID NO: 907787 - DNA, 565 bp, Homo sapiens
taccatcccccctagtcagaatgaatatyattaaaaagcacaaaatgacaggtgttggcaagattagggagaaaagaggatgctcatacactgttcgtgggaatgtaaattagttcagccactgtagaaagcagtttgaagatttttcaaataacctaaaatagaattaccattttacccatcaatcgcattactgggtatatacccaaaggactgtaagttgttctaccagaaagacacatgcacacctacgtttatcaacagcatcacagtactattcataatagcaaaaacatggaatcaatctatatgcccaacaatggtggcctggataaagaaaatatggtacacatataaatgatggaatactatgcagcaatgaaaaaaaaacaaaatcatgtctcttgagcaacacagatgcagctggaattcattaccctaggcaaattaccaccagaaaggaaaaccaaataccacatattctcagttgtaagtgggaactaaacattgagtacctatggacaaagagaaaggaataataggcaatgggaaatatgtgaaagtg

SEQ ID NO: 907788 - DNA, 529 bp, Homo sapiens
agaactagaggaccaagaggaaaacttcccaaagctagcagaagacaagaaataaccaagatcagagcagaactgaatgagatagagacacacaaaatccttcaaaaaactcaagggattcaggagctgtatttttttttttttttgaataaaagttaacaaaatagaccgcatctgcactaataaagaagaaaacttaaaagaattaaatagacacagtcagaaatgataagggggatatcaccaatgaccccacaaatatacaaacaaccatcagagaatactttaaaaatctttagcacataaactagaaaatctagaagaaatggatacattcctggatgcacacaccctcccaagtctgaaccagggaaacattaaatccctgaataaaccaataataagttcaaaaattgaggcagtaataaatagcctaccaccaccamcaacaacaaaaatcccaggatcagatagacttacagctgaattctaacagagatactatttcttctgaaactattccaaatga

SEQ ID NO: 907789 - DNA, 618 bp, Homo sapiens
aatcagagaggacaccaacaaatggaaaaacattccttgatcatgggtaggaagaatcaatatcataaaaatggccacactgcccaaagtaatttatagattcaatgctgttctcattgaactaccattgacatkctttacagaattagaaaaaaaaaaaactattttaaaatgtataaggaactaaaaagtcagtagagccaagacaatcctaagcaaatagaataaagctggaggtatcatgctacctgacttcaaactatactacaaagctatagtaaccaaaacagcataatacttgtacaaaaacagacaggtagtccaatggagtagaacagagacctcagaaattacaccacacatctacaaccatctgatctttgacaaaccttgtaaaaacaatcagaaaagggtttactatttaatacatagctctgggagaactggctagttgtatgcagaaaattaaaactggaccacttcctaatactttatatgaaaactaactcaaggtggattaaagaattaaatgtaacaacaaaaactttaaaaaccctaaaagaaaatctaggtaataccattcaagtcttaggaacaagcaaagattttatgatgaaa

SEQ ID NO: 907790 - DNA, 632 bp, Homo sapiens
ccaagtatggtggctcatacctgtaagcccagcactttgggaggccaaggcagatggatcatctgaggtcaggagttcgagaccagcctggccaacakggtaaaaccctgtctctattaaaaatacaaaaattagccggagtggtggtacatgcctgtaatcccagctactttggaggctgaggcaggagaattgcttgaatccaggaggtagagattgaagtgagccaagatcatgccattgcactccagcctaggtgacagagtgagacactgtccctaaataaataaataaaataaaatacttttccttcttgcttctaatattcaaatgctacaagttcttcaagttcaaggggctcatctcctccacgaagtcttcccctccagccactctagcccaccgtgggctcatccttctctgactacacacagcattcactgcctctgctggctatttgcagctttttacaaacctcctggaattgtttaaatgttcatgtatctgagttttaacaatctcctaactagattatttgattttttaatatggtggctctgtcttctagttcttgtctatccatacccataaaaaacagtggtgtcaccagaggaagtgaccagttcccaaat

SEQ ID NO: 907791 - DNA, 553 bp, Homo sapiens
acctcagttggtacacaattccaaaattcacctatctcactaaaacagtgaagaaccatgatttccttactgttacaattccccacaaaaaacaaaaatgaatcrggtcattgttacttaagtgataagtaccttagagaaagctttttaacatacaatcacagatcccttgttgaagaacacttttgctaacagttttgccttgctgaattaggaaaaaacattctttcaaggacagtagtaagattgaccaggtttctttgtactctctatatttgaagaaattgagccagttcagtccaagtcacttaaatcctgagtcttgattgcctaatttgtaaaactgttcagcttcctgccagactcatagggttgtagtggggagttcagtaacataaggcagcatttggaaagttgtaagaaaaaacaaaaatgattatgaagtcactttaaaatatagggctctaatattttactgtcaatcactttcaaagcagtgggacattgtaggcaaaacaccggtctgggaaatgaaagacccaggagaactaag

SEQ ID NO: 907792 - DNA, 594 bp, Homo sapiens
ctgggtatatacccaaaggaatataaatcattctgttataaagacacatgcatgcgtatgttcattgcagcactattcacaatagcaaagacatggaatcaacccaaatgcccatcaatgatagactggataaagaaaatatggtacatatacaccatggaatactatgcagccataaaaagtaacaaaatcatgtcctttgcagggacatggatggagctggaagccattatcctcagcaaacaaactcaggaacagaaaaccaaacactgcatgttctcacttataagtgggagccaaataatgagaacacatggacgcatggaggggaacaacacatactgggatctgtcaggggtcaggggaaaaggagggagtacatcaggaaaaatagctaatgcaggctgggcttgacacctcgatgatgggttgataggtgcagcaaaccaccatggcatgcrtttacctatgtaacaaacctgcacatcctgaatatataccccagaacttaaaataaaattttaaaaagaatatgtagcaccttttacacattgcatacactctacactaaatattattgaacatccccagtta

SEQ ID NO: 907793 - DNA, 625 bp, Homo sapiens
ctaattcttgtatttttagtagagatggggtttcaccatgttgaccaggctggtctcaaactcctgacctcaggtgatccscccgcctcagcctcccaaagtgctgggattacgggcatgagccactgccccttgcccggatttcaacaatttctaaagtaaatattaatttacttttgttatttctcataattaagagtaaaaatgtagcctgtaaggcagctgacttctgtcacttcctggttcattttaatctaatcttatggttaaggaaaatcaatttagagtagcaatatggtacatttagtaatccattctgagcacactttctttcttctacttctgaagtgttcttctctaacatgttgttttttcagaaattattgttactgacttatttcaacagctctgagaaacaaaaaattcagtatttcataaaatttctctaccatataaagtttataacagatgatatcacaggggatagcttctaaaagctttaaggatatttttactgatttgtttcaatatagtgttaattttagttctcaccacagccatttcattctggctgctttgcaatggagttgttagagaatatatgtcaaatttccctgttttatac

SEQ ID NO: 907794 - DNA, 702 bp, Homo sapiens
gccatgcccattcatttaggtattgcctatgtctgctttcacactacaaaggcaaagtgagtagctgtgacacagaccacatggcctacaaagcctaacatatttactctcaggctgtttatagaaaaagttttcaaacccctattgtagatgatagatggttgctaaagagagacagggtgattgaaaacaacaatctgtatagggtattagctttataatcctcaacatttgactgtattctaacctgttgaaaaagatctgctgtagaggaaacatcaaagaagtacagtttagttctggaaggaagcttagcaattactaagaccatttttagatgaggaaaaaatattttattctttatcttaaaaattaagctatacagtcactacgaattacttctactggtatagtacttcttagattgtaaaggagattaaaggaactgcaaagacaggatttatatgcatcaataatatctttgcttattttatagatagtaattataaactatatacatatacataaagcatattatgtgaatatattttattcataatactatataaataaaatagaaaatactaaaaattaacaagacattacagatagtactgaaaaacataagtattctattaccattcctgatctcatcctctccctccactacccagacayagctactatcctaaatttggtgtt

SEQ ID NO: 907795 - DNA, 640 bp, Homo sapiens
ctcagtaatgttttgaggctttcagtgtggagctcttgtgcatcttttgttaaatttatgccaaagtatttgggtgatggactttggggacwcaggggcaaagggtggaaagggggttagagataaaagactacaaatggggttcaatgtacactgctcaggtgatgggtgcaccaaaatctcaaaaattaccactaaagaacttactcatgtaaccaaatgtcacccgttccccccaaaacctatggaaaataaaaaataagtaaaataaaattttgaatacatcgaaaaaaagagaaaaaaattaaaaaaaaataaagtcactaaatgctggaaagcttgagtcttgagagttatttaggagaagatctatacccaggcagccatccacgaagcctgctgatctcaaaggctgggaggcaaagtctgttgaagctgagatttgctccccaagaatattacaaagtaggcctctgctggaacagcagggagggtggtcagctgcaaaagaaagaaggacagggctgagaggagctcaagagggaacaaggtccagagttcaggcagtaggtagtgtgtgagaagaggctcagcattctgggtaaggagtggattccagcaagaaagcctgacctgtcaa

SEQ ID NO: 907796 - DNA, 614 bp, Homo sapiens
taaagtactcattctccaataaacactgcatttcagcagcactgtagactcctgcttgcctagggagtgagtgactggcaatcaaactaaggtcagctacatggcaatgaagaacgtttccattagcccaggtagacattttgataaatccatttaatcacgctactggaaagcaacagattataaacaatgacatctcctgtctgcttttaattatgtggattacctattttatgacagtgattacactttgttaactaacctacaaaataatgttctacatgactagatacagaaccatacctataactatttaacttaatttcatctgaggttcacatcaacattattataaacacatggaccataagtttgtagtttgtaattttgtaactgtgtgcaaattccacttcccattaacatacggtctaaacatagaaaataaagagcaatccaagaactctttaaattcttaacccaaaacmaactattaacagaccatccaatacaactacacaagatttaactttttcagttcagtgatttctacttcagtgaagccaaatttaattttatttttgctactatctacctaaaaatcaagacatttggca

SEQ ID NO: 907797 - DNA, 681 bp, Homo sapiens
ggtttctaaatacctaaacttttcctggcatatttccaaacayagagcagaaataacattaaatatccattatgagtaaactgactactcttcaggatattttcagtcatgaggtttctgtttgaatcatgtttttaactaaaaacatcttatatcttgggatgtatatgaaagctattctgtcaaaagatagaaagtgttatgaaaggaatgtgatttacacatgaattataaaaggctagtaatctaataagactacatttggcagtgtgtgtccattactgttcaggatagaaagtgaccagactcatggaaatgggtctctaggctatgtagcagacccaccagtataaagatggatacatcaatgttcatggcttgaggaaattaatcataaagactatacgacttgcttcttgttatgattacctagtatgaagcaatattctgattttaatttgacttcccatataactgcctacagggagtgactatgaactcaagtatggcattatagattctattttaaattaatgcattggtattccgattttaatacatcagtctctcagggcttgtttaaagtaatttttccccaaattattaatccactgcacaaatgatgataaatgaaatttctaaatccgagatttaagaaccaggccctcattttgtcaaggc

SEQ ID NO: 907798 - DNA, 623 bp, Homo sapiens
aactaaaagaatgaaattaaaatgttcctaacacaaataaatgataaatgtttgaagtgacggatctctgaattaccctgatttgatcatcacacattgtatgcttctatcaaaatactacatgtaccccataaatatgtacaactattatgtatccataataactaaaactaaaaaaatgtaaatgcatctcttaatatgtatgtgtttaaaattagaaacttgctacattttaaataaaagagaaacaaatgacttctatgaactattcaatcatttcaagtatacaagtttagtaatctttacacaactttacattaattacacttatttttactaatagtagcattacatgttcaaaatttgaatgttatttagttttctgacattacaatggcacaactttaaaatctgtattactttttcctttatattttaggagtcttcctaggccaaagtataaaatctgtagctctagcaaaaactaaataaaaatgaaaaaaacaaggtatctgtcacccyacacctcctaatcaatatggcttatttttttgctaatttttttttttttttgagacagaatttcactcttgttgcccaggctagagtgcaatggcacgatc

SEQ ID NO: 907799 - DNA, 620 bp, Homo sapiens
ccaagaacacaaaagcaaattcaataaaaacagagataaayagttgggacataattaaactaaagagcttttgcatggccaaaggaactggcagcagagtaaacagacaactcacagagtgagagaaaatcttcacaatctatacatttgacaaaaaactaatatccagaatctacaacaaacaaattagcaagaaaaaaacaaacaatcccatgaaaaagtgggctaaggacatgaacagacagtactcaaaagaagacatacaaatggccaacaactatacaaaaaaatgattgacatcactagttataaggaaaatgcaaatcaaaaccacaatgcgataccatcttactcctacaaggatggccataaccagaaaatgaaaaaataatagatgttggcatggatgtggtgaacagggaacacttcactgctggtgggaatgtaaactagcaaaaccactacggaaaacaatgtggagattccataaagaactaaaagtagaaataccatttggtccagcaatcccactactgggtatctacccagaggaaaagaagtcattatacgaaaaagacacttgcacacgcatgtttatagcagcacaatttgcaactgca

SEQ ID NO: 907800 - DNA, 608 bp, Homo sapiens
ttatcatttcctgaacacttattatatgtcaacaactctacaaattacattaattctctaatttaattgttacaaatgttatagggtaggtacctttactaattctatgtataggtgaggaaattggggttcagagaggctatgtaaattgcccaagttcttatagcaactaaattaataatgtggaggtaacgccaggcaatctaacgctagagcccttacacttagtcactacactgctcagtgttttgtagtgaagaaaatggataatcattttctctaggaaacaccacggaaacaagcccataagctctgggtgggaactcaaataaagactctacagagaagctctaaataccaattaggtcattgtgggaaagtgagaaatctcacacaatgagcatttttttgaactacatgtctatccttgtatggaatatgtgcatttagtctccctccagatatttctgctcctgtctatttacctctttccaggtgatgtttccagartatctgttcctagttatttggggaagaaggtttggttctcatatacacttgagtgagagcaggctgcagggtgaatctctgaggtcaccttgcccctg

SEQ ID NO: 907801 - DNA, 689 bp, Homo sapiens
gctgagatgtttggatggagagaaacataaatctggcctacatgcacatccagtcatagtaccttcccttgaacttaattatgacatagattctattgctcacgtgtttgttgctgaccttctcyttattatcaccttgccctcctactacattcctttttgctgaaataatgaaaataataatcaataaaaactgagggaaatcagagactgctgccggtgcaggtccttgggtatttgcatgcattaggtatttgtcctaatgctctcccttcccttgacccctaccccctgaaggaccccagtatgtgatgttcccctccctgtgtccatgtgttttcattgttcaactcccacttatgagtgagaacatgtggtgtttggttttctgttcctatgttagtgtgctgagaatgatggtttccagcttcatccatgtccctgcaaaggacatgaactcatcctttttttatggctgaatagtattccatggtgtatatgtgccacattttctttatccagtctctcactgatgggcatttgggttggttccaagtctttgctattgtaaatagtgttgcaataaacacacatgtgcatgtgtctttatagcagaatgatttataaatctttgggtatatacccagtaatggaattactgagtcaaatgacatttctggttctagatc

SEQ ID NO: 907802 - DNA, 587 bp, Homo sapiens
caatttcttcaactttatagcagtatcaacaaccacaactcaaagttgagtagtatagttaaaaataattattcaagcatcaaagttatctattaatcattttcccttaataagaaggatatcgcaraaactacaatcacttatagtcagaagctatctaaagtttttcattaaccatagtcattatgttataacaacagatcacttgaacttattcctcctgtctaacttatatatcctttgaccaacatctccctaactcttctttcccccatccatcccagcctctgataaccatcattctactctataattctatgtgatcaacttttttacattctgcatatgagtgagattatgaagttatttgtctttctgtgcctggcttattttccttaacataatgtcttccagtttcatccatgttgggataaattgcaggatcttcttttctgtggctgaatagtcttgtattgtgtatgtatgtgtgtgtgtgcatgtgtggttgaatactagtctagtgtgtgtgtgtggctgagtagtattcttgtgtgtgtgtgtgtctgaatagtattctagtgtatgta

SEQ ID NO: 907803 - DNA, 602 bp, Homo sapiens
tttcttcatccaatctatcattgatgggcatttgggttggtcccaagcctttgccattgtaaatagtgctgcaataaacatacatgtgcatgtatgtttataacagaatgatttatatttccttgggtatatacccagtaatgggattgctgggtcaggtggttcttctgcctccaggtctttgagtaatcatcacactgtcttccacaatggttgaactaattcagtctcctactaacagtataaaagcattccctttcctccacgacatcatgagtatctgttgtttcttgactttttaacactagtcattcagactggtgtgagatggcatctcactgtggttttcacttgaatttctctaatgatcagtgatgttgagctttttttcatatgtttgttggttggatgtttgtcttcttttgagaagagtctgttcatgtcctttgcccactttttgatgtggtttattttttttcttgtaaayttgtctaagtttcttgtagatactggatattagacctttgtcagatggatagattgcaaaaattttctcccattctgtaggttgtctgttcactctgatgatagtttcttttgct

SEQ ID NO: 907804 - DNA, 417 bp, Homo sapiens
tagaaattccctacaatctgtctcagagatgaataaagaatacttcctaactcattctgtgaggccagtattaccctactaccctaaacacataaaccaaagacattacaaaataagaaaattaaagaccaatatctcttatgaagatagatgcaaaaatcctcaaaaaaagaaacctaagcaaatcaaaacccaaaatgtataaaaaggattatacaccatgaccaagtgggatataccccaggtatgcaaagctggctcaactttaaaaaaccaattaactaatccatcacatyaacaggctaaaaaagaaaaatcacatggtcatatcaatagatgcagaaaaagcatttgacaaaatcaaaaacacattcatgataaaaaattctcactaaactaggaatagaagggaacttc

SEQ ID NO: 907805 - DNA, 582 bp, Homo sapiens
gtatcttgtatcttgtgacactgatcaacttattaattctagtggtattttagtgaaactcttacacacttttatataaagaatgatgtcatttgcaattaaggcagttctagaagttgacacggggaaggagggtgagccgtcaggaccccagcagggcctgtgggcagctcgcactgaaagaaggggcccaggtgagggaaccttcaagtaacctcatgtccttggtgacagatccaccagaacttcaaactctggtaaccagaaacccttattctagacacagccctgtatcaagctaatttcatggagatgctcaagagcaagatgttctactgctctatcctgacttcctgaggctctcatctgtggaaggcttgaagtgagggcatcttctaatgatgcagatgttggctcagctctcatccacaaatcctcaggtcacttggcaggggacacacataggtaacacagggcacctcacggcagacccttccaggccagacctcgcctgtgatcccatctgggcaaccccacatccctgcccatcactgtgtgtccrggaagcaagagttgagggtg

SEQ ID NO: 907806 - DNA, 624 bp, Homo sapiens; identical to SEQ ID NO: 901161

SEQ ID NO: 907807 - DNA, 622 bp, Homo sapiens
ctcaatattaatcatcacagaccgcatgggtcatccttctttattgttgggtttgctcttttccaaagctgcacattcaccaaaaaggctgacattcccagtgagactatacmagtcaatggcaaaaccaagattcaaactcaagttccctaatttcagatctagtcctttcccaatgatgccaaccttatccaagctagtatgattgtctatgtctctataaaatagtaatcctccaattgttattgttaatttttaaattgcaatttggaaagaacatgttccttttcctcttatgctgtcaaaaaattggtatgaggtataactctttgttagctgggagtatctttgagggattcctattttttccaaatttattattaatgaaaaatatcaagcattcataaaagttgaaagggcactctgtatactgcccacttagatttaaaagtcagcattccatgatatttgtactcattccctctgtctctttgtatgtttgtatatatttgcatatatacaatacatatacaggcgtagacactttgtgtttgaaatattttagtatttgaagacatcattacattgcatccctgttgcatcatgcacctcataaggataa

SEQ ID NO: 907808 - DNA, 634 bp, Homo sapiens
gtttctggtggacagtagtctattagtagttaagttttggaggagtcaaaagttatacatgaattttggatgttaaatggcactgaagttcctaacttctgtgttgttcaagggtcaactatgctaacaaactgaatccagcaatgtatataaggaattatacacaatgattgagtgaaatttatctcaggaattcaaggttggtttaatatatgaaattaatcagtgtaattcataatttaataatgaacaagaaacacataattacttcaatagacatagagaaataatttaacaaaatgcacaatgctttcattataaaacactcaaaactaggaatagaagggaacactacatcattctgataaaggccatttaccaaaaacccatagctattataatgctaatggtgaaaaactgaatgcttttccctaaaataagaaaatagacaagaatgtctactctcatttcttctattcagtattttctggcgattcaagccagaacaaatctacaagaaaaagatagaaggaaacaagtaaactatctttattcacagaagatattattttatgtaaaamattataaaggacccctcccttccccagaaaaacattagaactcataaacaagt

SEQ ID NO: 907809 - DNA, 627 bp, Homo sapiens
ggcaaagacctgctaaagggacaagaagaaagggaaaatgaagtcatattttattcatcattcagatattcacctcattatttgawctattaatagaaaattgaggctttttcctctcttgtgggtatcctatctctttatttttagatcttcttggaaatacctttctgaaacttgaagatcccctctagatattattttccaggatgaaaggcctctagcagagtctttaatgtgcaataatgagaagatgaaacattattgtgtttcctctggactcttgtatttgaacttgatccaggattgacactaggcagctcacctttcccacatcatggttagctctaagtcaggctaagaaattaccttccctggccactccctgctttgtccagttaaataaaaatgaatttttagttttatttagttaactaactccatgggccatggtaagctaaagaaaagtagatgtatgagaggaaacgttggcaaattctctgtacttatttagagtacaggaaagatccataattaaccatgctttgggaaaatacttccttggaatggtcatattgaagggtttggtttaaaaaaagttgagggttgggggcttctacatcacatcct

SEQ ID NO: 907810 - DNA, 628 bp, Homo sapiens
gtacatgatgccaccatagaaaaagcagttgccttaatctttggagtcatttgccaggttgtgcytattatgaaaaacctgttgcattatatacatagttcatataactttctgcttctattcttgtgttccacattcttttgggcacatgggatacttttgggcagaagggactttgtggaagtcatttccttggtttaaaatattcaaatggaatcctttgaagtttgttgatcatccatcaaaagatacatttttaaaaaatagatattctggagaaaataacaattgcaatcttttaccaaacacttaatgtctatcccatgaggtactgtgtttattgtttttccaggattctcaattttttttgctcaaacagctttatgaagtatgtactgttatcattttcattttacatataaaacaagtgggcttagtcacattaagtaactcctccaagtcaccattagctgacttcagaaccaggaggtaaaccagcagtctgattttagtgctcacaataaccagagtatcataacttcttcagaaatttagaaatcttgtcattttgtttcaggaatagcaagcagacctactggctctgtatcttccaccatgagaagtttgt

SEQ ID NO: 907811 - DNA, 592 bp, Homo sapiens
tagatccactgacagcttgcaccatgtgcctggaaaagctgcacacactcaatgccagccyataaaagcagctgagagggatgctgtaccctgcaaagccacagaagcagagctgcccaagaccacgggaacccacctcttgcatcagcatgacctggatgtgagacctggagtcaaaggagatcattttggagctttgaaatttgaccgccctgctggatttcggacttgcatgggctttgtaacccctctgttttggccaatttctcccatgtgaaactgctctatttacccaatacctgtacccccattgtatctaggaagtaaatagcttgcttttgattttacaggctcataggcagaagggatttgccttgtctcagatgagactatttggactgtagacttttgggttaacgcagaaatgagttaagactttgggggactgttggaaaggcataattggttttgaaatgtgagggcatgagatttggaggggtcagggatggatgatatggtttggctgcgtccccacccaaatctcaacttgaatttaatctcctagaattcctacatactgtgagagggaccc

SEQ ID NO: 907812 - DNA, 563 bp, Homo sapiens
agaaataatctgacaaacttctttgtgatgtatgcattcaactcacagagttgaaagtttcttttgaataagcagtttggaaacactcctttgtagagtctgtaggtgaacatttgcggcactttgagacctatggtagaaaaggaaatatcttcacgtaaaatctagacaaaagcaatctgagaaacttctttgtggtgtgtgcattcatctcacagagttaaacctttcttttgattgagcagttttgaaagtctgttttttttagaatctgcaagtgaatatttggagtgctttgaggcctatggtggaaaaggaaatatctttacctaaaaactagaaagaagaattctgagaaacttctttgtgatgtgagcattgatctcacagagctgaaactttcttttgattgagcagttaggaaacactctttttgtagaatctgcaagtggacatttggagcactttgcagacaatgatagaaaaggaaatatcttcacattaaaagtagacaggagaawtctgagaaacaactttgtgatttgtgcatttatctcccagag

SEQ ID NO: 907813 - DNA, 566 bp, Homo sapiens
aaggaaatatattcacataaaatctagacagaagcaatcggagaaacttccttgtgatgtgtgcattcatctcacagttaaaccttccttctgattgtgcagttttgaaactctctttttatataatctgcaggtggacatttgtagcgctttgactcctatagtggaaaaggaaatatcttcacataaaaactagatagaagcattctgagaaacttctttgttgtgtgtgcattcatctcccagagacaaaccattcttttgttagagcagttttgaaatcctcttttcgtagaatcttcaagtggacatttcaagttccctgaggccaatgatggaaaatgaaatatcttcacataaaaattagacagaagtattctgagaaacttctttgtgatgcttgcattcatctgacagacttgaacctttcttttaattcagcagtttggtaacactcttkttgtagaatctacaagtggacatttggagtgctttgtggcctatggtagaaaaggaaatatcttcacataaaatctagacagaaacaatctcagaatgttctgtgt

SEQ ID NO: 907814 - DNA, 593 bp, Homo sapiens
ttgaaactgtctttttgtagaatctgcaagtggacatttggagcccttttrggcttatggtggaaaaagaaatatcttcacataaaaactagacagaataattctgagaaacttctttgtgatatgtgcgttcatctcacagtgttgaaactttcttttgattgagccgtttggaaacactctttttgtagaatctgcaagtggacatttggagtgctttgcagcctatggtagaaaaggaaatatcttcacataaaacctacacagaagcaatctgagaaacttctttgtgatgtgtgctttcatcacaccgagataaacctttcttttgattgaggagttttgaaactgtctttttgtagaatctgcaagtggacaattggagcactttgaggcctatggtggaaaagaaaatatctccacataaaaatagacagaagatttctgagaaacttctttgtgatgtgtgcattcatgtcacagatttgaacctgtctgttgattgagtagtttggaaacactcttttttagaatctgcaagtggacatttggagcactttgcggcctatggtagaaaaggaattatcttcaca

SEQ ID NO: 907815 - DNA, 696 bp, Homo sapiens
atatgtgcattcatctcgcagaattgagcctttcttttgattgagcagtgttgaaaccctctttttgtagaatctgcaaatggtcattwggagcactttgaagcctacggtggaaaaggaatttatcttcacataaaaactagagagaagaattctgacaaacttctctgtgatgtgtgcgttcatctcacagagttgaaactttcttttgattgagctgtttggaaacagtctttttgtagaatctgcaagtggacctttggagcactttgtgtcctatgatagaaaaggaaatatcttcacataaaattcagacagagccaatctgagaaactactttgtgatgtgtgcattcatttcacagagttaaaactttagtttggttgagcagttttgaaactctctttttgtagaatctgcaagtggacatttggagcgcttttaggcctattgtggaaaaggaaatatcttcacctaaatactagacagaagaattctgagaaacttctttgtgatgtgtgcgttcatctcactgagttgaaccttcattttgattgagcattttggaagcactccttttgcagaatctgcaagtggagatttggagcgctttgcagccagtggtagaaaaggaaatacctgcacataaaatctagacagaagcaatatgggaaaattctttgtgatgtgtgcatt

SEQ ID NO: 907816 - DNA, 696 bp, Homo sapiens
atatgtgcattcatctcgcagaattgagcctttcttttgattgagcagtgttgaaaccctctttttgtagaatctgcaaatggtcatttggagcactttgaagcctayggtggaaaaggaatttatcttcacataaaaactagagagaagaattctgacaaacttctctgtgatgtgtgcgttcatctcacagagttgaaactttcttttgattgagctgtttggaaacagtctttttgtagaatctgcaagtggacctttggagcactttgtgtcctatgatagaaaaggaaatatcttcacataaaattcagacagagccaatctgagaaactactttgtgatgtgtgcattcatttcacagagttaaaactttagtttggttgagcagttttgaaactctctttttgtagaatctgcaagtggacatttggagcgcttttaggcctattgtggaaaaggaaatatcttcacctaaatactagacagaagaattctgagaaacttctttgtgatgtgtgcgttcatctcactgagttgaaccttcattttgattgagcattttggaagcactccttttgcagaatctgcaagtggagatttggagcgctttgcagccagtggtagaaaaggaaatacctgcacataaaatctagacagaagcaatatgggaaaattctttgtgatgtgtgcatt

SEQ ID NO: 907817 - DNA, 605 bp, Homo sapiens
gaatggaaaaggaaatatcttcacataaagacaagaaagaagcattctgagaacttctttgtgatgtgtgcattcacctcacagagttgaacttttcttttgatttagcacttttgaaatactctttttgtagtgtctgcaagtggatatttggagcgatttacagcctatggtggaaaagtaaatatcttcacatcaaaaccagacagaagcattctgagaaactcctctgtgatctgtgcattcatctcacagagttgaacataactttcaattgagcagttttgaaacactctttttgtagaatctgcaagtggatattttgagtgctttggggcctatggtggaaaaggaaatatcttcacttaaaaactagacaaaagcattctgagaaacttctttgtgatgtgtgcattcatcacacagagttgaacctctccttaggttgagcagctttgaaacactctttttgtagaatctgcaagtggacatttggagygatttgaggcctatggtggaaaaggaattatcttcacataaaaactatacagaaacattctcacaagcttctttgtgatgtgtgcattcaactcacagagttgaac

SEQ ID NO: 907818 - DNA, 570 bp, Homo sapiens
caaagaagcttctcacaatggatctgtcaaggttttctgtgaagatatatccttttcaaccataggccttaaactgctcatgaatatccctctgcagatactacaaaaagactgtttccaaactgctgcatccaaagaaatgttcaactctttgagatgaatacacatatcacaaagaagtttctcagaatgcttctgtctggtttatatgtgaagatatttcctttctcaccataggcctcaaaatgctccaaatatgcatttacagactctacaaaaagagcatttccaaactgctcattcaaacgataggttcaactctgtgagaagaaagcacacatcacaaagtagtttctcagaaagctcctggctagtttttatgtgaagatatttcctttttcaacataggctgtaaagggatcacaaatattttttacagattctacaaaaagactgtgtccaaactgctcaatccaaagaaaggttcaactctgtgagatgaatgracacatcacaaagaagtttctcagaatgcatctgtccagtttttatgtgaagatatttcttttc

SEQ ID NO: 907819 - DNA, 253 bp, Homo sapiens
aaagaagtttcttagaatgcttctgtctagttttcaggtgaagatatttcttttttcaccataggcctcaaagcgctccaaatatccatwtccatattctacaaaaatgctgttcccaaactcctcaatcaaaagagaggttcaactctgtgtgatgaaagcacacttcatgaagaagtttctcagaatgcctctgtctagtttttatgtgaagatatttcctatttcaccttaggccataaagggctcacaa

SEQ ID NO: 907820 - DNA, 489 bp, Homo sapiens
aagagaggttcaactctgtgtgatgaaagcacacttcatgaagaagtttctcagaatgcctctgtctagtttttatgtgaagatatttccyatttcaccttaggccataaagggctcacaaatatccctctgcagattctagaaaagaactcttttcaaactgctaaataaaaagaaaagttcaactctgtgagatgaatgcacacatcgcaaagaagtttctctgaaagcttctgtccactttttatgtgaagatatttcccttttcaccatacctatcaaagcgctcaaaatatccctttgcaaattctctgaaaagactgtttccaaacttctcaatcaaaagaatggttcaactttgtgagatgaatgcacatatcacaaagaagtttctctgaaaccttctgtgtagtttttatgtgaagatatttcctttttcaccataggcctcaagccactcgcaaatatccctttgcagattttgcaaga

SEQ ID NO: 907821 - DNA, 651 bp, Homo sapiens
tcaaactgctccaaagatccatttgcagattctacaaaaagtgtgtttccaaactgctcaatcaaaagaaaggttctactctgtgagatgaaagcacatatcacaaagatgtttctcagaaatcttctgactagtttttaggtgaagatatttcctatttcaccataggcctcaatgggctcacaaatatccctttgcagattctacaaaaggactgttttgaagctgctcaatcagaagaaaggttaaactctgtgagatgaatgcatacatcacaaagaagtttcttagaatgcttctgtctagttttcaggtgaagatatttcttttttcaccataggcctcaaagcgctccaaatatccatatccatattctacaaaaatgctgttcccaaactcctcaatcaaaagagaggttcaactctgtgtgatgaaagcacacttcatgaagaagtttctcagaatgcctctgtctagtttttatgtgaagatatttcctatttcaccttaggccataaagggctcacaaatatccctctgcagattctagaaaagaactcttttcaaaytgctaaataaaaagaaaagttcaactctgtgagatgaatgcacacatcgcaaagaagtttctctgaaagcttctgtccactt

SEQ ID NO: 907822 - DNA, 509 bp, Homo sapiens
acatcagaaagaagtttctcagaatgyttctgtgaagtttttacttgaagatatttccttttcctccatagggtacaaaagtctccaattatccagttgcagactctaccaaaaagtagagtcaaaactgcgcaatcaaaacacaggttcacctctgtgaattgaatgtacacatcacaaagaagtttctcagaatgcttctgtgtagttttcatgtgaagatatttccttttccacattaggccttaaagcactccaattatccacttacagcttctaaaaagagagtgtttcaaaactgctaaatcataacataggttcaattctgtgagatgaacgcccacatcccaaagaagtttctcagaattcttctgtctagtttttatgtgaagatatactctgttccaccataggcctcaaagcgatagaaatgtccaattgcagattctacaaaaagagagtttcaaaactgctgaatcaaaagaaggggttaaccctttgagatgaat

SEQ ID NO: 907823 - DNA, 663 bp, Homo sapiens
tgagatgaatgcacacagcataaggaagtttctcagattgcttctgtctagattttatgtgaagatatttccttttctaacagaggccacaaagcgctctaaacgttcacttgcagattctacaaaaagagtgtttccaaactgctcaattcaaagaaaggttcaactctgtgagatgaacgcacacatcacaaagaagtttctcagaattcttctgtctagtttttatgtgaagatatttccttttccaccatattcctcaaagagctctaaatgtccgcttgtagatttttaaaaaagagagtttcataaatgctcaatcaaaagaaaggtttaactctgtgaaatgaatgcacacatcacaaataagtttctcagattgcttctgtctagatttaagtgaagatatttccttttctacaataggctgcaaagcgctccaaatgtccacttgcagattcaacaaaaagagtgtttccaaactgctcaatcaaaagaaagtttcaactatctgagatgaaagcacatatcactaagaagtttctcagattgcttctgtctagattttatgtgaagatactgctttttctaatataggccgcaaagcacaaaaatgtccacttgcagattcyacaaaaagagtgtctccaaactgctctatca

SEQ ID NO: 907824 - DNA, 534 bp, Homo sapiens
tttatctcacagagttgaacgtttcttttgattgagcagtttggaaacacactttttgtagaatctgcaattggatatttggagcactttgaggactatggtgaaaaaggaaatatcttcacataaaaactagaaagcaacattctatgaaacttctttgtgatgtgtgctttcatctcacagagttgaacccttctattcattgaacagtttggaaacgatctttttgtagcatctgcaaatggatatttggagtggttgtaggccttggtgagaaaggaaatatcttcacgtaaaaactagacagaaggattctgagaaactcctttgtgacatgtgcatttataacacagagttgatcccttcttttgattaaacagtttggtaacagtctctttgtagtatctgtagagggatgtttgcgagcagtttgaggcctacrgtgaacaaagaaatatcttcacataaaaactagacagaagtattctgagaaacatctttgtcttgtgtcgattcatctcacagagttgaacc

SEQ ID NO: 907825 - DNA, 702 bp, Homo sapiens
ctctttttgtagattctgcaagtctatatttgaagccctttgtggtctgtgctggaaagggaaatatcttcaaataaaaaagcacagaagaattctgagaaactaccttgtcatgtgtgcattcacctcacatagttgaacataccttatgattgaacagcgttgaaacacactttttgtagaatgtgcaagtggatatttggagtgctttgagtcctattgtggaagaagaaatatcttcacataaatactacacagaagtattctaagaaacttctttgtgatgggtgcattcatctcacagagtttaacttttcttttgattgagcagttttgaaacactctttttgcagaatctgcaagtggatatttgggtggaatttaggcctattttggaatagaatgtatcttcacataaaaactacacagaagtattctgagaaacttctttgtgatgtgtccattcaactcacagagttgaacctatcttttgattgaacagttttgaatctcactttttttattatctgcaagtggacatttggagccttttgaggcctatggtggaaaaaggaatatcttcacataaaactacacagaagmattctgagaaacttctatgtgatgtgtgccttaatatcacaaagttgaacctatcttattattgagcattttgaaacactctttttgtagaatctgcaa

SEQ ID NO: 907826 - DNA, 589 bp, Homo sapiens
cttctctcctctctcactgggaaagagactctagcaactgacgaaggtgaggaagatttaatcacacattcctactccattgagagctgctgcttcttgtgtttttttttttttttctctgtgcttaccgcttatttcttccacacacctacttcaggcatagccaagagtaaaggatagtggtgctggatgtgggccccattagggaagatttaggctttatcctttgtttgtgttctccacttgtgatttgtattaaattcactttgggacacataccacaaggtacaagagggctttttgattgaaaagtgaaaggagcctattagaaatgtgaaatcataatttctggaggtttggggatttaaaaaaatgtggacagctgctggctaaagaactgagaaacgtttaagtcagaaaaatattctaggcaacggagccagagaacctaaatcagtggcaaatactgmtaagccatcattacatactaaatagttattagtcatctcttcgttttaaacagaaagcttaagggtctgaagtccaaagcttagactccattctttctaacaaatcaaaaatcccatcc

SEQ ID NO: 907827 - DNA, 674 bp, Homo sapiens
actttgctatttcttcccctttatcacaattttccacttaatgarccatcttagtctcctgttgaattcaataattcaatttccccttttctttttttctcatctctttcctttctgatttaaaaaatgtatttaacttaaaaaaatccaccttgccctctgtgtaggctctgtctttgagtaaactttacacagaatctcatattttttgaatgacctaataaccctcttttagttttgtcttttccttgtaaattcattaaaagtgaagtttaccactatttcttttgttattctgagttgtcagtttttgctattcaaatttcagtttggaggaagcaccacatatatttctacttcacagcatatttttattattcctacttcatggaagccttaatagcatctttgctagaaggctgttttttctcttagtgatcagaaggatttatttttgtctttgttacccatttctagacaagtgtttgtcagtttatagttcaggtcatgaggatttagatgtaaatcacagaatggtttgcacaactcttacttaaaattgctctgataaccttagattctcattttatctatgttcaatttcttattaaacataatgtatatattttcacctttatatcatctctaaggtttagtgcattgttaggcacttg

SEQ ID NO: 907828 - DNA, 617 bp, Homo sapiens
ctatcactgtacttacctggtgacattgaaactatttctctatgtcctgcagaatggaagctagccaggatgtctagcttatttttctctgtctctataatgccttttacattttctggcacatattaggaactctataaatattggtttaactgaacaaaactaaaatctaaagaataaaattaggccaaatcaaaaatgtaaaaaaaaaaaaaagagaaaaaatagtttcaaaatagaattataggcaatgactaaaagggaacataaataagggtagaatggctcaatgatcatgaatttcagagctaagaagttaaaaattagtttgaaatacaggcaaataactgaattcttaagactaacttctaggttgaaactgcctcccaagacagactctcttcagagcagcaaagccaggaaaaagcaaaccacttgaacatttctctgacagtcattcatatctatggcccacagactcccttgcaagtgcccataaagtccaaaagaatatgttttatagaacaggcctataatcaggcggctcaggggtacattatccttaacccccagagtagtctraaatggaaatttcaaacaatgtaattatctgtttt

SEQ ID NO: 907829 - DNA, 594 bp, Homo sapiens
aagtgcctcagtttctatacaatctttcacaattaygaagccctaaatggcttcccatcctgcaatgatttcataaggagcctatgccacctgtcatgtaaggctttttccatgcctaataaatatgttttggagggatttcaccagtgtttctgctaagatacatgcataaaatggacacagaggttgtgagaaatctctgcagtttctctttgtctatacacatgaaagtattgaagaccagcacttggattagttaagataatgttttaattcatcactgtctcctcctccccttggtaccagcttttatgttcattgcattccccacccttttaagtactcagtacctcctgcatggtaacctattctgatatttgatattatcatgcttaatttgactgaatccattcggatattttatctttaagaaatttgtagttttatacttttaatttatgataaaattagattaatatcaaacattaacaagtgacttttaggaaggtatatgagctttcttattgacttcaaactataaagtacaaactgtgacactagaaatttagtcctttaacacatattgtatttata

SEQ ID NO: 907830 - DNA, 617 bp, Homo sapiens
tgacctcagttgatccaccagcctcggcctccctgttactaaattttagcttactaaataaactgaaaagaaagaaattaagtttttttggcagagaagggcaaggtacaataatagtactgatttaattttttaggagtctttatctttcagaaatatacaccgagattcttatagttgaaatgactcggaatttgcttgaaaatattttaggaggtgtaagtgggtaggggtgtagatgaaacaaaatgggccatgagttggcaataatttgaaatcagtggatggatatatatgggcattccttgtggcagtctatttttgtacatgtttgatgaaagtttacacaataaaaacttaaaatgagtgaatgaatgaaaaatttaaaaaaactatgtcagagtgaacactggttttgctctttagtcactgaaatgttaaggtttgggcatatttcaataatagcaagatattagcaatacaagtaatagcaacacaacttataatcatacatcctcccatgtgcatagagctttacaattcacagggcccaaacctgagcccacaccggaagtaytgatatcactttacaaatgggaaaactgagttccaagagg

SEQ ID NO: 907831 - DNA, 627 bp, Homo sapiens
atttgtctcaatcacacaggggctaagtttgcagaactgaaaatcaggaaagataatctaagctgaatttttattaggagaatttttacctgcacaaatgatatacgattaaattacttacatttagctatgttaaatatgtaagtgtatctttatgaaatagacttacatgaaattcgcatggtcacaattctgctgctgtttaagaatgtttccaggccaggcatggtggctcacgcctgtaatcccaacactttgggaggctgaggcaggcggatcatgaggtcaggagattgagaccatcctggctaacacagtgaaaccctatctgtattaaaaatacaaaaaattagctgggcgtggtggcacgcacctgtagtcccagctactcgggagactgaagcagaagaattgcttgaacctgggaggcggaggctgcagtgagccgagatcgcaccactacactccagcctgggtgacagagcaagactccatctcaaaaagaaaaaagaatgtktccacaagtattcattgagcgcccactgtatgtaaggatgcatgctgagagacagcaatttctccaggcctgaccccctcccactcttttagctagggcattgaggcttt

SEQ ID NO: 907832 - DNA, 590 bp, Homo sapiens
atttcattccttctctttgaccagaacttctcatgagatcagcaccagctgcattgcaataggattgctttcctagtaattttcartggaaaacataaacaagtttaaaccttttaccattagacctgaaaaatagtaaaaacaagaaaatatgtctctacataaaaagaactaaaatccttagtggctgatgtcacctacaagagatgaagatacaattgatcagaggaggtcaaacttggaaaattcagtttcgctaaaagaaaacaaaggtcaaaatattttatgtggataaataaccctgacaactgtagaagattttctacttcacatggaatggtttcctaacaaaaaagtctgggccaggcatggtggctcacatttataatcccagcattttgggaggccaaggcgattggatcacaaggtcaggggatcgagaccatcctggccaacatgatgaaaccctgtctctactaaaattagctgggtgtggtggtgagtgcctgtaatcccagctactcaggaggctgaggcaggagaattgcttgagcatgagaggcggaggttgcagtgagccgagatcatgc

SEQ ID NO: 907833 - DNA, 601 bp, Homo sapiens
aaaagtggacttatctctaattctgcactggcttcactctgaatcacatatttcagatraagattttacacagcacctcatttaagtaaacacaataattgttgagtattactatcagcactaatacggatacatgtaactagtgccttataacttgcaaagtaaaacctcatttaattggacactcacaaccatcctgtaaaaggggcagttgttttctcttgtttctgctgtctagtgtttcctgtaatatattataccagtatttgctgagctcctacaatgtttcagacactgtactgaacactgaaaatacagcagacaaaagacagatgacagttcctgtcctcatggaatttttattctactgtggagagactgagaatttaaaataaataagaagagccttgtattctagaagacggtaagtgctctggaggaaaataaagcagagaatgaagttacagaaagatgaagagagaaaatacaatgttcacaaagattgacagggacaccttactgagacttgaccaggagcaagaacaaggcagcatgaaagaatagcaaggtatgagcaaatgaaaggaggggaggaagggag

SEQ ID NO: 907834 - DNA, 572 bp, Homo sapiens
cagtcagcttttcatcttcaactttataactttcacctgaggatatgaggaacccacaggggagtttcaaaaatggtatcattttgtatcagacttgttttttaaacacttggtttctcacagagataggtggtttctccttaaaatcgaacatttatatggtgtattttactgtagttgctatcagaaaagttagttttcccaaatttaagttcactctggggtactatagcatgaatgtagttcattctgttgagctagttgttcacgttagtgtagttcacatatttatctggaactcaaaaatgaggggttgagaggggaagctaaacttcacatgtccaaatatataattttaatatttactttatatttagaatagaaaagtaattgattctagaattagaccaattgctaggattgctaggatatataaaatgaagctgaatgttttaactcyggaatttttctgaatagtctaagaaagaaggctgaaatgtaccacttgccttttgacttttgcttgtgtgttttaattttgttcagtgaggctttcacttaaaaaaaatgat

SEQ ID NO: 907835 - DNA, 696 bp, Homo sapiens
acaaatgcagaagcttgtggtagtgtcagttcttcatcactagaggtattcacacagagaccatgtcactttctgtcgagaggggtagttttcaaattttagaattcataagaataatttctggcatggcagccagattctggctcaggaggtcctcataagcatcaagaatctctccttttaataagcgaactagaggattctgatgcaggttaggagtaacaatctgcagattgtaaaagagataattatttttaaaggagaagttagattccatgatgaagtttccatccagctctatgtccagaccatgctgatctatttcttcccagggttcctgttttttgtatagtctttatcacataatttaatattttattatattttgtctccctcttctaatcatttccctcatcccacaaatatttactgataatttaccatgtgccaagcaccattctaggcactggcgagacattatagagccaagcagacaaagcagcctgaccttatggagctgataagctagtgaagggagatttttaaaaccccaaatatatcagttattttataaatttttcctccatacaaccagatgcaaactcttttgggaaggactctgtcttatttagtattttatgtagtgtctaraacaatgctctgcaataacaggtactcaaaagtatattttaaagc

SEQ ID NO: 907836 - DNA, 653 bp, Homo sapiens
aatggcccctttcactgcggacacttagataggcctcttagggagatctaactgttggttttccaaaacagtgacccctgtcagcaggaagcacttaaaagtggtttttgttctcatccttatccttattctaacttcagttagatgtatttctttagagggggaaataacacagttaggaaacagccaagggtcctgggtgaaaccccaccttcaagcctaaaacctcctgaaggctgaaaaatcagactgctggtcccagatgaggcctggctttttccaactgattatgtctgaataatgtccacttgcacactgggggaagggactggagccatgggaagttcacaccttgtgcagggaggaggaatctggccacttcagttcttgtatgatggtctggtgttcagcaatctgggaggtgggggcctgtaaacaaattttttctttacttcttttttttctttttacccaatcgactttacttttcatccttcagagtgtccctgacctaatctttccttgtcatgtgacaagaacccaattttgctaaagttctgcaacatgaggatttggaaccctcgtttagaataagctgaggatatgcatgtargtgtctttctggcttctcttatctgtttcaacgtgtattt

SEQ ID NO: 907837 - DNA, 578 bp, Homo sapiens
cactcaaatctcatcttgagttgtagttcccataatcccctcatatcatgggagggacttggcaggaggtaattgaaaaatgggggcaattcccccttgctattcytgtgatagtaagttctcatgaggtctgatggttatataaggggctttcccttttgctcagttctcggtcttctccttgctgccaccatgtgaagaaggaagtatttgttttcccttctcccatgattgtaagtttccagaggcctctacagccttgctgaactgtgagtcaattagacctctgtcctttataaataacccagtcttgggtatgtctttatagcagggtgaaaacagactaataccgtaaattggtaccacagagagtgctactgctataaaaatacccgaaaatgtggaagacactttggaactgggtaactggcagaggctggaaccatttgaagggctcaggagaagataggaaaatgtgagaaagtttggagcttcctgaagacttgttgaatggctttgattaaaatgctgagagtgatatggacaataaagtcagtgctgaggtagtctcagatgga

SEQ ID NO: 907838 - DNA, 578 bp, Homo sapiens
cactcaaatctcatcttgagttgtagttcccataatcccctcatatcatgggagggacttggcaggaggtaattgaaaaatgggggcaattcccccttgctattcttgtgatagtaagttctcatgagrtctgatggttatataaggggctttcccttttgctcagttctcggtcttctccttgctgccaccatgtgaagaaggaagtatttgttttcccttctcccatgattgtaagtttccagaggcctctacagccttgctgaactgtgagtcaattagacctctgtcctttataaataacccagtcttgggtatgtctttatagcagggtgaaaacagactaataccgtaaattggtaccacagagagtgctactgctataaaaatacccgaaaatgtggaagacactttggaactgggtaactggcagaggctggaaccatttgaagggctcaggagaagataggaaaatgtgagaaagtttggagcttcctgaagacttgttgaatggctttgattaaaatgctgagagtgatatggacaataaagtcagtgctgaggtagtctcagatgga

SEQ ID NO: 907839 - DNA, 648 bp, Homo sapiens
tagctttctctccttttaggcttccctgatctttatgagtgactttattggaaccctccttcccccttttaacttagatgagattgcattatctttatgtcttccaccaggagtaaaggagtcaactgccaaggtaatttaattacttttaatcttgtggcttcaaacaccaaagttaatcttctaagccctcagaccccaagtaagtccctttacaggcaaaggtggtcactaaagatagaagagccaaatcaccctcaatattactgctattattaagattatcattattttttatcttagggattgcagtcatccataaaaagatatttctgtttcccatataattcctccacagtataatctccaaattctattcaaccaatagaggtagtggagcacaatgttaagagtcaaattcccatgttcaaaccctagctacaccaattacatattggttctatagcttgagggaattaaacttcctaatttcaatctcttcatctgcaagctgaaaacaatagtgcctgttttatagagttaytagggatataagctttgtagagagaacgtagcatttagcaattagctattttttatacagattatttttgtgcgtagcatccactctactgtattcaaaaataa

SEQ ID NO: 907840 - DNA, 580 bp, Homo sapiens
tgggcatatacagaagatggtcagatgaggaaaagtataagctggtctattaagtttttaaaacagaagataccaaaagtgaaactcttcatctttaacaagaaaatcatgtttaaagtaaaattatagatgctgctttttattaggggtcaaaatttttactaatctggcttttaaaatgatagaatggattgaaaaggaaggctaagaaatagtttcttaaggaaggtgtttatggatggaatgtattaatacattctttttttttttttttttttgagacggagtcttcctctgtcgcccaggctggagtgccgtggcacgatctcggctcactgcaagctccacctcccaggttcacgccattgtcctgcctcagcctcctgagtagctgggactacaggcgcccaccaccatgcccggctaatttttttgtatttgtagtagagacggggtttcaccgtgtttagccagaatggtctcgatytcctgacttcgtgatccacccgcctcggcctcccaaagtgctgggattacacgtgtgagtcaccgcgcccggccattggtacattcttacttg

SEQ ID NO: 907841 - DNA, 559 bp, Homo sapiens
actgtgtgtggggacgttgaccycacatttcccttttacactgccctagcagaggtctccatgagggctccacccctgcagcagacttctgcctagacaaccaggtgtttccatatatcctctgaaacctaggtggagttcccaaatctcaattcttgacttctctgcatttgcaggaccaacattatgtggaagctgccaaggctaggggcttacaccctctgaggcaacagtctgagctgtaccctggcctcttttagccaagcctggagcggctgggatgcagggcaccaaatcccagggctgcacataggaggggggccctggacccagcccatgaaaaattttttgcctaagcctctgggcctgtgatgggaggggcggccatgaagttttctgacatgccttgaagacattttccccattgtcttgacgattaacatttggctcctcattacttttacaaatttctgcagtagcttccatttctccccagaaaattgtttttgcttttctatcacatcactaggctgcaaactttccaaacatttatgctctg

SEQ ID NO: 907842 - DNA, 583 bp, Homo sapiens
cttcatgattaacatttggctcctttttacttatgcaaatttctgcagcaggcttgaatttccccccagaaaattgacttttcttttctattacatcatcaggctacaaacttttatgctctccttcttcttgaaccctttgcctcttagaaatttcttctgccaaataccctaaatcatctctttcatgttcaaagttccatagatctctgaggcaggggcaaaatgccaccagcctatttgcatagcaagagtgaactttactccagttcccaacaaattcctcacctccacctgagactacctcagcctggacttcattgtccatatcactatcagcattttgatcaaagccattcaacaagtctctaggaagttccaaactttcccacattttcctgtctttccctgcctgttacccaattccaaagtcacttccacattttcaggtatctttacagcagcgccacactctctgcagaaccaatttactatattaatctgttctcacactactaataaagacstaccaaagactgggaaatttataaaggaaagagttttaattgactcacagttcagc

SEQ ID NO: 907843 - DNA, 504 bp, Homo sapiens
ccaagactgaaccagaaagaaactgattccatgaacagaccaataacgagctctgaatttgaatcagtaataaatagcccaacaaccaagaaaagtcttgggacctgatgggttcagtcgaattctaccagatgttcaaagaagtactggtagcattcctacagagaccactccaaaaaactgaggaggaaggactcctcaccaactcattgtgtgaggccagcatcatcctgataccaaaacttggcagagatacaacaaaaaaagaaaacttcaggccaacatccttgctgaacattcatgtaaaaatcctcaacaaaatactcacaaactgaatcccagcagcacatcaaaaagctaatccacaatgatcaagyaggcctcatccccgggatgcaaggttggttcaacatacacaaatcaataaaggagattcatcatataaagagaactgaagaccaaaaccacgtgattatctcaacagacacagaaaaggtttcaata

SEQ ID NO: 907844 - DNA, 648 bp, Homo sapiens
aattcacatatattgtaaaaccagactgcatgtggaacaaactgtgtgtttgaactaattaagtattcaaagaaatatttaatatttcttattcacccaccttgcccccttttctcctcctttctcratcagtaaatatttactggatgtttccagaatgtgaatgttgcataaaaacaagtatatgaaattgtctttgctatcaaggataatataactgaacgtaatatattagcccactttgctgctttaggaagaatactaaggtgagcccagtttaatctttaacatattgttacctctcatttctgcttgttcaaatccaagctgcaactcagtgccatcttcttcatgattatctttactcctacccctctctacctccattcccccaaaaagtgatctcatactcctgtgagcatccttagcatttatgcagtcttttcttttttttttttttttattattatactttaaggtttagggtacatgtgcacaatgtgcaggttagttacatatgtacatgtgccatgctggtgcgctgcacccactaactcatcatctagcattaggtatatctcccaatgctatccctcccctccccccaccccacaacagtccccagagtgtgatgttccccttcctgtg

SEQ ID NO: 907845 - DNA, 622 bp, Homo sapiens
aggaggtgagtggtcagtgagtgaacattactgtctgagctctacctcctgtcagatcagctgcagcattagattttcatagaagcccaaatcctattgtgaactgtgtatgcaaggtatctaggttgcacrctccttaagagaatctaactcatgcttaatgatctgaggtgggaccatttcattctgaaaccatgccccctccccacccttggtccatgaaaaaattgccttccacagaattggtccctgatgccataaaggttggggactgctgatctaaagggagaggtagactcaacaaaataaaagaggacacaaacaaatggaagaatattccatgctcatggataggaagaatcaatgtaatgaaaatggccatactgcccaaggtaatttatagattcattgccatccccatcaagctaccaatgactttcttcagagaattgaaaaaactacttcaaaattcatatggaaccaaaaaatagcccacaatgccaagtcaatcctaagccaaaagagcaaagctggaggcatcacgctacctgacttcaaactatactacaaggctacactaaccaaaacagcatggtgctggtaccaaaacattgatctgtat

SEQ ID NO: 907846 - DNA, 612 bp, Homo sapiens
tatttgctgtaaatatttttcttagtttgtgttctacgtgttttcttaatgatgtccttaggtgagaagaaattttaaatttkataaaatatatttcatcagtggtttattgtttttattgtgtgcgtgtgtgtgtgtggcatatcctactatagggatgtgaagatatatttccattatttcttctagagaaatgattctcaaatggagcctattttgcctcccagaaaacatttggtaaaatctgaagacatttttagttgttacaaaagaagaggtgctaactggccaaaaatgccaatccttcagaggttgagaaatcttactttataattgttatgcataggcctataatccatttaaattaatcttggaacatagagtgaaataggagataggtgtatttttcagccttaactactttactgccattacatttaagtctttatccatcttcagttgatttttgtatatggaataaggaaggggtccagtttcaatcttctgcatatggctagccagttatcccatgaccatttattgaatagggactcttttggtcccattgcttgtttctgtcaactttgctaaagttcagatggtcataggtgt

SEQ ID NO: 907847 - DNA, 509 bp, Homo sapiens
agtcaagtggtcaaacagaagctgtgatgataccaattagcaaaggaaagttgcctggatactctcagagacataacagccttgtgcttaaggatttggattctggagttaaactagctttggaatcatcactttctgcctttgtaaccttgagagaagaatttagccccattaatcttcattcattttctcattggtgaagtgagcctcataatatcttcctcaaatgttttatgaggattacatacaataatctatctgaagtgtttaacgtagtgcctagcacacatcattattaaataaaagttgactatttgtgcttgtttgtgtaactttgattactgttccagaaatgcaaagtgaaaggtataccatacctttcccccagccagttctatattgcctgttggagtaacaagaaatcactcacaatttgactgattatggatgattttccrtcaatgatcccatttaatccactactaacataggacataggccctaatatt

SEQ ID NO: 907848 - DNA, 539 bp, Homo sapiens
ttgggagtttaaggtttagtgactgcccttttggcttttggacttgcatgggacttacagcccttttgttctgaagaatttctcctatttggaatgggagtatttaccyaatgcctgtacccctattgtatttaggaaataactaacttgttttgattttacagtctcataggcagaagggatttgccttgtgtcaggtgagattttggactgtggacttttgagttaatgctgaaatgagttaagactttgggggactgttgggaaggcatggttggttttgaaatatgaggacatgtgatttgggaggggccaggtgtagaatgatatggtttggctgtgtacccacctaaatctcaccttgaattgtaataattcccatgtgccaagggcaggcccaggtgaagataattgaatctgggggggcagttttccatatactgttctcctgggagtgaataagtctcatgagatctgatggctttataaagagcagttcccctgcacaagctctctcttgcttgctgccatgtaagaag

SEQ ID NO: 907849 - DNA, 578 bp, Homo sapiens
tctctgatacagaggtagagaaaatgaatgtttcaaagaaagcaaaatctggaagactatgagactgacttcatcctaaaaacaaaggctggggatgtatttaaaacaaattacagcaaaatctccacrttgataaaaccaggatacccctctggaagttgtaatcatttctttagttactatacaactcccatatttttggccaatgctgctattttgccaaacagttggtcaggggctgtaatccaataagtgttttattttctattgcacattcacaaattaagccacagcggcaacccatatcaacctgatctgctcagagaggcataggaaaagtcaattagtttttccactctctagggccaaatagacaattagaatagagagaaggttgtagggggagaagtctgtgagtattttgcagagaaagtaagtctttgaaaactacaacatcaagttaatatcaatcagcccaacgaatatgtggcactttctaaaaagacgattttcttctattaagttataaaataacagagggtctgatctatgtaatgatcatcatattcactgtatcg

SEQ ID NO: 907850 - DNA, 536 bp, Homo sapiens
gaggcacagaatatgttttgccttggtaaatagtatgctcttaataataatgtccattgtactattgctgggtgcagtgcttttctataaacctcaattaggtcaagatggttgatagcgtggtttagatcttctctttccttattaatttattatattcttgctctatcaatttctgagagaggtgtggtgaagtctccaactatagttgtggatttgtctctttctccttttttagttttacctgtgtttgctttatatattttgaagttctgggattaagtacccacatatttaggaatattatctcttactcattttttcacccatttatcattatgcatggttccttcttcatgattatttttaataaactttattttttaaatcagctttaggttcacagcgaaattgaacagaaagtacagacagttcccatgtaccctttgttcccacacatacaacagtctctcctactgtcaatgtctcacaccasaatggtacatttgatatgtactgaaccttttaaattttgt

SEQ ID NO: 907851 - DNA, 615 bp, Homo sapiens
ctaacacttattatggatttttgtgtctatgagagatattcatctatattttcttttttatactttctttgtttctgtaagcagggtaatactggcttaataaatgaattgagaagtgtttcctctttcaaattgtggaagcaatggtgtagaattggtgttaaaattattctttaaacatttgatacagtgaaatcgtctgggcttagagactttatttttaagagttttaaaattacaatttcagcatctttaatgttataggacttttaaaattatttattttgtattaggtgagttgtaatcatttgtcttttttgagggatttattcatttcgtctaaatcgtccaatttatgagtgtaaaattcttcatagtactttcttattatcctttgatatctgcaggatctgcattcatatcctctattttagtcctcatgctgcttatttgaatcttctctcttttttctttattagtctcgctaaaggtttttcaatgttactgttctttttagagaaccagctctttgtatcattgattttctctattgcttgctttcaatrtcattgatttctgctcttacctctattttttccttcatccttcttgctc

SEQ ID NO: 907852 - DNA, 649 bp, Homo sapiens
  misc_feature 602, 603, 604, 605, 606, 607, 608, 609, 610, 611, 612, 613,614, 615, 616, 617, 618, 619, 620, 621, 622, 623, 624, 625,626, 627, 628, 629, 630, 631, 632, 633, 634, 635, 636, 637,638, 639, 640, 641, 642, 643, 644, 645, 646, 647, 648: n = A,T,C or G
  misc_feature 649: n = A,T,C or G
agcccctcagagcctggctgaagactgaaaacctgtttatccaatggctgactgagctgtgaagcacccagcaaagagccccactgtgctcctccccgccccatgagctgagggatcctgccatctgttcatccctctaaggacatctgagggaggcattgtgatgctggatggtgactgtgttttccaaaccaaaatctgacacacatgggctggcagataggaatgtagttatgaaaagaacagggcaggatgttgggaatcatgatcatggtggaaaatttgggatttgcagtcccgacttgtggagaagactccagaacccagaaagtgctgcccttgagtcctggccatgactatctgtgtggccttgagccaggaggtgctgttgcctctctgtgaccctctggaaggtgcagacatcagccgctccaggacagtgagctgccaagtctctcctaatcccaacagtctgatcagctcctatcaagatgcccaggccggcttcccaggctgccctggatcaagccacactaaacttaatccagcaggaatgccatttyttttgagtttttttctcccctaaatgcataaagagtaannnnnnnnnnnnnnnnnnnnnnnnnnnnnnnnnnnnnnnnnnnnnnnn

SEQ ID NO: 907853 - DNA, 619 bp, Homo sapiens
gtttttgggtggagagtcgtatagatatctatcacatccacctgatccttagctgagttcaggtcctgaatatctttgttaattttctacctcgrtggtctaatattgtcaatggttaaagtctcccactattgtgtgggagtctaagtctctttgtaggtttctaagaacttgctttatgaatctgggtgcatatctatttgagatagttagctcttcatgttgaattgagccctttaccattatgtaatgtccttctttgtctttttttaatctttgttggtttgaagtctgttttgtcagaaactaggattgcaacccctgcatttttctgttttccatttgcttggtaaattttcttccctgcctttattttgagcctatgtgtgtctttgcacgtgaggtgcatctctcgaggacagcataccaatgggccttagttcttcatacagcttgccactctgtgtcttttaattggagcatttagcccacttccttttaagattagtactgttatgtgtgactttcatcctgttaccatgatgttagctggttattttgcatacttgtttatgtggtttctccatagtgtcactggtctgtgttcctcagtgtgttt

SEQ ID NO: 907854 - DNA, 680 bp, Homo sapiens
aaaaactgatcaattagatgctttacgaaaactaaaaactttggctctgccaaagaccattgaggaaggtgtaaagacacattacagactaggaggaagtattctcaaaccacatatctgagaaaagactagtatctataatgcataaggaactcttgaaactcaatacttttaaaaatccagttaggaaataggtaaaagacatttcaccataggggatatgcagatggctaataagcacatgataagatgttcaacatcattagctagtagtgaaatgctaattaaaactataataagataattctatatgcccaccaaaatcactaaaatataaaatagtgacaacaccaaacactatcaaggaacaatagaaactggatcactcctacattcctggtgggaatgaaagtggtacagccattctggaagacagtttggcagtttctcataaactaaacatgcaaccacattcaaaccagcaattgtactcttgggcatttatcttagagaaatgacaacttatgttcactgaaaaatttttacattcatgtttataaatgctttgctcataatggccaaaaactggaagccacccagatgtctttcaatggacaaatgtttaaaccaacagtggtacatccawaccatagaatactttgcagcaataaaaaggaatg

SEQ ID NO: 907855 - DNA, 607 bp, Homo sapiens
tatgaaaaatgagcaagtggagacattgatcttattttctaatatctgggtgatctactatttggttcttatgcattaaattagattttgaaatcttaaactcargtccgggtctctttgagctttgctaattagtgcatggtgtggaaaagctcatgtgtcctagggaaccacttgacactttgatgctccatggcatcaaagcatgaagaatgaaataaaatggtataattattttgtattttaactataagatctcaaaggatgttatagttaaaattcaaagtaattatactatttacatgatataactatataccatataaggtataaaggctctctgtgatcctttaattctccaggatctcagagaaacagatgcaaagacaggattaataaatataaataaatttatataataaaaatattaaagatagggtcaaaagcctccaatttttaactgatagagttgaccaaagtatattaaaataatatacttaattacttaatttagtcagcatgttattgtttgcactagtcacaagggcttttggacaagagtgatgataaatcaatgcaaatccaacatcgcttctagaaaaatgcc

SEQ ID NO: 907856 - DNA, 446 bp, Homo sapiens
cactaacctccactgtctgatgggtttctgtactcctaaatttggagtattgcaggggctattgcatgsttttactaggccttgggcttttaggtccttaaaaatcttttggagtcattgttggggctcgggtctaagggggtactgcttttgttagggaaaggaggcggaatcctttagtttaacttgaacaggatgggcattctttgctcgtccatattgtccttctgttgcccagacttcaggattaattccttcctcaagcaggggacagcaaatgtgtgttccttctcctatgttcaggggtataatggcccctgcttttgctagaatgtctctccctaacaagggagtggggctttcaggcataattagaaaagcatgtgaaaagagtaaagttccccagtcacaacttagtggctgggagaagtatctagtgactgcct

SEQ ID NO: 907857 - DNA, 446 bp, Homo sapiens
cactaacctccactgtctgatgggtttctgtactcctaaatttggagtattgcaggggctattgcatgcttttactaggccttgggcttttaggtccttaaaaatcttttggagtcattgttggggctygggtctaagggggtactgcttttgttagggaaaggaggcggaatcctttagtttaacttgaacaggatgggcattctttgctcgtccatattgtccttctgttgcccagacttcaggattaattccttcctcaagcaggggacagcaaatgtgtgttccttctcctatgttcaggggtataatggcccctgcttttgctagaatgtctctccctaacaagggagtggggctttcaggcataattagaaaagcatgtgaaaagagtaaagttccccagtcacaacttagtggctgggagaagtatctagtgactgcct

SEQ ID NO: 907858 - DNA, 667 bp, Homo sapiens
tggccattcttgcaggagtaaggtggyattgcattgtggttttgatttgcatttccctgatcattagtgatgctgagcattttttcatatgtttgtttgccatttgtatgtctttttttgagaattgtctattcatgtacttagctcactttttattggaattgtttggttttttcttgctaattcatttgagttctttgtagattctgtatattagtcttttgtcagatgtatagattgtgaggattttctcccactctgtgggttgtctatttactctgctgactgttccttttgccgtgcaaaagctctttagtttaattaagtaccagttaggcaatagtcaccaagcagcatggtactggtataaaaatgggcacatagaccaatggaacagaatagagaacccagaaataaatctgaatacttacagccaactgatcttcaaaaaagcaaacaaaagcataaagtggggaaaggactccctattcaacaaatgataattgcccagccacatgtagtagaatgaaactggattcttacctctcaccttatgcaaaaatcaactcaagatggatcaaggacttaaatctaagacctgaaactataaaaaacctagaagataacattggaaaaacccttctgacattgacctaagcaaggattt

SEQ ID NO: 907859 - DNA, 681 bp, Homo sapiens
taaaaaagatactttttttgccaaaaaatttgttttcgctgtcatgcaagttctcctgggtaagcacctttggtcttgttttgtgcatagcatacagagcagcaattgtatatagccaaagaaagcctgtttttttttcttgttaatttatttaagttccttgtagattctggatattaccctttgtcagatggatggattacaaaatttttctcccattctgtaggttgcctgttcactctgatgatagtttcttttgctgtgcagaagctctttagtttaattagatcccatttgtcaattttggcttttgttgccattgcttttgtgttttagtcatgaagtctttgcctatgcttatgtcctgaatggtattgcctaggttttcttctagggtttttatggttttaggtcttatgtttaaatctttaatctgtcttgagttaatttttgtataaggtataaggaaggggtccagtttcagttttctgcatatggctagccagttttcccaataccatttattaaacggggaatcctttccccataaggatatgaacagacacttttcaaaagaagacatttatgcagccaacaaacatatgaaaaaaacctcattatcactggtcattagagaaatgmaaatcaaaaccacaatgagatactatctcacactagtca

SEQ ID NO: 907860 - DNA, 564 bp, Homo sapiens
taaagcatcgaagtattttgttatagctgcccaaagcaagacagctaccatatgccctcaccaaattttccctatttattaacatctaayattagcatgttaaatttgctacaattattagagcaatgtgtagatttattgttataactgatgtgcagattttatttagatatccttatttttcttttaaatctacactcctttttttattttagaatctcgttcaggatattactttacatttagggcaggtttcttagcaatgaattccttcactttaatgtttttcttaaaaatttattgctcttcattcaagtttgaagattaattcactgggtaaagattaattttgtggttttcttctttccacactttaaatacttaagttcattttttttttttctggcatggtttctgatgagagtccactataatatcatttctctatagaaaatatggagttttttatctattttatttctggattttctctatgtctttgtagtttctttttgaagtttgcgttagcagcagcgaatttgtagggttctgcagcaacacaat

SEQ ID NO: 907861 - DNA, 691 bp, Homo sapiens
tcaggtcccacatctccctgcagttcatttatgcttcaggtcaagggtcacaaatattcacttgataagggatgacagattagtcacagctagmtgctgaaagtggagttgcatgaagtgcacatttagcttgcatgagggagagcacaaattggaaacttatcaaaattgccttggtgggtctctttcaaggcttctttggaggctgctctcagatctattacctctggaaattcttgaggacttttaaaaatacaatgacatctcatctcttcttaaattctgtctagtggacaatttgtgaggggtgtatgtgggaatctgcaattgaattcttcctcaggtacggtgagttgggcctcattccagctccaccgccatcatcatcagaatcctagtgggaatttcccttcctcagaagactgaaactccacctgtgctggtaatgccaggccccctacatagctccagtctattacctcaagggaacacaaaggcacactcttacaatatatatttacacctgagcttgtaaatatgacagctaagaatcagaaatgttgttttacttaaatgggcttgtcagtagattgggagtatattgtattccaaggaaatgctttttagatgtaattttaggtacaaactctggattttccttcacgtacaaaaattaaaactttgattacac

SEQ ID NO: 907862 - DNA, 600 bp, Homo sapiens
aaaaatacacaggctttctttgattagtcaatttttttccccaagagttgtatctcactgagtacagtttttttattcaagagttgtatctcacagtgagaaagaaagaaagaaagaaagaaagaaagaaagaaagaaagaaagaaagaaaaaaaaaaacttgaaataaagaaacttgaaagaaggttgagaattgttacttatttgcaaatcttgagttttggcctgagagtggagagtaattggaacattgaagatgaaaaaatttctaagagattaaaaaaaaaaacaagaaaagaaaaaagaaaagaaagagaaacaactattaattctaagaaaagcacaaggttacataaaaaagccaatttcttcttagcacattgtgtgacttagctgtgaataatatttatataatcaaaaataaaatatgtgttgaccatttctctaacaaaaaattatgacatatctctcttggggaattatggaacaggaagtgtgtgtatatgtgtgtgaaggtarggaaaggagggggctaggtaagagagctaaatttccctagcaggaaattaacagaaaatacctaagctttaaaacatcagg

SEQ ID NO: 907863 - DNA, 573 bp, Homo sapiens
ggctgtgacagagtctagcacaaggaaggaatrctataaacatttgtgggagaaaaatgagacaacagacttggaagatgaagtggaggcaggggagggagaaggcatccaagccagaggaagcattgtgtgcaaagagagatggaaattcagaagaaccacaggggctaggagagaaattcaggggaaaaagcggtaaggaggagaggcttagcagggtccggagctagattgtgaggaatctggtactccaggaagagagatttcactgtgtcctgtaggtgctggagtcactgaagaattctgagagaggaagtgacacatctaagttgggagaaagtttcaggaaatgagtagtcagtagaggagtcaaaaaaaataaggaagagctttagaattcccaaacattggatttgaaggataggaggtgattgggtcattctggcatctgtgagggaagcagggagggagtatttggggaggggaaaagctgtagctgggagacaggtaaagagggcatttattataacagggaaggtgaaaagggccaaggtctgaactagggcggggcag

SEQ ID NO: 907864 - DNA, 602 bp, Homo sapiens
atttctgtagctacatttatgaatattcaaccttacaaaattactttttttccccatgaaacttttcagattttggaactgcagaggaaagattatagacctgtgtcaacaaataatgattgttgagtaaccaaccattctctgcctctgaagaggaacatcctataattctttctttcttagatttttttcctttggctttgacattttaattacacaattgatgaatgtttagcatagaaaaaaaaaaaactagaaagtcagaaactcaggacttatgtaatcaaacaactacgagaaaaaaaatagcctcaagctggaatcctattgatttaatccccaaatcccattatacagttccacttcctctgaccagggagccaactttgaaatgtaagaaagaggcacgggaagggctgggtccctgctgcacactgactgtgacttggcacctgttctgcactcaagaggtattaacactttgctgaagaattctgggctaggctcactgtctttctctggctccaaaggaaggatggggaggaagtaacaggtactttggccagaaaatcgtgggaaaaaaratttaaccatttaacatg

SEQ ID NO: 907865 - DNA, 683 bp, Homo sapiens
gtagtttgtgacatcaaatatgtatgttttatatctctcattaatttgaaaataatttgaatttcactaagtttcaggtcttgaaaactcrccagttagtcaaaacaaactcaccaatagcctaatccccatttatccctttttttcatatagtcaatgtttatttagatttcactgtttaccattttctttgcttacatgtcttccctcctgcccccaccatgagatttattgagcatacatatacttgacaaattaaatttgcatatatttatggtatataacatgatgttttgatgtatgcatacattgtgcaatgattactacaatcaagctaattaacgtggctcacgcctgtaatcccagcactttgggaggccaagttgggtggattacctgaggtcaggagttcaagaccagcctggccaacatggtgaaaccccttctctactaaaaaaaaaaaaaaattagccaggtgtagtggtgggtacctgtaatctcagttactcatgaggctgagacgagagaattgcttgaacctgcaagacagaggttgcagtgagctgaaattgcaccattgcacaccagcctgggcaacacagtgagactctgtctcaaaaataataataataataccaacacatttatcacctcatgtagttaccttttgtgtgtgtgtgtgt

SEQ ID NO: 907866 - DNA, 597 bp, Homo sapiens
gctgggctggagtggctgtggggtgtccagatagatgggcatgtagactagtgctttctcaacctttaatgcatgcacaaatcatcgagatcttgttaaaatgtagatcctgggtgggcayggtggctcacgcctgtaatcccagcactttgggaggctgaggcgggcggatcatgaggtcaggagatcgagaccatcctggctaacacggtgaaaccctgtctctactaaaaatacaaaaaattagccaggcatggtggtgggtgcctgtagtcccagctactcgggaggctgaggcaggagaatggcatgaacccgggaggcggagcttgcagtgagccgagatcgtgctgctgcactccagcctgggcaatagagtgagattccgtctcaaaaaaaaaaaaaaaaaaaatgtagatcctggctcaggaggtctgggataggacctgggattctgagtttctaacaagctcccagggatgtccatgcttctggtccctgaaccacactttgagtgacaaggatgtaaactgttggaaacatggatctggtgctcattgcgggaaagggggtgtcctcagggcataggtcacagcc

SEQ ID NO: 907867 - DNA, 540 bp, Homo sapiens
aaaaaaaaaatcttaaaaaacctcctccacaaatattggtaaaaagctttagcctttgttatgtaggtcaactcaacttatccctttytcaccagaaacacaatttggataacaatataaagcggagataaaccagtgagtttgtatttttgtattactctgttttactgcctcatggttaaaaacttttttttttttttttttttttttgggacagagtctcacttcattgctcaggctggagtgcagcggggcaatctcggctcactgcaacctccacctcctgggttcaagtgcttcttgtgcctcagccgggcgccaccatgccccacgcccagctaatttttgtatttttagtagagacggggttatgccatgttggccaggctggtctcgaactcctgacctcaggtgatccacccacctcagcctcccaaagtgctgggattacaggcatgagccactgcacctggcctggttaaaattttttaaatgagaagtcataagatctggttacatcactctatatgtttgtgtatg

SEQ ID NO: 907868 - DNA, 540 bp, Homo sapiens
aaaaaaaaaatcttaaaaaacctcctccacaaatattggtaaaaagctttagcctttgttatgtaggtcaactcaacttatccctttttcaccagaaacacaatttggataacaatataaagyggagataaaccagtgagtttgtatttttgtattactctgttttactgcctcatggttaaaaacttttttttttttttttttttttttgggacagagtctcacttcattgctcaggctggagtgcagcggggcaatctcggctcactgcaacctccacctcctgggttcaagtgcttcttgtgcctcagccgggcgccaccatgccccacgcccagctaatttttgtatttttagtagagacggggttatgccatgttggccaggctggtctcgaactcctgacctcaggtgatccacccacctcagcctcccaaagtgctgggattacaggcatgagccactgcacctggcctggttaaaattttttaaatgagaagtcataagatctggttacatcactctatatgtttgtgtatg

SEQ ID NO: 907869 - DNA, 570 bp, Homo sapiens
aaaagctattttgaagttgtacaactaaattatgaaatatattttctattaccatggtatataagacatgacgtttttargtgttttttttttttaataattgcaacttttggcagataccatgaattggcttgctcaatacttattctagttgcttttcaattctcatcctcaatgacacatatagaaaaactaaaatctgcatttccacaaagaggataaaggtggaggcatcacactacctgatttcaaactatactacaaagctaaaataattaaaatagcatgatactagattcaaataaacacattaaacaaatggaacagaattgagattacagaaatgaactcatgtttctgtggtcaatggattttcaacaacggtgccaagaatatgcaatggacaaaggacaatttcttcaataaatggtgttggaaaaactggacatctgcatgtaaaagaatgaaatgggatcatcatctcacatcacgtaagaaaataaactcacatggattaaagacataaacacaaaacctgaaactgtaaaactacttaaagaaaatataggg

SEQ ID NO: 907870 - DNA, 556 bp, Homo sapiens
acaaactattctaaaacatagaggaggaagaaatagtacaaaattcattctatgagggcagtgttaccctgataccaaaaccagayaaagacatatcaaaaaaaaaaaaactccaggccaatatctctggtgaatattgacaacacatcctcaagaaaatactagcaaaccaaattcaacaatgcattagtaagatcattcatcatgaccaagtggaatttatccctgggatgcaaggatggttcaacatacataaatcaattatgtgatacaacataccaacagaatgaaggataaaaaccatatgatcatttcaattgatgctgaaaaagaaagttgataaaattcaacaacccttcatgataaaaaccctaaaaaaactggggatagaacgaacatgccttaacataataaaagccatattatagaacagacccacatttagtatcatactaaatggggaaaaacttaaagtctttcctctaagatttggaacatgactagcatgcccactgtcaccactgttattcaaggtagtactcaaagtcttggctag

SEQ ID NO: 907871 - DNA, 610 bp, Homo sapiens
acaagatgacaacatccagggatagaaagggaaacatatctatattgttctcttttcttcctttcattctttttttttgagacaggatctggttctgtagcccaggctggagtgcagtggtgcaatctcggctcactgcagccttgacctcccaggctcaagtgatcctcctgcctcagcctcctgagtagctgggactacaggctcgcaccaccacccccagccattttttttttttttttttttttttgtagagacagagtctccctatgttgttcaggctggtctcaaactcctgggctcaagcaatccacctgccttggcctcccaaagtgctgggattacaggcatgagccaccatgctcagccccttgttttctttttttaaaacagtgaaaacctttccagaggcttcccaaccaattttcttgtctcattggccagaattgtatcacgtgcccttgtttaaactacccacttaacagcattaagacctgcggactggcttaaatgagaaaagattcatttcctagaactgcctaggagggtaaccctacaaaataaaggacatggtcactgaaaggagagtraaccagactggaattctctt

SEQ ID NO: 907872 - DNA, 570 bp, Homo sapiens
cttaagtgggcccctgccccctgagtatcctaactgggagacacctcccagtaggygcagactgacacctcataaagccgggtgaccctctgagacgaagcttccagaggaaggatcaggcagcaacatttgctgttctgcaatatttgctgttctgcagcctctgctgctgatacccaggcaaacagggtcgggagtggacctccagcaaaatccaacagacctgcagctgagggacctgactgttagaaagaaaactaacaaacagaaaggaatagcatcaacatcaacaaaaaggacatccacaccaaaaccccatctgtaggacaccatcatcaaagaccaaaggtagataaaaccacaaaggtggggagaatccagagcagaaaagctgaaaattctaaaaatcagagcgcctcttctcctccaaaggatcacagctcctcaccagcaatggaacaaacctggacggagaatgactttgacgagttgacagaagtaggcttcagaagatcggtaataacgaacttctccgagctaaagaaggatgttcgaacccattgcaaagaa

SEQ ID NO: 907873 - DNA, 600 bp, Homo sapiens
acaggaattgttaacactgtggatgcatagtcatgaataacagttggaatgawcaacaagctaaccaaaatgcttaaaaaaatggggaagtgggggaatcagaagtccataggggctttgataagtccttctaatccataaaaccatggtcgtacattctcagaaaaaagctcagaaaggccctaagctctcaccttggggctcacacaagcaggaagtgaaggcccagtcagagttctcaattgcctggctgaatgatgatggcatattccaacattcacatagagccccttgccagagataggagactcattggttctaggcattgaagaaaatctctgttcaattactggctaatcattatcctaactgaatacagatttcagtgaccacacatgaaaaggaacacagacttacagaatttattaaataaacaaaaccaacagcaataaaccctggggaatttgctggagaagaggaagattctgatttccagagttctcacattattgaaaatgccaaattttaacaaaaacttatgagacacttgaagaaacaagaaatttggcctatgcatattttttataaagccttcaataa

SEQ ID NO: 907874 - DNA, 658 bp, Homo sapiens
gcccccttgcctggataagactgtggaccaattttgatcatggcatcatgaccacaagagcacagttaracttcatctgcagcaaggttatcacactgttcaagtagcaggaaatgtttataagttgaatgaacaggtaaacaagggaaatgtttttcttcatattgaaggtcaagaaacagttttaaagtgttaattaaaattttataaatagagctattataagcaaacagtgacttcactaatttacaaaccattcctctcattgattgaaacacaaagaaaccctccaaggaataaaatagcttaactttttaagacagcattggttatagatttaaaagcaatagttttgcatttcaagaatgtgccaaaacttggggtttttcgtaaaacacatagacctagtaatcctcatttatcctagagaaattaaaacttacattagcacaaaataatttgtacttgaatgtttgtagcatcattatttctaatcacagaataccttaaagtaaccaaaatgaccttcaaagggtgaatagataaactatggtatgtcaatacgctggaatgctacacagaaatcaaaaggaatgaaccttaggtatacacaacaatgtagatggatctcaaatgctttatgctgagtgaaagaaga

SEQ ID NO: 907875 - DNA, 582 bp, Homo sapiens
gaagtatatatgatttaaaagtcactatgtyacttctaagttttaaaatcaacattctatcagtgacacatattacagaatagtcagcatgtttactaggtccatgtgggcagaaagccaaaagaggttattttatttcttacgttactttttttttttaaaaaagtgtataataggaaatcattgatagatcaagaaaagaagtaatgtggtcaggtaggtagtatggtaaattcaacatatttctgatgacaaagaaataggcaaagaaaaataaatgatgttcacaaagactctttggcataatccttcttggagacgagaactgcatattgaaggactaattcctcacaaagagatgtattcttaaatacaccctattgtggtcttggcctttgttgttttcattttaggaataagtgtctcctatgttccactaaagcaaagacaactatttttttaagtaaatattactagacagaagaaaagtaattaagaatcacatagtagaacacaatataattaaatttcagtagatttatttttattttaaaaagattttttattttaaaaattaatata

SEQ ID NO: 907876 - DNA, 606 bp, Homo sapiens
tcagtttctagaaagattcgtccgaaggggatgagaactgactgccttcctagtgccatggatgaatctggcccactgaccaggcagcactaacaagcaatggggaaactgagtcatttttatggacgtgtctagtctccagtatgttatatgttcctggggcacttgataaaccccttcctcttttccttctctgctattttgttctgttcctcagagtagtgggagagcgctctgcctgaacacttgatcgtgtgttgtggaccattccctgctgagtaatgacgtgcatcttttcgtgaacttgctgatcacttctgtatcttcttttctggagtgtctgttcaaattttttgctgatttttctttacttgaagacagagagaaacagggagattaagagagaccaaattttcctcccagtgtatgatttccttaataatttgatgatagtgtatcttgacgagcagtaatttttaattttttgaggttcattkgatcactttttattattacacctgcttttgtgctgcttaagatatcattgcttattccaattgtgtaagcaaatatattattctgtgttttcttctagatactttatat

SEQ ID NO: 907877 - DNA, 550 bp, Homo sapiens
aaactgaaacacaatggcagagaatatgacaaggacagtagggaaatctgaagcctctgacatatattttttgaagaaaagatattggcaaatccattgacctcagattcttttatcatagggcatttgcagggttcctagctgagaaaaaaaatgcatgcacttggccgggcactgcggcttacgcctgtaatcccagcactttgggaggccaaggcaggtggatcacgaggtcaggagatcgacaccttcctggctaacacggtgaaaccccatctctactaaaaaatacaaaaaattagccaggcagggtggcgggcgcctatagtcccagctacttgggaggctgaggcaggagaatggcgtgaacccgggaggcagagcttgcagtgagccgagatcgtgccactgcattccagcctgggygacagagcaagattccatctcaaaaaaaaaaaaaaatattcatgcacttcccaagtctccacttgtattctatttgccttagatctctaagacaaaaaagtgggtgaaggatatgaacagacac

SEQ ID NO: 907878 - DNA, 533 bp, Homo sapiens
acgtttgattggtgtacctgaaagtgacggggagaatggaaccaagttggaaaacactcttcaggatattatccaggagaactttcccaacctagcaagacaggccagcattcaaattcaggaaatacagagaacaccacaaagatactcctcgagaagagcaaccccaagaaacataattgtcagattcaccaaggttgaaatgaaggaaaaaatgttaaggtcagccaggaagaaaggtcaagtagttacccacaaagggaagtccatcagactaacagtggatctctctgcagaaaccctacaagccagaaagaagtgggggccaatattcaacgttcttaaagaaaagaattttcaaaccagaatttaatatccagccaaacaaagtttcatagatgaaggagaaataaaatcctttacagataagaaaatrctaacagatttttgtcaccaccaggcctgccttacaagacctccagaaggaagcaccaaatatggaaagaaaaactggtaccagccactgcaaaaac

SEQ ID NO: 907879 - DNA, 533 bp, Homo sapiens
acgtttgattggtgtacctgaaagtgacggggagaatggaaccaagttggaaaacactcttcaggatattatccaggagaactttcccaacctagcaagacaggccagcattcaaattcaggaaatacagagaacaccacaaagatactcctcgagaagagcaaccccaagaaacataattgtcagattcaccaaggttgaaatgaaggaaaaaatgttaaggtcagccaggaagaaaggtcaagtagttacccacaaagggaagtccatcagactaacagtggatctctctgcagaaaccctacaagccagaaagaagtgggggccaatattcaacgttcttaaagaaaagaattttcaaaccagaatttaatatccagccaaacaaagtttcatagatgaaggagaaataaaatcctttacagataagaaaatactaacagatttttgtcaccaccaggcctgccttacaagacstccagaaggaagcaccaaatatggaaagaaaaactggtaccagccactgcaaaaac

SEQ ID NO: 907880 - DNA, 628 bp, Homo sapiens
gctggatcatatagagtaaattggattatgcattttagcttttgcatgtacttccccctctcaacaraagggatacaatttggaaaggatctggcaaatagtccaagtactggaaaagagaaccctgctctctttgatcctgctctcaaattttgagtatataggctggggtatttacctggtaaactctgaggaggaagactcagtgggaaggaatcaataagacctcttcaacaattcaagtttaaatcttcctttagacttaactatgggaattctgaggatacttttgtcctttatttagttacaggcttcataatacttagtgttaggaatatactagctgcttaacaaatgttgaaaacagaataaataaaaggttaaaaatttaagaattaacacggcacaattgagcttttcaggtatactaacagatattcaacagaataaatattttaaaggctttttaatataagctttcatctaataagcagtttgaagtactagaaagagcacaggcattatcatacacatctatgtgacttaatctctctgagcttccttccatgtcttcatttgtaaaactggaatcaacttagtttacagagttgctataaagatttaagct

SEQ ID NO: 907881 - DNA, 571 bp, Homo sapiens
tactccctatagtattatttcttttagtgtgggacgtctagagatgaattcactcaggttatcttttctttcttttttgttctttttggtctgaaacaacctttttttttatagctacattcactggatatagaattgtagtaggcagttattttcttttagcacgttaaatatatcactccactatcttctggctgccattgtttctgttaagaaattgattgttagtcttaaacagagggtgaaatcatttgtgaactcccattcacaattgccacaaagagaataaaatacttaggaatacaacttacaagggatgtgaaggacctcttcaaggagaaatacaagccactgctcaaggaaataagacaggatgcaaacaaatggaaaaacattccaggctcatagataagaagaatcaatatcatgaaaatggccatrctgcctaaagtaatttacagattcaatgctatccccatcaagctaccattgactttcttcacagaattagaaaaaactactttaaatttcatatggaaccaaaaaataacccgtataaccaagacaatct

SEQ ID NO: 907882 - DNA, 658 bp, Homo sapiens
caccacaatgacaggatcaaatccacacatattaatactaaccttgaatgtaaatgggctaagtgccctgtttaaaaggcacatagtggcaagctggataaaaaagcaagacccaattgtatgctgtcttcaacagacccatctcacatgcaatgacacccatagattcaaaataaagagatggaggagaatctaccaagcaaatggaaatcagaaaaaaagcaggggttgcaaccctaatttcatataaaagagactttaagccaaccaagattaaaaaagacaaagaagggcattacatagtggtaaaggtttcaattctacaagaagacctaactattctaaatatatatgcacccaacacaagagcacccagtttcataaagaaagttcttagagtcctacaaaaagacttaggctcccacacaataacagtgggagactttaacacctgactgatggtattagacagatcattgaggcagaaaattaacaaagatatttaggacctgaactcaacattgggctaagtggatstaatagagccctacagaactctcttccccataacaacagaatatacattcttctcattgccacatggcacatactctaaaatgaaccacacaattggacataaaacaatcctctgcaaata

SEQ ID NO: 907883 - DNA, 647 bp, Homo sapiens
cctattcctttttatcgtatatcaggcattttaactcacttgaaatctcacagataggaatcctgaggcacattatgatatktttaactcttcaagtatctaattggatgtgtttttatctggaatgtgtgaaatgtcttcttctttacctaatagtaactggtatgtcttggctcagcatggaaacaacaaatttaacagccaatagatggcactggaagtgttcaaaacattttctatatcttttctgttccattgagtataattatttttttaaagcaaatgacaatttatatagttaaattaaaaatgaaggcacattcagaacgtccatgttgaagaaactcaaatatttcattgttgcacgaccattgaaaattctagcactttaacaatatgaaacgatgccttcattctctcccatgttgtaacttaactactgtgtcattcaagtatgttttaccaccacctgttaggatttctgaagtctgtaaactcaattggtatgtgtgatgtctgcagagatttcatttttggtactattctcctgattatgtgatcctggtaggataaggattacagccaaatgttattaaataatttcattattggttctcacttgcatttttctaaagccaacttcacaa

SEQ ID NO: 907884 - DNA, 578 bp, Homo sapiens
tttattcaattgtgacatgattaattttttatmcatgctaaacttcttccaccaatttcgatttgcaaattcaaatgagtgtcaatagactgaagctttatttgtatgacttccttttaattaccaatttcacacatagatagacaattgatgaaaagtagagacaatgtctttgaataaagacagatgaaaactttgtacttaagtaactatgggaattactaattgagtcagcaaataaaaatttgagtcaccattaggatcggatgaaatttttttctgtgcagttactgatatgtgtgtacttacttattgctaaacacagtttcttcagaagttggtcaactactttagaaagaaaacttgcatattctcagggagcctatgctataaaatccaattataatttttctcccaacaaaattttagatttccgaaaaaatacattcataagaatttttttaaccatatttgttgaagcctaaacttctggagtttacaaatagatttttgtttcaccaaatgtcttccaaaagcaataatagtatacaaaatgtaattgcatactcatggaaaag

SEQ ID NO: 907885 - DNA, 660 bp, Homo sapiens
tttcttttgacttatttttatccatgtgtgggttatattcggtgagttttgcattattctcttttgttgaaaactatattttaaggagtacartgtggcagctctgacagccagctaaccaccaggatttgttgtgctttgtattactggtgctgttgctgtttgtttctttagtgactttcctagactaattctatgacgatgatattatttgttatatgtggctactaaaatctctgcttagttatcttagtagttaggtaattattaaaaacagattttattcgatattttgaaacaataattctcccagccattaccaaggggctctgtgtatgcattggggcatgtcttcagtggtccagagggaagtttacaagtcttccttatctttcacttcctgcttacacagagcctcaaaatcagttagtggtaggtgaatagagttttcttattcttccttggatatgtgcatagtcctgcacatgtatatggccttctatattttcaggaatatgttggaacttttcaaagccctctatgggcatcttattccttagtttttcatatatctatatctatatctaatctatatataatttctgttgttgcctccaactgatatcactgtcttgggaacctgcaatgactaacattgac

SEQ ID NO: 907886 - DNA, 647 bp, Homo sapiens
  misc_feature 312: n = A,T,C or G
atgcgttaatgaacgcttttgggtgatgktgatgagcttcatgtctctcatttgtgcttcttttctgaaaatgtacatatattctgtttttatccttgttatgttttagtatatatctttcttttaatagtcacattatgaaagaataaagaaataaaggattgtctttcatgaagaagtaaaatacaactatatccaactgtttggagaggggagtgtgggttacctgttcataacacagccagttcttccattcattaagtgtattcactgcctgctgtgaaccacacactttgccaggaaagatactgntaaaattaacaaaactgtcacctcaagagactcccttagtcttatgaaagtaacacttcatgctttcaagaaaaacttatttcaacatttaactaaatatctgttattttgcatggtaatatagcatagtgtagcaaaatttacagtctttgggcccagacagacccaagatctaaccacttctctgttactctttcttttataagctcaactggggaaaaatattcaatttccctaggtctccataacttcctctgtattatggagattatggagtttgactgttctgattattatatcacagtgtgtgtgtgtgtaaagaaactggcacatta

SEQ ID NO: 907887 - DNA, 718 bp, Homo sapiens
aggggcagagccctcctggagaacctgtactagggaatgtagaggggaaatgtagggttggagcccccacacagagtccccatggggamactgcctggtggtgctgtgagaagggggccactgtcatccagactccagaatggtagattcactggcagcttgcatctctcacctggaaaagctccaggcattcaacgccagcctatgagagcagctgtggccactgtaccctgcaaagccacaggggcaaagctgccaaaggttattggaacccactgcttgcccaagtgtgctctgaatgtgagacatagagtcaaaagagattattttggagctttaagatctaataactgccctgctgggtttcagacttgcatggggcatgtagcccctttattttggctgatttctcccttttggaatggaagtatttacccaatgcctatacccatcgcatcttggaagcaactaacttgcttttcattttacaggctcataggtggaagggacttggcttgtctcagatgagacttgggactttggacttttgagttaatgctgaaatgagttaagactttggggcactcttgggaaggcatgattagactttgcaatatgagaaggacatgaggtttgggaggggccagggacaaaatgacattgtttggatctgtgtccccacccaaatctcatgtcaaattgtaacccccaatattgg

SEQ ID NO: 907888 - DNA, 606 bp, Homo sapiens
tctgctacattgctcactgagcacacaatctactccaggtgagactaagaatggacccctctcttcatgctggcattttagttagkgaaggtaatggatggtagacgttaagtgtgcctatgaatcatcccactgcctatttctgctcccaggatttatgagataatatgggattgagagtgcagattctagagtcaaactggatttgggctttggtcctgccacttactgtcagagtattttggggtgaattgcttagtcattcttgccccaattttcccatctgtaaaatggggataattctagtatctactttatttggatgttttggggcttaagtgagttcctatttatagagcactttgaacagcgcctagcacattataagtgctccaatattagttacatttattattactctcttttgttttttttttttggtggtggctgaggatcttgtctactcactgtcttgacagtcaattccattattacagtgaatcttttctctggtacagttctacctacaccataggttgcataaattttaaaaaaattctaatttatgagcagtacccaatgcttttcctcttaaaaaatttcttt

SEQ ID NO: 907889 - DNA, 635 bp, Homo sapiens
ttataccttcgcttccttttttctgtctctcttacccactctttcacattttcygccacttccttaatctttgtgaggccttctgaataattttttaaaaatgattttcagttctattttcaattgtgtctaatatattattaaaactgcacattaaagttttactttggactattctatattttaattccagaagttaaattcagttttttcctgcagttattataaggctttcttttcttttattttcttaaacattttaaatatatgtttaaaatacttcatatttgataattgcaaaattataacaaatttctgaaatttgtgtgaatttgtttctgctggtttttattcagcttttggatgattctcccctagtgtgtcttgtttccttctgggctcatttttgattatgaaatacttagtgtccacataaaattatttgtgggcatttttgggtttacagcctttgtgtttgctacttccaggcaccaaagggcacctcttgtcacggaccacttttaatttgaggcttttagaactataaaatgctgtaaatgtcagccacaaataagcttgagatttacgtgcaatcctgaagactttgtggaattattttcatatcccatccccct

SEQ ID NO: 907890 - DNA, 687 bp, Homo sapiens
ccctatttgaccttgggtaaactcgactttgtcaattaaaacacattccacttacttaaaatgtaaccaagattccctcaggacgaatcagtatagtggttaaaaataggattttcttaacactaataaaaagtatatttctccttcctccttacatactactatgattcccatctgatgcaaattcttccccatacagtatccctgggggtcactgaaaatgtcacagatgtttgtaaacaaattctcttggctgccatcccaccatgttcctcctctcccgcccctctgctttgatgtgttctgttgttgccagccacaaaagcgtcatgaagctgcctatgtccctgaggcactgttaacacccaccaaaaagtgacatctgctaccacgtcttcatgagagacacaggctagctcaccctgctcccaatccctctgtgccactctcttccacagcagccacaaaacagcattgccttagggacttagcatctcgtggtgcttttgctgaaatacctccttcagatttgacgctcagtcctctctctgtgcgatcagacaaaagtgtggtatttaagccataaacaaacagagtggcagacaataggtgattttccagaatgactccaaactcctgtacaaactayttttttctctgtccaaactgtcttctcagaatgatgtc

SEQ ID NO: 907891 - DNA, 577 bp, Homo sapiens
aagaacagaagaataaaaaagatatgaaaagtagataaaatagaaaatataaatttaaacataccaatagtaacatcaagtatgaatggattaaacaatccagtcaaaaaccaaagattatgagactggattaaaactaacaaataaaaaaatccaattatatgttgtctgcaaaagtcacattttaggccaggtgtggtggctcatgcctgtaatcccagcactttggtaggctgaggttggtggatcacttgaggccaggagtttgagaccagcctggccaacatggtgaaacccagtctttactaaaaatacaaaaataattagctagacgtggtggcacatgtctgtagtaccagcagctcaggacgctaaggcaggagaatcacttgaacccagaggtggagactgcaatgagttgagattacaccactgcactccagcctgggtggtagagccagactgtgtctcaaaaaataaaataaaaaaagaacmaaagtcacattttggattcaaaaatacaaacatattgaaagaaaaatcttggaaaaaaatataccatacaagtagaaaccat

SEQ ID NO: 907892 - DNA, 676 bp, Homo sapiens
taaaactggtaggtttttagytgtaagttaacaaaactgttcacaaaataaatcatactaaaaacttaacaatattattagataatatttagaaggaaataatgaaataaatgtccccaaaaagttcagtcatttaagagtagtttgatagtttgagtaggccctggcactaggtagcagtgtcccctggtggtgaatcttggtatttcatatctctccatcgtttttcctcagggttcttctgatgctgaggagtctggtcctagcccctggctagctaatccttccagccggaggacattcttcccacatccccgtacgtatgtacctgacagagtggaagtctcccagccacctctgagatctttctcctggaaaagaaatgctatcaagtcactgacaagcacacaagaccagcctgtgttcaccaaattaatcacgtactctaggcctaaccctatctgtatattaaactagctttcttgcttagatgccattgacttgagtaagcagaataagatctatatttcaagtggaaccaagtactctctgtttccctgcagggacaccaaggaaatttcagagctcaggaatatcctaacacagttgcagccagggactctggggcgttcagcccacatggtgctttctgctgcccacagggtgcctccagtca

SEQ ID NO: 907893 - DNA, 611 bp, Homo sapiens
gtgtcttgctacttaaaacaaccagcactcgcrtgaactaatagagcaagaactcactaattaccaatgggatgacaccaagccattcatgagggatcctcctccatgcccccgatacctctcaccaggccccatctccaacattcgggatcacatttcaacgtgagacttggaggagacaaatatccaaactatatcatttctctttttgccttgtcctaataaaggaaggaagttacttgtggtgataaaggccttggttttcactttgttgtctgctgcctgttgaaatgggtcagaatataaaagggtttttctgaggaaaagtaaatgcttggaaaagttcttgttactgggcctattatattagttcccaataagaatttgagctacactgtgctaatagagtccatgagcccgctggtgtcccatctctcagtagaggacagggcagcatattccactccagtagtcgttgtataaaatatatttgaagcacaactctcattacaaggtacgcaatacatttttagtgtgtcattgagaaacatccaggaaatcactcagagaagctttcctgtattctctgagcatattccctttaaaggctt

SEQ ID NO: 907894 - DNA, 647 bp, Homo sapiens
agtcacagagtattggttctctcactctgtaagccatggttttacccatcttcacaggccaaaggtgcttcataaccttgttcatgtattgaggttctgttggctcttgtaatggtaatttcacatgtggacagttgttcatattgatgtttctataggggtatgatagctggagaggtctgcaccactgtcttgctctgcctcgatcattatttttttctaacaagaatttgtctcctcctagtttttctttttctcttaaccgacctaggtatagccttttaatccttctccctcctctgcttctaatgtcattgcttctttgtatgcctatcatatctacatgctacatgaccttcagctggttatgtataatatataagacttaatatcctataaaatagaggtaataatagcatctacttgataggaaagttaagaatattaaatgacaccattgatgttaaatggaggtaactttctgaaatgtattaatgagacatgattctttgttctagtccacttcrtagactagactactttgtttgagttttctcttttcagtcagagaaagcaataaaattgtaatggtaaaaattaaataaaatttaacttaaaattgtgttctggtcttctcattgttcagc

SEQ ID NO: 907895 - DNA, 546 bp, Homo sapiens
gtctctccagtctcttgaatcccgcaacactacaatggctccaagacagcatgtgggatctaagtaataactttttattttttttattttttttatttttgtacaagactgggtctggctttttcacycaggctggagtgcagtggtgcaatcacagctcactgtagccacctcctggtctcaagccaccctcccaccttagcctcctaagtaacttaggactacagttgtataccactatggttggctaatttttgtattttttgcagagacaaggtctcactgtattgctcaggctggtttcaaattcttgagctcaagagatttactagtctcagccttccaaagtgctaggattacaggcacgagacaccgttcctggccagtaattttgttttattatattaaggtgaggtttataccacattcttctggttacagaagtaatacatgctcattgtatacactgaaaaatgtaagcagtataaagaagaaaataaaaaaggatatgaaaatcactagtggtcccattgcctaccgtaacat

SEQ ID NO: 907896 - DNA, 568 bp, Homo sapiens
cagattgaaaatactatatgttcagattttttaaaaaacagtattgcatgaatgttttaattaaaatattcctaaatgagcttgagcaaggaggacaggggagataagtaaaataaggctttgtggcataggagacatttggtggaaatctttcagctcaactaagatttgaaaaaaaaagagaatttttataaaaaatgtaaaggcaggatttacactgatgagcttgtggagaaaatacagagtctaacataattcaaaagagactaatcagtcaaagtggtttcgaaggaatatcttgaagagagagaacataaaatgaagatcaggtatgtagttattttaataatctatccatgagataaaaagcattgggttttatttgtcaaaatgggacaatagttccaagaaccattatttgctcagcctaaagaggtttttacattttgaaccagcgacatattgtgctaagtaggataatatccaaatttgtgtctatatcaayaattttgttctcaattaaaaacactttattcacacaactgatgattatctgcatttgatttag

SEQ ID NO: 907897 - DNA, 663 bp, Homo sapiens
caaccccaagacacataatcttcagatttcccaaggttgaaatgcaggaaaaaatgttaagggtagccagagagaaaggttaggtcacatacaaagggaagcccatcagactaacagtggacctcccagcagaaactctataagccaaaagagatttggggccaatattcaatattcaacagtcctaaagaaaagaatttccaacccagaatttcatatccagccaaactaagcttcataagcaaaggagaaatataattcttttcagtcaagcaaatgctgagggaatttgtcaccaccagccctgccttgcaagagctcttgaaggaagcactaaatatggaaaggaaaaatcattactagctgctacaaaaactcactgaagtacaaacaccaatgacactatgaaacaactacaccaacaagtctgcaaaataaccagctagcatcatgatgacaggatcaaattcacaaaagacaataacaacttaaatggaaatggtctaaatgccccaattaaaagacacagaatggcaagctygataaagagtcaacacccatcagtgtactgtatgcaagagacccatctcatatgcaaagacacacatagactcaaaatacagggatgaaaaaaaaattacctagcaaatggaaagcataaaa

SEQ ID NO: 907898 - DNA, 663 bp, Homo sapiens
caaccccaagacacataatcttcagatttcccaaggttgaaatgcaggaaaaaatgttaagggtagccagagagaaaggttaggtcacatacaaagggaagcccatcagactaacagtggacctcccagcagaaactctataagccaaaagagatttggggccaatattcaatattcaacagtcctaaagaaaagaatttccaacccagaatttcatatccagccaaactaagcttcataagcaaaggagaaatataattcttttcagtcaagcaaatgctgagggaatttgtcaccaccagccctgccttgcaagagctcttgaaggaagcactaaatatggaaaggaaaaatcattactagctgctacaaaaactcactgaagtacaaacaccaatgacactatgaaacaactacaccaacaagtctgcaaaataaccagctagcatcatgatgacaggatcaaattcacaaaagacaataacaacttaaatggaaatggtctaaatgccccaattaaaagacacagaatggcaagcttgataaagagtcaacacccatcagtgtactgtatgcaagagacccatctcatatgcaaagacacacatagactcaaaatacagggatgaaaamaaaattacctagcaaatggaaagcataaaa

SEQ ID NO: 907899 - DNA, 639 bp, Homo sapiens
ccaagtttaaaacttcctgtggctctgggtggcaaatattccaattttcattttgaagatgagtacatgaaccctgtcttagtctgcttgtgctgctataacaaagtctgagactgggtagcttataaagaacagaaacttacttgtgacagttctggaggctgagaagtccaagatcaaggtgctggcaggttcatttgtctagtgaaagctgctttccacttcgtaagatggtgtcttaatgctgaatcttccagagaagggagaaatgttgtgcccttacacaacagaagatagagggcaagctaggtgcttcttcaaaggctgcttgaagtgccttttataggagccttaattccatcaatgagggagcagctctcatggcttaatcacctcttaaaggccttaatgcttaacactaccacattggcaacacctgaattttggaggggacatatttaaaccatagcagaccctcagaaaggtcaagtgactcacccaaggtcatacagtttatacttgttcatgtcactttgcatacatcctgaaatagcattaagcataattytaaatttcatcataaatatctaagtcatggcccaaactgatctttttaaaatgtagtacgtaacaactaag

SEQ ID NO: 907900 - DNA, 645 bp, Homo sapiens
tcaagctcctgggcttaagctaccctccagcattagccccgcaaagtgctgggattacagacgtgagtcactgtgcctggtccaaggagatttaactattctaaatatgtgtgcacccaacatcagagcaccaagatttataaaacaaataagactagacctaagaaaagagatagccatataatagtggaggactttaacattccaccaacaccattagacagatcatcaaggcagaaaactaacaaactctggacttgaattcagcactttaccaaatagacctaataaacagacatctatagaattatccacccaacaatcaaagaagataaattcttctcatctgcacatagaacattctctaagattgaccacgtttggtcataaagcaaatcccaataaattcaataagattgaaatcatctcaaacatcttctctcgactgcagtgaaataaaattagaaattaatgccaagaggaactctcaaaaccacacaaatacatggaaamtaaacaacttgctcttgaatgatttttggggaaacaatgaaattaaggcagaaatcaaacaattccttgaaacaaatgaaagtagagacacaacataccaaaacctttgggatataacaacagcagggttaa

SEQ ID NO: 907901 - DNA, 602 bp, Homo sapiens
cctggtatagccatttctcttttgtgtaaacctaggagcagttataggggctcttctttgtgaagtcctcagggccccaggatctttctatctcttaaccttctgtaagatgttgcttttgtcttcatagtccaggctcaccatgaggtctgcatgacgttccagtcaatctacatctacagtgtaataagcaaaatggtcttccagttaaaaaaaaaggttaaactaagttcaatatatcctgtttattaaggtagaaaagcaacatattttaaaaatacttccatttttaattctctgtgcctaaaggggaaactgatcttatatacctctccctccaagcatcatgggtaaaggatgtgttgcagtataaaagctggagaaaggatgttccttggaatcagacagagatcaagctgaatttctcaactttgtccctaaggaagtcaatattttttttttttttttgagacagagtttcactcttgttgcccaggmtggagtgcaatggcgtgatctcggctcactgcaacctctgccaagcgattctcctgcctcagcctcctgagtagcttggattacaggtgtgtgctaccatgccc

SEQ ID NO: 907902 - DNA, 662 bp, Homo sapiens
tcggaaaatttacctatgcacattagaaaattctctgaattctatttccaaaataaaacacttgaaaaaatattcactgcatatatgatacaaatggccaacattattaaaatatggagtattactagatatcattaaaaataaatatgaatctcattaggataattggcaaaggcttgtgagagcttttcacacaaaagttctgatgacctctaaacttaaaaattaaaagactcaacataattaggaatcaaaaacatttgctctataatggtcatttgaaaatataaagctttgggaaacaatatagcatactgagagagcatcactgttaaggtcttattgaactttgagtatacccctactgtccaattatctgtgaggacttaggcaaactgctgaaactttattgatgttcagatacttcatcaataaagtaggcatagagtctggcacattgtaaacactcaatgtaggctatcataaatacattcaacactgatgaggatgtggagaaatggaccatatcatactacagagatgggccaggaatttggttcracttttctagaagactgtttgtcattatgtatcataaatcttaaaagtctgcatgctctctgacttaggaattccaaatataaaaaaagattaaggcaata

SEQ ID NO: 907903 - DNA, 596 bp, Homo sapiens
cctttgctctgtcaggaaactgtccttcagagtaaatgatgcttgtgctggttgcaggcatattaattatgcaatgctgtattttgagatgcaattgcagatgcaattgaactatttcactgaatttacaagttttattatcacttgagaacaccagacaattactccacttgtgttcatagaccatcattcccttttgacgtatttgggttgtgatgtgtgccaggcttccagacaagcagaagtcgtcaacttagaggtctcaaattctgtgattccgacaggaacagatttattctcaaaaccccagcattggcaaaagagatttttttaaaggcaggaacaagatgacagcctttcaaacaagttctatttctttatagcttatcaccgaatcatctattaaaaatattacaagctaattttatagtttagtcaatgctatcattgggatgtgaccttcagtgatctcagtgctggctggcttggctgctgactgaaacataccagcaatagctatgtgcctcactgacctactraagatacccttttagagaaaatgttgaaaacatggaagagtgccttgaccattgcca

SEQ ID NO: 907904 - DNA, 584 bp, Homo sapiens
aagatctgtggaaccaattttatctgaacacaatggaaaggaactcaccattttgagctacatatggtcttaaagataccatcttaaataaagagaaagtgaagaaaacatggtttcaatcattagtttctttcccagagccactttctccacctctaatatattgtttattttctgctaacactttaaacacttatactcagttaatatttcaactcttgtgtgaggaattggtttttatgctttctagcagacagattgcctgagactgacacttctgaccaagtaaaataagcatatttaaaatgctctgtagcttattttcgcaacgtatttgtgaacactagaacttccatatggaagggactgggggagaggatgcacacagtttgaaaaactattcaggaactggagagggtaatgaaaatgaaaaaatgtaacttatggcctccaatctatcttttcaaaaagtaattaaaaactgaaaagcaaaagaataattacttcttagtttartacccccattctaacacctgatgtaatcattagggtttgatgcagctcaagataaacattgtataaaa

SEQ ID NO: 907905 - DNA, 665 bp, Homo sapiens
gggccatgctcatgctgtggcagtgtatttaggaagtggctctttttcagcacttttaagtctcaagattaaatacactccattcaaaaagatacaatcttttaggcactagatagtttcaggaatgcagaaccttctttactaggctcatactcccactcaagaaagcccttcaggtttagcaagttccacccacctattgcatttctttgaaaagcacaaaggatgaaaagaagtagatgatctctcgagaatgctgagtttctaatcaatttcctgctgaaaatgacatcaaaagtaaatttgagtcaattttgaaaggcaaagaaaaatctctctgttccttctcagtcaatattacttgagacttataacctcttatctcaagcttttcttaattttttcttctcccctactctgttccgttgaggatcagagttcaatcaaatgaaaaccattaggaagaaatacgtgacaattccacacacaaaaaatataaagactaagagcatttaacagaccaaaacaagatcagatgaagcacgatttgaaagaagatagaaatgatgatactttccatattagcaaaaattaataaaagccccaaataracatggttcctaaaagtaagtaggacagctctaaagaactaaagatttttattg

SEQ ID NO: 907906 - DNA, 571 bp, Homo sapiens
tgaggactccaaagcctgtacactttccactttctcacctctgagacttatatgcccatgggttcaaatacaacacagatccccagaacaccagaactgctatcaaaccaataaaatcatgtgggtgaactgtatatctgaaatgagactttgatggacaactctcttgacaggggacatattacatttaacaatttaagaatagggaggaataattgttccagacctcctttgtgacttttcattcattcattcaatataaatttactaaggagccactgtttacagcctctgatctacacattgagtatgaagtaatgaggaaaaaaaaacccaaacagattacacacttttattgacaagtgttctacatcttggtatgggttagtcagaaatatagttctcacatgtaaaacaaaacaaaaaactcacccattgaaattttgtartccctagtccagtacatccatgagtcttatagacctatgtactcacacataatgcaatccaacctaattaaatgccacaccatggttggaacccactggtgacaaactgataagtaggccag

SEQ ID NO: 907907 - DNA, 609 bp, Homo sapiens
ccacctaaagatacctctgttcatgattatgaatgtaaaataagccaattggttgccattttctttgggtctatgatgtctctctcgtcatctggaatttaagcatctgagcttccaaatttcttccccactcttcttaattattatcccttttgcttccatagacagattctgaactatcttttaacataggcaaatgcaatgtaatatcagctgtctcagctgctctttataatgaaggtaattcccctcagcctaggcccttggctgtaatacctggtattggaaagaaccaaaatgcctctttttttccctctctttttttcatgttaaatgacatgtttattttcctggataataaaaataatgactcaagaaagtcctacaaatatttcagcttttccttaacacacgaatgtcttggcatctgtgaaaggttatgtgttgcataggatttgagataagacccaggttaaattagtgctgtgctaggtatttatatgtgaccctgagaaagttgctaaacatctctattttgcttccattctctcacaggcaaaacaagaatgataataggcatgtctcaaggtygctgtgtggaccagctaa

SEQ ID NO: 907908 - DNA, 544 bp, Homo sapiens
tttaatatttttttatagaactcttcaatgagccttattagatttatttttttcttctgtgtatgtgtgggtttttgttttgttttatttgaaacaggttctcactcttgtcatccaggccagagtgcagtgacaccatcactggtcactgtagcctcaacctcctgggctcagaccatccttgcatgtcagcctcctgagtagctaggactccaggcacctaccaccatgtctggctaaattttttaattttgttttttgtagagacagggctccacaatgttgcccaggctggtcttgaactcctgggctcaagcaatcctcccacctcagcctcccaaagtgttgggattacaggtgtgagccagtgtgcctggcctggtttattaagttttaggtattttattcttttttaaaatgcycctattgtaaatgaggttttaaaacttatttttctgatgattgttgtcttatacaggaaatacattgattttattggtaattttgtaataagccaactgggtctttttagttcttctaacag

SEQ ID NO: 907909 - DNA, 604 bp, Homo sapiens
cttatcagcttaaggagtttggggctgagatgatggggttctctaaatatacagtcatgtctgccaggcaaggtggctcatgcctgtaatcccagcactttgggaggctgaggcgggcagatcacgaggtcaagagatcgagaccatcctggccaacatggtgaaaccccgtctctactaaaaatacaaaaattagctgggcatggtagcatgcacccgtagtcccgtagtcccagctactcagaaggctgaggcaggagaattgcttgaacctggaaggcggaggttgcagtgagccgagatcatgccactgcactccagtctgggctacagagcaagaatctgtcaaaaaaaaaaaaaaatcatgtcatctgcaaagagagacaatttgacttactctcttcctatttgaatatcctttatttctttctcttgcctgattgccctggacagaactgccaatactgtgttgtcttgtgctggttttcaaagggaaagcttccagctttcgcacattcattggytatgggtttgtcataaatagctcttattatttttagatatgtttcatcaatacttagtttgctgagagtttttaacatga

SEQ ID NO: 907910 - DNA, 602 bp, Homo sapiens
tttgtttggtttcactgcctatgctccttctactatgattcctaaacttgttgggaatcaaactgcaaagatttaaagagggagcaggtaaagayatgagtggagtgtgtttaaatcaatgagttcaaggcatttgttctttagaaaaaagatgtgatgattccttaaaatcagcgtttatcaaccttggccctattgacatattgggctggataaatgttttcagtaggaggatgtcctgtgtgctgcaggatattcagcaacatccctggcctctgcccacatgatgcaagtagcaccttctccaggtaggattgtaacaccccaaaatttcttcacaaattgccaaatgtcctatgggaggtaaaaatcaccttaggttgagaatccctgtcttaagtgtgctatggagttaagaaaaaggttttgttacctttttttttttaaaatgaaggtgaagttgtttagggagacctgagtatgcttactgataataggagaaagaatcattagagaggaaatgattgaaaatgcaacaaaataaacaaggtgagacacagcatgatcttctggtgctcagtataatgtgtttcaagacacac

SEQ ID NO: 907911 - DNA, 702 bp, Homo sapiens
cttactatgttcttttgtaagcttcttcttgttcatgttagtataaacccttytcatgaagccatgaaaccacatattgaaaaggctatttatatctcttcaactcaatataaatagaaatgtagaccagaattggaagctattagtgacccattgtgcatataaaggtgcatcttgtttttaattttatggcataaattagagaactgaataatggcttctattaaaaattatagataaaatagaaacaggtatatgtatgtctgtaaatttatacatatacttatctatatggttttagaacttggttatatttgtgagataataggaaaagaaaatatcactgtattatcttctatataaacttacgctcacgggcaccttctattagaatggcttgtgtttcattcattccataaaatacagattttccaactctgccaatgaatcagattctttggatgtgaagtgtaagagtctccatgtctaataagtacttcagataagtcttcttctcactcacatttgagtaccactgtcctgtttggcatggagtgtgttaattttcttgaaagccacatagaatcaatgcaagtatttatgtcctgatggttcttaaaatcctaatcagagcaattatattccctaaaaaatatcatatttaggtagatacataaagaggccattaaattaaaactgtgt

SEQ ID NO: 907912 - DNA, 612 bp, Homo sapiens
ttgtgtctttaaatgtattttagcagaaaaytgacagagattgctcaaagatctgctactcaggtggcattaatatgagaaattctccactgtaatatgtttagaaaccagaatatgaatataaataacattgtaaaataaatacccaatagtttcttgacaaactttacatttcccatgattatgaagttaatttttcattcgaatgagtcttagggttttctaggtatacaatcatatcatcagcaaagagcaacagctggactttctcttcgtcgatatgggtgccctttatttctttctcttatctgattgctctggctagaacttccagtattatgttaaatagaagtggtaaaagtaggcattcctgtcttgttccacttcccagagagaatgctttcagcttttccctgttcaatataatgttggctgtgggtttgttgtaaatggttttttttttttgagacagagtttcactcttgtcatccaggttggagtgcagtggcgtaatcttggctcactgcaacctccacctcctggattcaagctattctcctgcctcagcagcccgagtagctgggattacaggcccacattaccaggcccagc

SEQ ID NO: 907913 - DNA, 643 bp, Homo sapiens
tctgctcttactgttgtaatacagcatgaagartgtgggactctagactgctggccggacacttctctctgttctccccagtggtatagttaataatgatgatgaacttggtgggggtggtaacaaaattcaatcttaaaaaacgaacaacaaaatccaatcacaaaattcaggtagacaagtgaaaccaatctcttgggaatcagatctctcaactgacaagtttctctacttttaaattgatcattatggataaaatgaatgctgagttcatagagaagaagggaatttgaacacttggttacactaaaggagaaggtccttctagaactaaatggaggcatctgttttacttaaattaagggtctgtaaataccagccagggactgagttgacagccacttctgcaataaagtaataaatcatggagctggttaaggaagcaagaaacaccatattcttgctttgttcacccaattaggcaataagccatctgggtccttttgttaattgccacctaatacaatttatgcaattaaattcagtcttttatttaattatattaatttatcccagcaacttcaaagacccacaatgccaatgataaagttcagttaaaaaacagaggtcttgaaaaattttt

SEQ ID NO: 907914 - DNA, 578 bp, Homo sapiens
gagctacacagagacctggcaaatcattacatatgaagatgccagtgggccaactttgctgctgggttgccttttcctccccctgaggccttactgcccagccactaagttcaaaagcagaggcagaggtccctaatacctgacctcttggaagagcccaggatccaatgccaaccagcagttccttctgaccagcagcactaccaggctcttcctgaacagattactcacctcctggaagtcccagtgctgctggtggatggccaggccttcctccgtgcagttctgaagaatcacctgctcctgcctgacagcaaagcacaggtgctgtgggctgccaaagtgaatctccttcctgctggtgtgctgcaggtactgtgacagaagcaatagttgttagcgcagctagaaagagatcctcttcaaagctgtagaggaggtaagaagaacccactatagagctgaggtctaggggcaatcttyagattctatcggggtcagaaagaccatatctcatggtcaagtccaaaaacatgctgctagactagtcatagcctctgaagtccccacattccacc

SEQ ID NO: 907915 - DNA, 634 bp, Homo sapiens
ggggcagcgcaccaacgtggcacatgtatacatatgtaacaaatctgcacattgtgcacatgtataccctagaacttaaagtataataaaaaaaattaaaaagataccaaaactgaaaaaaaataaaaataaaaaaataaagatgtcagaagggctgcatcttttctgaaggcatctagggaggaatcattttcttgcctttttcagcctatagagaacttctctttctgtcttcaaagtcagcaacagccagtcaagtttatttctgtccagctctaaaactgactcttctgcttccttcttctgcttttaaagactcttgtgattacattgcctccacccaaataatccaggataatctctccacctcaaggtcagctgattagtaaccttaattctatcggcaacttagttgccttgtcatgtaacatagcatattcacaggttctgaggattagaacataggtacctttgggaactcttttgcctactatgctattttaaatkaaattaaacagggatctcgccagcagaacttcagttaccttctagtatctaaagaataacgtgaattgccaaggcaatcacaggatatggggtctgtgaaatctatttcattacagattttttttta

SEQ ID NO: 907916 - DNA, 646 bp, Homo sapiens
tgaaggaataaatttctcttcctttaagtcaccaagtttgtggtaatttattatagtagtcacagacactagtacgatagttttaattaaatcccaaacatttaaaattttataaattccactcaatcaaagattttttgagttagtattatgaacaagaccatggggaaaacctagcttaagtcattcatactcaaaggaaggaagcagatgctggaacacagggcagaagagatcggaactatctgataacagagaagctacagtggtgatgagaaaagtgggaggagggaaaggtgatattatctgagcaaaggatcagtgaatccttcgggaaagagctggcttcaaatttggccttgaaagactgataagacttcaacaaaatgtgacaggatacctgaatatatctgagagtcacctgtacaaatttattcactataaagcttatttgggactcttgatatcatgaatacagctagcttatagttcgtataatgcaccatgaaatcacagaaccacgctcagtcagtgtaaaaagcctctaatatgggtgctgttcttatatcccaacatagccatgggcattcgttagtgtcccytcctctacaggaaaattgatactcatatgaattctaaaaatata

SEQ ID NO: 907917 - DNA, 604 bp, Homo sapiens
caatgcatgagtgaatgagtaaaagacaagttgtgtggctagactattgtgagtctggagaaagtggatttttttaacattaaaggatragaataggaatgaatgatatagggaagagatgaaatggatatgtttgtatctggtctgagagtccacttcaaaatgaacattccctcttcagagcacccatgcattgctcatgtgctgctattgcacccatcacattgatttgttatagctcctaggggttacttagatggattagttcacctttttatttccagcatagagtgtggcacattagaagtatccgaagtgcatttatgtatacactgactcatactggatgaacagtatcatcatcgcccaatcctaaagtcttgccccgtttaaggagctttgaggtattattgtcttgaaaactcatggaaatggaaataatgcacaagaagcaatgtctgaaagagtcaggcattcagcaaacacaattttttgtaaaatttgaaaacccaaaccacagtatgacattaagaaaacacaaatattacttagccaaaagaaaaaccattttgaaatttttcataaaatatttagaaagaaagaa

SEQ ID NO: 907918 - DNA, 591 bp, Homo sapiens
gagagagggcatccttgtcttgtgccagttttcaaagggaatacttccagcttttgcccattccrtatgatattagctatgggtttgtcataagtagcttttattattttgagatatgttccatgaatacctaatttattgagagtttttaatgtgaagggatgtggaattttatcaaaggccttttctgcatctattgagataatcatgtggtttttgtcattgtttctgtttatgtgatggattatgtttattgatttgtgtatgttgatccagccttgcatcccagggatgaagtcgacttgatcatggtggataagctttttgatgtgctgctggattcaatttgccaatattttattgaggatgtttacatagatgttcaacagggatattggcctgaaattgtctttttttgttgtgtctctgccaggtttgggaatcaggatgatgctgacccccaaaaaagagtttgagaggagtccctctttttttattgtttggtatagtttcagaaggaatggtaccagctcctctttgtacctctggtagaattcagctatgaatctatctgatcctgcacttcttttt

SEQ ID NO: 907919 - DNA, 591 bp, Homo sapiens
gagagagggcatccttgtcttgtgccagttttcaaagggaatacttccagcttttgcccattccgtatgatattagctatgggtttgtcataagtagcttttattattttgagatatgttccatgaatacctaatttattgagagtttttaatgtgaagggatgtggaattttatcaaaggccttttctgcatctattgagataatcatgtggtttttgtcattgtttctgtttatgtgatggattatgtttattgatttgtgtatgttgatccagccttgcatcccagggatgaagtcgacttgatcatggtggataagctttttgatgtgctgctggattcaatttgccaatattttattgaggatgtttacatagatgttcaacagggatattggcctgaaattgtctttttttgttgtgtctctgccaggtttgggaatcaggatgatgctgaccccmaaaaaagagtttgagaggagtccctctttttttattgtttggtatagtttcagaaggaatggtaccagctcctctttgtacctctggtagaattcagctatgaatctatctgatcctgcacttcttttt

SEQ ID NO: 907920 - DNA, 587 bp, Homo sapiens
aaaaccctcagatctcatgagactcattcactatcatgaaaacagtgcaagagagacctacccccataatttaatcacttctcaccgagttcctcccacaatacatgggaattgtgggagttacaattcaagatgagacttgggtggggacaaagtcaaaccatatcattccactcctggctcctcccaaacctcatgttttcatatttcaaatccaatcatgccttcccaacagacccccaaagtcttacttaactcatttcagcattaactcaaaagtccacagtccaacgtctcatctgagacaaggcaagtcccttccacctatgagcctgtaaaatcaaaagcaagttagttacttcctagatataaaggggatatgtgcgtcaggtaaatacagaaattccaaatgggagaaattggccaaaacaaagggcctacaggccccatgcaagtttaaaatccagcagggcartcaaatcttaagccccaaaatgatctccttttacttcatgtctcgcctctgggtcacactgatgcaagaggtggggttcccattgtcttcggcagctctgcccttgtgggtc

SEQ ID NO: 907921 - DNA, 593 bp, Homo sapiens
tatcttcccatttaatcctcagaaatttgtgaataagcattattattattattattatttcgattgtatcttgaagaaacagagacttagagtaactaacccacgattgcataatagtgaagctgggataagaacaagttttgtctgactccaaagcctgagctcttaaccactgtgcagtgcagttgccaggtgttcaggatttgtgataccactcaagatataccaagataaaaatggcatggtccatgtatctatcaggggcctggcaggaaacatatggcctatatactcttccgaattcaaaagactttgatgaaacgaccattttcaaaagtgcaaacaatagcacaggttggtgctctatcctggtgctagcaataatgaggcactgttagcaaccctagtcctgaacatgaatggagtcagtgattcctggatctcagagacagtaggcccaactactgggtagaagctgtggcctctggtagggaaacacaaatacagccaatacacaatccagttaggagagrggaattgagagctctggtaaaaacactccaacctaaacttctttccttcttcagatttcc

SEQ ID NO: 907922 - DNA, 646 bp, Homo sapiens
tttattagtaaactttctccacttatttttgtttgcaacttggggatgtcatgtcatttarcctgaatcttctcattgaagatttgcttccaacctgaatgaactgttttactttcacagcttccagtcccctatgaaaaacagtcagtcctctgatgtttctagttcctcacctccatctgctaagagctgtagctttcccaggacaccacctgggctcccagtgtacagagcaggacagaaggaaggaatggccccgtattcaactcttgccatcagcacacagatcaacaatgcttgaaatatactcatttgtaagttcacccttttaaccagctgccatatctcaagcctctgtaatgaggctcaaaagacacctcagagataaaactggcagaataccctttccttcactgtccttatctccattatccttccttccagactcctgtatacacagacatgcacacacatgcacaaacacacatgaccccaggcacacaaacagacaaaagcttaaccatctaacaatatttttttaaattttatttatttcttttctcaatccaaacaaaagccctcttacctgccaacacacgcaaatgataatttggaaaattttcctgcccattagttcggcaaactg

SEQ ID NO: 907923 - DNA, 617 bp, Homo sapiens
ttgttttggaatattttcagcaggaatggtaccagctcttctttgtacatttggtagaattgagctgtgaatctgtgtggtactgggcttttktttttttttttttctggttggtaggctatttattattgcctcaatttcagaactcattattggtctattcagggattcgatgattcaatcttggaagggtgtatgtgtccaggaatttatccatttcttctagattttctagtttatgtgcatagagatgtttataatattctcagatggttgtatttctgtggggtcagtggtaatatcacccttattatttctgattgtgtttatttgaatcttctctcttttcttccttattagtctagctagtggtcaatctattttattactttttttcaagaaaccagctcctcgattcattgatcttttgaatgtttgagtgtgtgtgtgtgtgtgtgtgtgtgtgtccctatcttcttcagttcaactcttattttggttgattcctgtcttctagatttgaggtttgtttgctcttggttctccagttcttttagttgtgatgttaggttgttaacttgagatttttctagcttttgaataaggtcatttagagg

SEQ ID NO: 907924 - DNA, 759 bp, Homo sapiens
cagcacatcaaaaagttaatccatcatgatcaagtatgcttcatccccaggatgcaaggttgcctcaacatacacatatcaattaatctgattcatcacatraacaaaactaaagataaaaaccatgtggttatctcaatataagcagaaaaggctttcaataaaattcaatgcctctccatattaaaaactctaaaaaatctgggtattgaagaaacatagctcaaaatgatgagctgtttttgtatcagtatcatgctgttttggttactgtagccctgtagtatggtttgaagttgggtaacatgatgcctccagcttcgttctttttgctgaggattgcttggctattagggctcttttttttggttccatatgaattttgaaatagtttgctctagttctgtgaggaatgccgttggtaatttaatagggataacttgcatctgtaaattactttgggcagtatagccattttaatgacattaattcttcctatccatgagcatgacatgtttttccatttgtttctgtcttctctgatttctttgagcagtgttttgtaattcttctagagatctcctagagatctttcacctccctggttagctgtattcctaggtatcttattttttctgtgtgtagcaattatgaatgggattgtgttcttcatttgactctctgcttgacttgatgtataggactgctagtaatttttgcacattgattttgtatgctaagactttgctaaagtttatc

SEQ ID NO: 907925 - DNA, 649 bp, Homo sapiens
caaagccaaaagccacgttgatctttttattgtcatagcgttcttcttactatatatggaaatttacataattacaaaggaatttataaagctaaaaataacagtgattgaagatattttcttattctttttttatttcaatagtttttggagtacaggtggtttttggttacacagatgagttttttagtggtaaattctgaaatttcaatgcacccatccctgagcagtgttgcactatactcaatatgtagtcttttatgaagataattttaaagcagacaatgggcagaaatatggtttgagcctccaattctgctatcttgaactagcccccacaacccactgttgcttttacaaccttttaaaaaagtactctgcctaaattatcaacaaaggacactgagatcgttaggtgttttatgttccaaccaccttctcatgtatccaagatgttggccaagatattgttactccatgtgaaattaattttttaatccagaagtcacatttttatmtactttaaagatatcaaaagaagattccatgaaaacattccagttgttcccagctcctagcatctggaatgacttacttggtcacttgtcccagtatcactttgtagttagaatttcatctgatttgtact

SEQ ID NO: 907926 - DNA, 651 bp, Homo sapiens
attgccaaaacctggaagcaaccaagatgtccttcaatgggggaatggatacacagtggtatatctagacaatgaaatattatttggtactaaaatgaaatggtttatcaagccttgaaaagaatagagggaacttttatgcatattaacactcagtgaaagaagccagtcttaaaaggctacatactgaatcattccaactatatgacgttctggaaaagataaaactatggagacagtaaaaaagaccagtggttgtcaggaattaaagggagaagcaggaatgaataagcagaacacagagtatttttagggcagaaaaattttatgtatgattccataatggtggatacctgtcattataaattcgtccaaactcataaaatgtacaacaccaggagtgagtcttaaggtgaattattgactttgtgtgataatgatttgtcaatgtcagttcatcagttgtaacatatgtgccactctggtagggaatgttgacaatgggggaggcatgtatggggcagggggtatawggaaaatctctaacttctgctcaattttgctgtgaacctaaaatagctctacaaaatagtatattaaaaaaaataaaagaattgagacttacataccatccatctaaaatattagttc

SEQ ID NO: 907927 - DNA, 649 bp, Homo sapiens
gagtcgaggtttctgttgtgtgcagctgaagtcaaactaactgatataatgtcccaagtcatgtcgaattggtgkgaaagggtgctgtgatccattagctatgtctgtcaaaggtgggggtttcaacctttgccagcctgtgctctttagttccttatttgcatcttgtgcaggggttatctacggggtttgttttgctttcattactacccagattagtgcttttaatgtgcagacagtggttataacataaaatacccttatttgtatgtctcagtctgtgcttcagcttcctgagctgcccaacccattctgcacctcatttcttctgttctttttgactcccctggttactaaagtgttgtttattccattcttacgactttctcacttgcctgatgctgagatttaaaaattcacctggagatagaccaggaacacagcacactgcagcctatttgaagcatcagatgggtggtgctgacgatatcttatatgaggctgatctggcctgctgtatgtgtgaccccatcaattgctggctgatccgaagggctagcgtctccttcatctggtcttcattgagctgtggacagccctccaaaagctgaatgctctgtcaagaaggatgcccttcccagacaggaag

SEQ ID NO: 907928 - DNA, 646 bp, Homo sapiens
actcaaagccagctggagatggctccactggaaattcagcaggacggactttcctagcctttgcctggacatccttgcttacctataggatccttttggsctgatcatttgtctatgccatgatgcaaaataccaggttagaaaatggagtctctggcaccccccattttgcaaataacaggagcaggcctgtgattactgcagcagaagtttaaagcaatgaatactggatggatcataggttgagcctgtggtgggagggttttgctgcatgcatgtgctttagctactatattctttttcacctagtgattccctcaaaatcattctttggttatggcaaagaatgtatagtggccaatagtgcattaccctcacataaggtctgctaccaccacccctatatcctttgtgcaactttgagtgagctggggagaaggacagggaagaaggaatagaagtattttttatggtggagtctctctgcagcaaaaacatgctcaggcagttcctgggccccaaaggatgcagaatctggcaccaccttacttgaagcagagcgtacagtgtatttttcttcatagatagcctgtaaagctctgccaataggcctatttttctcagggctagtgactcatttggggca

SEQ ID NO: 907929 - DNA, 606 bp, Homo sapiens
tctggtttatgtatttactatactatactttttattgttattttaaagagtggtggtgggtgcctgtaatcccagctacttgggaaactgaagcaggagaatctcttgaacccaggaggcagaggttgcagtgaaccgagatcgtgccactatactccagcccgggcaacaagagtgaaattctgtctcaaaaaaaaaaaaaaaaaaaagttatgtgtaaaatagtctcaggccgactgtttttcagcaggttttccagcagaaggcattgtgatcatagaagatgatggctgtatgcatgttacagctcccaaagaccttccagtggcataattttatggttgtcagtgatattgatcactgtatcaatgaagacagtgttattgataattccaaccctgcgtaggcctaggctaatgtgtgtgtttgtgtcttagttttcaacagaaagtttgaaaagtaaaaagaaaattaaaaataataaaatgcttaaagaatatgaatataaagaacaaaacaaactatattattttattatattagccagagatggatcacttgtctatgccctaatwataatgattagaaatgagtttctgacatctt

SEQ ID NO: 907930 - DNA, 631 bp, Homo sapiens
cattaactgtcagctcttattttgttgaataatttttacatagatgagtggtgaatttgagatatagttagtaaatggaagataagtatgtcatttttttccctccttagctataatgatgggttctattaagagatttcctagtgttgaaccatctttgcattcctggatgcaacatgccaggaaaaccgctgttgttttttgctttttagttgtttatttgtttatgctgacagattctgtttactaatgctttatttgatatatgtatatactttttgaagatatgaggtctcattacattttccagactggagtgcagtggctattcacaagtacgtttacagtgcactatctctgggctcaagtgatcctctcacatcagcctcctgagtagctgggacaacaggtacctgccactgcacctggcactctttgatattctttagtaagattgatctgtcttctttttttgatgcagttagtttttggttttaatgacacattctttatagaaaagaactggaggattttctttgcttttctgtgctgtaacatagtttcaggagcagttgggattcttgatttttgcaaatgtgwtagaattcctatgaaaaaatattcagggctg

SEQ ID NO: 907931 - DNA, 598 bp, Homo sapiens
acttaacagaaaattaaggtgcagcaagattggtaaacctgctactcagtgaagtggcaaccatcattgaatctgttgaagataaaggttatatttcatataatgttttcctccattttttttcttcttctgccrttatcaccattaccacccaatctttgattttatcctcttttgtgtttgcctctagtcttcttaatgacacccagcaggaggctgacagatagcaaggcccagccccactcttggcctggagaccaaggagggcatccagcttagccacgggttccattcacctctgaacacactatgcctcttcgttctctagttttgcatctggcaattagagacaaattttttcagttaattaaaccacaccctactgactcctcagtgactcctcactagcttccatgttaggattagactgctctggaccatgcacttttctgtttaatcacagcaccctcccctgcaacctctaccaatttctgtagatttcttctggactgtctgacttcaccctgcttgctcacatgtagctcaactggacataaatacagtcaccacaaatatacaaattatggcacatagcaca

SEQ ID NO: 907932 - DNA, 557 bp, Homo sapiens
aaatattggtaagccatgcatttaataaagaatttatatctgaaacatataaggagctcaaacaactcaacaacaagaaaacaaaaaactcaataaaaaaatgggcaagggacctgaatagatatttctcaaaagaaaatatacaaatgatgaacagaaatatgaaaaaatggttaacatcgcaaatcattagggaaatgcaaattaaaaccacaatgaaatatcatctcacagctgtcagaatggctattataaaaagatgaaagatagctagtgttgatgaggatgtggaggaaagggaactctagtacgctattggtgggaatgtaaattagtacagccactatggaaaactgtggcatttccacaaaaaactaaaaatagaactaccagaggatccagcaatctcacttctggatattgatccaaaagatttgaaatctgtttgttgaacagatgtctgcactctcatgttcaaggcagcactatccacaatagccaagttatggamtcaacaaagttgtccatcaacaaatgagcaaataaagaataggtag

SEQ ID NO: 907933 - DNA, 537 bp, Homo sapiens
cttcttcctaatgtggatgggaaactgactggcagaaagaaaatcttccccccttcctcttgggtttcttctttttcttttcataatctcttttaagaattttctattaccatttcattcaatttctttcttctttaatttttcgcttcttcctgttacttactctgcagcctataagtggtagatgtatctgtggtagtggttagtaacctgggttatggagccaggttgattggatttgaattctggctctccaactttaccagttatgtgacctttttcaaattccttaacctcttaatgctcaggttcttactctataaaatgggagtcatcatagtatttacttcatgaagttgttatgaagatgaaatgagtttatacatattgagtactttgacacatgtctggcacatagtttttaatacatgttattgatgatgatgatgatgatgatgatgatgattgcttgtttaactttgtgggtagcgcttgaagtaagtgctkttggccaaactggtagattctttctggcaa

SEQ ID NO: 907934 - DNA, 537 bp, Homo sapiens
cttcttcctaatgtggatgggaaactgactggcagaaagaaaatcttccccccttcctcttgggtttcttctttttcttttcataatctcttttaagaattttctattaccatttcattcaatttctttcttctttaatttttcgcttcttcctgttacttactctgcagcctataagtggtagatgtatctgtggtagtggttagtaacctgggttatggagccaggttgattggatttgaattctggctctccaactttaccagttatgtgacctttttcaaattccttaacctcttaatgctcaggttcttactctataaaatgggagtcatcatagtatttacttcatgaagttgttatgaagatgaaatgagtttatacatattgagtactttgacacatgtctggcacatagtttttaatacatgttattgatgatgatgatgatgatgatgatgatgattgcttgtttaactttgtgggtagcgcttgaagtaagtgcttktggccaaactggtagattctttctggcaa

SEQ ID NO: 907935 - DNA, 644 bp, Homo sapiens
ttttagatatgaaaactaaggcttagacatattcttattcatctaaatgtacatagctaattaaatacagaactatttataacccacaatttcatatatatgcaaatttagtgaagacttttcatctttctttcattccctttctccatttacaatggacctgtcccaatctgttatctattttttccatatacaatagggtagagaattggcctacagggttttttcaacctatctcttaacaaactcaggagtggttgactctatggaggttaatcattgccaagtgaatcttcctttatccttcaaactcaaggacagtttagaccattcaaacacactggacacatttcatacctaactagagcatagagtggtctcctgcacaaattcctccatacacttgtagaaatgcaagtctgttcatcattaatcttatgatatggaaaatagttcatttgtatggaaatagctgaattgggatgatgtgtttcttgttgaaaatgaaacacagatttctgattaaaagccaaatctcgttgtgaaaaggtcaaaaacgatggcttcaaataaaattatttcagctctattttatgcaggtcactratgaaatgccctgtcaaaatgtgaatggttttctggtg

SEQ ID NO: 907936 - DNA, 526 bp, Homo sapiens
gcttgttcttttaatgaatttatccttaagagaacttctgattttccactgacctacgtccagatgtatttttaaaattacaatagtataaaataaacatcttagcctagaacacaaaacaggaagtgcaggattttcttctctagactatagcaagctttgcagttaaaatagtaatatgtgcttataaagattttctttaaatgaaggtaatgatattcttggtgaattttcaaatacagagattaattgtatttgattatgtgttgtgaaggttaattttatatgtcagtttggcttggccaaaggtgactagatatttggccaaatattattctgggtgtgtctgtgagggtgcttctggatgcaattaatgtttgaatcagtagactgagtacaacagattacctcccctctgcttcagtatggatgggctcattcagtcagttgaagagctgaatagaacaaamagtctgagtaagatggacctcttcctccctatcttgagttgggacataagtctttt

SEQ ID NO: 907937 - DNA, 603 bp, Homo sapiens
ccattgaaaaccaccagaagacaaagatgtcctctcttaccactcctattcaacatagtgttggaarttctggccagcgcaatcaggcaagagaaagaaataaatcatattcaaataggaagagagaaagtcaaactgtctctgtttgcagatgacatgatcctatatctagaaaaccccatcatctcagccccaaagcttcttaagctgataagcaacttcagcaaagtcttaggatacaaactcaatgtgcaaaaattccaagcattcctatacaccaacaataaacaagcagagagccaaatcatgaatgaattcccattcataattgctacaaagagaataaaatacctaggaatacagctaacaagggaagtgaaggacctcaacaaggaaaactagaaaccactgctcaaggaaatcagagaggacacaaacaaatgaaaaaacattccatgctcatggatagaaagaatcaatatcgtgaaaatggccatactgcccaaagtgatttatagatttaatgctattcccatgaaactactattgacattctttacagaattagaaaaaactactttaaaattcatatggaagcaaaaa

SEQ ID NO: 907938 - DNA, 624 bp, Homo sapiens
taggaatcgtttttggtggtactgatgaaattgcctagtaaattattttgtttgtgctctgggagagarttaatactcagagaagtgtgcagaaagaaaggaagttctggtgccatagaagtaaatttttattttaagttcaggggtacatgtgcaggtttgttacataggtaaacttatgtcatgggggtttgttgtacaaattatttcatcatccagtattaagtctaatatccattagttatttttttctgattctctccctcctcccaccatccaccctctgaaaggacccagtgtgcattgttcccctctgcgtgtccatgtgttctcgtgatttagctcccacttataagtgagaacatgtggtatttggttttctgttcctgtgttagtttgctaagaataatggccttcatttccatccatgtccctccaaaggacatgatctccttcctttttatgactgcataatattccattttgtatatgtgccacattttctttactctatcactgatggttatttaggtggattccatgcctttgctattgtgaatagtgctgcaataaacattcatgtgcatgtgtctttatgtagaatgcttatatatcctggtgtac

SEQ ID NO: 907939 - DNA, 598 bp, Homo sapiens
accatagaactgatatttaccaacgacctattatcattgtagttgttcagtaccaaattattggggaaaagatacgaagaaatattaaaatgggtcctgcattcaaaaagaacactcaggaggagcatacatgtggctcagatgaacacaatagtctcttagagaaggaagcgatatcttatacttagtgtggtctgaaaaagctgcatagaagagggaggtttgatctggaccctggagaatttaatttcctgactacaggaaatgtcatactgaagtagaaagaattatgtgagaaaaagtatggagacagacatgttcaagagaagtaagataattttttgcaaaactaataaagggaaattgggttggaccaaactataaaaacacttgaagagttaacctcatgacctaataataccttgttagtatttataaacctgtattataaatatcccataataaataccttgttagtatttataaacaaggttactaagggagtaaattatgtacgcaygagataaaacctggccaagcacagaaaggactcaaaacctgagatacaggaagaagtgaaggatcaaaaattctaata

SEQ ID NO: 907940 - DNA, 610 bp, Homo sapiens
ttatgattgaaaccaatatgaatrttctcaaacatttctttttagtagacatgtgaagactttcttttgggtatataactaggaatgaaattgttaggatgtgaatacatttactttagtacctattacccaatagttttccaaagtggttttatcaatttactttctcaccagtaatctgtgagaattccagttgctccacatactttctaacctttggaattgtctgtcttatgttttagtcattctggtatttagtgacatggatattttatgtacaggggaaatttaaagactcttgtactctaggttgtttttcagttcatcaaatacttatttcaagcttatcatgtttaatgtgtgcaaatgcacttattgctggcccatagtctaaggtaataaatcatattttgcttaaggagcacaaaatctttttatttagtaaatatttactaacatttgctaagtacttagtagtgtacttagtgatgggaaggatacaaaaggtaaagtgaaagactagtccttgccctcaatgattgtacagtctgtttagggaggtaaaaactgtactttaaattagcaatgcaaaattacatgatgacatgta

SEQ ID NO: 907941 - DNA, 634 bp, Homo sapiens
gagacagagagttagttcaaactcatatctgccctgattccagtggtgctacccacatcatgtcatatcttatattacatcacactttacctcattaaatgtgaataaaaacctttgcatctcagctttcagttttgtagtgttttaagccatgaactacaaaaagaaatagttttggaaacagagtcctgctctgtcacccaggctagagcgaagtggcacaatcttggctcattgcaacctcgacttcccaggtttcaagtgattcttgtgcctcagcttcctaagtggctgggactacaggtgtgtgccatgatgcccagctgatttttgtatttttagtagagacagggttttgccatgttgctcaggccagtctcgaactcttggcctcaagtgatccacctacctcagcctcccaaagtgctggaattataagtgtgagccaccatgcctggcccaagaaaatatttttaacatttaaaaaagtagtttaggccaggcatgtgcttcacacctgtaatcccagcactttgagaggccgaggtgcgcagatcayccgaggtcaggagttcgagatcagccttgccaacatggtgaaactccgtctctactaaaaatacaacaattagcc

SEQ ID NO: 907942 - DNA, 583 bp, Homo sapiens
caattccaagccatatctttgtgaatatgtaacactgaatgtttttaacaacacccaggtcacctcttgaatgctttgctgcttggacgttttttcccrccagatgcgctaaaacatctctctgaagttcaaagttccatgaatctctagggcaggggcaaaaagctgccagttcctttgctagaacatagcaagagtcacctttgttccagttccccacaagttcctcatctccatatgagaccacctcagcctggactttattgtccatatcactatcagcattttggtcaaagccattgaagaagtttttaggaagatccaaacatttccacatcttcctcttttcttctgtgccctccaaactgttccaacctctgtctgttacccagttccaaagtggcttccacatttttggctatctttacagtagaatcccactgtactggaaccaatttactttattagtctgttctcacactgctaataaatttataaaggaaagaggtttaattgactcatagttcagcatggctggggaggcctctgtaaacttacaatcacggtgaaggggaagcaaata

SEQ ID NO: 907943 - DNA, 586 bp, Homo sapiens
tttcaaagaggaggttatataatgggcacctcaktgggaaggcatgcagtgttacagagtagttcaagattcaaccagctgtgaaaaataaataaatggtaagaacatattttgcaaagcaatgagcatttagacataaacatatatctgtttatactagttcatttctagtataaacagatatattttatgggtggctagctttcaacctctgttttcacctaaaattgggtgggatgcttatacagttactgataaaaatatattccttgagtctcatctttgcacacaatgaaatgagaagatcctcagaaggaaatgagatcagatcttggttatcattacaaatatttgtattcatgagtactggataaacgtagcagggaaaataaaaaacatattctttaagtgactagatttaaaacatagtgaaacttactcaaatgacttcaatgtcaccatggttttttgaagtagaaaatgaatgatttctatgaaagcaaagaattcgtggaatgcagacgaaggactgagctgcaaaggaaatgcattttagctcaatactgattataaatcatccctgatg

SEQ ID NO: 907944 - DNA, 573 bp, Homo sapiens
acagtgtatgattatctctatctatctatctatctatctatctakctagctagctagctagctagctatctgagacaggatctcgctctgtcacccaggctggagtgcagtggtgcaatcacagctcactgcagcctccacctccctagctgaagcaattctcctgcctcagcctcctgagtagctgggactacaggcacagaccaccatacccagctaattatttttgtatttttcgtagagacagggctttgccatgttgcccagactggtcttgaactcctgggctcaagccatctgcccacctcagtctcccaaagtgctggaattatatttgtgagccaccatgcccagcctttataatttaatggctattcaagtggtaatttatctacctctgtaatttttttctctaagctatgtttcagtttggatacttttgttacctcctcatatcatcaatttgttgttttaaaatgaaattattgtagaccctggttagaatttgctaatcattattattaagtacaaaaagataccacatactttctctattgaccatttcttcttgct

SEQ ID NO: 907945 - DNA, 573 bp, Homo sapiens
acagtgtatgattatctctatctatctatctatctatctatctagctagctagctagctakctagctatctgagacaggatctcgctctgtcacccaggctggagtgcagtggtgcaatcacagctcactgcagcctccacctccctagctgaagcaattctcctgcctcagcctcctgagtagctgggactacaggcacagaccaccatacccagctaattatttttgtatttttcgtagagacagggctttgccatgttgcccagactggtcttgaactcctgggctcaagccatctgcccacctcagtctcccaaagtgctggaattatatttgtgagccaccatgcccagcctttataatttaatggctattcaagtggtaatttatctacctctgtaatttttttctctaagctatgtttcagtttggatacttttgttacctcctcatatcatcaatttgttgttttaaaatgaaattattgtagaccctggttagaatttgctaatcattattattaagtacaaaaagataccacatactttctctattgaccatttcttcttgct

SEQ ID NO: 907946 - DNA, 666 bp, Homo sapiens
ttctcttgcctgatggccccggccagaacttccagtactatgttgaacgggagcggtgagagagatgacccttaatttctataccctgctcaatataatatatggtacagargtgatatggtttggctctgtgtccccacccaaatctcatcttgaattgcactcccataattcccatgtgttgtgggagaaacctggtgggagacaattgaatcatgagggcagtttcctccatactcttcttgtggtagtgaataagtctcatgagatctgatggttttatcaggggtttctgcttttgcatcttcttcattctctgcttgctgccatccatgtaagatgggacttgctcctccctgccttccgccatgattgtgagcttccccagccacgtggaactgcaagtccaattaaacctctttcttttgtaaattgcccagtctcaggtatgtctttatcagctgcgtgaaaacagactaacacagtatgttggtaccagcagagtgaggcgctgctgagaagatatccgaaaatatggaagtgactttagaactgggtaacaggcagaggttggaacagtttggagggctcagaagacagaaaaatgtggttaagtttggagacttgttgaatggccttgcccaaaatgctgatagcgatatggaa

SEQ ID NO: 907947 - DNA, 557 bp, Homo sapiens
ttcccttggctaggaaagggaaatcccccagccccttgtgcttcctgggtgaggtgatgccccaccctgctttggctcatcctccatgggctgcacccactgtccaaccagtcccaatgagatgaaccaggtacctcagttgaaaatgtggaaatcacccgtcttctgcattgatcacgctgggagctgcagactggagctgttccttttcggccatcttgcaatttcatgttaattttctaaaagagggtaccccaaaaattgtttagacttcaggtctctgaaaatctgaatttgcccaatgctctattcatatataagggatgcatacagtgtagttttttagacagccactcattcatatgtttgaggttatcagtaaaatgttaggttatgagtaaagattatattgtatactttaccatgacagatcctgtaataaattggcaacatttgctctaagtaataaaatttcagatgctggctgacagtactctgtasgtgtcatctgtgttctgtgagggctcggcctgttctggctgagaatttctcctaga

SEQ ID NO: 907948 - DNA, 589 bp, Homo sapiens
tactgtccagccctaaagtaatgagaagggcctttagaaatgtcrgcacgtgatgttggtcagctctaaactctagacaccttttaaagaagtgcttagtgtcctttccaaattctacttcaaattccagtcttaacctacatactgcacaactagcagaaccatgttttctgctagttgatcattttatcaactctgatcagatgtcagagttaattttgtgtaaatgttaacagatatggttagtttattcctacaaattttttgactgccagctactacttctacttcctatgctattacaaaaatataataatttgtactcagatttatgagataatggatccttatcttccaaacatagtttctaaaacagttcagaattcactggtgctgaaaagcccttctcagctagatattaatgttcaccttaaatttcttacgtctcaggttactatctctgtgaaaaggaaggaaagttggctttctcattgtgtctactgccttgatttgggaccctagaggtttccagcctctaatcctgttaatctttgatagtgaaagctggttaattcacttgagataccat

SEQ ID NO: 907949 - DNA, 321 bp, Homo sapiens
actgctgacacacaacttgtctttttcctctgagcttacttaaaatacttatgaagccttgaaagctttctcatccgttttttatttttcccttacagagtattgatttctatttttttaacttcaaaaattcacatagcacaattgttaaaaagttcaaaagtaactttcttaaatttagcttttaatctaaattttttatttttaaaaagacctaactttacagcacatgacataactaataaataaaacaaacaawtattcatcaatattgagcaaaatgataaattttacttttgaaaagtttgttttcaagaaaaa

SEQ ID NO: 907950 - DNA, 625 bp, Homo sapiens
aataactaaaagagtggaattggaatgttcctaccacaaagatataataaatgcttgaggagatggatacccaagttagcctgatttgatcattacacattgtatgcttgcattaaaatatcacatgtataccataaatatgtacaactattatgtattcataataattttaaaaatatttttttaaaaaaataaaacattttaaaaacaataagatacccagttaaacttgaatttcagataaacaaaaataatttttagtttaaatgtgtccaatgaacacctctcataaggcccagtatatgtgatatactgaaaaattacttgtttttgctctgaaattcacatttagttggacatcctatattttacctggcaatactagactcattgaaacttcagtactttttagtaagtagagatatgcgatgaggaaaataaatttcttgagctgctattcaccttgtatttaggatacaactttcatcaggatgtgaggttctgtgtgtttttgttcctcggagtttctccagkatctagatcactcatagcatttggtaaatatttattgaatgagacagtgaaatggtaatggttaaaatattgtggcatgcaggatgcttaa

SEQ ID NO: 907951 - DNA, 657 bp, Homo sapiens
aaacattcaaaccatagaattatcttaggtctcatattcgtataataaggataataatccatagtgttatttaaaggattgaatgagttgaaatatgaaagctctcagcacatactgaccattaractgtgattcatcattgtaacttttatcactatattaactttttattattttgtataaatatttcagtaaagtttccagagtgtctgaagtttttttctattgttgttacagacatcttagtttttacattttaaatttatgagtgatgattatttttctaaagctattgctcacaaagaatgcaaattcacaaatagtattttgacaacagagctggagtaatatcataaaattaatgacaaccatgttttatataattacataaattctatatgacaactttgacttcatgttaaggaataattgcatagaacccgggcaaaattttaaaatgtaataaaataaaatttattaacaataaaagttattaataataaaagcattgcctaaaacaaatagatcaaccaggtaaaaagttcaaaaatatttgtctatgttaagctatagcatttcatagcatacaatggaaaattaaagaaataggaaaaagttaattgaatagattttcaaaaatgaaaacaatagtcatta

SEQ ID NO: 907952 - DNA, 521 bp, Homo sapiens
ttatttagtttttttaaatttattgagtcacgtgctaagcatttttcacatatgtgactaaaataatataccttcaattacaatttgtaaattataagtaaaggattttgcactgttaaaaaaagagtaagttactttcacagtaaaccctataatggaatgttaatttgtttctgcatgaattcaaagtcaagtacttttggacttcctcttccatctttgatggagcacttaaaatcagacccatgcacccctagttcttggggaaatagaaaaaaaaaaattaaattttaaaataaaaattaaaaaacaggaaacaaagcaaggaggaagaggagcaacctaaggggcactgaagaattaatgaaaagacaggtcttgaggggacaaaatcttggagaagcaggacaacactcaggaagtcaaccagctgttcctttttccttcagggcattttcagactctttacccattgcaagaaaktgaacatccatgcaagatacttggtaagccggaattgc

SEQ ID NO: 907953 - DNA, 662 bp, Homo sapiens
ttatgctgttttggttattaaagctttgaagtatattttgaaatcacatagtgtaackctgtcagatttatttttcttcgggttacttctgctttttagggtcttttgtagttccatatatattttaggatagtttttgttccatttctgtgaataaaggcattggtatttgatagggattgcattgaatctatagattgctttgggcagtattgatattttaataatattgactctttcactccatgtgcatggaatagctttctatttatttgtgtcctctttctttcgtgagagttttgtagatttcttttagatattttttcttcttacattgaatttattcctagtttctttatagttttgtaactgttgtaaatggtgttttcttaatttcttttacagattgtcccctatggataaacacacacacacacacacacacacacacacacacacacacacacatttttaatgataatttgttatcctacaagtttactgaattcatttatcagttctaacaaattttttgttgagctgggttcgagccccacatatgggcaccacttgttcacagatgaacaagtatacattttaaaaatataagatgatgtcatctgtgaacaaggaaaatttgacttcctcttttccaacataga

SEQ ID NO: 907954 - DNA, 632 bp, Homo sapiens
gcacatatgtttatcgcagcagccttcacaasagcaaacacttggaaccaacccaaatgcccatcaatgatagactgcataaagaaaatgtggcacatatacaccatggaatactatgcagccataaaaaaggatgagttcctgtcccttgcaggggcattgatgaagctggaaagcatcattctcagcaaactaatacaggaacagaaaaccaaacactgaatattctcactcgtaagtgggagtttaacagtgagaacacatggacacaaggaggggaacatcacacagtggggcctgtagggaggtgggggcctaagggagagataacattaggagaaatacctaatggagatgacaggttgatgggtgcagcaaaccaccatggcatgtgtatacctatgtaacaaacgtgcttattctgaacatgtatcccagaacttaaagtataattttaaaaaagttgtttaaccttttccaaattcagattacatatatacatgcacaaacacacacacacacacacacacagatatatgtattaacatataacttctaaaatgaatttaaaacacattagaatacttgattttgcactaatttcttataccttattaggttatataattatg

SEQ ID NO: 907955 - DNA, 632 bp, Homo sapiens
gcacatatgtttatcgcagcagccttcacaagagcaaacacttggaaccaacccaaatgcccatcaatgatagactgcataaagaaaatgtggcacatatacaccatggaatactatgcagccataaaaaaggatgagttcctgtcccttgcaggggcattgatgaagctggaaagcatcattctcagcaaactaatacaggaacagaaaaccaaacactgaatattctcactcgtaagtgggagtttaacagtgagaacacatggacacaaggaggggaacatcacacagtggggcctgtagggaggtgggggcctaagggagagataacattaggagaaatacctaatggagatgacaggttgatgggtgcagcaaaccaccatggcatgtgtatacctatgtaacaaacgtgcttattctgaacatgtatcccagaacttaaagtataattttaaaaaagttgtttaaccttttccaaattcagattacatatatacatgcacaaacacacacacacacacacacasagatatatgtattaacatataacttctaaaatgaatttaaaacacattagaatacttgattttgcactaatttcttataccttattaggttatataattatg

SEQ ID NO: 907956 - DNA, 576 bp, Homo sapiens
gacttgggagtggtcagaattcatgtgaagrtgattgatgtgtttaggtgaagatgagcccaccccaaaaatggcagtcatttgaggctaatcattccaaaaatgcagagttggttgaatatttttaagccgatcaatgtaataccttccattaacagaataaagaaggaaatgatataatcatttcaagagatgcagtaaaattatttgataaaattcaaagcttatttttgaataaaactcttagcaagtaggaatagaagggaaccccccaatctgataaagggtattatgctttggttgagtaacagcccccaaagatgcccgtgccctaatccccaaacctgtgatagtgtcaccttctatggcgaaagggcctttgcagatgtgattgagctaaggatcctgaggtggggaaactgtcccggcatgtccaggtgggcccagtgtaaccacgggggaccttgtaattgggaggcaggagagttggggcagaacaaggagtgcaggaagagaagccaaggtggagtgatgtgatagaaacacacggaaataaataatctgctcttgaatgac

SEQ ID NO: 907957 - DNA, 637 bp, Homo sapiens
cattcactttactttattttcaaytgtagaatgtgctttttaactgtgattgatcttgtgaatatttaaaatcttcacatatgtaaaaaatcagaaatatagtaaaaggtattctcagaaaagtcttattttcatccttaccttctacacttcaatctccacatcctttgttgtaagcatttttagtttggattatttgtctaacacttgctttttgttcccttcaaaattgggcaaatagtatggattcttattctcttttctttcttacaccaacaaaatggcattatatacattgctttgcatctttagcaaagatgtaaaacttactctttgtttttcttctaaattttatttggacaatttcaatcatatatagaagtagaatagctttatgagcctcaatgtgcttttcattcagcttcaagcattatcaattaatggccagttttgtttttttcaatctccccaaactcatccctatattcttttaaagcccaaggcaagcactattctactttctgtctctaactacctaatgtaagtgcaattatacagtatttgtctttttgtgactggcttatttcatttagtgtaatgttgtccaggttaatttatgttataacacatgtcaaaa

SEQ ID NO: 907958 - DNA, 330 bp, Homo sapiens
ccttgagggcaggcagaatctgtgacttagttttcattaatagaatatgctaaaggtgatgcaatgacactcccatgattaggttactctatgtgtctatctagatctatctatagcttagcatacctgaagtatataaaaggtcatatatgtatgactgctagcagaccaaagttgagaccttctaaccttgaagaaacaaactcccatgttgcaactgcctatgtaaaggttcatgtagcgggaaattatgagtggcctctagggtctgacagccaataaaacctggggcctcagtcakacagccacaaagatcagaattctgccaac

SEQ ID NO: 907959 - DNA, 639 bp, Homo sapiens
  misc_feature 367: n = A,T,C or G
tatttcaaaaaaaaaaaaaaaatagttgcacaatatattaaaatgtaatgtgttatgttaataacataaaggggcatagctctagaagagtaatatttttatatgaaacttaagttggtatcagtttaaaaatattgttataattttagaatattttagaatattgttagaatttagaatatttatataattttagaatattgttataatggttaccagaaagaaaatatctatagaatatatgcaaaggaaaatgagaaggtaatcaaaaatgtgtcactacaaaaataattaaacataaaggaaggcaagaaggaaggaatgagggacaaagaaaactataatactcacagaaagaaaataacanactaccaatagtgagtcttgccctatcagcaataactttaaatgtaaataggttaaacttcccaatcaaaagacatagattggccaattaaattttttaaaatatgattctactatatgctatctacaggagactcactttagatctaaggacatgcttaggttgaaagtgaaagatggaaaaagatatactataaaaataataaccaaagaaagcaaggatggctraactaatatgagacaaaataggctttaagtcaaaaactgttacaa

SEQ ID NO: 907960 - DNA, 552 bp, Homo sapiens
ctacaggaaaaagtctctccttacaaaacctattccataaatttagaaaaagcaactgttccactagatgtgcagatatcaacatagggaaacaggaaacatraaaaagcaaggaaatctaacaccatgaaaggaacacagtaagtctctagtagctgaccccaaagaaaaggatatgtacaaaatacctgaaaagtatttcaaaataatgttatgaaggaaactcagtgagatactggaaaatacaaacaattcaatgaaattagaaaaactattattgatttgaataagaaatttaacaaatagatatcataaaaaagagctaaaaagaaatcttaaagctgaagaattcaaccaaaaaatacaattgaaggcttcaaccaaccaactaaatcaaacagaagataaaatttctatacttgaatacagtcctttgaaataacccagtcagagtgggggggaaaataagaataaaaaagaatgaacattgccggtgggatttatgggacataattaaacaaattgttgcattgtagaagtaccagagagaga

SEQ ID NO: 907961 - DNA, 604 bp, Homo sapiens
aaaacatacattgttaattctaggttcccaattttaccctttgaacttacatagaattagtcaaactaaggctctagagaaacagttttcaatgttgaaaactaattcaacgttgtttctagtgcttcaaatccctgaacgcttttgcaaaatataggccatatttggatgcctgctaaggtcaagcccccatgctagatgcattacatatgttatctcaattaaacatcacagaaaaactgcaggtaggcgttatgattcacatttcatggattagaaaactaaggttcagaaaggttaagacaatttacacaaggctatgcagctagcgtgagaaaactcaaatgcagttttgatctatcagattccacagttaatgttctttctcttcattatttatttataagttttatgtatacataatagttgtacatataatggggtgcatgtgatattttgatacaagtatacaatggataatgatcaaatctggctaattgggttatccatcacctcaaaaacctaccatttctttatgttgggarcattccaaatctttgttaccgaaatgaactgacatccacttgcctggtgcagtaaagcc

SEQ ID NO: 907962 - DNA, 720 bp, Homo sapiens
tgctttaaaacctgaaggatggaggtgtctggtaaacacataggcacaccctgacccagtttttccacagtaaaatggaatgttgcaaaaataaaattggatgaaattctaygaaccctttagaaagttaaaatactataattttgttgttgttgttgttgttgttgttgttgtttttgagacagagtcttgctctgtcacccaggctggagtgcagtggtatgatctcagctcactgcgaccccagcctcctggattcaagtgattctcctgcctcagcctcctgggtagctgggattacagacatgcgccaccacacccagctaatttttgtatttttagtagagacagggttttgccatgttggccaggctggtcttgaactcctgacctaaggcaatccacccgccttggcctaccaaagtgctgggattacagcttgagccaccacgcccgggcactgtaatgtattttaattgcatttatgttatttacagtaaagaatcagaaagccatgtgccttgagacccttctttcttccctgacttttcctcctcacttctctttcacctctctccaatcacatattcccatatgtgaagacagctaagtccttaaaacaaattttcaagaaaataaaaatagagggtgaagaggagaatgtataaaagcttcacggaggaaggaaattgtattcatagctaagggcagcattctcag

SEQ ID NO: 907963 - DNA, 599 bp, Homo sapiens
ctcaaaggatagtttctagtcacctttactacaaaggcctttctgatctgcccccatcttgtctggtgtcttctattaggacatctcattccgatggtgtatcattctgggttcagtcagaaaatggaagccgtgccggagagtacactagaggtaatttaatatgggaactagttacagcactgggagggctaaaagagcaaacaggagatggtgagaccacccagaggttagcaacagcagaaagccactatcccttctgtggacagagcatcaaatggtggtggcatgaccagagctcaggacctacagctattctgaagtgaggggctgcccagcaggagttggaacaacaggggaagctgtgactatggccagagatgcttcttgaagcaaaaagaggcaggcagaaagaccttggcattgtccctttccctgttgttcagcttcctgaaagggcctcccattggccaattgataaaggttgcctggccttgcaggttgcaaaggtcactctctgtggtgcgaaatcaattaggggaagagtgtcgagtagatctgaatccagacagcagaaaawatcatactctttgggtctc

SEQ ID NO: 907964 - DNA, 686 bp, Homo sapiens
aaagtctaaataaatcatcaaggttacaagtgtgtgccacgcataaatatttaatcactgmaaagtgttcttttcaaaatgtaagggtttgtaagcacagtgtttgatttgtaactgactccaggggcaatgttgagatgtgttcctcacaactcttggctacttaagatcttacaatcatgaggaggaggagagtgttaggcagatttcaatgcctgtcaatgaaaagacatagaatagtctgggaaatcaattccagtcagggctgtagatcagcagttattttacaaagagcgagggctgacaggaccaccacagtcattcgtgtttattgttcaaacaggtgtttgggggccatccaggctcaatgcagatcatgtgaagaaaccagcaaggggcaagtttagggagaaaggaagaggacagtaaggggccaggcagcaggagagggcagggtgtaaggacaggcttggaggcagccttcccccagtttgagatggtgtttgtcttatgacatcctgcagcctccattgttatttctcacaacatcacgactggtgtaggcactctgtccatcagggtggcctcttctcacaggaaaaaaaagaagcccttgatttacattctgcctttagaaatgttccctgcctttctgcttcatgttgccatgttttccttgcctaccc

SEQ ID NO: 907965 - DNA, 646 bp, Homo sapiens
cttacttaattgggctgtctttttcttaatgagttgtaagaatcttaatatattccagatataagccccttaacagatacatgatttgcaaattccacggattgtttgttcactttcttgatggtgtcatttgaagcacaaatttggttaattctgaggaagtccaactcatctattttttcttcagttgtttgtgctttgatgtcatgtttaagaaaccactgactaacccaatttcatgaacctcacttctatattttcttctacaagttgtatagttttatcctttacatttgtgtcttacactatgaggtagggagtccagctttactctttgtagatatctggtggttccagcatcatttgttgagaaaactattttttccctgtttgaacgtcacaacaccctgttgaaaatcaattgtccataaacataatggtttatttctggactctcaattctactccattgatctttatgtatatcttaggccaatatcacactgcttgattgctgtcatttgaaagaaagttttgaaactaggaagtgtgtgtcggaaacttcctcatctttttcaagatgattttggcaattctgggtcycttgaacatccgtgaatttaaggatgtttgtcaattcttacaa

SEQ ID NO: 907966 - DNA, 657 bp, Homo sapiens
aacccgggaggtggaggttgcagtgagcggaaattrccccagcgtgggtgacagagcgagactgtatctaaaaaaaaaaaaaacctgaccaaacaaacaacaaaaaaaaaaaccttatgtatgctctcacattttttgtatgcggataaaagtaaatgaatatatatcttctctccctctctgcttattttacacaaagagttaagaccagtcagtttaggttatttgcttttgcaagacttggctacttctttagtgtgaagtatcttacaaagtgcacctctgattgaattaattatctctcatcttggagggattcaccatgcagagagttcaatttgtttagatggtaatttcatattgaaattgattttgggccaaagtccagcactgccaagtcttatgtaaccagcagaagctgagctttcaaccagctgccatatgttatgaggaacaaagccagaggaccagtgcagatggttctcaagaaataagttatcactctcaaagtctctagaaagacatattatcaaaaggttatcatgtgtggcatacttcttaagaaaacaccgcatttcccttcctagagtgattagtaaaatatataccaaaatagttcatttaaggtgttctctggaatggtttggctttgtgttc

SEQ ID NO: 907967 - DNA, 639 bp, Homo sapiens
ctatgtgtctgtctcacaacatggagcagatggagagaaggaactcggctttgtgggagtgggcatggcttttgaaacttgtgatagaagtacacacaggaaggcaatgtgcatcaacaggatgctggtctcctcggaaagggtttgcccagacaaaacatggaacaaaacagaaaccaggtcagaaaatttagatggaaaaaaaaaatgggactaagtgctacagattctcaaagcctgtggtcattgctgaaacaccacaatactatatctggtggccaggcacagtggctcacgcctgtaatcccagcactttgggaagccaagacaggtggatcacttgagctcaggagtttgagaccatcctggccaacatggtgaaaccctgtctctaacaaaaatacaaaaattagccagacatgatggtgtgcacctatggtcccagccacttgggaggctgaggtgggaagatcactggagcctgggaagtcaaggctgcagtgagttgtgattgagccactgcactccagcttgggtgacagagacccagtctcaaaagacaaacaaacaaacaaaacaaaacaaaaaacaggaaaataaaactawacctgttatctaattagaagcctcagagtcaac

SEQ ID NO: 907968 - DNA, 683 bp, Homo sapiens
gaagtaattcctgggctaatcatttcagatctgagaacaaaagaagttgctaaaaaaaaaaaaacaacttttatttacgcagcagatacttatggatcgtctaccttgcaccaaacgcgcgcgcgcrcacacacacacacacacacagtgaatactgtgggctatacaaataatatataacatctgttgaatgattaatatgtgacaggcaatatacttgctacttaaaaaggattctatcattttaccctcccggggacatatgaagtagagatattatcatccctgctttacctatgagaaatatacgagtcatgaagtaacttactctaggtcacccagttaataagtggcaggacaggacattacactttacgcccagtctgatacagagacctcagcccaacctctacaatgtgtccttcagtcagatctgggaatctgtatattttggaaccaccttaggtgaatgtgatagaattagaacttgagaagccttgatgtaatcaaacttcctcattttcctgatcagaaaacaaactcaaagaagcaatttttctggaaacacacaattgcagaaagagattcagagaggctgttcctggtttcttggctaaggtcctttctactatccagactacattggctcagtccaggaggagtcaaagaaggtaaataattca

SEQ ID NO: 907969 - DNA, 623 bp, Homo sapiens
cagtgtagtggggtccttccccaaggggacccggcctccccttccttcaaggggttctgggtctgtaaactggctcaaatctgtaaattgattgaggggccatgattttctgtttttataattcaaattagtcttttgtccatttgacctggaagttttctgcttatataaattaagtaggaatacagtaggcttcctgtcaatttcacttctaggaaaactgtgattaattagtcaatgccagaactctacacaggtcaggctattctgattggtgctttgcctctgctgtccattacagtagctacaaccaccttggctttgatggttgagtgctgccatttggcccctgccaccttgggatccaattattcctgttgtatttaaattttgtagttgagtgactgtggttctcaccctttagaactgacatacagagaagagcaattacagggctctgcaaagatgcaggtgctgccctcacaaatctatgtcrcaaaggattggtaaagggtatatcttctggaccctcccagctgggatgagtaggtccaaagtgactaatacatttcaccatcccaatctccctaagcctttggatccttttctctacagtaaaccaa

SEQ ID NO: 907970 - DNA, 639 bp, Homo sapiens
tcccttgtttaaaatgaacaaaactctgcaatgccaagagagtaattagatagatccaggcttcagtgattacaaaagctggataaaatctgccaatgccatttatatctgaatctgggcaagccaaaaggcagtagctcttggaaaagtcttcgcaaactcaaacttcagctattgttttgtgttatggacaccaccacctaagtatcaaaaaactctaggaatgtgaggaatatgtctaagaaataaagtaaggcatatcacgagaaagaggtatgcaataacacataatagaaatagtggtgtcatgtattttttttctcatagcactttcacatatattctcttctttagtcctcacgtcatgccaatagggtaggacagagaggacacatatttcctgtattttagagacaagaaagctcagaagactgagcttctttctatgaaaaaagagtttcttagaaagggggcacatttcagggctaaagaggtaagtggctgagctagccttaattggaggtcattttgacaataatgatgatgaagaggaggcaaatgatgatagctgtcatttactgaggtctatttaccaagcactatgctcartatacaccttaactccgtgtgaaacaagca

SEQ ID NO: 907971 - DNA, 685 bp, Homo sapiens
tcaggtcccacatctccctgcagttcatttatgcttcaggtcaagggtcacaaatattcacttgataagggatgacagattagtcacagctagmtgctgaaagtggagttgcatgaagtgcacatttagcttgcatgagggagagcacaaattggaaacttatcaaaattgccttggtgggtctctttcaaggcttctttggaggctgctctcagatctattacctctggaaattcttgaggacttttaaaaatacaatgacatctcatctcttcttaaattctgtctagtggacaatttgtgaggggtgtatgtgggaatctgcaattgaattcttcctcaggtacggtgagttgggcctcattccagctccaccgccatcatcatcagaatcctagtgggaatttcccttcctcagaagactgaaactccacctgtgctggtaatgccaggccccctacatagctccagtctattacctcaagggaacacaaaggcacactcttacaatatatatttacacctgagcttgtaaatatgacagctaagaatcagaaatgttgttttacttaaatgggcttgtcagtagattgggagtatattgtattccaaggaaatgctttttagatgtaattttaggtacaaactctggattttccttcacgtacaaaaattaaaactttga

SEQ ID NO: 907972 - DNA, 585 bp, Homo sapiens
ttctttgattagtcaatttttttccccaagagttgtatctcactgagtacagtttttttattcaagagttgtatctcacagtgagaaagaaagaaagaaagaaagaaagaaagaaagaaagaaagaaagaaagaaaaaaaaaaacttgaaataaagaaacttgaaagaaggttgagaattgttacttatttgcaaatcttgagttttggcctgagagtggagagtaattggaacattgaagatgaaaaaatttctaagagattaaaaaaaaaaacaagaaaagaaaaaagaaaagaaagagaaacaactattaattctaagaaaagcacaaggttacataaaaaagccaatttcttcttagcacattgtgtgacttagctgtgaataatatttatataatcaaaaataaaatatgtgttgaccatttctctaacaaaaaattatgacatatctctcttggggaattatggaacaggaagtgtgtgtatatgtgtgtgaaggtarggaaaggagggggctaggtaagagagctaaatttccctagcaggaaattaacagaaaatacctaagctttaaaacatcagg

SEQ ID NO: 907973 - DNA, 619 bp, Homo sapiens; identical to SEQ ID NO: 902743

SEQ ID NO: 907974 - DNA, 666 bp, Homo sapiens
tggaagaattttccagaattgacaaagaacatttttacaaaaataaaatttccgaaatgcacttgaagagctatactttaagtccaacttattaaagagaaaatgtcagcacaggatatatataaagcattttttaaaataatgtgacagcatcataattctctttgatttgtaaaagtaattgaacacattttctaccagtgtgaccactgatcttcagtgcaaatggtgagaaagattctctgcttggcatctctagtcaggcttctgattcttctgctaggcccatctctgcacttccttccaaatccagttgcagcaaacaactttgctaagtcagtttagcaagaatcttctaccctcaatatctgattatcctctctacttgatcaggttcctcatccttcatcactccttaggtgatgtgtgaccaccctggcctgagttaagtaagaatcctgtggcccggcatggtggctcatggcggtaatctcagcactttgggaggccgaggagggtggatcacaaggtcaggagatcgagaccattctgaccaatatggtgaaaccctgtttctactaaaaatacaaaaaaatyagctgggcatggtggcacatgcctgtaatcccagctactcggagggctgagataggagaatagcttgaa

SEQ ID NO: 907975 - DNA, 618 bp, Homo sapiens
aaagaaagataattaagataattaattttcttaagatatcttaagataattaattttcttaagatatcttaagataagagaaaaacagaaattaatggaacagaaaacaaatatacagtggagagaataaacaaagagatggtttattgaaaatacaaataaaattgataaacatgtattctacttctatcaccaggtaagctcctaccagacatgactcttccccagataataagtataaactttggacaaaatacaaaagcaacaacctgaagttggagagtgaacaaaaacaagcagattctggaaggaagtgacatcaggaaaaggaatgatgcagtgtgagttgcctggttttatggcttttaacctgagaataggccaaatcaggactccatggttgtattagtcttctcaggctgccataacaaaataccatagattgggtggcttatacaacagaaattaattttctcacagttctggagactggaagtccagtgtcaaagtgtaagaagggttggcatctggtgaaactttctccttaaattggagatgrctgttatctcactgtgtgctcctatgacctcttctttgtgcgtgtgtgagggaagagca

SEQ ID NO: 907976 - DNA, 615 bp, Homo sapiens
tcctccctctttttcattttcttgcagtcacccaacacctctttactcatccygcataatccaactcaagctttactttcttctttaccttcatacccctattctcttggtctgtgtaaggtgttgatttgtgtgttactctaatgccttagcatttccatatcaatacactcacttttacttatcagtgtctccaacaagtctccaagtttcatgatgtcaggcaatgggttttaattgtctttctatctggagtgtgtctcccagtgctttggagcgtagtataatcaataaacttttgatgggcgaatgcaagaaaaaatgtgatactgaatttccacatatgttttcagagaacccagccaactatgaagttccttgtctttgccttcatcttggctctcatggtttccatgattgtaagtatatcaggacatttgaagaatatgttctcagtacctatcccaagagtctctctattccttgtgttctggcatatattggtgtttacttgaatacagctttatatgtttaaatgtttccatatgaacttttttttgtactaacctacataagctatataaggatttagaataaatagtcattattcatcta

SEQ ID NO: 907977 - DNA, 568 bp, Homo sapiens
taccacacagcttttaacattctttccttcatcatgactttagataacctgatgactatgtgcctaggctatgatctttttgcaatgaatttcccaggtgctctttgagcttcttgtatttggatgtctagatctccagcaagaccagggaagttttccttgattgtttccccaaaaacattttccaaacttttggatatctcttcttcctcatgaatgccaattattcttaggtttggtcatttaacataatcccaagcttcttggaggctttattcattttttaaaattctttttctttgtctttgttggatggggttatttcaaaaaccttgtctttgagctctgaagttttttcttctgcttgttcgattctattgctgagattttgcaatacagtctacatttctccaagcatgtcctttatatcttaaagttgtgattgttttctatttatgctatttatttcactgaagatttctcccytcatatattgtatcattattttttatttgcttaaggtgaacttcacctttctctggtgcctccttgattagcttaataatcg

SEQ ID NO: 907978 - DNA, 683 bp, Homo sapiens
agttagcagagcttttaactctaaattcagaatcttttttgggcttgtatgttcaattgtccaatattgaaaatgactaaggcttgcatttgtagcattgtgacatatttagacagaaatatgtctcattagccagtattttgttgcagatgcctttcccctggtctccccctgagggtgccagataatgactattgtcagaggatgtcccgtcacgacatttgatacccacagtcattcacatggaagaagcttttagctcagaattttatatggagggcaaatgtattcactaaagctcagatattagcttccagcatctctttgtgaaaaacagatgaaaaaagccatagttcctggtgccttagggaaattcctatagtgtcttctttcactgcctagttactatggatgctattcctgtaccatgctgttactgcttgagacttgtctgaactagaattgcttccctgtattagggtattgataccagtgactgagatttctcatatgtaattgtccaacattcaggtttcaatacaacagtgtattcatgaaagttttgcttcaatgtgtcaagaaaaacttaaatgaaaacagtattaacratagtatttattgaaagtggattatgtattttctatgtggaagatatttcacatatctattttaaatctcaacac

SEQ ID NO: 907979 - DNA, 590 bp, Homo sapiens
cattctgtgtcttttaattggggcacttagcctatttacatttaaggttaatattgttatgtgtgaayttgatcctgtcaccattatgctagctggttattttgcagacttgttaatgtagttgcttcatagtgtcattggtctttgtacttcagtgtgtttttgtagtggctggttatggattttcctttccatatttagtgcttccttcaggagctcctgcaaagcaggatttgtggtgacaaattccctcagcatttgcttgtctgaaaagattttatttcctctttgcttatgaagcttagtttggctggatatgaaattctagtttggaaattcttttcttttagaatgttgaatattgtccccccaatcttttctggcttgtaaggttttcactgagaggtcctctgttagtctgatgggcttccctttgtaggtgacatggcctttctctctggctgcccttaacaattttttccttcattttgaccttggagaatctgatgattatgtgtcttggggttgaccttttcatggagtatcttattggggttctctggatttcctaactttgaatgttggtgtgt

SEQ ID NO: 907980 - DNA, 590 bp, Homo sapiens
cattctgtgtcttttaattggggcacttagcctatttacatttaaggttaatattgttatgtgtgaatttgatcctgtcaccattatgctagctggttattttgcagacttgttaatgtagttgcttcatagtgtcattggtctttgtacttcagtgtgtttttgtagtggctggttatggattttcctttccatatttagtgcttccttcaggagctcctgcaaagcaggatttgtggtgacaaattccctcagcatttgcttgtctgaaaagattttatttcctctttgcttatgaagcttagtttggctggatatgaaattctagtttggaaattcttttcttttagaatgttgaatattgtccccccaatcttttctggcttgtaaggttttcactgagaggtcctctgttagtctgatgggcttccctttgtaggtgacatggcctttctctctggctgcccttaacawttttttccttcattttgaccttggagaatctgatgattatgtgtcttggggttgaccttttcatggagtatcttattggggttctctggatttcctaactttgaatgttggtgtgt

SEQ ID NO: 907981 - DNA, 635 bp, Homo sapiens
cccttactcctttcaatgagtgtggttccccacggcccccaaatcccagctggttctgggaaccctcctggcctgggcttccagactccccctgagtcagcacccagtgccacattgaaagaggcagcaggcaaccctgggcaaagacccttgagtctgacttctctttatgccactcaaccctagaacaaagatcattttcctgtcattactctccttgctcttaacaaacacacacactttaaatgaacgatacattttagatcatcagcaggccacttgtaattaaagtatggtgctggatacagcacgcggtatcatctttgatccttatagccaccctgtaaggtctacattctccccatttcagagattttcacttagactcagcgttttagcaacttgccgaagatcacaatgtaaatggcaaagttgggtttgtctcatgggtttaaagccaaaacccatgatccagccatgatcctgtgctgccttcctcttggaaaccccctacttgactatagactcctgtccctgccatcctttcctcttcggaaccaccaacatattctcctgtaatccagctgctcatggagtcaacawcttcttcaccaaatctttttccaaaaaatctc

SEQ ID NO: 907982 - DNA, 598 bp, Homo sapiens
taaaaatgacagcttccctttctgtagcaattttaagatctacattatctctattttccatatgaatagcaaattgaaggaacaagcagaaaattgtatccttgagaagactgagtcaatatattttaatgcaaagttgtgaggttaaactaatgaggttaaaactagtaagaaaaggttgtaggcatgtagatttacaaagggtgtggtgtatgtgtatgtggtgtgaatatatatattcatatctatactaatgtaaacatatacatatatacaagagaaaaggaaggcaaagaatattaaagaattatatagtgctgagaactatgtttttagagggtgtcactacatgatttagtagaaagacgtcttatattaattggaagtctcatgtggcaggcactgctgtctacttaattccccccttgtaaaagaacccgattttgttcatggtggcaatatgtgcagctagggactgtacttccagcctcctttgcaactagtgtcccatctgcctaaattctggccaaagaggcagaagcagattttggttgaaamctctaagaagtctccttagaagggattctaacatcaagag

SEQ ID NO: 907983 - DNA, 606 bp, Homo sapiens
atgattatctcaatagatgcagaaaaggcttttgataaaattcagcatcgcttcrtgttaaaaactctcagtaaactaggtattaaaggaacatatctcaaaataataagagctatctatggtgaacgcagagccaacatcatattgaatatggaaaagctgaaagcattcccctgaaagccagcacaagacaaggatgccctctctcaccactccgtgtttaaccgtagttaaatggaaattctgcagagcaatcaggcagagaaagaaataaagagcatccaaataggaagagaggaatttaaactatccctcttgcagatgcatgattctatatctagaaaacctcgtagtcccaggcccaaaagcttcttaaatgataaataacttcagcaaagtttcaggatacaaaatcaatatagaaaaatcactagtatttctatacatcaggaactaccaagccaagagtcacattaggaacacaatcccattcacaatgccacaaaaagaataaaatttttagaaatacagctaaccagggaggtgaaagaactctacaatgagaattacaaaacactgctcaaataaatcaagaggtgacacaaa

SEQ ID NO: 907984 - DNA, 665 bp, Homo sapiens
ggtccatggtcttcctctctgagcactgttatttcatttcactatcaattctatgcccatgaatcccacatstgtgtctcttatctacccatcctctcaaactccagatgtgtttctaacacttttgaatagacatctccacttgcatgccccatctgcttctcaaactaaacatgcccaaactctacttagtcatttatgaacatgctgccaccagttgccctgcattcaaactaaaggcatgggtgtcacccaagtctcttcccactcactcttcttgtatctccaatccatcacaaagatgccaactttaccccctaggcctcttacatttcatttctttcattcttattccttaatagatatgtttgttctttctgcctgttctttttcttattcctccatctttgcttgtctatcccaccctaagccactagacagccttcacgaatggcacctcctccgtgaagccttccttgaatctacaccccctgtaatcttctctttatatgaacctatcaatcatctcttcctcctctcttgacacatatttttggccttcttacataagaattatttgggcacctgttttgacctgcctactattttcctgaggaagatcatgctgttttcatctctgtgttccccttacctatgacaatccc

SEQ ID NO: 907985 - DNA, 605 bp, Homo sapiens
acaacctccacctccccagttcaagggttcaagccattctcccacctcaccctcccaagtagctgggattacaggtgcacaacaccatacctggctaatttttgtatttttagtagagatggggttttaccatgttggccaagctggtctccaactcctggcctcaggtgatctgcccacctctgcctcccaaagtgctgtgataacaggcatgagccactgcacccggccttggtttttttgtttgtttatttttgttgtttttttgttttttgagacagagtctcgctctgttgcccaggctggagtgcagtggcgcagtcttttaaacattctcaagagaaggcttttgcttgaagtccataagcataacattgacgttgattgcgtggggtgaggtgttaggctgtggttggagacactgagatgcgagcaggctcttgccttatgcagcttgagtccagtaagagggatagactcataaaaaggcattaacagtgcagatcatatgtgccaccgcacacgccacataggtcctttcaaatcaccacacagtggaaattaacctggcttgggtggagttygagtgcagattatccaggcga

SEQ ID NO: 907986 - DNA, 634 bp, Homo sapiens
caaaaaattagccaggtgtggtagygcgcgcctgtaatcccagctactcaggaggctgaggcaggagaatcacttgaacccgggaggcggaggtggcagtgagccaagatcatgccattgcactccagcctgggtgatagaatgagactctgtctcaaaaagaaaaaaaaagaaaaagaaaaatggtaagtgttggccaggatatggagaaaggggaacctttgtctaccgttggtgggaatgtaagttagaacagccattttggaaaacagtatggaagtttctcaaaaaaaactaaaaatagagttaccatcattctgcagtcccacttctgggtatatagccacaggaatgtaaagcagtgtgttgatgagacgtctgcactttcatgttcactgcagcgttattcacatgccaagatatggaaacaacctaagtgcctatcgacagctgaaaggatttaaaaatgtggtctgtgtacatgaaagaatacgattcagcctgaaagaagaatgaaattctgtaatttgtgacaacatgggtaaacctggagggcgttatgctatgtgaaataagccaggcacagaaagatgaatattagatgatctcacttttatgtggaatgtaaaaattt

SEQ ID NO: 907987 - DNA, 666 bp, Homo sapiens
gccttgatctgagaggaaggggaggcagggtgttgattacagagatgggtgcacagaggcccagggaygtggggatccatccaaggtcaaatggccaatagctgatggagctaggactagactgtgggtctccttattctcagttcaattgctttctgcctgccccttgcgtaggacatgaccaagggcaattagtctggcacctaagaggtcagagcctgtgattgtggggattgtgggggttagttgggacaacctcctgctgtcacaagaaccccttctacataacccccatcagttgcttctccagctttggtttgagtcaagccttcctggaattaaaccccctagtctccctgaggcttctgcttgtctgttccagtgtttccgacacaacacagtgtctatctaggcatcagcccttcagctgccagaagacagggttccgtcctctcaggaacacaaccccaggatccttgacctctctttttgtggtcccttcccaagaaggtacctactagtctagaaccctgtgttccagacaggggaccattagcacagaggaaggggcctccctgactctgttatcctgcttcttttaaaaaaaaattgtggtaaaatatgcataacataaaatttgccaccttcaccatttttaaatggaca

SEQ ID NO: 907988 - DNA, 642 bp, Homo sapiens
gtctgcagaattgtgagccaattaagcctctttttgttatcaattacccagcgacaggtatttctttacagcaacacaggagcagctatatatctatatctatatctatatatatatattcatacatatgcacaatgcacagtgacatacacaattcaaaaacagacttgaggggaaaaaacacaaacgctatccaaaaaaatgcaggtatagcaataattgcaaagaaacagaatttaaaaagcagtgaataagtcaaagataataattcataataacataagttttatgttacagtgtaaattccaaaagaagccatagtcattaaagtttatacacctaataaatatatgtcacatatagaaagtaaagctgagtagaaataacatgcatagattagactttaacatagctctcaaatcaggatattaagtagatatgaaataaataatagaaatgatcgggtttcattcaaacagacacataaaatacacacagatctctgaattccaaaaatagagaaaacattctattcaaatgtacatagaattttcaaaaaaaattcacatgtatggtcayaaggaaatgtccaaagattttaaaaagcaggtatttcctaggttatatccagtaaaagcagat

SEQ ID NO: 907989 - DNA, 324 bp, Homo sapiens
attatggttctcattttcatgatacaattactatataaacttcctcttgctgctgtaacaaattatcacgaaatacatatcttacaataaagtgactgttaagcctacagttctggagttcagaagccttaaatgagactcacagggctaacatcaagttttgggcagggctgcagtctttctgagggctctgtggcagagtctatgtactttatttttttcagcatgcagaggccacctttatttcttggaacatgacctcgttcttatatcttttttgtttttttttttttgagmtagagtctccttctgtcgcccaagctg

SEQ ID NO: 907990 - DNA, 595 bp, Homo sapiens
ggggatgtcaagactggtggaggtgtgaaatttagaggtcaaacgaaacacctagcattgctagggcagcctcccacagcaaagaatcctctggtcctaaaggtaagtacaccaaggttgagaaaccgtaatatagaaagtaaacactatgtagctattccaagtgctcaggaaaacacatcagtgccctcgaggggaaaagcgtaaacattttaattgctgtacatggtgacacaaatccatgttgttaatctaagtggaaggggctgaagcacgaaacgtaattcaaagagtttacttgagccaaaatgaggacagctgcctggaagaaacagacccaagtatccttggatatgaactccatttggagctttgcaacaagcagtttcttaaaggcaaaaaagggataagaagtgggatgatgcaaagaggtttgtcacaaattatcattggcttatggaaatcacatttattagtgactggctatacactgttacactattattgggtgtggattgtagtgtctggtgtggcatyattgattaatttatagctactgtggcaacagcaagcagcctagatgaacacacagctc

SEQ ID NO: 907991 - DNA, 520 bp, Homo sapiens
tatattttaaaaatacatttacaaatatgagactagaagtaataacatcttttttttcactgctaaacgtcaagtcaatcacaaagaagaagtccagaatttaccaaagatattttaggtagtggagaactcgtaaatgtataacaaccaggtctctaaaagaaaaatgtcctgacatgacgtttgccaatttctatggtataaatactccaaacatagcctactttaggccatttaaggtcacgtcagctagcttgcaaagtttctggaaaactttacaattgattcctgcaagccagaagaagctatcaccagcacaccactggctgcacaatacacaactttttgctaccagcagtggaaattttgacatctgtatctactaaggagctgggtcactcaggtccactggatgttctttacctcagcaaaaaaataaaaaataaaaaaataaaaacactcatgcaatgatatttttgctgaagatgrataatcatataaaacaaactaccttttttga

SEQ ID NO: 907992 - DNA, 671 bp, Homo sapiens
gaaacatctatatacttttgatggaaatgtaaattaatacagccactatgggaaacagtatagagatttctcaaaaaactaaacataggccaggcacagtgrctcatgcctgtaatctcagcattttgggaggccaaggcatgatgattacctgagcccaggagtttgagaccagcctgggcaacagaattgaaccctgtctctacaaatattagccaggcgtggtgtcatgcacttatagtcttggctgcttgggaggctgaggggcaaggatcgcttgagcccaggaggtcaagcctgcagttagccctaactgtgccactgcagtccagcctgggtgacaggaatcctgtcaccaaaaaaaaaagaaaaaaaaattagaactaacatatgattcagcaatcccactactgggtatttacaactaacatgtttcttgtagcactattcacaatagcaaagatggaatcaacctaagtgtccatcaactgataaatggataaagaaaatgtggtgtatgtatacacaatggattcagtcataaaaagaatcaaatcatgttatttgcagcaacatggatgaaaccgggaggtcatgttaagagaaataagttaagagaaataagtcaggcacagaaagactaatattgaatgttcttactaatatgtggg

SEQ ID NO: 907993 - DNA, 669 bp, Homo sapiens
ctctgcatttgtcactggaaatatgatttagtcctgtcagggtagtcaaacacatctttttattgtttatctctggttccctactaattaaccatgcagaactggagatgaccgcaattgtgctattaacagatgcccagtctcttccattaactgtgctcttcgagagtgacattttccttttatttattttagtattctcaggtcctgataccaggagctcaattatgcttattggatgaataaatgaggtgcaaatgtaagctggggcaagaagggtttgctttgtcaacagatttagtgactaaaaaaccacactgaaggaaacttaaggacagcattcatattttattcatcattagacccactaaggaccatgggcatagtgttggctgcttactgactgggccatgatcccaggttccatcttatactcctgagaggcagagccagagttaacacatttagcctttagaaagacacaccatagtgctgaccattctccctgaagattttggttttctgcagatatttacaaaatcttcacaaggattktgacaatcttctttgatttttctggtcccatcagtgccaaaacttatcaatctatgttaataatatatgcaattttaggtatatgttttcaaaagtcttactaaaacaactact

SEQ ID NO: 907994 - DNA, 358 bp, Homo sapiens
tggatattaaaccttagtcagatgcatagtttgcaaacattttctcctactctgtaggttgtttactctgttgatagtttcttttactgtgcaaaagctctttaggtcaattaaattccacttgtcaatttttgtttttgttgcaattgcttttggcatcttcatcatgaagtctgttctttggctgatgtccagaatggtatttcctggattttcttctagagttattatagtgtttctggccttacatttaagtctttaattcatcttgakttgacttttgtatatggtgaaatgtaggggtcccgtttcaatcttctgcatatggctagccagttatcccagcagcatttattga

SEQ ID NO: 907995 - DNA, 652 bp, Homo sapiens
atttactttttgctctacaaagatttcaggcctaaagttgggcagactctgtgtttgtgatcaatctatcagttcatatttgtctccaagatctctctgcaattcaatttatgttcagggcaagaatatctcaaggactaatgagatcactggatcatttaaaccattatttcctgttttgaaatgtaaaaatactttagtaatctaatttttaaataagataaaccaaagtaagtttaaaataactttttttcattcaaaatatttgtttgaaatgctcagtttttcctggaggaaaaaaatttttttgactttgctgccacctcatggctaaggcagtaattagaaatagttcttcaggctcttacagaactacagttgcagaagaaaaaataatccatggagaagtcatagtaaatatgagctttgccttgctcatgtagtaattttatttcatttgttctttagtccaagttcgatagtcccatctttgacttacaagttcatttcagtcattgtatgtcatagttttcttgttgcctttctcatctttcttggcagcttttggactagataattctacaaagtcattgttcttwgtcaataagcaataataatctcactgcagaaatcgtgtttgtatcacagctct

SEQ ID NO: 907996 - DNA, 652 bp, Homo sapiens
atcttattaatcaaggagctgaagttttaagaaccatatagggatagatatgaggctttggtcttacactgaggccccgctaagcctccrtgtacagccaggaccctcagaagtccatatctttagtgaagtagtggattggaaaaagagcctgcccattatcaaagagagatgacaaagaagcttgtctctcttggcctaaaattgaagtggtgaaggagggggcaagcataccctcaaacgggtttgggatttaaatttctattatatgtgcattgcaggagactgcaagccaagaaacaattataaagtgacatccagacagtaacacttgggggaactggaagaagaaaatacaaataccctgagtacacacaacacctcatcccacaccaacatgagctcacaatctaaaattacaacacacacacacaaaaacacaataggcaagaacaagagaaatgacacccagaagaatgaataccatgtgcaaaataaggatgtttaaaatgttcaaataaataaaagataaaattagaaaattgaggaataacactcttaaaagataccaggaagatttgaatttgaaaaagaaccaaataaaatatagtgtgtgtgtgtgtgtgtgtgtgtgtgtgtgtgtgtgtgtgtg

SEQ ID NO: 907997 - DNA, 594 bp, Homo sapiens
tgggcgtggctgctcccaaggtctctgatgtgccctggagtcattttccgcattgtcttggcaattaacatttgtctcctcattacttaytcaaatttctgctgcctgcttgaatatccccccagaaaatgggtttttctttcctactgcattgccaggctgcaaatctttcacacttttatgttctgcttcctcttgtacactttgctgcttagaaatatcttccaccagataccctaaatcatctctctcaagttcaaagttccacagatctctagggcagaggcaaaattctgccagtctctttgctacagaataacaagaatcacatttgctctagttcccaaaaagtttctcatctttatctgataccacttcagcctggactttattgtccatatcagtatcagtgttttgataaaagccattcaacaagtctcttggaagtaccaaactttcccacatcttcctgtcttctgagccctccaattctctaggaagttcaaactttcccacattttcttgtcttcttctgagtcctccaaactgttccaacttctgcccattacccagttccaaagctgcttccccatt

SEQ ID NO: 907998 - DNA, 372 bp, Homo sapiens
taacctcaccaaatcaactagataaggcactaaggaccaatcttgaagaaacatagatatatgacctttcaggcagataattcaaaatagctgtttagaggaaactaaaaggaattcaagataacacagagaatgaattcagaattttatcagatacatttaacagagattgaaataattaagaagaattaagtagaaattacagatgtgaaaaaatgcagctgatatgaagaatataccagtctcttaacaacagaattgatcaaactgaagaaagaattcatgagctagaaaataggctacttgaaaatacataatcagaggagacaaaaaataatgagaaacaaygaagcaagcctacaagatctagaa

SEQ ID NO: 907999 - DNA, 608 bp, Homo sapiens
gaattcctagtgcctgctgatacccagcaccacataaaatgtgctgtttcatcttcgctgcagagttcctgcccaggggcaatttcraattttcctccagtcttaagtccattttcttttttctttttttttttgagacggagtcttgctctattgcccaggctggagagcagtggcgtgatctttgctcactgcaagctccgcctcccgagttcacgccattctcctgcctcagcctcctgagtagctgggactacaggcacccaccaccatgcccagctaatttttcgtatttttagtagagacggagtttcactgtgttagccaggatggtctcgatctcctgacctcgtgatccacccgcctcggcctcccaaagtgctgggattacaggcatgagccactgcgcccggcctgagtccactttcaaatagggggatgagctagtcactgcagaggtcctaagtttctgcatgatggaaataccgtgaatttcagcatctgtactgtggtggtgttgggccttcacccgacccctctagggctgactcaggaatctgggtcagtactggactgacggagctggggtctgagtcaattattgtctg

SEQ ID NO: 908000 - DNA, 608 bp, Homo sapiens
gaattcctagtgcctgctgatacccagcaccacataaaatgtgctgtttcatcttcgctgcagagttcctgcccaggggcaatttcaaattttcctccagtcttaagtccattttcttttttctttttttttttgagacggagtcttgctctattgcccaggctggagagcagtggcgtgatctttgctcactgcaagctccgcctcccgagttcacgccattctcctgcctcagcctcctgagtagctgggactacaggcacccaccaccatgcccagctaatttttcgtatttttagtagagacggagtttcactgtgttagccaggatggtctcgatctcctgacctcgtgatccacccgcctcggcctcccaaagtgctgggattacaggcatgagccactgcgcccggcctgagtccactttcaaatagggggatgagctagtcactgcagaggtcctaagtttctgcatgatggaaataccgtgaatttcagcatctgtactgtggtggtgttgggccttcacccgacccctctagggctgactcaggaatctgggtcagtactggactgayggagctggggtctgagtcaattattgtctg

SEQ ID NO: 908001 - DNA, 435 bp, Homo sapiens
cacacggtggaaaggaatatttagttgacagtagtcttcttatatttctatgtagccttyagatacttttaaatttagtttatgtgttgggaaaaaattgaaaagactctattttgaatatactgccttgcatttttattcctatgtattatgaattagaacataacatattctgtatacctaccaggcaaattaatgtttacacagtacgacaactctttttaggcagttcacatctacatgtctttactattatctattgaagcacttctctgaaaaagacacaggactcttggtccttgtgacttggctttgtattgttataggcagatgaagaaagttacaaaatgcttgtctatttgcaatctaatattctaccatttttgctaaatgatagacatcttgcagataagcatttgcttgtagatagttttc

SEQ ID NO: 908002 - DNA, 612 bp, Homo sapiens
gctaaaaccacagaaaataaaaccaaggacaaggagggactactgtwtttactgtctgcctccatctctggattgtaagctccatgggagcagagactctgtgtttttgataccactcttgtgaatacctagaacacaaatataaagtgggatagagcaggcattcaagtaattttcttaatgttttcaaagatatcaccacggaggaaatataattttctacaacctccatgagttgttagttgggatggaccctgtaataaaagaaggattagcaagagaaaaacgagtttattaacatttgcagcacacatcctgtgggagaaacctcaatgaaaagtaactcaaagcagtggcttagaactctggcttacgtaacatctttcacaaagaacagtacatttgtggagaaacaacaggacaaatgtaagcagtttttggctttcaagggccagaaactgtgagaaggtaaatatatgggaggaaaccaatggagtgaggtttccttgcagattcctctgtggccatctctgagctcctaaaagtctagagttgtctccagtaaaggagacttgatatcctgtctttaggcagataagagggaaagtagag

SEQ ID NO: 908003 - DNA, 598 bp, Homo sapiens
ttatagggcaattcaaaatatctccttcatattgggttagttgtaatagttggtttttctcaaggaattggctcatttcatctaagttgttaaattttatgrgtgtttatcctttgaagtctgtggggtctgtagaaatatcccgtttcattcttgatagtggaatttgtgtctttctttttttctttgccagtcttgttagaggtttatctcttttattgatcatttcaaagaataacctctttgctgcattgattttgtctacttttttgtttcaatttcattgctttctactttttattattagcttctttcctcttgctttgactttattttcctttgcttttctacatacttgacatggaagcttagattattgattcgagattttccttctttctaatatatgctttgtgccatgaatttcccttgaagtactgttttagcttctttcatttgttgtatttttattttcatttggttccatgaggttttttatttcccctgagtggagtatagaaacattcctttgaagctctttactctttgccatttgtaatataactgttttaaatactccctctacatacattgaaga

SEQ ID NO: 908004 - DNA, 463 bp, Homo sapiens
ccagtagtcattcaggagcaggtttttcagtttccatgtagttgagcagttttgagtgagtttcttaatcctgagttctagtttgattgcactgtggtctgagagacagtttgttataatttctgttcttttacatttgctgaggaatgttttacttccaactatgtggtcaattttggaataagtgcgatgtggtgctgagaagaatgtatattctgttgatttgggtggagggttctgtagatgtctgttaggtctgcttggctcagagctgagttcaattcctggatatccttgttaactttctgtctcgttagtctcttaacactcataccrtctcccttaccccccgtactccaagcatagatactattatccaacttttaagtatgaaaaaactgaaggctgcttagggcttaaaggtttaaattaaggctatgatttggatccagatctgcctgtc

SEQ ID NO: 908005 - DNA, 646 bp, Homo sapiens
agttttgagtgagtttcttaatcctgagttctagtttgattgcactgtggtctgagagacagtttgttataatttctgttcttttacatttgctgaggaatgttttacttccaactatgtggtcaattttggaataagtgcgatgtggtgctgagaagaatgtatattctgttgatttgggtggagggttctgtagatgtctgttaggtctgcttggctcagagctgagttcaattcctggatatccttgttaactttctgtctcgttagtctcttaacactcataccatctcccttaccccccgtactccaagcatagatactattatccaacttttaagtatgaaaaaactgaaggctgcttagggcttaaaggtttaaattaaggctatgatttggatccagatctgcctgtctctaaagcatgagcttttcaacattacaataggctgtctcacttttcactgatatcagagtaaccttttttaaaccatgatgctgaacatattccatttccctgcataagtggattgcaactagtgtaggtttaagttcaaacttcttaccaggacatcaaagtttttaattacctgactctcacctgcatttctggcctgttrtattttcaatcactttctcaatgact

SEQ ID NO: 908006 - DNA, 647 bp, Homo sapiens
aataccaatagaccatagccatcattttattagtwttcaagaggtccctaacattaagaaacaatataaaactaaaagaaattagctgagtacaatttaagtcaaatatatgaaccaaatggctactgtgaaattagttcagaaatcaatatgttagaatatacaagagatttaacctctggaaattttactttggttcttaactgtaaaaacaactactctctcaaaattagttagaaaacaccacagtaccagattcagtatcttttcttcatccttccttggatctctgtgatacaggaactgtcaatctcttctaagagtatctctgataccttccataacactatattctcctatctgcttcctctctgaaatctttcactcatttcccaacaactccaacttttccccttccctgaactgactctagacttattaccaaaactttaatgtctttttgtttggtgcttatatatcctatttcttagcctaattatttcaagtgtttattttgcaactaaatttgaaacttcccaaggtcaggaaccaaggattctgcttctgaatttcttactaaatatatagattgattatttggtgcaccgaagtcacacaaatatttatactctacggattgatttatt

SEQ ID NO: 908007 - DNA, 583 bp, Homo sapiens
ccattgcactacagcttgggcaacaggagtgaagctccctctgaaaaaaaaaaaaaaagggggggggggatatgaacaaacagacacttctgaaaagaagacatacactacttaaccaacaaacttaagaaaaaaagctcaatatcactgatcatcagagaaatgcaaatcaaaaccacaatgagacatcatctcacaccagtcagaatggcgattattaaaaagtcagcaaacaatagatgatggggaggctgtggagaaatagaaacacttttacactgctggtgggaatgtaaattagttcaactattgtggaagagagtgtggcgattcctcaaggatctagaaccagaaatactgtttgacccagcaatccctttactgggtatatactcacaggaatataaatcattctactataaagacacatgcacatgtatgtttattgcagcactatttaaatagcaaagacatggaaccaamccaaatgcccatcaatgacggctgaataaagaaatgtggtgcatatacaccatggaatattatgcagccataaaaaggaatgatgtcatgtccctgtagg

SEQ ID NO: 908008 - DNA, 621 bp, Homo sapiens
atctagaaatgtcactctatgattttctttcttctcccctgaagatccgcatgtgacaagtgtcctaacctatacctaaagaaagagatgctacgctgagaggctgagaagaatctgagcaaacaggccttgctgggttccccccagaattcattaccattagatcataccctttttagccaatcttatttctacacagccatcaattctttactgcacataagcataaaaatacagtttttcctaggtctttgggtcttcattctgaaggttcctgggacgcataaaacttggattaaataaatttgttatgttttcctcttgttaatctgtcttttgttataggaatgtcagctgtgcactttgaaatgggtgcaaaaaaaaatattatacatttttacctttacatagtcttcagaaaaaatatggataatcataacttcttttcagttagtctctaatatactaaatgttgtttgtcatatttaaaatatgagaaataaaattattctgtatatattttcaatttaaagaaccctattatgtattacttcattgggtctattttctgggttttgtcgttgaaatrtctggagtacaataaacagaatatttttcaga

SEQ ID NO: 908009 - DNA, 536 bp, Homo sapiens
ttctttggattcagcagttttctaaacagtccttttgtagaatctgcaaagggatatttcagagcccattgarggctatggtgaaaaaggaaatatcttcaaataaaaacaaaacagaagctttctgagaagcttcctgtgatgtgtgcattcatctcatagagttgaatctttcttttgattgagcagtttagaaacagtctttttgtaaaacgtgcaaaaggatatttctgagccatttgaggccgatggtgaaaaagaaatatcttcacatcaaaactagacagaagcattctgagaaacttgtttctggtgtgtgcattcatctcacagggttgaacctttcttttgtttgagcagtttggagtcttttttttgaatatgcaaatggatatttgtgagcgctttacagcctatggtgaaataggaaatatcttcacataaaaataagacagaatctttctgagaaaatgctttgagatgtgtgctttcatctcacagagatgaacttttctgttgatcaagtagcttggaaa

SEQ ID NO: 908010 - DNA, 546 bp, Homo sapiens
ctatcttttgattgaacagttttgaatctctcttttttcagaatctgcaagtggatatttggagctctctgaggcgtactgtgaaaaatcaaatatcttcacctaaaaactacacagaagcattctgagaaactcctttgttatgtgtgcattcaactcacagagttgaaactatctttggattcagcagttttgaatctctctttttgtagaatctgcaactggatatttggagtcctttgtgccatatggtagaaaaggaaatatcttcaaataaaaactatacagaagcattctgggaaacttctttgtgttgagtgcattcatcacacagtgttgacactttcttttgattgagtagttttgaaaaaatctttttgtagaatctggaagtggatatttagagggctttgaggactcttttggaaaaggaaatatcttcacataaaaactacacagaagcattctgggaaatgtcrttgttatctgtgcattcaactcacagagttgcacctatctttgaattgagcactttcaaatctctct

SEQ ID NO: 908011 - DNA, 615 bp, Homo sapiens
ttgtgatgagtgcattcattgctcagagttgaacttttgttttgattcagcagtttgcaaactctctttttgtagaatctgcaactggatatttgaagmcctttgtggcctatgttggaaaaggaaatatcttccaataaaaactagaaagaaacattctgagaaacttctttgtgatgtgtgcattcatctcacagagtttaagctttcttttgattaagcagtgtttaaaaactctttttgtaaaatctgcaagtgcatatttggagcgctttgaggcctattgtgaaaaagtaaatatctacatataaaaactacacagaagcattctgagagacttctttgtgatgtgtgcattcatctcatggagttgaaccattcctttgatttagcagtttcaaaacactatttttgtagaatttgccagtggatatttggggccctttgaggcagatggcagaaaaggaaatattttcccatagaaactacacagaaacactcggagaaacttctttgcgatgtgtggtttcatctcacagagttgaaccattcttttgattgagcactttggaaacacaccctttgtggaatctgcatgtggatatttggagtgct

SEQ ID NO: 908012 - DNA, 626 bp, Homo sapiens
ggcatcatctgtaatttttaagactatatagggattctgatctttcatatatcccaaatagaatagttatatctggggttattgtgaatattatataatataaagcacctacaaagtgctttgtgaactacaatacacattataataacaggtaatattattcttattaacattcattttggaagggtcaaatattttgaatgccagtggaaacaatttaaatcaacctcctggtttccttctacctctggataatccttcatctgttagtgacagctggagaagtaatagtaatcacagtcatgtgtaaatcatgggttttcagtgttacttatagattaaagggtctcttatttcaagctaccagcagcagaatatgttgtcatgataggtgtttaaaatattaatctagatttttttctataagggccaattatttgtctaggcactcaaaatacaaaattaaaactattgcacctttccttaaagaccatctagtgtaataaagaaggcatgcatattagtgggttatcttaatactatatgatgaatacatcagtgagagttaaggcaggggtacagtgggamcacagaggctggcctataattttgtataaggagcatta

SEQ ID NO: 908013 - DNA, 636 bp, Homo sapiens
aatttttgtatttttagtaaagacgggatttcaccatgttggccaggctgctctcaaactcctgacctcaagtgatctgcctgccttggcctcccaaagtgctgggattacaggtgtgagccatcgtgcccagccacattttctttatagacactgctgttactttgtctaactgtaaacattaaaaggcaaattgagtgacaagatgactttctaaacagacctccctgtcaatgaccacttggattaaattattattgagaagtagagtgcagtggagtgagcccactggagttagggggtcagagtgctgggtttatggataaattaggacagaattagctagagtccagtctgatcaactgttttttccatatcactttacaataaataatattcaattcccttctccatatggcctgtccaataaaaggaaatgggaactattttctcagctttccctcgcttgtgctaccctttcctcccaaattaagcccaacatcttagaagatgtctatctgtcaccctgcyccaagggtgcactaacaagttgaagagcttgaagaaattaggagttcaaacagacacttgtaagcacctactccacaactacctttggcaaaacatctggggatg

SEQ ID NO: 908014 - DNA, 576 bp, Homo sapiens
acacacacacactaggttcttgcatctgagggtggggcctgaatctctgtacatcaggcacaggaaggtgccactccttgctacttttctccaggtctcatgatccaatccctaatatttccatkgtggaatacgcttgacacttacttcacatcatttgctctatctttgcattaactaatgatcatatcaaaacactgtcttttgaaaaaatttattgcagaggggtcacctaggaaagatgcacttggtaggggtcacctgtgcccccttgtcctcctttgctattcaaatcgtcctcaaacctaccctctggctgaggtgggcagtccaacatgcaggcaggcgcctggctgcctggaggcagcccttctcgttgccctgtcataattcaagcaggtctttctgatgccagaggaaatgcctacaagccttagaaaagtcttagagatttttaataagggttattagcctctattcctttggaacaagaaagggtagagctgactttgatcatgaagttttcgattctctcgctgccgtcacacctcttccaatgcctcagtaggagacacc

SEQ ID NO: 908015 - DNA, 658 bp, Homo sapiens
aactatcctgggcattttgtgcattgaaggaaaggattgcaagttccttgtcatttctgtgttccaactcatgatgtcatgacaactgtaggaccacctttcctgatgccagcctcggttgtgagaggaaaacatttctcctctcctatggctctaactcctgaccctttccccttatctcttgctctcacctcccctatttccagtggccaagactgtcccttgcaaagcagctgcagcatctccaattttctggtttttcaacatttttcctgccatgtctatgacagtcttgagtgttctctttccaggagcagtatttatagcttttgtttccgcaccactggtatttttccagtcttggaaccattccatttatttagttgaatgaattgtctttttcaactcttggaatgtttcctttgattctgagtctgcttgtggtgctaaaatttcttaacaacctgttggccaaggccccttctttctcttctgcagagggaacctaaagctgtcctctgtgagaaagaaatgactgtggaattcattctttyggtcttccagttgggtcatctctgcttatcaatccacacagtggaatggactagaggtggctccttcataccagagtagaagcaaccttattttccaatataaa

SEQ ID NO: 908016 - DNA, 631 bp, Homo sapiens
gaagtcagtgttcacttaccattctgaaaattcgatggcctttaagagttatgctaaaacaactcttcctgtgctctayagatggaagaaccaagcctggacaacagcacatctacttgcagcatggttgactgaatattttaagcctgatgttttaagctcagaaaaaatgattgctttcaaaatattactgctgattgacaatgcacctgttttactcaagaggtctgagggagatgtgtaagattaatgttgttttcatgcctgctaacacaacatccattcagcagcccatgggtcaatgagtcattttaactttcaagtctaatttaagaaatatattttgtaaggctatagctgccataggtaatgatacctctaatgattctgggagaagtaaactgaaaatcttctggaaagaattatccattctagatgtcattaagaacattcatgattcataggaggaggtcaaaatatcaactttttctcaaacagaagtttggaaaaaagttgattccaaacctcatgaatgacttcgaggggttcaagactcacttgaagaagtaactgcctatgtgtaaacatagcaaaataaatagaattagaagttcagctgcaagaagtgaca

SEQ ID NO: 908017 - DNA, 597 bp, Homo sapiens
ctgtattggttattctagttatacattcatctaaatttttttcaaagtttttaacttctttgcctttggtttgagttccgtcctgtagctygtagtttgatcgtctgaagccttcttctctcagctcttcaaagtcattctctgtccaactttgttccattgctggtgaggaactgtgttcctttggaggaggagaggcgctctgctttttagagtttcctgttttctgctctgttttttccccatctttgtggttttatctacttttggtctttgatgatggtgatgtacagatgggtttttggtgtggatttcctttctgtttgttagttttccttctaacagacaggaccctcagctgcaggtctgttggagtttgctagaggtccactccagaccctgtttgcctgggtatcagcagcggtgttttcagaacagcggtttttcatgaaccgtaaatgctgctgtctgatcgttcctctggaagttttgtctcagaggagtacccggccgtgtgaagtgtcagtctgcccctgctcggtggtgcctcccagttaggctgcccggaggtcaggtgtcagggacccacttgaggag

SEQ ID NO: 908018 - DNA, 658 bp, Homo sapiens
atataaacagagaccacataaaaatattttcytggggtgccgtgtgccctagaggctactctgagaaaatggttactctaaacctgtcctgacaaagctttacaatgagccttaaaataattaattttatcttcaagtaacttaacggctgagaaaaaaaagaaaataagaaaataaagtccaacaatctttaggaatgacaaaaactggtacttaatataaaatttatagtactcagaatccaataaaaaaacttacatatagtatacagaaatagacccagaaatgaaatgaaagagatgatggaattaacagacaagaactttaaaatctttgttataaatacatgaatttgaaaaatatggatataataaaaagaaaaacaaaaataaaaatttaacaaaacagaaattttagagattagaaatttcattatctgaaatgaatattttgctacaaggtgttaccatcagatttgctactgaagaaaaagatcagtgaacttgaagatgtagcaatagaaactacccaaaatgaatcctagagagtaaaatggctgaaaaaattaaaaagtattagtgacctacatgaaaatataaaatattctaatctacatggtctcataattgggaaataataagggattcagaaaaacaag

SEQ ID NO: 908019 - DNA, 597 bp, Homo sapiens
aaataccacatttaacatgagtccatgaattttttaatacatatttgaatcaatttgcttatataaacagagaccacataaaaatattttcctggggtgccgtgtgccctagaggctactctgagaaaatggttactctaaacctgtcctgacaaagctttacaatgagccttaaaataattaattttatcttcaagtaacttaacggctgagaaaaaaaagaaaataagaaaataaagtccaacaatctttaggaatgacaaaaactggtacttaatataaaatttatagtactcagaatccaataaaaaaacttacatatagtatacagaaatagacccagaaatgaaatgaaagagatgatggaattaacagacaagaactttaaaatctttgttataaatacatgaatttgaaaaatatggatataataaaaagaaaaacaaaaataaaaatttaacaaaacagaaattttagagattagaaatttcattatctgaaatgaataytttgctacaaggtgttaccatcagatttgctactgaagaaaaagatcagtgaacttgaagatgtagcaatagaaactacccaaaatga

SEQ ID NO: 908020 - DNA, 621 bp, Homo sapiens
tcaaacaaatttacaagaaaaaaacaaacaaccccatcaaaaactgrcaaaggacatgaacagacacttctcaaaagaagacatttatgcagttgagttataatattacaaaaataaatgataatagtatctggaaaagtgaggaaaaggtttaataaacacattcttaaacatgtatttaaataaagaatatactaattctttatttaaatattcttaaatatgtgtttaaataaagaatataaaagagttaccttctttaaaaaaactagcctttggggtaaaataaaagaggcaaacagtaacttttagtagaagctttatattcttggacttttatatttctatattttctctattacaaagcttaaaacatgaaacattaacttacaaatagcaggaaacataaagatatatcaagtagttacaaaatgcaatggagcaagatgttgagataaaattggctggagattgaagtcggaaagatcaaaagcagaaagattcaggccttagaaagtgcaatcagaagactgtcaaatttcactgatatctcaatgcagtttgtagattgatggatgctgctaataatatatcaatgtaaatgtctatggcaatgctaga

SEQ ID NO: 908021 - DNA, 599 bp, Homo sapiens
  misc_feature 244: n = A,T,C or G
gtttcaaagaacttcttgaaatctaccctaatttcattatttrcccgggagtcattcaggagcaggttgttcaatttccatgaagttgtgtggttttgagtgagtttcttaatcttaagttctaatttgattgcactgtggtctgagagactgtttgttatgatttcagttcttttgcatttgctgaggagtattttactttcaattatgtgattgattttagagtaagtgccatttggcagangaaagaatgcatattttattctttgggggtggagaattctgtagatatctattagtttcacatgatccagagctgagttcaagttctgaagatctactaattttctgtcttgatgatctgtctgatattgacagtgtggtgttaaagtctcccactattattgcttgggagtctaagtctcattgtaggtctctaagaacttgttttatgaatctgggtactcctgtattgggttcatatatatttaagttagctcttcttgttgaattgagtctttaccattatataatgcccttcattgtcttttttgatctttttttgtttaaagtctgttttgtcagaaaataggattgga

SEQ ID NO: 908022 - DNA, 293 bp, Homo sapiens
aatttcctgggtacttactacatggtaatttagaaccaaatgaccatgaaaaaagtaaggcaggaataggttargtgacttgcccaaggtaacacagcttagcaaggagcagagctgggatctgaatttggacagtagaaccatggcatgccacgtgttcctaccgtgctctgctaactctcagtaattaactgcaatggaaacataacgccatctaaaaactagtgctattgatctttgccttccaccttggacttaagtctctttgactcccacgttgttccaattaactt

SEQ ID NO: 908023 - DNA, 293 bp, Homo sapiens
aatttcctgggtacttactacatggtaatttagaaccaaatgaccatgaaaaaagtaaggcaggaataggttaggtgacttgcccaargtaacacagcttagcaaggagcagagctgggatctgaatttggacagtagaaccatggcatgccacgtgttcctaccgtgctctgctaactctcagtaattaactgcaatggaaacataacgccatctaaaaactagtgctattgatctttgccttccaccttggacttaagtctctttgactcccacgttgttccaattaactt

SEQ ID NO: 908024 - DNA, 578 bp, Homo sapiens
ccttttcttaccacttatatcacttacatgtttgctttcaatttagaaacttctcttatactgtcttattttattttctatttcaagtcagattatttcatgtataaacatgttttgtctcctctaaacattataatcttacagggatgggaatcccttcagttaaggaggaaacgacttcctctctatcacttcatgataatgtgaatgctgaggttattttaagattgcgttgtactgtggatctgtatttgggactaggtcatacccacaccagggacgcagctgcagctgaaaagtaaggttaagcctagtgtctgtcactaagggaaggaacatatgtattagaccagcacagacggcgcaggagagaggaagggagtgctgtcctgggcttgactttgagggagggttgagatatctatggtgtgtagaagtgaaggggaggtggggagattgtggtcgtgaggtgtgttaaagccagtatctgtcacatggaggtctgtacttaasgttatttttaaatgatgctcagagaccctttagggattccagaaggttccagagaggactctcag

SEQ ID NO: 908025 - DNA, 576 bp, Homo sapiens
ttatgctattgtagcttgttcctgaaataaagggtagatttgtaagcactgtcatttgagtcttgtgggtcagggcctggactagggtgatgcaagtacagagtaagtatctcctaaaattttctggtctcagctttgttgtgggtcttcagtgtcaatcaaactcgttgtcaccattaatcaagtcgacttcatcctcaagctagtttactactgtcacaacatacctaccagtggcagtggaagatccatactttctccttcatacacagcaagagacaaaactttgactccagcaatgaactatcaatttttcttttaattcccttaatctgggatatttcacctcaatcactaggagaatgccaggtctttgttagtttactaatcaggatggctctatagagctggtgttagtgtgagtagctggaaagaaaaaatattaacacagaattctgttaargaggagaaaagagggaggtctgtgttcacttgtgcaggcaacagtgtccactttgccttcttactggcagaaacattaacttaaaagggaatacacgcagcttatgagtaaaa

SEQ ID NO: 908026 - DNA, 615 bp, Homo sapiens
tatatacccagtgatagagttgctgggatgaatggtatttctgtctataggtctttgaggaatcaccacactgtcttccacaatggttgaactaatttacactcccaccaacagtgtataagcattcctttttctccacaaccttgtcagcatctgttattttttgactttttagtaatatgcattctgactggtgtgagatattatttcattgcggttttgatttgaatttgactaatgatcagtgatgttgagattttttttatatgattttctccctctcacttttgggtatttaatttgtgaaactaagatgcctggaaatttatgtcaggcgttatgtcatatgaggttacaaacttgaggataaaaacaatatactgaggagagcagagtaaaaagatgaagaaactagagtttttccagaaatcagtgacccaatcctgtaactttgttgcttctagacttcttgttacatgagataataataatagtaatratgataatgataataacagcaataatttcccttcccgttaagcacttgtcgattagagattttgtgtttcaatattagaaacaagtgttccgatgctggggaaatgtgacaatatg

SEQ ID NO: 908027 - DNA, 525 bp, Homo sapiens
  misc_feature 452, 472: n = A,T,C or G
actctctttttgtagaatctgcaagtggatatttggagtgatttggggcctatggtggaaaaggaaaaatcttcacataaaaactacacagaagcattctgagaaacttcattgtgaatgtgtrctttcaactcagagttgaacctatcttttgatagaacggttttgaaacactctttttgttgaatctgccaggggatataagagcgctttgaggcctatggtggaaaaggaaatatcttcacataaaaactacaccgaagaattctgaggaacttctctgtgatgtttgcattccactcacagagttgaacctatttttcaattgtgcagttttccatgtctctttttgtagaatctgcaagtggatattgggagccctttccagcctattttaaaaaggaaatattttcatataaaaactacacagaagcatctcagcaacttcttgntgatgggtgcatcatctcancagtgctgaacctctcttttgatcatgcagcttggaaacattctttttgtaga

SEQ ID NO: 908028 - DNA, 631 bp, Homo sapiens
tttgtgatgtgtgcattcatctcacggagttgaaccgttcctttgatttagcagtttcaaaacactctttttgtagaatttgccagtggatatttggggccctttgaggcagatggcagaaaaggaaatattttcccatagaaactacacagaaacactcggagaaacttctttgcgatgtgtggtttcatctcacagagttgaaccgttcttttgattgagcactttggaaacacactttttgtggaatctgcaagtggatatttggagtgctttcaggcctattgcggaaaacgaaatatcttcacataaaaactacacagaagccttctgagagacaactttgtgatgtgtgcattcaactcacagagttgaacctatattttgattgagcagtttcaaaactctctatttgtagaatctgcaagtgagtattttgagccctttgaggactttggtggaaaaggaaatatgttcacataaaaactacacagaagcattctgagaaagyactttttgatgtgtgcattcaactcacagagttgaccttatcttttaatagagcagttttgaaactctatatttgtagaatctgcaagtggatatttgcagccctttgtctcctatggtg

SEQ ID NO: 908029 - DNA, 559 bp, Homo sapiens
tttgaggcctatgatggaaaaggaaatatcttcacataaaaactacacagaagcattcttagaaacttctttgtgatgcttgcttttatctcacagagttsaacatttattttgattgagcagttttgaaacactttttgtagaatcttcaaatggatatttggagcactttgggcctgcatggaaaggaaatatcttcacataaaaactacacagaagcattctgagaaacttctttgtgatgtgtgcattcatctcacagatatgaagctttctttttattgagcagtttgtaaaaactctttttctagtatatgcaagcggatatttggagccctttgtggcctatgttgcaagaggaaatatcttaacataaaaactacacagtatcattctgagaaacttccttttcatgtgtgcattcatctcacatagttgaacctgtcttttggttgagcagtatggaagcactctttttgtagaaattgcaaggggatatttggagagattttatgcctatcttggaaaaggaaatatgatcacataaaaaccacacaga

SEQ ID NO: 908030 - DNA, 559 bp, Homo sapiens
tttgaggcctatgatggaaaaggaaatatcttcacataaaaactacacagaagcattcttagaaacttctttgtgatgcttgcttttatctcacagagttgaacatttattttgattgagcagttttgraacactttttgtagaatcttcaaatggatatttggagcactttgggcctgcatggaaaggaaatatcttcacataaaaactacacagaagcattctgagaaacttctttgtgatgtgtgcattcatctcacagatatgaagctttctttttattgagcagtttgtaaaaactctttttctagtatatgcaagcggatatttggagccctttgtggcctatgttgcaagaggaaatatcttaacataaaaactacacagtatcattctgagaaacttccttttcatgtgtgcattcatctcacatagttgaacctgtcttttggttgagcagtatggaagcactctttttgtagaaattgcaaggggatatttggagagattttatgcctatcttggaaaaggaaatatgatcacataaaaaccacacaga

SEQ ID NO: 908031 - DNA, 377 bp, Homo sapiens
tggatgttgggagcaatttgaggcctatggtgaaaaaggaaatatcttcaaataaaagcaagacagaagaattcagggaaacttcttcrtgatgtttgcgttcatctcacagagttgaacctttcttttcatgagcagttttgaaaaactttttgtagaatctgcaagtggacatttgcagccctttgaggggtatattaaaaaaggtaatatcttcacataaacactagacagaagaattctgagaaacttctttgtgatgcgtgcgttcatctcacagagttgaacctttcttttgattgagcagtttggaaacactctttttgtagaatatgaaagtggacatttggagccctttgcgtccctaagcagaaaag

SEQ ID NO: 908032 - DNA, 540 bp, Homo sapiens
tttgattgaacagttttgaatctctcttttttcagaatctgcaagtggatatttggagctctctgaggcgtactgtgaaaaatcaaatatcttcacctaaaaactacacagaagcattctgagaaactcctttgttatgtgtgcattcaactcacagagttgaaactatctttggattcagcagttttgaatctctctttttgtagaatctgcaactggatatttggagtcctttgtgccatatggtagaaaaggaaatatcttcaaataaaaactacacagaagcattctgggaaacttctttgtgttgagtgcattcatcacacagtgttgacactttcttttgattgagtagttttgaaaaaatctttttgtagaatctggaagtggatatttggagagctttgaggactcttttggaaaaggaaatatcttcacataaaaactacacagaagcattctgggaaatgtmgttgttatctgtgcattcaactcacagagttgcacctatctttgaactgagcactttcaaatctctct

SEQ ID NO: 908033 - DNA, 613 bp, Homo sapiens
aggaggcaaagactttaggaagtgatttcaccatgaaagcaaagagcccatgaataggataagaggtcttgtaaaagggagccaagggagcttgttctctccttccaccatgtgaggacacagctaggaggtgtcctctgtaagatacaggtcctcaacagacacctaatctgccactactttgaccttccacttgccagcatccagacctatgagccaaaatttctgctgcttataagccccctaggctaaggtattttgttacggcagcccaaatggaataagacagcctctgaccatcttgagcaactcacttatctgttgaactctccacagatttaactgtgatgaaatcccttcaacagatgtatattgaacacctactatgtataaggacacactgtgttattagatagggtataaagaaagtcacagttccccagaggtaggcactgccatagctgaagagccaacccaagttgctgttgccagtgggggaaggkctgggtgtcagagaagaagagaacttgccaaagtccatgtctgcagcaatattggaacgtctaatggatggttcccaaagtggtgactcctcatcttcttacaaaaactc

SEQ ID NO: 908034 - DNA, 607 bp, Homo sapiens
cttgcctgtttctatgtccaggatggtattgcctaggctgtcttccagggcttttatagttttgggttttacatttaagtatttggtccatcttgggttgatttttgcttatggtataaggaagaagtccaacttcaatcttctgcatatggctagccagttatcccagcaccatttattgaatagggaatctttccccattgcttgtttttgccagctttgtcaaagattagatagttgtaggtatgtggtcttacttctaacctctctattctattccactggtgtatgtgtctgtttttgtactagtaccatgctgttttggttactatagtgctgtagtatagtttgaagtcgggtaatgtgatgcctcaagctttgttctttttgcttagctacttaagttctttcttggttctatatgaatttttaaatagcttttttctacttctgtgaagcatgtcattggtagtttaataggaatagccttgggcagtacaaccatttaartgatactaattctttctctccattaacatggaatgatttttcatttatttgtgtcttctctgacttctttgaacagtgttttgtaattttcattgta

SEQ ID NO: 908035 - DNA, 556 bp, Homo sapiens
aaataaaaactattgatacctacagctacatacgactacagcaaagattaaatgaagcctaaattttagccagataaaggcctgtttgtctctccttctactacatgatacacggtgtctggctttcaaaaaattgtaagaggccaggcgcagtggctcactcctgtaatcccagcacttcaggatgccgaggcgggtggatcacgaagtcaggagtttgagaccagccagggtaacatagtgaaacaccatctctactaaaaacacaataaattacccgggcttggtggcaggtgcctgtaatcccagctgctttggaggctgaggcatgagaatcgctgtaacccaggaggcagaggttgcagtgagtccagatcgtgccactgcactccagcctgggcgacagtgggaaactccatccaaaaaaaaaaaaaaaaattgcaagacatgctaaaaggcaaacacataatctgaagagacaaagcaaacatcaaarccagactcttatgtgatacagattttagaattataagactgtcaattgaaaataattact

SEQ ID NO: 908036 - DNA, 703 bp, Homo sapiens
gagacagaaattaacttgtaaatgattcttactggaayttgaatgagagacaggcattgttttgtttaaaggcacttccaggtgtggttgcattcgtcactatactttgtttcttttttgagacagagtctcactctgtcatccagactggagtgcaatggcacaatcatttctcactccagcctttacctccaggctcaagcaatcctcttgcctcagcctcctgagtacctgaaactgcaggtgcacaccatcatgcccaggtgtttttgtttgttttattttgttttgtagaaatagagtttcatcgtgttgcccaggctagtctgaaactcctgggctcaagtgatctgctcacctcaatcctcccaaagtgctgagattatcagaggcgtttgaaccagggcaacttttcttaaataggggatggataaaataaggctgagacctactaggctgcattcctaggaagttaggcattgctagtcacattataaataggcggtcagcacaagatataatcataaagaccctggtgataaaacagaatgcaatcaagaagctaatcaaaacccaccaaaaccaagatggtgatgaaagtgacctctgctcatcactctcaccgctcattgtttactagttataatacattaatatgctaaaagacagtgcctccagtgacatgacagtttacaaatgccct

SEQ ID NO: 908037 - DNA, 389 bp, Homo sapiens
tcttatactctgcttccatttgaacattttgctacttagaaatttctttcaccagataacctaaattatctctctcaagttcaatgttccacagatctctagggcaggagcraaatgccaccactccctttgctaaaacatagcaagggtgacctctactgcagtttccaacaagttcctcatctccatctgataccatctcaacctgaatttaattgtccatatcactatcagcattttggtcaaaaccatttaataagtctttaggaagttccaaactttcccacatcttcctgttttcttctgagccctccaaactgtttcaacctttgcctgttacccagtaccaaagttgcttccacatttttggtgttcttatagcagcaccc

SEQ ID NO: 908038 - DNA, 389 bp, Homo sapiens
tcttatactctgcttccatttgaacattttgctacttagaaatttctttcaccagataacctaaattatctctctcaagttcaatgttccacagatctctagggcaggagcgaaatgccaccactcyctttgctaaaacatagcaagggtgacctctactgcagtttccaacaagttcctcatctccatctgataccatctcaacctgaatttaattgtccatatcactatcagcattttggtcaaaaccatttaataagtctttaggaagttccaaactttcccacatcttcctgttttcttctgagccctccaaactgtttcaacctttgcctgttacccagtaccaaagttgcttccacatttttggtgttcttatagcagcaccc

SEQ ID NO: 908039 - DNA, 530 bp, Homo sapiens
atatgatccagcaattccacttytgggtatatgtctaaaggaaataaaatcagtatcttgaagagagagctatgcatccaggtttattgcagaattttaaaaatagctaagacatgaaagcaacctgagtgtctgttgatggccgaatgaatagaataagtagtatacatataaaaatgcacacaaatacacacacacacacacgcggctgaatgttattcagccataaaacaacaacaacaaggaaatcctgctatttgcgagaacttggatgaacctggaagatattttgctaattgaaataagccagacacagaaatacaaatactgtatgatctcacttgtgtgtagaatctaaagcatatgatcagagaggagaacagtggttgccaggagctaggggaatggggaagatggggggatgctggtcaagggtacaaaacttacagttataagatgaataagttctagaggtctaatggacagcatgatcactgtagttaataatactgtattgcttacttgaaatt

SEQ ID NO: 908040 - DNA, 664 bp, Homo sapiens
tgggaaccacacccccatttcccaaaggagctacagtaagccttgcgcaaagataggctgagctcagatatgcctattcctgcctccaccttgtggtctttctctaccttccctggtagccgaagaaaaagctcatattctcttgggagtcctatgaccctgcccactgcctgagaaacctgaatacttaaccaggtgtccctagagcaagtttgcatcctccctataggactgcagctgatgcatacttgaaaaggtcacctcctggctggaggccaaccaacacaaaaccagcccactaaacaaaacacaaccaaggaccctcacagagtccactttaatcccttgctacctccactgtagcaggtgctggcatcagtggctgcaagacctgtagatagatcacaacataggactctttggagacactccccagtactagcccagagcacagtagctccactgggttcctagacccagaagagcaaaaacaatcactacagtctagctctcaggaagccctattcctaggggaagggggagaacaccacataaagggagcatcccatggttcaaaataatstgagcagcagcccttgaatcccagacatagtctacccgtatgagaaagaactagaaaaacaattctggcaatatgacaaaa

SEQ ID NO: 908041 - DNA, 614 bp, Homo sapiens
tttattataatgatgatgcttaagtggcttaaatccaagacatatcccagcttagtggggttgcagctctgttatgttttattgatcactgtcagagatttccagaactttgatgtaatagggcagcatgatagagtgaaattcaacagagtggagctcttgtcccgccttaattattgtcaactctctgaatcttagttccctcatttgtaaaaattaagacttgtctggatgctcttccaaatcctactcagcttaaacagtctgacattctgagaggaatggctgatactttcctgaagatcttaatcctttggtaacagtggtagttatgtcatttgtttcctgggaacctgacatagcgccccctccagctgagcagagaagctcttggcccattctgtacatgaccctgctggactttccaattgtgttaattggatgctttgaaccagagagacctgcacctggcttctcccatgagcaagatcacacattctccaaataaaatgagagagtggttgtctccatatgaggttggctggtttttgtggatttgcaccctctactgtggtytaattttcacatcacttagtgcttgcatgaaagcgttt

SEQ ID NO: 908042 - DNA, 579 bp, Homo sapiens
tgcctgttttaggcaaatgggaatgcttttggaaacaatatgaaccgcaacgggtatttctgcaagtttctaagactggcaggagtcagctcgggggaagcaggaagaatccccagttggttggctattcttgggaccgaagagataatccccattgaacagagcctacactcacatccttgagtccgtgatgttcttcgcttccctgggaacagccagagtccagctttccgtgtggattgctttcacagggatatctggcccttcaagccagtggtgtgaatgtcaccccaagaaccttgacgtgtagatactgcctacttcaagtcatactgcagctctgcctcttcccaagataggatttgaagcagcttccaacagaaaatggatgtgaaaatgtattgtgaacacatgcataggaccatacatacatcatacacacacacatacacacacacttaaacatacacatgcacatgtacacacacayacacagctatgggcacaacttcatttcaacttgtagattgtgaagtaaaggcattggaactttgtggcttgcaaatctaaattacctcc

SEQ ID NO: 908043 - DNA, 537 bp, Homo sapiens
gtaaatgtgctgctctagctccttgaggtgtgaatgtctactatatgaaaagccattttccaatctactgataagacagacagaagatattggtccaaagttagtaaacaatgtttaargtcttagatgaaaatattaattcttattaatagacgtacagtgaaaatcctcagtatagaaattatggatacatttggttgcaaagagttgtataagcatttcattgtccataaatgtctattaaattatgttctccaaaatctacatttgtcataatgaaattatatgcgctgtgctgtgcctaaataacaaacgtctgaggccaaatcaaacaattagcacattcataaagtcaagacattttgttgtcaaaaataaccatttttttattgtaagaaatccacttttactaaatatctaagctcataaaatattggtgagccacagaccaccactaagaactgtgacactaattctattttttaaaaaacaaaactctttaatcatttgattatttatttatttatttatttattt

SEQ ID NO: 908044 - DNA, 694 bp, Homo sapiens
aggtattctaataggtgtgaggtgtatctcgttgtggttttaatttgcatttccctgatgagtagtaacatggagcattttttcayggacctgttggccatttgtatatattcttttgagcaatgtctattcaagtcctttgcccttttaaaaatttgattatttgtcttatttgctattcaattgtttgagttccttatgtattttggatattaaccccttatcagatatatatggttcgcaaatatcttctctcactctctgattattcacctttttaattgcttcctctgctgtgcagaagacttttagtttcatatattcccattaatctatttttgcttttgttacctgtgcttttaacatcatatccaaaatataattgctcagatcaatgttgtagaactttcccctatgatttcttctagcagttttacagtttcaggtcttatatttaagtttttaaatatattcaaggttttacatatattcaccgcaatcaagtgagattaacccctgggattaaacccattttcagttgatttttatgtattgtatgaaatatgaacctaatttcactcttttgcatatagatacacagttttctcaactggatccagttttctcattaattggagtctgtcctttccctattatgtattcttggaacttttataaaaaaatcaattgtcat

SEQ ID NO: 908045 - DNA, 681 bp, Homo sapiens
agcacatgaatgtctgtgatccatttaaaattttttatttatttatttatttttaattataccttaagttctagggtacatgtgcacaacgtgcaggtttgttacataggtacacatgtgccatgttggtttgctgcccccatcaactcatcatttacattaggtatttctcctaaagttacccctcccccagccccccatccctaaacaggcccctgtgtgtgatgttccctgccctgtgtccacgtgttctcattgttttaaaattaattttatttggaagtatagaaaggaaaatgagctagacaccatatcaattcaggcagtatttacatgattcctaactcatcaaactagagaataactgtgaaggtggctcacacctgtaatcccagcactttgggaggccgaggcaggtggatcacaaggtcaggagttcaagaccagcctggccaacatagtgaaaccctgtctctactaaaaatacaaaaaaattagccaggcatggtggcgggcacctgtaatcccagctactagggaggctgaggcagragaatcgcttgaacctgggaggtggaggttgtggtgagctgagatcacggcattgcactccagcatgggcaacagtgcaagactctgtctcaaaaaaaaaaaaaaaaaaaaaaaaaaaaaacacctcaa

SEQ ID NO: 908046 - DNA, 675 bp, Homo sapiens
attagtgaggtacatatgttacagttgttattgattatattgattaattatattggcaatataattaatccaatattgacacattattactaacaaaagtccatcgtttacattagtacacactgtatgtattgactattcaatgggctttcacaaacacatgtcatgttcccaccattacagtatcctaaagaggtttcattttcctaaaaatcctatgttctaccaattcatcctcttcttgcctcctgcaagaacactggctattatattattatttctactgtctccatagctttgtcttttccagaatgtcatatacctgtagtcatacagcatataatctttgtaagttggcttctttcacttagaaatatgcatttaagtttacttcatgtccttttgtagctgtatagctcatttatttttatttctgaataataaacacttcattaaatggacgtgccgaagtttgtttatccatttatctatggaaaaatattttgtttgcatccaagtttggcaatttggcaatttatctatggaaagtattttgtttgcatccaagtttggcaatttggcatttttaatgaaaaaaagtgtgcaataaacatttgtgtgcaaaatttgtgtgaacmttaattttcaacttatttgggtaaatgcctaggagca

SEQ ID NO: 908047 - DNA, 647 bp, Homo sapiens
attaattatatttgcatagtctatatttttataaattttcctataaaatgttacccagttgcaaattttttttatatatggtttttctcttaaacttcctcatatactagaaccttgatgataattttataaaagaaatactatggagtactaactgttacagtgcttttctttctacctctttctttctctctgtttctctttctgtttatctctctgtctcagtcttgattatataataaattaataaaatgagagtaagaactctgatttttttctataacaattgaatatatttctctcttattttcattgcaaatattgactggccaacaatcttttaaatgggaccactgacagaagataaattgggcaagagagtataattggaacaggttacaggaatttgagctgccagagactatagatgattaagtctaatgcctcattttagagctgagagagaaatcgtggttgagagacgttgtcatttatctaagagtgctgagctatttaatggtgagactacacacactcttctaatcccagtgttcttttactgaactcaattatttgtattacmgatacttcaaaacttattccaagtacatgtcaagcaaagggaagaatgtttataagtataaggt

SEQ ID NO: 908048 - DNA, 655 bp, Homo sapiens
gtatcaaggaaactgaaactcaccagatcggtgagatgycagacccattattcctcctgactgcttccttactctttcttaatttctgttttctaaattccttcctgctatatacacccccaaccccattttagctggttagaaagaacagagttgaggcttggctgccatcttcccggccgatgtcacctgcaatataacaaagccttatcccctggcaaaactcattgtttcagtgattggctttctgagcagtcaatgacaggacctagaccgaacacctggcatttccataacagttcctgtggcttcgcatacgagcataagacctaaggtgatgagcatagcagccagccttcttccaccactattccttgtttgccctatcctctgcccatttctcaactggatggtgttccttactgaaaaattaaccacagtcttgatttatgaagggcctgaattcgttaggggataacctcattatcccctggtaatcaggaccagtcacctcactgaatgcagtgaccccttttctatacaatggtccagctacataaggagctcagaatggccagaggcagcttcagcttccaattcactaggaccatgactcttttagaagtagtctttctttgggcattagcatctccag

SEQ ID NO: 908049 - DNA, 564 bp, Homo sapiens
ttcactctgcatttgcacacaccctgccttcttcggaagatgccctcctcatggtataatttcaaagcatagctcagacattcgtctttcctcggtcagccaacacatctttagcaagcaggtacctgcgatttgccaggtaccagccttgggggcaaggcctggagcttcttggttctcgcactttctgcaatacccagagaccttccatagcctgttgagtgaaggaatgggcagcacatgggatgctgaacaaatagcacagagctttatgatgacttggaattattaaaagtttctggatgcagagctgatgtcccaaaaatttgatgagacactaactgagagagcttggataacaaccaacactctgatggggcaagtttttcccaggtttccctctcttctcctggatgggtcccaaaaacttcacaccctgagaagccccaccccagcmggcacgggcttcctgtcgaagctccattccttccactggagaaagcaccagatagcctcgtggattcacacagcgagccgtacccagcccaggggagccagggccct

SEQ ID NO: 908050 - DNA, 634 bp, Homo sapiens
gtaatcaacacaatttagttatagtgacaatacagattaatggaaaataatagagaggccagaaacggacctatgtttacgtattgattgatttttggcaaaagtgccaaagcaactcaacagagaaagaaaaattttctgacaaactgtgctggattatgtgaatataaatatagaaaataatgaaaatagatcttcatctctcaccatgtaagagttaactcaaaacggatgagacctacctaaatgtaaaatctaaaactataaaacctctgtactaaaacacagaagaaagtcttttaaccttaaagtttgcaaagtttttgaataaaacctaaaagaaaaaaaattgagaaactgaattccatcaaaattttaaattttttccttctaaagacagcacttaggaaacaaaatgactagccacaaattgagacaaaatatttgcaatacatctctcagataaataattaaatctagaatatataaaacactcttacaactaaaaagtaagacaaataaccaaaaaaagtggggggcgggcaaaacctgtgaaaatgcactttaccagagatcttcatccackatggccaaataggaagagctctggtctgcagctcccagtgtgtttgac

SEQ ID NO: 908051 - DNA, 598 bp, Homo sapiens
tgcttttacactgttggtgggagtgtaaattagttcaaccattgtggaagactgtgtggcaattcctcaagatctagaactagaaataccatctgacccagcgatatcactactgggtatgtaccaaagggttataaatcatgctactataaagacacatgcacacatatgtttattatggcactattcacaatagcaaagacttggaaccaactcaactgtccatcaatgatagactgcattaagaaaatacggcacaaatacaccatgaaataccatgcagccttaaagaaggatgagtttatgtcttttgcagggacgtggatgaagctggaaaccatcattctcagcaaactatcacaaggacagaaaaccaaacactgcatgttctcactcataggtgggaattgaacagtgagaatccttggacacagggtgggtaacatcacacaccgtggcctgtcggggggtgggagactgggggagggatggcattaggagaaaaacctaatgtaaatgasaagttgatgggtgcagcaaaccaacatggcacatgtatacctatttaacaaacctgcacgttgtgcacatgtaccct

SEQ ID NO: 908052 - DNA, 632 bp, Homo sapiens
acaagatcaacaggcaatactatgtcacatttctatatactaacaatacacatgcagaaagtaaatagagcacaataccattttaactgctccaaggaaaatgaaattcttagttgtgtattgaataaatcacatacagaatctatatgctgaaaattccaaaatgctactgaaagaaatcgaagagctaaataaatggaagacactaagtttatggattgtaagattcatatagtaaagatgtcaggtcccccagattgtcatacaggtttgacacaattcttgtcaaaatcccaagaaattttcttgtagctatagacaatattattctacagtttataaggaaagacaaaagaattaaagcagataaaatacttttgaaaaaggagagtaatgtcagagaaacctgtctacctaattttaagacatatctgtctagctaaaacaatcaaggccgtgaaataaatacatatatccgtggaacagaaaaggaacaaaaattcawataaattagaaatagactcgtataatatgccaaactgatttgtgacaaaggttcaaaagcaattcaaccgagccctttcaaaaactgatgtggaaaatttagacagctataggtttttttaaaaaat

SEQ ID NO: 908053 - DNA, 632 bp, Homo sapiens
aattggaagtatagaagtaaaacactctttagcaaatacaaaagaatggaaatcataacaaacagtctctcaaaccacagggcaatcaaattagaactcaggaataagaaactcagtaaaaatggcacaactacatggaaagtgaacaagctgctcctaaacgattactgggtaaataacaaactttaaggcagaaataaagatgttctttgaaaccaatgagaacaaatacacaacataccagaatctctgggacacatttaacacagtgtatagaaggaaatttatagcactaaatgcccacaaaagaaagcatgaaagatctaaaattgacaccctaacatcacaattaaaagaactagagaaacaagaggaaaaaattcaaaagctagcagaagacaaaaaataactaagatcagagcagaactgaaggatatagaaacctgaaaaacccttcgaaaaattcaacgaatccaggagctgttttttttaaagcatcaacaacatagactgctagccatactaataaaaaagaaaagagagaagaatcaaatagaagcaataaaaaatgataaagggggtatcacmactgatcccacagaaataccagctaccatcacagaatactataa

SEQ ID NO: 908054 - DNA, 265 bp, Homo sapiens
ggacatgtgacatgcctatatgaagaagaaattctgaatgtaatatattcaggaccaaaaaatggaatcttactgaaatacagtcaggttaaaatattttgcttatagattrctctgtactgcacaaggcttttccaaaaaattagctaactcccttagttcatcatatcgcataagagttcctttgaaaatataggagctatgtgtatttttttaaaggagctctgtgtattttaaagacaggcacaatcctgtatctttctac

SEQ ID NO: 908055 - DNA, 598 bp, Homo sapiens
aggaaccatgcagaggcttgacccaaacaaatggaaatgattgaaacatgtgaagaaaaagtagctttctggaagttagaaattacacggcgcaaaggcacaaagtcagccagggtatgtagaggaaaagagagttatccacgcaataaactgtggggtatatagagggaaaagagaattatccactctatgaactgtggggtatatagggggaaaagagagttatccactctataaactgtggggtatatagggggaaaagagagttatccactctataaactgtggggtatatagggggaaaacagagttatctactctggataaaacaagagcgagtgaagaagattaatgttcctgacttgcatttactggactcagtggatattctctccttccctgcaacctgtgccctacagggtaagaatattccccccaccccgcccgctccccgatttcacagatgaagagtctgcaactcagggaggagaaacaacattctcgaggtcacagagctgtaaattaacagaggacaatttcaaaaccaggcctccttggctctaagactyaagtcctttcctcctctaccatcaaaaga

SEQ ID NO: 908056 - DNA, 582 bp, Homo sapiens
ccaggagggaactgatttgtaaaggggtatgaggaacaacattccctctggtacaaagctaactgtgttgggcaccacttctaagcctcattactcatcttactggaccatagctctaagcctcatactgatcttactggcatgttgctctaagccagtaactagcatctcacctgtcaactgagcagaagcacagaggtttactaggtcctgagggaggctgttactgcacaagttctttgctggtgacagcagaaagtacttaggggccattccaagggtctgccttgtttgcagagttgattcatttgtgattgccatataaaggcctctgaaccaacaattgtttgggagcaaaagcaaacgagtgccaagatccaagttctcgtactgtggctgtagggttgagggctgcatagggtcgaaaggtataagtcactgtaatatcagygtggggacaccatgggtctcatcagtggttttgcccatgggcacagcccttgtggcggatgtctaattgtgtgcagcccagatgtcagcggaggcccttggagatcctattaaacttgacccgaaccccaa

SEQ ID NO: 908057 - DNA, 597 bp, Homo sapiens
tcactttttctttcaagtgtgctgaaacaaaatctaccatctgcactgccaaatacttaagtaagatgtgttataacactatttaaaaagatattcttgacagcaggaaaaatatccagcctgtgacagactcaggctctcagggtcttctccttttaactcatagttctaccccattgttgctttcaaaggtaaataatctggtccctagaatgcagtgaagagaatcagtgcagaggcttgggttatgatatgaagtgatcagaattgatggttactgactggacagctactactcagaatgactgctggccatttattgattaatctgtccaagcaccatggcatatttcctcctctaattgctggcaagccaggaagttgtggcgaaaccaagtgttggccaaatatgaagctaccaggaggactgggggttagttgatgccatttgccactttagttggcatcacaagcaagcatggcagattagatgttatcttyaccaaaaacgagagtgctttcagtgtacaatttatccttatttttgatatcctgtattgagacacttactattcccttatctataatggcagatgt

SEQ ID NO: 908058 - DNA, 647 bp, Homo sapiens
ataagcttttccacatatgaagaacagcttgtttcaggktttaaaatataataagattaacttttaaattgagttgagaaaacagcaagttacagataaattgagttactaaggaaagtgatttcacttttaaaaactgaattaaggacgttgaaattaatttatttttgaacagaacgtgctcaatgttaagttttgtttattaatttctctttggacaaactctttgaatgaaaacaaaatctattataaaactttgtttttcatattggcagccctgcatcaaatttttatctacaataaacatgaattatataccacttgcaggtagaagtcccatctgcacatcgattcacttcagccaatgacatgtgtgtgcatggactcttactgtagtatgcattaagtcccctaagccaattacttagtggagacatttaattcagtttaatctttaattatatgcttttgattaatggttaaaataaccgtaagttatagctgcaacattccatgttaattagtgggaaactttctagacaatttggaagactttcttatatctcttgctttagtttaaaaaatttgggaagtaggaaagagacaaataatcctctttgaagattgaattattaggaattattaag

SEQ ID NO: 908059 - DNA, 478 bp, Homo sapiens
atttgaccgaatcatccaaatgcacaatttcaccatgaaaggcttcagaaaaacaataacaactatttttagagcacctactatatggtcaggtggtacaattactaaaaagacaccggaaaagattttgtttctatcactggctgaagtccgcaaaggaaaaataaaacctgttcatcaagctacaggcacatgccaccacgcccagctaatttttgtactattagagacgggtttcaccatattggccaggatggtcttgatctcttgacctcgtgatttgcccgcctcagcatcccaaagtgctgggattacaggcatgagccactgcaccctgccaagatagatttttctctaaaaaatgtgcaaatctcccaataccctataggataataygttaaaaggtaggttgaaaatgcatatgactaagcgaaagaagccaaactgaaaagcctgtatactgtatgattccaactat

SEQ ID NO: 908060 - DNA, 519 bp, Homo sapiens
tatgctatatgataattacagggtatagttttgtctggctctctcactggtccacatacaccctgagaactgaattggatccatgtttttatattttacttggtattaaacattggtacatagtagatgttcagaggtttcaaacacagttggcagttgttctgtctaggatattagcttcattttactctaaccagccatttatcctacataaaattcaaggtcagtaatcacctgagatttctaagaagggattattattaattaattactgatgctgtcaagaacttgttaattctcctctatgtttgaataatcaagtacctttgggcaaatgtgctgtaaaaacttgagttatccatactcagtatggagatttcttttgtttatttttccttcttcccataaatatttamtgaataccaactggatagcaagcaatgcgttggacacagggaatgcatcaatgaactagacagatatgaagtctacatccagtagggaagacagacattgaac

SEQ ID NO: 908061 - DNA, 622 bp, Homo sapiens
caggttgaaacttaatctccatcatggtggtatgaagagatgaagtcttttgggaagtgtttaaatcatgagggcatcacatttatgaatgaattaatgcacttataaaagaggcttcaaagaaagtttgctgctttttgctgtttggctcttctgccatgtgaggacatagcattcctccccttcagacgacacagcctcaaggcaccatcttggaagcagagcaaggcctcaccagacaccaaacttgctggctccttgatcttggattttccagcctccagaactgtgaaaataaatttatattatttgttaatgacccagtcttaggtcttatttatagaatcccaaagggactgagacagtatagttataaatcaatgtcaagtttcttccattttcttaatatggaggtttgccatttgaggatgcttcattgcttctctgacctgaataaagtaacatatatgattctcattatactattgatatttaagggaacggcttacatccatttcataagaattgtgtctcatgaattatatttgtattccagaaaccaaactttgtytggagcatcccaatttaagatagccatttggtaagttaattgccatgaatg

SEQ ID NO: 908062 - DNA, 605 bp, Homo sapiens
caaagacagaagtcaaaaggttagaagtgatttatttatttttgctatgcttttttttttttttaagttccagaatacatgtgcagaacctgtagatttgttacataggtatacatgagccatggtggtttgctgcacctatctacccataacctaggttttaagccccacatgcattagctatttgtcctgatgctgtctcttccctcaccccccgaccccatgacaggtcgccatatgtgttgttgccctccctgtgtccatgtgttctcattgctcaactcccacttatgagtgagaacatgcagtgtttggttttctgttcctgtgttaatttgctgaagatgatggtttccagattcatctgtgtccccacaaaggacatgatctcattcctttttgtacctgcatagtattccatggtgtatatggactacattttctttatccagtctatcattgatgggcattgggttggttccatgtctttgctatcgtgaatagtgctgcaatgaacataygtgtgcatgtatctttatagtagaatgacttatattttggtatatacccagtaatgggattgctggatcaagtggtgtttctgg

SEQ ID NO: 908063 - DNA, 640 bp, Homo sapiens
tggtgtttctggttctggatccttgaggaatagccacactgtcttccacaatggttgaactaatttatagtcccaccaacagtgtaaaagcgttcctgtttctccacagmctcaccagtgtctgttgtttcttgacattttaataatcaccattctgactggcatgagatggtatctcattgtggttttggtttgcatttctctaatgatcagtgatgttgagctatttttcatatatttgttggccacataaatgtcttcttttgaaaagtgtctgttcatatcctttgcccactttttgacagagttgtttttttcttgtaatttgtttaagttggttataaattctggatattagacctttgtcagatgggtagactgcaaaaattttctcccattctgtaggttgcctgttagctctgatgatagtttcttttgctgtgcagaagctctttagtttaattagatcccatttgtcaattttagcttttgttgcaattgcttttggtgatttcgtcataaaatctttgcccatgcctatgtcctgaatggtattgcctaggttttcctctagggattttatgatttggggagtgatttattttaaaatagagcatacattcacccattctctggttca

SEQ ID NO: 908064 - DNA, 710 bp, Homo sapiens
tatctcagtaaacactagagttttagaattttgaatacattggttttgctgaacagagtctgtatttttctacatttactatatttcttctaaaatttttttttttattctactggagagtacccactgtgctatggactgaattttgtgtcttcccccaaattcatatgttgaagccctaataatacccaatgtgatggtatatggaggtcagacctctgggatgtaattagatttagacaaggtcatatgttttgccccccccccattgtagttttaatccgctttataagaagagacataaatatcctactctctctctaccatgtgagaatgcaagaaggcatttctctgcaaaccaggaagacagctcgtgccaggaactcactcagcaggcaccttgatcgtggacttcccagactccgaactcagagaaaaaaatgtctgttgcttaagccacccagtctatggtattttgttacagcagcctgagatgactaagacctactgcatagtagctgcaacttagcatggggctttcaatgttctcagagctcacaacatatatccatttagctgaaattaatctttctaaagttgatacattatgatrggaaaaactctggctatattaactctctaggcagagacagatcaccttcagtcagaaaggtcttgcttcccatctgcagagaccgatccaggccgat

SEQ ID NO: 908065 - DNA, 662 bp, Homo sapiens
ttgtattttatatttctgtgaagaatcacattggattttgatagggattgcattgaatctatagatcaccctggataataaggacattttaacaatattaattctatctgtaaacacaggaaatatttctatttattcgtgtcatcttcaatttttttaatcaatgttttacagttttcatcacttccttgcttaaatttactcctaagcattttatttattttgtgatgctattttaagtgggattgttttcttaatttctttttcagatcatttgctgttggtgtatagaaatgctgctgatttttgtaagttgattttgtatcctgcaatttactgaattcatttatcaattctaacagtgtttttttggtggagtcgaggattttctatatataacattatatttagtgcaaacagagacaatttcccttcattctttcctattttgataccttttatttctttcccttgcctaatttttctggctaggatttccagtactgtgttgaacagaaatggtaagagtgggcatccgtgtcttgttcctgatcttagaggaaaagctttcaacttttcaccratgagtatgacattagctgtgggcttgacatatatagcctatattgtgttgcgaaacattccttttacacctgattcgt

SEQ ID NO: 908066 - DNA, 645 bp, Homo sapiens
ataataccagatggtctgttatccttctgtattarctcatagtctgaggagaattgtaacacgtggcagactcagtaaagagttgaattccaaattcttagcagagttctgaaagatggcaataacgttttgacaaggaaaaataatacacaggtcttggcggcagtttctcaggctcaaactggttcctccctctttcttcacccacgtttccaactttttttttcaaattggtgttttggttttgagaaaagtgcacaaacaaaaagcttcttattggtctatacatccttgagagtctaccccactctatctgtatcactctaatgggtgatttttgttccatttaaaatagcgtattcttaccagccctttaccttctctttcctgctttatttttcttctcaccagttacgaccctttgatatactatctattttacctatttaatgttactgtctttataaatggagatgtcaggtccacacagggcttccaggtccatgcagactgtttggaaatatttgcctctgtttccttgaaaggcaaaagcagataagaaatttgagcaaagttaaggaaaacaagaagagacgctaagcctttggtggtttggagttgtttgggaagtccaaaaatatttga

SEQ ID NO: 908067 - DNA, 572 bp, Homo sapiens
cattatttgcactataagtatttgacgccaaatatttcctaaaataacttagagcagctcattcggaattaatgagacatattaatttgtctcattaataattaataatgagacatattcctgatggcctactagagagcaagtggtgtgacagacactggggatatagcactgaacaacatgggtgtggtcactggcttcatggggcctccagtctaattaacaggttatcacagtctacctgaagactttcaaagcactgctatttaaaatgccccaaagggcatgaatcttctttcccatgcccactgcaaacctacctcttccccagtgttccagatggttctatagatggcatcatcatctgaattacttaagtcaggaagctaaagtaacctctagttttccatcctccttacttcccacagttaatcattgagccttatcagttttaattcctaaatatcctttcgtttctgatacttccttcaatcatcactgcctcygctcttatacatcaccatcttctgttcagaacacttctgtggcctgcaaacttggcttcccgtatt

SEQ ID NO: 908068 - DNA, 614 bp, Homo sapiens
tccatacctggcattccagctctgttctctgtgaggcctgagtatggtaccttatttcccaactcagaaatccaggcaagtgctggtggtatcataaggcagagaaactctgttgtgtttggggaatttatatacttaatgtatttaagctgctttaccaagaagcctagttgccaactgatcatgtatcaagaaggaaataaatcactctaccttttctccagctagaaaagtgcagcagttgtgtttgtacgaatttgacccccatccgttggatgagggcgtaaagtgtattttatgttgctaagtcatggagttccatgtgattgggccattaaattctttatgattagtcattaagcccatgaaggacaagaaactgaacaagagttttgaagaagaaagcctaaggaagatgcatcaggaaagcagaaagggagtgaggatacattatggacaccattctttaaaggcgaccattgatgatctgcatcatataaacccrcagtgtctgaggaccttgacaagggccattcaagggcccagagctgtgttcaatagaaccgacttagtaccttggccagctgctaattccttaggaaaagctgcttttg

SEQ ID NO: 908069 - DNA, 662 bp, Homo sapiens
aaaacatcaaaactctccttataatcacgtttcttgcaatttgctattttagttatcatttgtagcttgaacagcatatttargtagaaaatgtcttataattttttggcttcttgttgttcaatttcattaaactcaaactgtattttctctatgctcttttgatatgcagtacaatatcctcactgaatcaggtatgtgacatcattttatccaaatataactattattattgaattatcctctaattctaatggttaacctttccctaaatctatttatacaaaatttgtaattatgcaaagagagaaaaatgtggaggaatatgaagaagtggtttgcatcttaaatgtttgaatgtcagaattgactattcaataaaagcaatttctaattaaaaaaactaaatagattgtttttcagtttcttctatttcagtttaaactttttttctggtaattttagaattccagattaagaacacactgagcattgacataaagcatttacttttatatatatatatatatatatatatatatatatatatatataggaaaaaaacttgctgtcaaaatatgcattcagttcttttcagtcattctaaatcatttctacagatcaactcatttttattttttattttttccttgaagttttga

SEQ ID NO: 908070 - DNA, 587 bp, Homo sapiens
tgtaaaacacgtttagcaattcaaggcagtgatacacaatatatcaaatgtaacatcattcagacataaccactaatatcttcaatgaaatatrtatttaagttttcctctctgagcaagttttcttagcatttcctaaaacctcaaatttttttatttaattttaatgtattttatctaccatgtggacaaaattatggcaaatgtgctatgttctattatcctatgattagcctagtagaaagtattactgaagaatatggacattatgcatggacacttctttttgtttttaaattgccaactgccaaaccagcatttgccatattccttccaatcacataagattaatcaagagagtttaattaaacaagtccaactcaccaaaattaatgatgttcactgaatgaccagattttcattccaattggaagtactttcatacttttacagacagtgtgactatccactttgcaattgcagtgcgacctgtgaaacttgcataaagacctcccctgaattattgttacctacatagttacagtaacttggaaggtgatgtcatgcattcacacaaaacatagaag

SEQ ID NO: 908071 - DNA, 435 bp, Homo sapiens
gcctccaattagaaaactatagcccataagaaatatcattgaaagatcaatgataaatcaaackcctgtcagttgctacctctttctgaggggagaaggcaaagtctgctatagcagagccaaaccagtaattttataaagagatcagtcattttcagaaatctttaacccttattctttattgagttcatcacttcacaaacctcagtttgcacacacaaaatgagggtgcacatccttatcattttgagttcatttccctttctgtagatcattcacaggagcacttttttatatacagagagaattctatgatgtaaatttaagtttcttgtgactctaaaatggatcttctgggctttaaagcatagcattttgaagtagtcactaacattatcatatgaattgccttgtaaacacatacacataaatatg

SEQ ID NO: 908072 - DNA, 605 bp, Homo sapiens
accatctgtctgcaataaacgggcctcctgagtgtggtgtcttgggctctaatccttgagtaatgactataggtggaaattgtctctgaggcaattcctagtgagaactaggagttctaggaaggatctatttgttaaaaatcagccaacagcaattttccctttaactgtcttctctgagtctttgctccttaaatattcatgaaacttgcagtgatttcagattaaagatctctccaagataagtagttcccagaatcttatatccatggtggtatctggattcgtttctaagtttcccctattatagttcgaaatccctttgcaaagcttgtattgctttcatttactgaaaatgaacaatgctgaggcaggacccaaaggacattaaaaccccattatagttcacttcctgaaaccacacattcggtcatcctgcaggtaaaatcacttccccgtgcgtacaggggagtgtagtgtttcctcctcagtgcagctgcaatgtctctaaactggtgtctttactaagagtttgttgaatgaataaataaattcagwttatttcatgtcccaagtcttcttgtgattgaatttgattcttagaa

SEQ ID NO: 908073 - DNA, 644 bp, Homo sapiens; identical to SEQ ID NO: 905253

SEQ ID NO: 908074 - DNA, 610 bp, Homo sapiens
ctaatctgagattcctgatgaaactttcagcaaaacaaactcaaaaaggcatgtgtgatcaggtaccatttttgctgcacatatgtaattaatcaggccaaatctaatgagactaggcatattttgtcaacaagaatcaaaatggaagtaactgtagagataaattttatgtattgataaaaacctatagtgtacccttgtgggttctcaattcttctggtttcctctgatgtggctacaattctgaaaactaaagtttccaatttttctcccagcctcctgacttggagttactaagaaataaaactgctcttttctgaagctgggtgatttaatataaactttgaagaaatcactgcaatagatcatgtacgggcaaaccttgtgcctgcttctgtgtgagccactcagaaagttcatcagaactcctgatgccatcaccaaagacattcaaaacacagacaaggacatctgtgggactgccactttcgtccttgagaaaaacatttagaaattttctcaattggctggtccctggactcaaacgaagtttccaactacttatccttgttttactttaattttcayagaaattcctttcattgtattc

SEQ ID NO: 908075 - DNA, 592 bp, Homo sapiens
acaaacctgacaaaaacaagcagtgggaaaaggaatccctatttaacaaatggtgctgggaaaagtggctagccatctgcagaaaattgaaactggactccttccttataccttatacaaaaatgaactcaagrtggatcaaagacttaaatgtaaaacccaaaactataaaaaccctagaaaaaaatctaggcaataccactcaggacatagacatggggaaagattttatgatgaaatcaccaaaagcaattgcaacaaaagcaaaaattgacaaatggaatctaagtaaactaaagagcttctgcaaagcaaaagaaactatcaacagaacgaacagataatctacagaatgagagaatatttttgtaatttgtccatcagacaaaggtctaatatccagaatctacaaggagcttaagcaaatttacaagaaaaaaataaacaacctcattaaaaagtgggcaaaggacatgaacagacacttttcaaaggaagacataaatgtggccaacaaacacatgaaaaaaattttaacatcactggtcattagagaaatgctaatcaaaaccacagtaagataccatttcac

SEQ ID NO: 908076 - DNA, 680 bp, Homo sapiens
atatagaacattttctcctgaacttgggacaacaccccaagactgccctgaacctgaygggatccaagctgaaagctttgtattcttttggttttcttcatgctgccattttacttatcttatcagagctgtgtacctaagagtttatctttctaatatcgattcttctcatgtttacactggacggggcatgtgtgttcaataagttgtgtagtttttagttttaccaaacagaataaagcctcttcactttatcccagacatcatggaatagttatcttctaagatgtggtcacctttgatgggtcagtttgtggtcaatcatccatcaatagtaatgatgataacatcaaaatgggccccccttttttaatcttaaaacatttttcttagaccttgaaatgactctaatgtaaatagaaaacagtttttgttactctgcagtactgatcgattatgatcccatgccagctggttgtttaactggctttactgggaagtcatcagttatgggtttgtatcaacaggactattaatccttttgatggcagcaggcttctaattatagctctgctcagttgaagagatgtgatccaatagccacaaatatatgtattccatgttgaaatgaattggagcataccggaaagtagtataaaaaccctaacaactctttagca

SEQ ID NO: 908077 - DNA, 637 bp, Homo sapiens
tagactgggtgatttacaaacaacagaaatttatttctcacagttctggaggcagggaagtccaagatgaaagtgccagtggattcgatgtctgctgcaggcccactctctgcttcatagatggcatcttcttgctgcatccttacttgtggaatggggcaaacaagctacctctttcttcattaatcctactcatgaaggtggagccctcatgacctaatcacctcccagagggctcatcttttactgccatcatattgaggattaggttgcaacatataaattttatgcgggacacaaacattcagaccttagcaatggataggcaaaatcaggaagaaaaactgaagccaatgtcagaaactagacaggaattagatccaagtgggaacaggctggaagcaagcaacaaggcttgaaggagactgtagcaaataacactgggtatgctggagttgtttaacagtccagggttgagatggaaaaccaactgactggtgcagtttttaaaagaaagggagtttgttttaaatattcaaattattctagtataggactaacattargttattaggattgttgtttacctcttggatttaatctatgtagaacctgaccaagaattcaaacaaagccc

SEQ ID NO: 908078 - DNA, 702 bp, Homo sapiens
ctccgagatgccctcctgaactacctctcccctccagtagccccttctcatactcattttatttttgtcatagcaccaacactatctgaggtcagggaccttgtctctcattcaatcctttatccccagagcctgaaacagtgtgtggcttggagtaggtgcatgaccaatatttactggaggaagaaacgaagacaggaaggaggaaggaagggagaaagtgaggaaggaaggaggaaggaagggagaaagggaaaagcggggaccagacagattctccccttttctggcgccctcaggaacccgagtctaccgaccttgtgggctggccactaaaacaaaggccccaggcagtacttcccaagcagccagcggaaggcagtttccctctcccccaggccctgtgcccacccacagttgggaactgctgcagtgacgtggggcctcttgccaccagctagctaacagttccatgacaattgcttgtcactgcgctagtcctctccagggtctgtagcagggacagtttacttgggacgggactcttagaattcccagctcatcatgggacagctgctttttgagygtttgtcccttaaacccgtagcaacgcagttaacccccgatgatctggctgcaattctggatgacctgacgataattctcacaaccgaatttctgcaaataaaacttccagaaagt

SEQ ID NO: 908079 - DNA, 570 bp, Homo sapiens
tttctgccaagagatcagctgttagtctaatgggcttccctttgtgggtaaccgacctttgtctctggctgcccttaacattttttccttcatttcractttggtgaatctgacaattatgtatcttggagttgctcttctcaaggagtatctttgtggctttctctgtatttcctgaatttcaatgttggcctgccttgctaagttggggaagttctcctagataatacccttgaagagtgttttgcaacttggtttcattctccccgtcactttcagttacgccaatcagacgtagatttggtcttttcacatagttccatatttcttggaggctttgttcgtttctttttactcttttttctccaaatttctcttctcgcttcatttcattcatttgatcttcaatcactaataccctttcttccacttgattgaattggctactgaagcttgtgcatgtgtcacgtagttcttgtgccatggttttcagctccatcaggtcatttaaggtcttctctatgccgtttattctagttagccattcatctaatcttttttcaaggtttt

SEQ ID NO: 908080 - DNA, 600 bp, Homo sapiens
aaattaggttgctcatgccaggacctagaagctcacagcaygcacaatggaaatgttcgcatttgctaatgtaaacaattgccagccccaccttatggtaagtattatgtcatcattctccctccatccaaattctccttccagctgttctgatagtcactcagactacagcctttctcagcaaattaatactgccttactacatctaattagttattgataactgattttcttcaattttgatggggtactcccctgcgactctgttaatgtatttcaaattatactgagatttcttgtgagataagaacctcccattagcttgccgttcccaaagtcttccatttctagtactcagtgcccatgaactctcaaatgtctttttagttctagtatccaaattcctgatgagatattttccatttttttctgttttgttttaacctaatactcgaatttgtcataattaacttttctaatataaaacacctttataaagggatttctctgggtcctcaacagaaaactactagcgtgaggaaagaactttggagtaagattgagattagtccaaattcttgtttcaaaacctaccagatg

SEQ ID NO: 908081 - DNA, 620 bp, Homo sapiens
gtgggatcaacctgtgggatctgatgcgacctccaggtaaacagtgttggaattgaatcggaggacacccacatatgttcactgcgtggtgatggggcaacccccacacatttggtcacagaagtcttgtgtgttgattttgatggtgtgagaaacagaggaaaaacatgttgtgagagttttttcctgaaacaggtgaaattttccatttgtgacacttctccaagctatacactaataatttgagcactttttggtagctatgttattcttcaggagaaggtttattaaaaacaaaaagaaggctgggtgcagtggctcatgcctgtaatcccagcaatttgagatgccgaggcgggcggatcacctgaggtcaggagttcgagaccagcctgaccaacatggagaaactccatctctactaaaaaacacaaaaaattacccaggcatggtggcgggcacctgtagtcccagctacttgggaggctgaggcaggagaatggcgtgaacccgggagtcggagcttgcagtaagccragattgtgtcactgcactcaagcctgggcaacagagtgagactccgtcaaaaaaaaaaaaaaaaaaaagcaaatagctatggc

SEQ ID NO: 908082 - DNA, 620 bp, Homo sapiens
aagtgagatcgcaaactatttgtctttacatgcctaggttatttcactcaacataatgtccttcaggttcatccatgttgttgcaaatgacagaattttttcttttttaaggctgaataatattcctttgtgtatatataccatattttctttatccattcatctgttcatagatacttggatcaacttttaaagaaatgcatatttcctttcagtttattttgaatatacagtacacggtttggatttttcaactcttttaaagaggagcaagaacagtcagcttgtttgtagtaaatcttgtacagatgtgagaaggtcctgattgctctatgccaagaatttgtttgactacaggtctgtggattagaacgggaaaatggggatagggacaggagtccaaattaagtgtcagaaaataatcagtttaatggcatgctcaggcagttgacaaaggcatagcataaacacaggcaaggtccaaagtacyagtcaggaaccagaactgaagtcaaataatattggcaaggtagcattctaaaacatctaaaaggctgttgtcaagccaacagagtttcctgattcctcacctcctttgaggaggaaaaacagtggcttgg

SEQ ID NO: 908083 - DNA, 646 bp, Homo sapiens
gagtggacattcttgtagttttgtccaggtattatyctttggaaatagaaatggttcgtaatgtttttatagttcatcctagaccatggctcagccttgccacccaacttccctgtccagggagatcagaagcaataggtggctatcaaggcatcatttgaatagggtggatatcaaatacagcatccccatctgtacaggactcagcctttgatagttcttgatctacccgccagcaaccattccttcctcccacttgcctttacctccacaggatcagtaagagcaagaaaagttcttctccttcttgatttatttcctcctacttaaacccaggcagagaaactggggcctaacttttatgaccttggtgttagtaaaacaaagcttactaataatattaaggaatagaagtaattttatgtccagggcctgttgaccagtataatgttttctctgatgcagttgactctctgaacctgaacatattctatataacttttacagctccctttcccaagggagataatcataacaatagtctctaggaaattcccttacatgggctgatatgtgctgtccttttttcctcatgtcccaagatcagataatccaaatgcaactttcataaatgtcctacacagtc

SEQ ID NO: 908084 - DNA, 624 bp, Homo sapiens
gcccaagccactgtttttcctcctcaaaggaggtgaggaatcaggaaactctgttggcttgacaacagccttataaatgttttagaatgctaccttgccaatattatttgacttcagttctggttcctgactrgtactttggaccttgcctgtgtttatgctatgcctttgtcaactgcctgagcatgccattaaactgatattttctgacacttaatttggactcctgtcctatccccattttcccgttctaatccacagacctgtagtcaaccaaattcttggcatagagcaatcaggaccttctcacatctgtacaagatttactacaaacaagctgactgttcttgctcctctttaaaagagttgaaaaatccaaaccgtgtactgtatattcaaaataaactgaaaggaaatatgcatttctttaaaagttgatccaagtatctatgaacagatgaatggataaagaaaatatggtatatatacacaaaggaatattattcagccttaaaaaagaaaaaattctgtcatttgcaacaacatggatgaacctgaaggacattatgttgagtgaaataacctaggcatgtaaagacaaatagtttgcgatctcacttatta

SEQ ID NO: 908085 - DNA, 612 bp, Homo sapiens
acctgtgggatctgatgcgacctccaggtaaacagtgttggaattgaatcggaggacacccacctcctgttcactgcgtggtgatggggcaacccccacacatttggtcacagaagtcttgtgtgttgattttgatggtgtgagaaacagaggaaaaacatgttgtgagagttttttcctgaaacaggtgaaattttccatttgtgacacttctccaagctatacactaataatttgagcactttttggtagctatgttattcttcaggagaaggtttattaaaaacaaaaagaaggctgggtgcagtggctcatgcctgtaatcccagcaatttgagatgccgaggcgggcggatcacctgaggtcaggagttcgagaccagcctgaccaacatggagaaactccatctctactaaaaaacacaaaaaattacccaggcatggtggcgggcacctgtagtcccagctacttgggaggctgaggcaggagaatggcgtgaacccgggagtcggagcttgcagtaagccragattgtgtcactgcactcaagcctgggcaacagagtgagactccgtcaaaaaaaaaaaaaaaaaaaagcaaatagctatggc

SEQ ID NO: 908086 - DNA, 602 bp, Homo sapiens
acaaattaggttgctcatgccaggacctagaagctcacagcaygcacaatggaaatgttcgcatttgctaatgtaaacaattgccagccccaccttatggtaagtattatgtcatcattctccctccatccaaattctccttccagctgttctgatagtcactcagactacagcctttctcagcaaattaatactgccttactacatctaattagttattgataactgattttcttcaattttgatggggtactcccctgcgactctgttaatgtatttcaaattatactgagatttcttgtgagataagaacctcccattagcttgccgttcccaaagtcttccatttctagtactcagtgcccatgaactctcaaatgtctttttagttctagtatccaaattcctgatgagatattttccatttttttctgttttgttttaacctaatactcgaatttgtcataattaacttttctaatataaaacacctttataaagggatttctctgggtcctcaacagaaaactactagcgtgaggaaagaactttggagtaagattgagattagtccaaattcttgtttcaaaacctaccagatg

SEQ ID NO: 908087 - DNA, 601 bp, Homo sapiens
aaacatataccatggtggtttgctgcacctatcaacccatccctaggtattaagcccagcatacattagctctttttcctgatgctttccctccccctgcttcccccagcagcagaccccagtgtgtattsttcccctccctgtgtccatgtgttctcattgttcagctcccgcttataagcgagaacatgcagagtttggttttctgttactgcattagtttgcagtaacagaggataatggcttccagctccatccatgtccctgcaaaggacatgatctcattcctttttatggctgcatagtattctgtggtgtatatgaaccatattttctttacccagtctataattgatgggaatttgggttgattccatgtctttgctatggcgaatagtgctgcaatgaacatatgtgtgcatgtatctttaaaatagaatgatttatactcctttgggtatatacccagtaatgtaactgttgggtcaaatggtatttctggttctaggtctttgaagaatcaccacacacagtcttccacaattgttgaactaatttacattccaaccaacagtataaaagcattcctatttctccacag

SEQ ID NO: 908088 - DNA, 658 bp, Homo sapiens
tgtaaaatcagcaagataaaaccttagaaaaggaagattgtttactagtccttaacaaattaagaaatgatataacaaaatgtaacatctrctgtaaacaattttttccctatttcttaaatggtattttaataataatttttgggtattaaaacatcaagaacatttcaagaagatttacaagctacgcagtagaaagtaagtgctgcttgtgaccagccagaaaatgtgtgtcataatgatatcccagaaaagtcttggaatcagggcatgatgtttctgagccaaaagtctacctgtgatatctaaggatgaaacaaaataaatatgcatacttaacataatctaaatatcattgtattttattcatctatttgcatgttggttaccttcactagtctatgagctctttgggaacaataaatgtctttttaattaatgaaaacagtgttaccctgacatgacaaaaattttaaattgtatcctgaatttgagacgtagttgaatattagtatcaagacaaaggtgcatttatctcagaaatataaaactaatttatcattaaaaaaatcaagcaacatgattcatatattaatatattttaaaagaagaatataactatctcaagagatataaaaaagtgataaattcaacttga

SEQ ID NO: 908089 - DNA, 638 bp, Homo sapiens
agatagagttgtaaccacagatctgtaaaaaaaaaaaaagtaagttattgagttaaatctgatcagctactttcctgcttatgtgtatacagagctactaacaatttcatttgtaatttactagcagaagtcatatgtgtgtgtgtgtgtgtgtgtgtgtgtgtgtgtgtgtgtgatatctgtgtaggtatatgtgtatatatatcctcaatttaaaatttttcatgtccatctatatgaaaattttttaattgaggaaattatatccagtggcctattttcttcccgatgaattataaacgaacaccattttctactcatacaagcggaatgtcaatctacctcatgggcctatcaaagagcgaatttgaaaaaccactggtttagccagtgatatggttactaggtgatgctaggccccattgccactgttaaaagcttatccataagcgagatgagaaggcccttgcttggcatgtaaaagcaggagtagcaggggatggcaggtagctgcaggttgatgacacatgatgtgtctacatatctatatagaaccatgaagtccatgaacatacccacttttcataacaaayccaaagctattttatcatcaatcccagtcaacaatagtaagatcc

SEQ ID NO: 908090 - DNA, 600 bp, Homo sapiens
agtcaaagagattattttggagatttaaggactgcgatgacggccccactgggttttggatttgcatggggcctgtagcccctttgttttggccaatttctactatttagtatgggagcatttatccaatgcctgtacccctattgtatcttggaagtaattaattgcttttgattgtacaggctcatacatggaaaggacatgccttgtctcagatgaaactttggatttggacttttgagttaatgctggaatgagttaaggctttgagggactgtcaggaaggcatgattgtgttttgaaatgtgagaaagacatgagatttgggagggcccaggggcggaataatatggtttgtttctttgttcacacctacatctcatcttgaattgtaatcaatccccatctgtcaagggaaggacctagtggcaggtgattggaacaggtgagtggtttcccccacgctgttattgtgataatgaatgagttgtcacaagagctgatggttttaaagtgtggcacttcctcattcttacamgatttctttcttgcctgccgcaatgtaagacatgcctccttccccttccaccatgattatac

SEQ ID NO: 908091 - DNA, 618 bp, Homo sapiens
ttgactttgggaagtgctttaaagtttcttctgggtccaaccactgagttggttttcaccagttgtcacataaaagccacttttcatcacacatcacacatcacaatcagatcragaaatggttcattgttgcatagagtaatagaagatgacacttcaaaatgataatttttttttttcatttttagtctgctcatgaagcacccacttattgagctttttcacccttccaatttgcttcaaatgtggaatgaccatagaatggtcgaagttgagttcttgggcaacttcttatatagttgtaaaataataaacttttatgattgctctcaattggctgttgtcaacttccaatggctggccactacactccttatcttcaaggctctcatctcctttgcaaaactacttgaaccaccactgcaccgtacattcgttagcagttccttggcaaataatgctgttgatgttgcgagttgaccctgctgttttacaacccattttgaactcaaataagaaaatcgcttgaatttgcttttggtctgacaccattttcatagtctaaaataaatacaaaataaacagcaaataataagtcattagcaacaaaaagtgaga

SEQ ID NO: 908092 - DNA, 601 bp, Homo sapiens
ccacatctaaaagttgaaattatgaaaaaaattaaaacaataaaaagtctctgcactaatcgtgctcaaagataaaaaatgtttttagtttgtaagaatttaattactttgttgtgcttatgatatatattagcatagttaatgttaaatagccgggcttttatgatagctacaagggtattaaaatgtgttgatattcagtgcaaattctcattaaatttcttaatatttgtgcaaatccgtaatatgatttgtacaaatacatgaaatatcagcttgtctaagttactttgacaatcaaatttctggaaggaacattgtaaaacttctgtacttaaaacattcaatataaatgttcttcagatttttgtacattgatagaaacatagtagcagataggtgaaaaattgaatctgaaaatatattctggaagtaataaaaagtgaaaggcttacaatagtgtgaacacttataccacacagtacattttgagctttggtattctgtccttaaaaataaatttttttatgaaaaacaaggatcttctctgttgtcagaaatggmataccattaaattcttcaagttaaaagagttacattg

SEQ ID NO: 908093 - DNA, 548 bp, Homo sapiens
aagtgctgttttcatgcttataattwtctatttccccattaaaaaattggctcttatatgtcattactggctggatattaagtgtcttcttgaggcgattttgagactttctttttctgcatgctcatgcacgcatacacacacacatgcacaaacacacagttagatgcatggttgcatgcataataaaacttgaaaacttaactgcagcacactgcataaattaaataaggcaaacatatccttggcaagacttgaagtaaatgctagagttttcccagcaataagtagttccataataacagaagtgaaaagaaaataaactaaaacttctaagtccatcttagttacatggaaagtccactaaagttttcttaagaagctgataccaaactcctaaaaatcaactctggattccaaaggtcgactttccatcccaagtcattacttactggtgcaggatttctattatccatgttgagccatggcttatagataaataaggaatttagaatacagcatttgaattcattaagctgcttccagta

SEQ ID NO: 908094 - DNA, 585 bp, Homo sapiens
ctgtaactggtcatgtggtcatagctggtacttataaactaccttcttccactacccattccatattccctttgctttaggcaaacacctcagctggtcattgttttttacctggtaggctgacccaaacctttattcctaaagggtctgagctattagtagtcctgtctcagttaggttgttgtagttttccattgttcttaattacaatgaaatggtaatattaagagatgccccaagagatctcctgtattctagatttactcttccctacctccattatggactagtaatccaatttccccttgttttccaggatcaatcatctcagccaacacagtaactcatttctttgcctgctgattcaaaggcatgatgaggaacccaaagtggccaggtggaagtttgaacatccagttcaatagaattatggttgtgtctcctgggggaagcatttctccctttagaactaagatctctttgccagaagaatataaggatgcaggaacagggagcaagtatctgctagtgggtcaccaggagtcatrgtgaatggtcccactctcatttctaccccttgactac

SEQ ID NO: 908095 - DNA, 607 bp, Homo sapiens
tgctggattttgaatgttcatggggcctgtagccccttccttttggccaatttgtcccatttgaaatgggtgtatytacccaatgcctgtacctccattctatcttgcttttgattttacaggctcatgggcaaaagagacttgccttgcctcagttgagactttggattttggggttaatgttggaatgaattaagactttgggggactgttgggaaggcatgattagatttgaaatgtgaaagggacatgagatttgggagaggtctggggcagaataatatggttaggctttgtgtccccacctaaatctcatcttgaattgtaatccccataatccccatgtgtcaagccagagactagatagaggtaattaaatcatggaggcagttttgcctgtggtgttcctatgatagtgagttagctctcatgagatctgatggttttataagtggctattccccctttgctcagcacttttcctttctgctgccttgtgaagaaggtcttgcttccccttaggcttccatcattattgtaagtttccttaggtctccccagccatgctgaactgtgagtgaattaaacctctttacttcataaattt

SEQ ID NO: 908096 - DNA, 570 bp, Homo sapiens
gaaaatctacctattgggtattatgctcactacctgggtgacaggatcatttatacaccaaacytcagggacaatttacccatgtaacaaacctgcatatgtaccctctgaacctaaaataaagttaaataatatccatgtgtgctcacagttgggagtcagagtgcctatcccatagtgcttctgtccacatcaacatttaggttaatatctccctaccttttccctttgttaaattacaggtgaaaaatattaactatttatttttattttttttttttttatttatttattttttgagacggagtctcactctgttgccaggctggagtacagtgtggtgcgatcttggctcactgcaaccttcatctcccaggttcaaggattctcctgcctcagcctcctgagtagctgggactacaggcacacgccaccatgcccagctaatttttgcatttttagtagagatggggtttcaccatgttggccaggatggtctcaatctattgaccttgtgatctgcctgcctcggcctcccaaagtgctgggattacaggcatgagccactgt

SEQ ID NO: 908097 - DNA, 570 bp, Homo sapiens
gaaaatctacctattgggtattatgctcactacctgggtgacaggatcatttatacaccaaacctcagggacaatttacccatgtaacaaacctgcatatgtaccctcygaacctaaaataaagttaaataatatccatgtgtgctcacagttgggagtcagagtgcctatcccatagtgcttctgtccacatcaacatttaggttaatatctccctaccttttccctttgttaaattacaggtgaaaaatattaactatttatttttattttttttttttttatttatttattttttgagacggagtctcactctgttgccaggctggagtacagtgtggtgcgatcttggctcactgcaaccttcatctcccaggttcaaggattctcctgcctcagcctcctgagtagctgggactacaggcacacgccaccatgcccagctaatttttgcatttttagtagagatggggtttcaccatgttggccaggatggtctcaatctattgaccttgtgatctgcctgcctcggcctcccaaagtgctgggattacaggcatgagccactgt

SEQ ID NO: 908098 - DNA, 583 bp, Homo sapiens
gcctgtagaaggaaacttaataagccctgcctctccttctgttaccttgcagtaagtttcccgagattcaggtcttgtggggacactgagagagggtagttcmaggcattccagtagctctcacagcaactgtactggcacctggcagcattctaacacctcagaaagggttgaacagtttgcatctgtgtctctatcaaaaggcattaaatatgcatctgatcaagatagtagtcaggactatgaagtgcctatggggggaatttgcttgaaattatgactatatgtacatgctttctttctgaaatggctttggggctgaaattctcacaagagaattggttaaagaacgggagatggttcaacaaagattgactgttaacagtttgggtggaaagtaaggggggcagcaagaccaaaattcagggctcattactaaagatggggcccagccctgcccatggaatttttaccacttgttggtggccatagaatcatggtagtcaagtaatcataagtcttggtttgctcagaatagtcccattttatttgtactgctccagtgtaattgttattagcacct

SEQ ID NO: 908099 - DNA, 657 bp, Homo sapiens
gctgataactgtgcagccaggattaaaagtaactccaaaatccatgcactgtccactctcccagttttgggaaaactgaggcctctgttgctgataaattcaactacagatgagactatcctggccaaaaggaagaatctacttttgccaaataatgcatggaattattttaattaaactacatttcattttaaaagaattattttaatggttatacagaatgcctaacacatagtaggtagtaaaaaaatattgaattagattaaatgatttctgacttgttaagagggaaaataataatagatgtagaaataaataatccaggcttgtgtgtggtattttccacatttttcagtttgttttgttgcttggcaaaaataaaagtccaaattctttctgggatgtttcataactgatagatgaagttggcctaatttttgatccatagagagcgattcgaaataccaatagcctcagggttacatttcccaacttttgttgtggaaatatttagtcagctaataatctctctcctgctgatgactttggcacgaactgcaccccttgtttttaaagaaacacaaaaacaatcctcaagaaggattcatacctgyctgaagctctggaagagctagaatgacgatgatgtggaataac

SEQ ID NO: 908100 - DNA, 649 bp, Homo sapiens
acatgatttttaaaaaatcttgtactgtagtttcaagctttatattttgccctagactgatttattatacataatttcacatcatatatttacatacaataaacttcacccatttctagtrtataattcaataatgcttagtaactttacccagtgttacatccatcaccataaatcagtgataaaccactttcatgcccccagtaaatccctcatgcccacttacaattaatctcctttcccaccccagccccagacaaccactaaactattttctctataaaattgcattttcttgattaacctctgtatttttaatattcattaattaataaaaaactcagtcgtaagagaatgtagtcagacttgtgcctgtttacggggtcaagctattttcttccttttgttttgtttcacaaaagaaaatatggctggtccatctttcacaaaattaacttaaatatgacatttgactgtaataacagtgagcatctttatgtgggcagattaagattctgtaatttcatgctcagctgcgttgatggctttcagccttgtttaagcagaccagctacggacagcagtaaaccctataatgtcctgccatggctaattgcttaaatcgtctacctctgtaacttttatggct

SEQ ID NO: 908101 - DNA, 373 bp, Homo sapiens
gaatgtagaattttattttaattaaragattaaaatctgcctctcagagaagagaaaataaaccttccctatcaaccctttaatttggttctgtagaccttcagctcatatgaggtttaaaggatctcttgaagagggcttttaaagtcagtaggtgtgtgtgttccaaattgaatactaaaacttaagatcactctatgccagaggaaatgaataccttagagggtaaagaggaattttatggcttgcttttaaaaggagagggtacactgggccactactaagcggccaaagcctttgtccaaattttacgaaggctccccttcttctggcacgcactgtgtcagggtctgtggcatggtgaacagcattc

SEQ ID NO: 908102 - DNA, 496 bp, Homo sapiens
  misc_feature 114: n = A,T,C or G
gttgatacgtttttggtttcctcattataagttttattggactttttttaytttttattttttttatttgagacaaggtcttactctgtcaccagcttgggaatgggcaagggngcaatcatgggctcactgcagcctcaacctcccggggctcaagcagtccttccacctcggcctcctgagtagctgggaccacaggtgcacaccatcacacccggttaatttttgtatttttagtagagatggggttttgccatgttgcccaggctggtcttgaactcctgaccgcaagtgataaattttttttatgtgatgtttagctaatgagacatttgtagtaaccttctagcttatggtggctctttttctattgagtcacttgtatatgcggagatggcattgtctgtgtaccatttgttgaaatgagggaaaggaaggaagtgagataacatttattgggagcctgttgtcttcaaggaactttatgtatgttttc

SEQ ID NO: 908103 - DNA, 644 bp, Homo sapiens
tactgatttatttctgcttatttcctattgcctccaaatgagaatattcagtatcacaaaaataggcagtgttgccttattaaactctgtattaccagcacttagaatagtacatgacatgtagtgggtgcttaataaatatctgttaatgtttttataaaaatgaacctcaacatatctggtggaatgaatttggctgaatgtaaccgaaaactacaatgcaaaccagctaaggcaaaaagaaaatatatctcacaaaaacctgaagtctagagttacagcaggctctaggcatttttgattggcgccttaatagtgtcatcaaggacccaaattctttccatctttttattgtgtcaacttcagcataggttttattttatggaaggtaacaaactcaatgatggctgtaggatttgcatgtctcacctccagacatgataatatccagagaataatggctctctctttctgtgtttcttttctagggataatgaatgtatttgatagaagtctccagaatactgtcttctaacattttcttaactaagtgagacttatgtaaatttcagaggcaatcatttgygaaaaacagaattacctggcctggcctagactaattacctggagtagaatcaatattg

SEQ ID NO: 908104 - DNA, 621 bp, Homo sapiens
tattcatctcacagagttgaacctttcttttgattgaacagatttaaaacactcttattgtagaatctgccattggatacttggtgtgctttgaggcctatwttgcaaaattaaatatcttcacataaaaactacacaatagaattctgagcaacttctttgtgatgtgtgcattgaactcacagaattcaacctattttttgattgagcactttcgaacctctcttattggatactctgcaagtgtatatttgtaaccctttgcagcctacggtggaaaaaggaaatattatcacataaaaactacacagaaacattctgagaaacttatttgggatgtgtgcattcctctcacagagttgaaccaatcttttgattgagcagttttgaaacaatctttttgtataatctgcaagtggatacttggaacgctttgaggcctattgtggaaaaggaaatatcttcacatagaaactacacaggagaattctgtgaaacttctttatgatgtgtgcattcaactcacagagttgaaactttcttttgattgaccagtttggaaacattattttttcagaaactgcaagtggatatgtggagccttttgcggcctaaggtgga

SEQ ID NO: 908105 - DNA, 629 bp, Homo sapiens
ttccttttccactataggcctcaaagcactccaaatatccacttgcaggttctgcaaaaagagagatgcaaarctgctcaatcaaaagatgggttcgactctgtgagttgaatgcacacatcacaaagaagtttcccagaattcttctgtgtagtttttatttgaagatatttccttttccacaataggccacaaaggtctccaaatattcactagcagattctacaaaagagagattccaaatggctcaatcaaaagataggctcaactctgtgtgttgaatgcacacataataaaggagtttctcagaataattctgtgtagtttttatattaagatatatcttttcccaaaatagacctcaaagccctccaaatagctactttgagtttctacaaaaagagtgtaccaaaactgctcagtcaaaagaaactttaaactctttgtgatcaatgcactcatcaccaaggtgtttctctgaatgcttctgtgtagtttttatttgaagatatttccttttccacaataggccacaaaggtctccaaatattcactagcagattctacaaaagagagattccaaatgactcaatcaaaagataggctcaactctgtgtgttgaatgcaca

SEQ ID NO: 908106 - DNA, 565 bp, Homo sapiens
gataggctcaactctgtgaggtgaatgcacacatcacaaagaaatttctcagaatatttctgtgtagtttttatgtgaagatatttcctttcccacataggctccaaatcgatcaaaataactacttgcagattctacaaaaagagtgtttccaaactgctaaatccaaagaaaggttcaaatcggtgagttgaatgtacacctcacaaggaagtttctcagaatgcctctgtgtagttttcatgggaagatatttccttttccacaataggcctcaagccctccatatatccatttgcagattccacaaaaagagtgtttccaaacttctcaattgaaagagaggttcaactccatgagatgaatgcatacatcacaaaaaagtttctcagaatgcttctgtgaagtttttataagaagatatttagttttccacmatagcctgcaaaggtttccaaatatgcacttgctgattctacaaaaagagattttcaaaactgctctatcaaaagataggttcagctctatgagttgaatgcacacatcacaaagtagttactccgaa

SEQ ID NO: 908107 - DNA, 590 bp, Homo sapiens; identical to SEQ ID NO: 905217

SEQ ID NO: 908108 - DNA, 620 bp, Homo sapiens
ccataggcctcaaagggctcagaaatatccctttgcagattgtatgaaaagactatttctgaactactcaatgaaatgaaagcttcaactctgtggtttgaatgcacacatcacaaagaagtttcccagaatacttctgtctaatttttatatgaagatatttcttcattcagaaatatcactcagaaatatccctttacagattgtggaaaaagactgtttccaaactgctcaatgaaaaggaagattcgactctgtgaaatgaatgcaaacatcataaagaggtttctcaaaaagcttctgtctggtttttatgtgaaggtatttcctttttcaccataggccacaaaccactaacaaatatccctttgcagattctccaaaaagactgcttccaaactgctcgatgaaaagaaaggctaaactttgtcacacatcacaaagaagtttctcagaatgcttttgtcttgttttatatgaagaagtttcatttttcaccataggcctcaaagtgctccaaatatccrtttgcagattctacaaaaagactttttccaaattgctcaatcaaaagaacggttcaactctgtgtgatgaatgcacatatcacaaagaagttt

SEQ ID NO: 908109 - DNA, 647 bp, Homo sapiens
tatccagaatctacaaggaacttcaacaaatttacaaaacaaaaaacaaaaaacaaaaaaaaacaccccatcacaaagtgggcaaaggatatgagcagacacttctcaaaagaagacatttatgcagccaacaaacatgacaaaaaactcatcaccactggtcattagagaaatgcaaatcaagaccacaatgagataccatctcaagccagttataacggagatccttaagaagtcaggaaacaacaaatgctggagaggatgtggagaaataggaacccttttacactgttggtgggagtgtaaattagttcaaccattgtggaaaacagtgtggcaattcctcaaggatctagaactagaaataccatttgacccagaaatcccattaccagtatatggccaaaggattataaatcattctactataaagacacatgcacacgtatgtttattgcagtactatttacaatagcaaagacttggaaccaacccaaatgcccatcaatgatagactgcttaaagaaaatgtagcacatataygccatagaatactatatagccataaaaaagaatgagttcatgtcctttgcagggatatggatgaagctagaaaccatcattctcagaaaactaacataggaaca

SEQ ID NO: 908110 - DNA, 637 bp, Homo sapiens
cctaaatgggtctatgcattgtgtagtatgaattatagtggattttgttggtgacctcctatattccctttatcagacaatgtcaccacaccccaactgctcagcatttgagtttccaaggctcagaactctcccattctccagagaataacacaaccgaaggagatcccttgtacctctcacccacttactgaggttgcagtttgcagtcaaggactggtggactgaaaatgtagagttcctcttggaagcagactgaggaaaacttactgttttccctgctctgccctgcttcctcattctttctcctgagagcactcttccaatacattgcacaaacctatttcagactacacccagagaacccaacctaaaaacatggagaaatactatttccacatttatataaccttgagctattcacacaatattgatgtctggaaaaattggtaaaactatataaaacaaaacagtttaagtcctaagttttgtgtttttttttcaatttcccccactcggccactccaagttctaaccttttaaactctgtattttctttctttagaagttatcctacaaaaataatcatgcaaaatttgaaaraaacaaatgcataaatgattcttacagccttgta

SEQ ID NO: 908111 - DNA, 630 bp, Homo sapiens
ctaaaggcaagtatatcttacaggcaatcttcaataaacactatttctcacaagtaagctttgatagaaattgggcagctgagtgggtttataatctctggcagaagctgaatggcagtwctattgtgttgctaatcaaaagtataatgatatgctttgaaagttcatggttaggttctaaaaagctggtctccctaggctcctgcttcagtagaaagaaacataacttctcttgatcagcttgtgatgaagcaataactgtgggcacaaccaataatattctcaaaaacttgctgctctaacacacgaacaaaatagtatgtgtggcctgtagatctgtgctccatttcagtagttcccaatctatgggctgcacactctaagtgattgtattttttatgtgtgggaggggtcaaagttttgcaaagttattttttttaatactaaatttggatgtgacctttcaactaatacaaagtacaactattacactgtagaagatccactaactttttcaacattaaacttgtaaaatttggggagttctttttatagttagaagatgcttacaatcaataaattaggataaataaatctggaggataactgtcaaaaatgatcattttcatt

SEQ ID NO: 908112 - DNA, 525 bp, Homo sapiens
gtagatttcatctcaagaaaccactttctttgytcatccgtggaagcaactcatccactcacgttttctctggaggctgctgcggtctcgccacatcttcaggctctgtctctgtttctagtgctcttgttatttccaccatatctgcagttacttcctacagagaagtcgtgaacccctcagtgtcatctgtgagggttggaataatcttcccaacttctctctctcttttttttttttttgagatgaaatcttgcctgggctggagtgcagtgatgcgatctcagctcactgcaacctccacctcccgggttcaagcaattctcctgcctcagcctcccaagtatttgggattacagtcactcccgaccaggcccagctaattttttgtgtgtttttagtacagagaggatttcactttgttggccagtctggtctcaaattcctgacctcgtgatccacgtgccttggcctcccaaagtgctgggattacaggcatgaaccaccaagcccggccccaacttc

SEQ ID NO: 908113 - DNA, 616 bp, Homo sapiens
accatgggaacccacctcttgtatcagcaygacccagatgggagacatggaatcaaaggagatcattttggagttttaagatttgagagccctgtgggattttggacttgtatggggcctgtagccccttcgttttggccaatttctcccatttggaatggctgtatttacccagtgccctcattgtatctgagaaggagctaaattgtttttgattttacaggctcataggcagaagggacttgccttgtgtcaagtgagacgtcggactgtaagattaatgctgaaatgagttaagactttgggggactcttgggaagggataattggttttgaaatttgagggcgtgagatttgggaggggccaggggcagaatgatttggtttggctctgtcctcacccaaatctcatcttgcattcccatgtattgtgggagggacctgtaggagataattgaatcatgagggcaggtctttcctatgctgttcttgtgatagtgaatgagtttcaccagatctgatggtttttaaaagaggagtttcctgcacaagctctctctctttgcctgctcccatccatgtaagacatgacttgctcctccttgccttccactgt

SEQ ID NO: 908114 - DNA, 616 bp, Homo sapiens
accatgggaacccacctcttgtatcagcatgacccagatgggagacatggartcaaaggagatcattttggagttttaagatttgagagccctgtgggattttggacttgtatggggcctgtagccccttcgttttggccaatttctcccatttggaatggctgtatttacccagtgccctcattgtatctgagaaggagctaaattgtttttgattttacaggctcataggcagaagggacttgccttgtgtcaagtgagacgtcggactgtaagattaatgctgaaatgagttaagactttgggggactcttgggaagggataattggttttgaaatttgagggcgtgagatttgggaggggccaggggcagaatgatttggtttggctctgtcctcacccaaatctcatcttgcattcccatgtattgtgggagggacctgtaggagataattgaatcatgagggcaggtctttcctatgctgttcttgtgatagtgaatgagtttcaccagatctgatggtttttaaaagaggagtttcctgcacaagctctctctctttgcctgctcccatccatgtaagacatgacttgctcctccttgccttccactgt

SEQ ID NO: 908115 - DNA, 616 bp, Homo sapiens
accatgggaacccacctcttgtatcagcatgacccagatgggagacatggaatcaaaggagatcattttggagttttaagatttgagagccctgtgggattttggacttgtatggggcctgtagccccttcgttttggccaatttctcccatttggaatggctgtatttacccagtgccctcattgtatctgagaaggagctaaattgtttttgattttacaggctcataggcagaagggacttgccttgtgtcaagtgagacgtcggactgtaagattaatgctgaaatgagttaagactttgggggactcttgggaagggataattggttttgaaatttgagggcgtgagatttgggaggggccaggggcagaatgatttggtttggctctgtcctcacccaaatctcatcttgcattcccatgtattgtgggagggacctgtaggagataattgaatcatgagggcaggtctttcctatgctgttmttgtgatagtgaatgagtttcaccagatctgatggtttttaaaagaggagtttcctgcacaagctctctctctttgcctgctcccatccatgtaagacatgacttgctcctccttgccttccactgt

SEQ ID NO: 908116 - DNA, 628 bp, Homo sapiens
cccttgaatcctattgaaactgtcttctgggttgtgtgtttccctgaggatggagaggcaatcctttggcaaacgtgttgccattccatcctctgttcccatcccaaaaccgtgagagttgccaatttctttctttcttttatcttcttgtttcaagagaatcagctggagtactccacttcactttctctctcttctccccaccatttttaccacaagatagcttttatatctggtggttacatgatgaagaataagcaatgaaggcaagattgtgacattttaattttctggtacattcatcaacttttcatctttatttcagtgctttctctggactagtaccaggaaattattagatatgcaagagctgaaattaataatggtataaactgaaaacctactcaaaaacacatcagcagagcatcagggacgtgtgggcacagagtctcaatgacatgtagagagcaagggttggattaaatccatgtaaaaaattctcactggggttttctaaccatcccttgtttgatttttgaaaatatttttattcagggccttggaatcttatkaaacaaagaaatagcttggctggcttgactcaaaataagcttgttatagccaagta

SEQ ID NO: 908117 - DNA, 559 bp, Homo sapiens
aatgcccaaccattactgttaaaaactgtccacgtcatgaaaagcaagaaaagactgagaaactgtgacagatgggagattcagaggatatcattactaaatcaaaacaggatcctagattggatgctggacagaaaaaggacattaggtggaatactagggaaacccaactgaaatctatgtattaattaactccactgagtcaatgttacctttctgactgaaagtcattgtaccataattctggaggacagtaggggaagctgaaagaaggatttaagggaactctctgtactatctttgtaactctttgggtcataaattatttcaaaattaaaaaaaaaaatttaagcaatcataattcagaaggcagtgatgaaatacaccataagcaaaaccaaaagcatgtgacactgtgggaagaggaacttacaactcgtaacacagacaagagtgaatctccctaatacataaagagctttgagaaaaacatcaataaccmaataagagaaaaatgaacaaacaattcaaagaaaaggaaaacaactggctcttaaat

SEQ ID NO: 908118 - DNA, 660 bp, Homo sapiens
cctcctggactgagccaatgtagtctggatagtagaaaggaccttagccaagaaaccaggaacagcctctctgaatctctttctgcaattgtgtgtttccagaaaaattgcttctttgagtttgttttctgatcaggaaaatgaggaagtttgattacatcaaggcttctcaagttctaattctatcacattcacctaaggtggttccaaaatatacagattcccagatctgactgaaggacacattgtagaggttgggctgaggtctctgtatcagactgggcgtaaagtgtaatgtcctgtcctgccacttattaactgggtgacctagagtaagttacttcatgactcgtatatttctcataggtaaagcagggatgataatatctctacttcatatgtccccgggagggtaaaatgatagaatcctttttaagtagcaagtatattgcctgtcacatattaatcattcaacagatgttatatattatttgtatagcccccagtattcactgtgtgtgtgtgtgtgtgtgygcgcgcgcgcgtttggtgcaaggtagacgatccataagtatctgctgcgtaaataaaagttgtttttttttttttagcaacttcttttgttctcagatctgaaatgattagcccaggaattacttc

SEQ ID NO: 908119 - DNA, 598 bp, Homo sapiens
cttggagagcaataagcattggccataggtttcagaatgagaagatttggtgttgctgaaagggctgagcaagctgaaccaaacactttcactggataattaattattttaaaggctaagtttcaaggattgtgtagcctttgttcaacgcatgcagtacatgtatctcccagtttaccaatgactaatagtgtaaaataagacaaggagaaaatggataatagccttttgacagacttagcctagattacaggtaagcatggattactgggaaacagaactcacaaattaacatccatataatgttttcttttttaacttttaagactcagttgaaaaattattgccaaaaataatactctctgtagttgtatttcacattataggaaggtctgcctgttggcactcgattcttctagttatcctgtgagacagatgaggcatgttttattatcttcattttatatatgaagaaatgaggccacagataatatggtccaaygtcacatagtagttgtgtagcagaaaaggtttccaacaggtaaatggtgtttccatttatgcacctcccacttactcttcacgtcactgtaatcag

SEQ ID NO: 908120 - DNA, 627 bp, Homo sapiens
cagagctattttatccatcagtacaacagcgtagtgctcatagactgtargattttcaatagccaatgaaagtatctgaggctctagaaaaatatttcacttatagccaaagaaacaacaactccaaaattacaattttaactttatgtctgccaaatgtaatataatgacaacttcattagttattaatttcagtgttcaaaaaaccatacatttgaaaatactttgtggctttgagttttatataagataaatgtcaaaaatatgtatgacgattgtcaaaaaatcatacgaacttataaattcattaacttattcatgacttaataagcttaaaatattaattttcattcatccacttatttattaacttaatacaaattatttcacaaacaagcacttaatttatattaggtcagcagtattcaatctagactgctggtatccttagagaacaaagagactttgtcaggaggacatacatataaatagtttgatgtagattaattttcagatgttcaactttcatgtgtactcattactgatattgatcaatctaaaaacaagcctgttcctctggttccattttctcactgccttgtctccaatcaatcatctttctttcca

SEQ ID NO: 908121 - DNA, 611 bp, Homo sapiens
ccagataaaatcagagaaaaaaaaatggtatacagctgataccacagaaataaatgaacctytatccttctaccctttacatgtactgaagttgagttgaaatgtattataaacacacgtctagaaactatgaaataaaacatttagaagaaaatgttggagaaagaataacatttgttagataagacagcaaaagcttaaagcataaaattaaagaattagacttcaaaactaaaaaaaaagtgatcttcaaaaaacatcatttggaaaataaaataataatatacagccttggcagatatattttcaaaacacatgtctaataagcttccatatctcaaaaattttggcccctcaaaattgggaaaactttggaacagaaatatcacagttacacaaatgtctaataatcacattagtaggtgctcaacctcattagttatcagaaaaatgtaaatcacaagcacaatgagctatagctaacaattagaataggttttatatatatatatatatatatatatatactatacatatatatacatatatatatagtatctcactaaatgtcctcatcacaatgtgtttatccattcacctgttgactgact

SEQ ID NO: 908122 - DNA, 611 bp, Homo sapiens
ccagataaaatcagagaaaaaaaaatggtatacagctgataccacagaaataaatgaacctttatccttctaccctttacatgtactgaagttgagttgaaatgtattataaacacacgtctagaaactatgaaataaaacatttagaagaaaatgttggagaaagaataacatttgttagataagacagcaaaagcttaaagcataaaattaaagaattagacttcaaaactaaaaaaaaagtgatcttcaaaaaacatcatttggaaaataaaataataatatacagccttggcagatatattttcaaaacacatgtctaataagcttccatatctcaaaaattttggcccctcaaaattgggaaaactttggaacagaaatatcacagttacacaaatgtctaataatcacattagtaggtgctcaacctcattagttatcagaaaaatgtaaatcacaagcacaatgagctatagctaacaattagaatagsttttatatatatatatatatatatatatatactatacatatatatacatatatatatagtatctcactaaatgtcctcatcacaatgtgtttatccattcacctgttgactgact

SEQ ID NO: 908123 - DNA, 605 bp, Homo sapiens
aaatggcattagaataattatatttttattaaattaaaacaaacttcactctataccttaaattatatacaaatattaactaaacataggtaataggtataaatattaaacctaaaaataaagtctaaaatattatattgaagaaactatctgaaattttggaaaagggaaagatttatgagaaacaataccaagagcatgttccataaaagaaaactggctgtgttgaattccatcaaaatggagaactgctcttgtaagacaatgtgaagagaataaagagacaaaccacaaactggtagaaaatatttgcaaatcatatatttctttttttttttttaatttccataggtttttggggaacaggtagtatttggttacacgagtaagttcattagtggtgatttgtgaaactttggtgcacctatcacccgagcagtatacactgaacctgatttgtagtctttcatgcctcaaccccttcccaccctttcccactgagttcccaargtctattgtgtcattcttatgcctttgcatcctcatagcttagctcccacttatgattgagaacatacaatgtttggttttccattcctgagtta

SEQ ID NO: 908124 - DNA, 589 bp, Homo sapiens
catatcaagtttagaattcttattgagatttttaaagtttccttcaggcaattataacctcactgcattttcatcctttctaaaacttctgtctctctcaatcctactcatcatttcaaatcttgttcaaggttgatttcttttacaaaaccaggctcaactcctatggttgttgttggaaagtacagaattctcatagcatattggagaagactgtaaccctcattctggaaaatttttcattttctgatcaaaagtcaagaaacaacagactgcctactagtattagttattatgccttgaatcagggatgtagagatatttgtggcatggccattgccaagagaaggttattgtaatgatccagaaatagtgggatggtagccttctgatgaatttgctctcaatgggtcatgtttacttcctttcaacatatttctgtctttgtaactctctgatgmagtatgaatattaaataataattgtcttgctggtgaattttcttttttttttgtttattgattgaatggtttggttttcttcttcaatttttatgttaggttcagggtacgtgtatagggttgttata

SEQ ID NO: 908125 - DNA, 605 bp, Homo sapiens
ctgcatcctgacagtgcgggatatttggtcaccataagaaaccagaacaccaaggagagartgtcaaagaagcaaggaatttcagagctccaaagacctacctgaccatcccacattttctgggaaggcaaaggataccactcccaggtcacactgaactcatagcagagccaagactaaaatgcaaaggagaacactaatttaggagctgacttgagaggatccatggaaccatcatactcaggcttcattgctgtcattaatccagtgtgctgtatcccatactaaattctgggattcagagaagaaaaacatatatttattatttttaagacaacgaaagtcatataactcaaccataattataagaaaagttaattgaataattgatgtgaacaaatcactatacttcacacataagcactttactttgtgattagccatataagggcagacacactactattattcctatcctatagatgaagaaactgaagcttacacagctgaaagaatttttccaaggcctaatgatacggctaagattcaaaagcacgcagttaaattctaatactcatgttctagtctgctctactgaaaggaga

SEQ ID NO: 908126 - DNA, 619 bp, Homo sapiens
tgtgcactgctcagtcctccactattaagaacacttacccagtcatcaacctggaacatggaaagcctgcttcttgaccccagttgccaccagaatgaaacctacaggagarcagcaggcttctgttctgcttttgacttcaggccctgagctctggcccaggggtgctcactgcatgggggcaggaaacagaagatagcccactgccctactgcaataacccatgaatcatcaagaggcacgtttcagcctgtttcctttgcatttgaagcaaagctgttctgcctataagcaagcatgtttcagtatgtgtcaggcatttaccatgaaaccagtaagaataagaggtttctaccatggggaagcattagtaagtcgggaaaggagtgaactattagacctcagatcttccctgatggaactgtcatctctgtgaagttctcctctccatggactgaagagaggacagggatgggagaggtgactgctccctccatgaagtggcacagatagatttgctccccttcctttctgatgtcttccctgactcacccagaaagtttcaaggtccctttcctctctgcacaaaggacatctcgtacaaaccaccaccttttaa

SEQ ID NO: 908127 - DNA, 617 bp, Homo sapiens
ccaccttttaagaacttattgtaggattccttytttttttatttgcattgtctatattatcttagaccaacagttcttaatccttggcagggaggggaggaaggggttgaagatttcttttgtatgtaataaaagaagccaaattcctcttgttctctcttccctttagagcccatcccctaaaaagcatacaaaagcactttagaaagttcactgataactctgaaacacctccttaattcatgttaaccacacccaaactaggctgtgagctttaaaaagaaaaggtagaattaactttttaaactctaatcatccactaccatgtttgactcagagtaagagttaaagtaatatccttcaaacaaatagtgcacaagcaaaataaagtgcaagtaattcactagcttctattgcctgacacatttcaatttgaggaacattgtttgaacttctggtacttaccaatgctgttcaagtctcaccccatgctctaccctatttcctccaaaataaacgataaaaaatgaaatgcaatcagagtaaagatctcctaccctagcccttttataaaaagcaagaattgagtttagaatgtgctctccagggttttcaac

SEQ ID NO: 908128 - DNA, 604 bp, Homo sapiens
aggtttggggaagctttcatggctgatgtcctgaaatatgtttttcaatttgtttgctttctccctatctcttttagggataccaatgattagtagattttgcttcttcatataatctcgtatatcttggaggttgtgtatcttcctttttattcttttttctttatttttgtctgactgtcttattacagagagccagtcttcaagctctgagattctttcctcagcttggtctattctgctgttaatatttgtaattgcattgtgaaattcttggagtgtgtttttcagctctatcatgtcagttcagtgctttttgttttgttctttgttttctgtttttataccagctattttgtctgtcggctcctgtatcattttattatattcttaatttccttagattgcattttggaattctgaatctcaatgatcttcattcttatgcatagtctgaattctatttctgttatttcagccatctcagccttgttaagaaacttgttggagaactagtgtgatcacttggaggacataagacactctggccrtttgaattgccagagttcttgcattggtcctttctcatttctgcatgtgggtg

SEQ ID NO: 908129 - DNA, 593 bp, Homo sapiens
gccagtctatctgctaaggcatagcaagagtgacctttcctttagttcccgataagtaccttatctccatctgagaccacatcagcctgtayttcattgtccatatcactatcagcattttgatcaaaaccattcaaccagtctctaggaagttccaaattttcccacattttcctttcttcttctgagccctccaaactgctccaatctctgcccattacccaattccaaagttgcttccacatttttatgtatttttataaaagtgccctgctctgctggtaccaattttctgtattagtctgttttcacagtgctataaagatactacctgagactagataatttatacagaaaaaatgtttaattgactcacagttctgcatgactggggaagcctcagaaaacttaacaatcatggcagaatgtgaaagggaagcaaagacctgcttcacatggtggcaggagagagagagagagatcaagggggggagtgccacactttaaaatcatcagctcttgtgagaactcactcactatcatgagaacagcatgggggaaactgccccgtgatccaagtacctcccaccagg

SEQ ID NO: 908130 - DNA, 593 bp, Homo sapiens
gccagtctatctgctaaggcatagcaagagtgacctttcctttagttcccgataagtaccttatctccatctgagaccacatcagcctgtacttcattgtccatatcactatcagcattttgatcaaaacyattcaaccagtctctaggaagttccaaattttcccacattttcctttcttcttctgagccctccaaactgctccaatctctgcccattacccaattccaaagttgcttccacatttttatgtatttttataaaagtgccctgctctgctggtaccaattttctgtattagtctgttttcacagtgctataaagatactacctgagactagataatttatacagaaaaaatgtttaattgactcacagttctgcatgactggggaagcctcagaaaacttaacaatcatggcagaatgtgaaagggaagcaaagacctgcttcacatggtggcaggagagagagagagagatcaagggggggagtgccacactttaaaatcatcagctcttgtgagaactcactcactatcatgagaacagcatgggggaaactgccccgtgatccaagtacctcccaccagg

SEQ ID NO: 908131 - DNA, 421 bp, Homo sapiens
taactaaatagcttccgcacagcaaaagaaactatcatcagagtgatcaggcaacctacaggatgggagaaaatttttgtgatctatttatctgataaagggctaatatccagattctacaaagaacttaaacaaatttacaagaaaaaaacaaacaaccccatcaaaaagtgggcgaaggatatgaacagacacttcttaaaagaagacatttatgtggccaacaaacacatgaaaaaaaagctcctcatataaaaaaggatgagttaatgtcctttgcagggacatggatgaagctggaaaccatcattctcagcaaactaacacaggaacagaaaaccaaatactgcatrttctcactcataagcaggagttaaacaatgagaacacatggacacagtgaggggagcatcgcacaccg

SEQ ID NO: 908132 - DNA, 600 bp, Homo sapiens
atgaggaaagacttctctccaaaggggaaaaataacataaaataaatggcaagatattaatcttgagaccatttacgggaaggtgttaagtggccccactggcattaacagcaatgagcttcgaatatcacttgtacagcaagctgcttagctctgcagataacaagtcacagcaggccttcttgggttgcaaatgtagtcactctgtttgccaattaactctttcccccattgccttttatataaccagccaagaagctttgctgagacagcatcatctgctggaaaacagcactggcctgggagttagaagaaatgatgtgcagaagcagtagtggaagtagtaacagatagtagcaataacagtagtaggaacattattgggaagccagagcccttggaggctctctattttctgaaataaatgtctacgttttctaagcttagtatcagccaatgtcgttgacaaggcattgttcttttatctcaagaaatttaaatttgtctcagttgttctgtgcatgctaaaacgaaatactccatggcctttccatgtacaccrcacaccgtccttaattcatctgtgatgctatagcctag

SEQ ID NO: 908133 - DNA, 615 bp, Homo sapiens
attttagataccatgaaagtgagggaaggactakgaccttcacaaggttatacaaatagtagtaatgctaagtatagaacacagagctcccttctctcagttcattgcaggatcttgcaaagctgctcagagaggcagacagcagactaatcatgtgatgtgagaatgcggacatatttatgctcacagctccttgtaccatctccaaaaataaatggttgcacatagagaaaacacaagctgtgaaccagacctctgatgcactcactctatgctgttatgacaataatttataatgttattgcaattacagtagaattatagcacgcccagcacctaatagagctgtgtgcatactcttgagaaagacggatgtgctagcatcttgagctgcagaaatgagattaaatggcccccatccctgatcctgccattgatttttgtagccctcccattaacatgatacttcgcacaccatccctgtatcgttcctcagaggtgaagacatagttttagagtgaaaataattagaccctcaaaatccaaggtgacaaatcttccacgcctccaactgccatgaatcagaagacataaatcaaagcctcttttgaggat

SEQ ID NO: 908134 - DNA, 620 bp, Homo sapiens
cagccacctgctaccacgcccggctaatttttttctattttttagtggagacagggtttcgccatgttagccaggatggctcgatctcctgacmtcatgatctgtccgcctcggcctcccaaagtcctggggttacaggcgtgagccattgcgcctggccttcctccatccttttattttgagcctttctgggtctttgtatgtgagatgggtctcttgaacacagcacaccaatgggtcttcactctttatccagcttgccattctgtgtattttaattggggcatttagcctatttacatttaaggttaatatcgttatgtgtaaatttgatcctgtcatcgtgatgctcgctggttattttgcagacttgttaatgtagttgtttcatagtgccttggtctgtctacttcagtgtgtttttgtagtggctggtgacagtttttcctttcactattcagtgcttccttcaggagctcttgcaaggcaggccttgtggtgacaaattccctcagcatttgcttgtctgaaagggattttatttctccttcacttatgaagcttagtttgcctggatatgaaattctgggttggaaattcttttctttaagaatgttgaa

SEQ ID NO: 908135 - DNA, 644 bp, Homo sapiens
ttggagctctgttttcctgcccctttccctgttcttggcacctgctttctgtcaagggaagcagttcctggcagagaccctggactccagggagtttgtgcagtaatcacagttgccatcactgtgaggccaggcacaaaaaaagacacagctccatccccgatcttgacttctcataggttgtgccaggaaatgtagaacattcagtatcttgcataaggttctgtaaattccagttcagcagggcatttttaagaaagaaatctgaccaaagttgttcaggaaaaagcaagtcaactttaaaagccaccagttccatttgtacttgataaagctcttgtatttcttcaccatagtttccctatattcctgaagaatttataacagcctctgtggaactgcccattacatatattatatatgatatataaagcgctgttgtattaaagatataaaaggagacaaaggatcagaacattactaagtgtaatgagattcagttaggtagaagggccaagaatgaagaagttaaagtaagacaagatgtcctgagaagtaaaactggggaataatttggttttgaytggaaacattctttcatttggggtattaaaaattgttgaacaaaagcctgagactcagtt

SEQ ID NO: 908136 - DNA, 452 bp, Homo sapiens
tttgccatcctatgaaagtaggagaaaggatgctgagaaagccatacccataargcccaggctcacagggcttaactgggtctgggacttaaccatgagagcaaagaatccccacctccctcttaccactattctagcaccaactgataagcaacagctgactggttgtaaagaagatgcaaaggcatctggagtgccccttccgtgtcacagtcattcaagccacactgaaaaccagaactaagaaatactttcaagcatctcaggccctgcatgaagcccaaggtcacaacaatccatcatcagaatgttaagtttttgacacactgaagataataatggcaataaaacaccccaaacaccccaaaacacagctcaacttctagattgattcggctcctcacgccagggacctggaagaaaagtaggcatgcccaatttcagatattcac

SEQ ID NO: 908137 - DNA, 607 bp, Homo sapiens
gaaagtttttttaaaaaccgtaatttatttggtcttttactaaaaccatttttggaggctgtggatgaagctgaataaatattaggattttttgtttgatacattaattgcatttggtccaaacctaggcagcagatatactttgtggctccaaaatatggaatgagtgaatccccatcttgatcctatgtggctcatatctatcactttgtaattgctggcaattttagagaatttaggtgcattatgtggctttgaagccatatacagtcttttgctatattcactaggtgatggtagtttatgaaatactgtgtaagataatgtgcctggtttccatttctaaatgaaataccgtttatttttatttaaattaaaaaagttttcactcgagtgaggaattttttagttttattgaggttagcatacatataataaagtccaaaaaatcttaaatgtggagctcaatgacattttatacacacatgtacaaatacgtgtatattatacacaacagtgtamcaccaaccaaatcaagatatggaatatttccaggacccctgaagattctctcatgcttcttcccaggcaacacccccaccctacc

SEQ ID NO: 908138 - DNA, 642 bp, Homo sapiens
cctgcggtcaacaaacatatggaaaaaaagctcagtaacactgattattagagaaatgcaaatcaaaaccacaatgaaataccatctcacatcagtcagaatggctattactaaaaagtcaaaaaatatcagatgctggcaaggttgtggataaaagggaacacttatacactgttagtatgagtgtaaattagttcagccactgtggaaagcagtagggcaattcctcaaagagctaaaaggagaactaccattcaacccaacaatcccattactgggtagatacccagaggaaaataaatcattttactacaaagacacatgcacataaatgttcaatgcagcactattcacaatagcaaagacatggaataaacctaaatgcccatcaatgacagagtgaataaagaaaatgtggtacatatacaccatggaatactatgcagtcataaaaaagaatagatcgtgtcttttgtgggaacatggatggagctggaggccattatccttagcaaagtaatgcaggaacagaaaaccaaatactgcatattcycacttataaataagtaggagctaaatgatgaaaacttacgaacacaaataaggaaacaacagacactgtggtctacttgagtgggaggg

SEQ ID NO: 908139 - DNA, 695 bp, Homo sapiens
ggtggttttctgttatttacattccaacgttctctaccaaatgttggtattttaatcaccagtaatctcactgccttttcccccctctccttccaactactacccttctttctcaagttcctggtttgttgaccaagatcagagtactttgggatctttgatacttgttttcctcactggaaggaacaaaacagttcatgtctttgagtcatttatggactgaggatgatcacagggtagagagagaggatgataaatgagtacttggtgtaacttgttgacccagattctgtattactgtccatttcctgtctatttaaacacaaccagcagcagaaaaactgatttatttatttatttatttatttatttatttatttatttatttgagacggagtctcgctctgtcgcccaggctggagtgcagtggtgcgagctctgctcactgcaagctccacctcccaggttcatgccattctcctgcctcagcctcctgagtagctgggactacaggcacccgccaccacgcccggctaacttttttgtatttttagtagagacagggtttcaccacgttagccaggatggtctcgatctcctgacctcgtgattcgcccacctcagcctcccaaagtgctgggattaccrgtgtgagccaccacgcccagccaagaactgattttaaaataaattcc

SEQ ID NO: 908140 - DNA, 617 bp, Homo sapiens
atagtagctcccacgagtttagcaaatatttccttcattaaacaaatttgtacttactagactttgtttcaggaagtgggattatattagtgaataatttaaacaaataaccagctatcatgaagtctacaatctgatggaagagacagctaataaatgaaaacaaacagaaataactaacttaaataatattataaactgtgtaataaaataaagtagaacaaggggttagataatctgggaataattatctcagagattttataagagtagagaccaaaaccattggcaggattaaccaaattgatgtgctctattaagtaacttacatgctattaaatccacagaacaatggtatgatgtagatatttttgtacatttgaggaaatgatgctcagataaattaaatgccatgcacaagaccatgcaactataaaatggaataaccgggatttggttgcaggttttactgataataaaatctgtaggcaatataaaaatattaatggtgacataaaacatcaaaatktgaggagtggggagagtggaatgaaagtgtaaaagtttatttgtgaataaagataaattgataacagcttaaactaacctgttacgac

SEQ ID NO: 908141 - DNA, 584 bp, Homo sapiens
tgtgaatgataagtagagaacttcagatgttacctctatttaaacatctgttcagccaatatgtgatttcatattataatctgcttcagctacatttgcttacccgttaatcaaaaaccataaattctgcrttgcacaatagctttttggttgttgtttgcatagtttcaatataagaatgcatatttaaatgattatcagatgataagcctttatgaaagtttctgcaatggaatgcctattttatgaatttttatgattaaaaggtattattacaaaagtaatctgagaagctaggaaactaatagtaaattacataattatttacctcctattcaatatattaaaaatgaaattccattttatgagagaaggatgaccagataaaaagaaacagaaaacattaaatcctttctctcttttctttctgatttttcttatagtatattggattgaaagtattttccttaaatttatgcacttttatagtttatctttctatcctgtgttgttttgaagaaagtaaatcagcagtatctaaatctgtaggatttgcttccctggcttactagtcattattgaca

SEQ ID NO: 908142 - DNA, 624 bp, Homo sapiens
aattgcagaaaacataatggaaagcctgggtgggcactacatttcagagcatggcattagcattgggtatcactcatgacacagatgggccttgtctgcttggggagtaccttgccccatgtggcaagtttgccgctttggcaggaaggcctgatgtgaagctagattgagaagggagaaggtgtgcagtttgtaatacttaaacaaggagttcactaacttgtaagtgagtcatcagggaagaaatgtaatcagaactgagaaagccagaccaggctctcatctaattccacccacatctgtcttgtactttatagtcttcagatgccttcattcacccagtatccccaggtggtaagaagcacatgtgttatcattgccattgtcaagatgagtgaattaacttttttataagcagtctataaacatttactgttctggatcatatctttattctttttgcatttacctagcatttcaaccaccaatttgtttttattccttacacaatttcawtaagattttgggggcaggataaagtgtaacaacagataatgaatatgatgtaatttcaggtttgcctgggaactcaaaattgtaggttattatggggattaagtgagg

SEQ ID NO: 908143 - DNA, 586 bp, Homo sapiens
cactgacatcaccatactgtcattcaaacatctcagcccagtcccaccctgtgcagcccccgccccagrcccacccaaatgttctggttccactgtgagcagtcagccttcccacaggctccattaaggccacttgaaagtgtgtgggagaaaaacgctttctgcattcgtgcaagggatttgacatcactaagggagctgtgttgtcaccacattaagctaaaagaaccaccaaacagggccgggcgcggttgctcgagcctgtaatccaagcattttgggaggccgaggtgggcagatcacgaggtcaagagatcgagaccatcctggccaacatggtgaaaccccgtctctactaaaaatacaaaaattagccaggcacggtggcaggtgcctatagtcctagctactcaggaggctgaggcagaagaattgctttaacccaggaggcagaggttgcggtgaacctagatgtgccactgcactccagcctgggtgacagagtgagactccatctcagggaaaaaaaaaaaaaaaaaaaaaaaaaaaaaagagaaccaccaaacaggagggcaggaggacaggg

SEQ ID NO: 908144 - DNA, 690 bp, Homo sapiens
aatcaccacattttttcacttttgcttattataatccctaaaattccaccaatgaaagtagcaatttccagccctgggtccttagaattctgactckgctgaggtagtatttattttcccataataagaaagatttcacaagccttgatgaaaatgtcaacttccgttcccttttgccaaaaaaatagcaagtttgcatggcagccttggttatctaatgatgcacagaagctctgattgtcagttatatatgcctttacttaatgaatataggaaagagaattcattattattccatcaatgaagtttgacatcacagcatggatgtccattgattttgagcataacaaataccagattttaaaaaattaattgtgaaaaattgggaactgataaatcagaaattcatttgaatttaaaagcatctttaaagtattacaaccatggctggaaaaagcaaagacataaaacagacataatgaacttcctttgaagcattattgtgaagatgaaatactttctggtcttcttgttcaggaaacgcttgttcaattggattctgatttccacagaggtttctctttgtctaacttgaaatcgggtctgctaaggaatggggggagttcctaggcattttgtgtatcccatatgccattatccatagcccaggatctggtacagaactgggat

SEQ ID NO: 908145 - DNA, 544 bp, Homo sapiens
ggtattccactgtatgtatgtatgtgtgtgtgtatatatatagcagattttttttttacattcatccattgatggacaataggttgacttcatattttggctattgtgaataatgctccaatgaccatggcagtgcaggtgtctttttgacatactgatttcatatcctttgggtatatattcattagtaggattgctggatcatacagtaatactattttaaattttgtgaggaacttccgtactgttttcaatagtagctatactaatttacatttccaccaacagttgacaaaggttccctcttctccacattctcaccaacacttgttaccttttgtcttattgataatattcattgtaacaaatgagaggtggtatctcattgtggttttaatttgcatttttctgatgactagtgatgttgtacatgttttcatatacgycttggctattcatgtgtcttctcttgagaaatgtctattcagatcctttgcccattttttaatcagtttatttcttttcttgtcattgagtttgagtt

SEQ ID NO: 908146 - DNA, 581 bp, Homo sapiens
ggggaattgggaaagatgagagttgccagtctgctggtgagctctttgaaatagctctttcaaaacagagctctgaatgggtatgggtacagaccattgttgtaaactgractgtgttaggccatttgtgcattgctataaagaaatacctgagactgggtaatttataagcaaaagaggtttaattggctcacgattgtttaggctttacaggaagcatggtggcatctgcttctggggaggcctcacaaagcctccaatcatggcagactacaaaaggaggagcaggcatctcccatgacaagagaaagggcaagagagagagacagagagtatgtggggaggggaggttccacacagttttaaatgaccaggtctcgcaacagctcactcactgtcatgaagacaacaccaagccataagggatctgcccccataatgcaaacacctcccactaggtctcgcattcagcattggggattgtgattcaacatgagatttgggcagggacaaatatccaaattacatcattccacctctggcgcctcctaaatctcatgtccttcccacattgcaaaata

SEQ ID NO: 908147 - DNA, 543 bp, Homo sapiens
ataaatagaatattatactgatgactttgcaaatcacttattttctacttaagaaacattatggatatctttccatgtcaggaaatctatatagagtactacattcctttgaaagtttgcagaatatttggttatacggatatatgtgtgtattcaaccattcaccacctactcttgatgggcatttgggttaatttcagttttcactgttacagtgaagtccttacacacagatctttgcaccctagtgcaagcgtttctgtatataaagtcctagaagtgatataatggtcaaaggaatgcacatttaaaactttaacagggctggctatggtggttcacacctgtaatcccagcactttgggaggccaaagtgggtggatcacctgaggtcaggagttcgagatgagcctcaccaatatggtgaaaccctgtctctactaaaaatacaaatattagctgrgtgtggtggtgtgcacctgcagtcccagctactcaggaggctgagacaagagaattgcttgaacccgggaggtggaggtt

SEQ ID NO: 908148 - DNA, 579 bp, Homo sapiens
gtcctaaatccaatgacaaatatcctaaatccaatgacaaatatccaaatcatcctggattcgggtgagtcctaaatccaatgacagacatatggagaggaaagtcatgtgaagatggagggagagattggagtgatgcagacacaagccaaggactgccggagccaccagagactgggagagaggcatggaacagattgtccttcagagcctctagaaggcaaccttgctggcatcttgacattgaatttctggcctctagaactgtgtgagaataaatttctgttgttttagccacccagtttatgctcttttgttacagcagcaccaggaaattagtatcagcaggaaccggagtcaggaaaacctggactcaaattccacagccacctcttttctgtacatcctgggcaaaatgcccaacctttccattcctcggttttgtcctctgtaaaatgggagtaatgatagcatcaagtgcacagggctgcatgaagattaaatgatgtggaggmatgggaggcagggaggcaggcaggggggaacagtagctgatgtggaggaatgggaggcagggag

SEQ ID NO: 908149 - DNA, 673 bp, Homo sapiens
gtcccattttgagtgatacagctgtaatcaatggcgtggttaaatgcttaatctaggtaaattgatagaaaaatgaagcaaatatttttatccttgtcttagcaaaatgttaaatttccccaaggagagattgaattatgtcagctttttgtttgtatatatatatattttttgcagggcaatttaagaggtaaagtgaagcagttatctttctgtcaaaggcttttcttagcaccagtgttggtagtgtgtgggccctttgatttaaaaagcacggatctatgaattacctggaaggtaacatgcatggaagttagggatatagctcaggtcacatggaatttggcattggaatttttgtttctcaactttctaagtggaaaagttatcttattctttgcttcatctagtatgctaaaaaagttaaatgggcctcacatcagaaaacatgaagcatttctgtgtcccattgtgtgggatacagggagttaggtagggaatgcagtgggtgcaaaggggacgacacattgttatcttgggtacctaggttttttattctaaaggacgttagcccttggggactaggctgagtgctttatttttctttattttgtatkgttctcttttttcctaaaaacttgaatgaatttgatgtgtgccccagtaaactttg

SEQ ID NO: 908150 - DNA, 653 bp, Homo sapiens
agcaagtgtcatagcgaaggcacgtactagatattagctgatgtgaactcagtgttctggtgttttcatttcatccagcttgagactatatcctcaggataagagtagatttaaaataaaaaaattaaccttggtaatattgatctttaactcattacttggactgattttctctttaaaagttgctcagatccaagcacacatttcttatttcaaaggaataactgtaccttgaacaaacaggttcatgctttgaagactgacaataaattgaaaatagttgttgtccatgggattaggtgctatgggtatcagagagctttgttcactggtatatttgtttattggccaaatactcacccaatgcatgccctgtgtcagtctctgtactatttgcccaacatgcataattgagtagagaagatggatatacagtggatgattataacacaatgtggctgataattgcaatgacagttaaatgcacaagatataatgaaaacacattaagagacataaaataaaatgtttaccaattcakttagaaacttacaattgggttgtgtataagacacacatgaatctcctagttgccatattttatacacacacacacacacacacacacacacacacatatcagtattatgtag

SEQ ID NO: 908151 - DNA, 653 bp, Homo sapiens
agcaagtgtcatagcgaaggcacgtactagatattagctgatgtgaactcagtgttctggtgttttcatttcatccagcttgagactatatcctcaggataagagtagatttaaaataaaaaaattaaccttggtaatattgatctttaactcattacttggactgattttctctttaaaagttgctcagatccaagcacacatttcttatttcaaaggaataactgtaccttgaacaaacaggttcatgctttgaagactgacaataaattgaaaatagttgttgtccatgggattaggtgctatgggtatcagagagctttgttcactggtatatttgtttattggccaaatactcacccaatgcatgccctgtgtcagtctctgtactatttgcccaacatgcataattgagtagagaagatggatatacagtggatgattataacacaatgtggctgataattgcaatgacagttaaatgcacaagatataatgaaaacacattaagagacataaaataaaatgtttaccaattcagttagaaacttacaattgggttgtgtataagacacacatgaatctcctagttgccatattttatacacacacamacacacacacacacacacacacatatcagtattatgtag

SEQ ID NO: 908152 - DNA, 616 bp, Homo sapiens
gcaacttttcttacatgatttctttggtactatcctccaaattacttagaacttacactgggcagatgttgaaacttctaatttctgaaaatatatttttcccctatttttcacttttgtcttttcccctctcctttcttacagaattcctctaattcgttgttcaaccatgttattcaatttttttttttttttttttgagatagaatctcgcactttcacccaggctggagtgcagtggcacgatctcggctcactgcaagctctgcctcctgggttcacgccattctcctgcctcagcctcctgagtagctgggactacaggtgcccaccaccaagcctggctaattttttgtatttttagtagaaacggggtttcaccgtgttacccaggatggtctccatctcctgatatcatgatctgcccagctgggcctcccagagtgctgggattacaggtgtgagccaccgcgcccggccgaatttttttattttatctatcatttttaattgccaagaayatttgattagtcctgggtgtttctttttttgtagcccttctttgtgtttcacagatgcggtacctcctcatcctttgaggatattataatttatt

SEQ ID NO: 908153 - DNA, 575 bp, Homo sapiens
cgcagtgtttcactttggtagattccacgagctaaaggggttatatcaatttacatatcagtgtatgagaaatcaagttttcccacatcctctccagaagttattattttctgacttataaaaaactttagccattctgcatgtctagtgataccacatttagattttgatttgatttttgatatggcttacatttaaccgaggttcgaggagactcatgttgaatctctgttataagtggttgtactgctgcaatcactggtcaattcggataaaactaggcatgatttgtggaatctaaaatgtttatttgcttaaaaaaaatctactctgtgaagttttacttgaaatttttattattgacacttacccttcaagctctttttttttttataaggttggttcctaatactgaagtccaatggaaatataatgcaagccaagccacatatataattgaaagtgttccagtattcactttaagaaaaataaaaaataagtgaataaattttaatagtatattcaacctaatatagcaaatgtaatwtaaatataacatatcaaaataaaaatta

SEQ ID NO: 908154 - DNA, 555 bp, Homo sapiens
tttataggtggtttttccacagcttcactctgcacttctcttacctgccaccatgtgaaaaagagcatgtgtgcttccccgtctgccatgattgtaagtttcctgaggcctccccmgccatgctgaactgtgagtcaattaaacttctttcctttataaatttctcagtcttgggcagttctttacagcagcatgagggtgggctaatacagtaaattagtactgcagagagtggggcactgctataaagataattgaaaatgtggaagcaactttaaaactggttaacagatttttgaacagtttggagggctcagaagagacgaaaacgtggaaaagtttggaacttcccagagacttggaaggctcagaagacagacagatgtgggaaagtttgcagcttcctagggacttgttgaacggctttgaccaaaatgttgacagtgatatggagaaggaagaccaggctgaggtggtctcagatggagatgaagaacctgttgggaactgaagtaaaagtcacacttgctgttctttagcaaagagactggaagc

SEQ ID NO: 908155 - DNA, 603 bp, Homo sapiens
ctatattgtcagaggtgttcaaacaagagtgactccatcttgataggggctgagtaaaataaggctgagacctactgggctgcattcccaggatattaaggcattcttagtcacaggatgagataggaggtcggcaaaagatacaggtcataaagaccttgctgataaaacagcatgcagtaaagaaccagccaaatcccatcaaaactgagttggcgacaaaagtgacctctggtcatactcactgctcattatacactaattataatgcattagcatgctaaaagacagtcccaccagctccacgacagtttacaaatgccatggtagcatcaggaagttacactattttgtggaaaaacgggtggaacccgcagttctgggaactgcctaccccttttcctagaaaatttacgaataatctaccatttgtttagcatataatcaataaacaaccataaatacagtgaatcatcagccctcagggctgctctgcctatagagtagccattcttttatttccttactttcttaagaaacttgattgcactttatggattagccttgaattcwttcttgtgcgagatccaagaatcctctctt

SEQ ID NO: 908156 - DNA, 692 bp, Homo sapiens
ctttccaaaggcggaggagcttcatcccatagccaccatcatcccaggccattagtactgccagactaccactgattttcccttaaggcccaacgtctcttatatccacttgtcatgaattctgcttggcctgcgactcatgcttcagggcactgagctcacctctgtcccagggcaggtccagaaatgtcatccaagaataaagtcctgaaattgaagaccccaagagcatgcttggtgctctatcatcctgtggcagttttggtacctaaggtgcaagaaaaagtctcctttactgtaccctctgcttttctaatgaagaatgagttttgccccatttccaccacagctggtaacttgctaagtctcacctgaagccaggagtctcataagctcactaaggcccttaatgtagtacctaggtattgcttctggtttttcagggctcaagggatcttcaattggaagctgataaatgctggtaggactgggttctttccttcaaggcagtgggttccctttggctcagggtgtatctagaaatgttgtcctggagctagcgcctggaacaggggtctcatgactctgactagtgccttrtcttgctgtggatgaggcagcatccaagatgcaagacaaagtctcctctttcctttcctctccttaagcagaaagaaagggtctcttctgga

SEQ ID NO: 908157 - DNA, 602 bp, Homo sapiens
gtctgagcaaggtagctcagttcagtgctttgagaggccaaggtgggaagatcactggaggccaggagttcaagacaagtctgggcaccataccaagaccctgtttctgaatataaagtagctggctacagtgtgtctgcctttaatctcagctacttgagaggctcaggcagaaggatcacttgagcccaggagtttgagggtgcagtgagctatgattgcaccacagcaatccagcctgggctgtagagcaagaccccatctctaaaaatgaaacagaaaaaaggcttcaattacttaaatgtaatcataccttggttttttgtttgttttgttttgttttgagatggagtttcactcttgttgcccaggctggagtgcaatggtgtgatcttggctcactgcaacctctgcctcccagattcaagtgattctcctgcctcagcttcccaagtagctgggattacaggtgtgtgccatcatgcctgrctaattttgtatctttagtagaaacggggtttcaccatgttggtgaggctggtctcgaactcctgatctcaagtgatccacccacctcagcctcccaaagtgctgggattaca

SEQ ID NO: 908158 - DNA, 671 bp, Homo sapiens
ttggtctgcagagctttgtgcctgggacccaaggccctggtggtgtgggctcacaaggaaatctcctgatccacaggttgcaaaaatccatgggaaaagtgtagttccctgagcaggtagcacaatccctcactgcctcccttggcttggggcaggaggtcccattgccctatgcagctcctgggtgaaccatccccctacctgccttttcttgctctctgtgaattgcaccaactgcctagtcagtcccattgaaagaatctgggtaccccaattgaaaatgcagaattcacttgccatttatgtttgtctcagtgggagctgcagactggaactgtttctactcacccatcttggcccctcccttctttttattttcttatagtttttgtcttgaaatatatttagtctgatttcagtatagtgactcctgctttttcttggtttccacaggtgtgaaatatctttttccatccttttacttacagtcaatgtgtttctttataggcaaagtgtgtttcttgtaggcaacagatcgatgggtcttgttttytcatccattcatccagtctatgtgttttgattggagagtttattttatttacactcaatattattatttataagtgaggacttatttctaccattttgttatttgttttttgggtttt

SEQ ID NO: 908159 - DNA, 598 bp, Homo sapiens
caagagcacatgctttgaatatctaaatgtatgtgtgtctggataacacccattaggtatttatcttaatgctctccctcaccttgccscccaccccctgacaggccctggtatgtaatgttcccctccctgtgctctcattgttcaacttctacttatgagtgagaatatgtggtgtttgattttctgttcctgtgttagtttgctgagcatgatggcttccagcttcatccatgtccctgcaaaggacatgaattcattctttttcatggctgcatagtattccatggtgtatatgtgccacattttctttatccagtctatcattgatgggcatttgggttggttccaagtctttgctatctcaaacagtgctgcaataaacatacgcgtgcatgtgtctttatagtagaatgatctacaatcctttggggcaaagacttcctgactaaaacaccaaaagcaattacaacaaaagccaaaattgacaaatgggatctaattaaactgaagagcttctgcacagcaaaagaaactatcatcagagtgaacaagcaacctacggaatgggagaacatttttgcaatctacccatctg

SEQ ID NO: 908160 - DNA, 475 bp, Homo sapiens
gacttcttgaggctgtgtcacaggtgcakgtcctcaaccttggcaaaataaaatttctaaattaagcgagactcatctcaaattttcagggttcacatgggtaaagctctaggatgtaactaaacatggctaaattgttatccctttttcagaaaatcccattccaatgactttatgtcaggtagcacattacaaggataaatacttcactgtcgtcctattttcttaatgtttataataacacacaattagaatggctaatgcctctcaaaaagctctctgtgatgcctacaacagataaatacttggtaagaaaggttgggagaagaattagggaatgattggtggttttaaaatgatagaaaagaaagtatatttgccctgtggtttcaaaattacaactaacggatagaattttaaggaagtatatgctgctatttcatgtgtgagagaattttctaagtactagaatgtg

SEQ ID NO: 908161 - DNA, 617 bp, Homo sapiens
gtgccagtatctgtgtttataacatataaagctggaaataataagaactctcttcagagggaagtaattcatccaatagtggactttatgttctatttccatgataaaatacagatttcctttaaaarccaaaaaatataaaaatataattccagcttattaaaagtaatagcctaagaaaagcatagaagtagaatatcctcacagtcctggtttttaattttattgcaaatataaatattgtctacttgaaaacatttcgtctcagcatctctctacaaataaccaagcaagcattgattgacagattaggcttactaatattgccttcccttttcctaagtgagctgttctacttacatttttgacagttgaaaatgactgcttgccaacattgtcaatgatatgttgagtaagaaattgtgttcttctatatcattttctaacctcccatttttcttttctttttctcttcacattcgttgttcttattgagatgaaatgatcacaaatggttagaaattgtctgttttcccttgatcaggtccatttatcctgtgcttagtttttctaaatgtatttttttaagaacataaaagatggtatgactctgcttg

SEQ ID NO: 908162 - DNA, 631 bp, Homo sapiens
gcgattctcctgcctcagcctcctgagtagctggaattacaggtgtgtgccacctaatttttgtagttttagtagagatagggtttcaccattttggccaggctggtcttgaactcctgacckcaggtgatccacctgcctcagcctcccaaagtgctgggattacaggcgtgagccaccgcacccagtcatgaattcttttaattgcaaaaaatgatataccatttatacagcaaactcttgcctcctttataagaaaagtaccagcagagaaaaacctattcaaggaagtcaaacattttgtcttgtaccacttacaaatcaatcaacgaatgtcctttgccacttaactttacaattattttcatgtgatttggtatctgagtttaaccaagtatagtccaatggaaggcaggtttacaaatgggaactaggtattttgaagaaagagaaacatttttaagaaatagaaacatttttaagaaatcaggaaaaggaaagcataaattttgtgatagccttaattggtgtttgtagagaagtttttaaaactagggagaagcagttataaaaagtgtaaagtgtcagggcaattgaaggtctggaaaatctctcagaagtagcagagaaa

SEQ ID NO: 908163 - DNA, 616 bp, Homo sapiens
ttgggaccagcccggccaacatggtgaaaccccgtcagtactaaaaaaaaaaatacaaaaattagctgggcktggtggcaggttcctgtaatcccagctacctgggaggctgagaaaggagaatcgcttgaaccaaggagggcagtgagttgagatggagcccctgcactccagcctgggtgacagagcgagtctcaaaaaaaaaaaaattgttctccccttaccctactctgtcttaatgtcagaacttcttttttaaatttttattgatacataatatgtgtacatatttatgggatacatgtgatattttgttacatgcatagaatatgcagtgatcaactcagggtatttaaggatattcaccacccatcacataggacatttatcatttctaccttttgggaccattccaagtcctctcttctagctattttgaaatacataatacacaatgttgttagctataatcaccctactctgctatcaaacgttaaactttttccattttatctaactgtatgttcacgcccatcagctagactctcttcattcttccctctccacacacacacccttcccagcctcaaaactatcattctattctctacctcca

SEQ ID NO: 908164 - DNA, 555 bp, Homo sapiens
ctagcacagcagtctgagatcaaactgcaaggccacagtgaggctgggggaggggcgcccgccattgcccagcctcgcttaggtaaacaaagcagcctggaagctccaactgggtggagcccaccgcagctcaaggaggcctgcctgcctctgtaggctccacctctgggggcagggcacagacaaacaaaaagacagcagtaacctctgcagacttaaatgtccctgtgtgacagctttgaggacagcagtggttctcccagcacgcagctggagatctgagaacaggcagactgcctcctcaagtgggtccctgacccccgacccccgagcagcctaactgtgaggcaccccccagtaggggcagactgaaacctcacacggccgggtactcctctgggacaaaacttccagaggaacaatcagacagcagcattcgcmgatcacgaaaatccgcggttctgcagacaccgctgctgatacccaggaaaacagggtctggagtggacctctagcaaactccaacagacctgcagctgagggtcctgtctgtta

SEQ ID NO: 908165 - DNA, 638 bp, Homo sapiens
ccagagtgctgggtttacaggcgtgcacgaacatgcccagcctgtttggtttttaaaatcagagtaatgttgacctcgtatgatatgttggaaaatgttgctttctcttctatttggagagaaaaaaatggaggactttctctacatgattttaatactagctatgaaactatagtaatcagaagagtagtgtaagaatagattcatggattagtaaatagaatcaagagtccagaaacaaatcagtccatatatgtgaaagtgacatttgacagttttccaaagtaattgaatgggaaaagaatagacttttaacaaatgctgctataattattagagatattcataagcaagaaaatgaaccttgattcttacctcataccatatgtgaaaagtgacttgaaatggattttagatttttgtgtaataactaaaattataaaacttcctgaagaacatgtatgaaacattatttacaattttaggaagaaacatttttttaaatggtgtatttgctagggttccaatagaatagatgtgtgtgtgtgtatatatatatatatgtatgtatatatakagagagagagtaaggaattagctcacgtcatcatgaaggctgacaagtccccagatctgca

SEQ ID NO: 908166 - DNA, 561 bp, Homo sapiens
ttcaatgcatgaaatgtgacatcattctatttaattagatctttaatttcagcaaagttttataatttttcagtgcacaagtcttatacttcttttgctaatttttttctaagtattttattccttttgaaactgctatgtaaagacttcattcttgattctttttaaattattccttgtatgtagaaatgcaattgatcttgacttctatagttctgatatatttgtttgatgtatttgttcttgttacaattttttgagaatttcatagattttccacatacaaaattgtgtcctctgcaaataaagagttatacattttcctttccaatttgaatgctcctctcttggtttttcttgcctgaatgcactgactaaaatctcctgtacaatatttaaagaagtaacgagagtcatcaatcttaccttgttcactttcttagggggaagcccttcatcatttcacaattaagaatggtgttcttataggtttttttgtagatgcttttatcaagttgaggagtayccttttcattccaagtactttcaaaattttactat

SEQ ID NO: 908167 - DNA, 626 bp, Homo sapiens
gtaatcaacacaatttagttatagtgacaatacagattaatggaaaataatagagaggccagaaacggacctatgtttacgtattgattgatttttggcaaaagtgccaaagcaactcaacagagaaagaaaaattttctgacaaactgtgctggattatgtgaatataaatatagaaaataatgaaaatagatcttcatctctcaccatgtaagagttaactcaaaacggatgagacctacctaaatgtaaaatctaaaactataaaacctctgtactaaaacacagaagaaagtcttttaaccttaaagtttgcaaagtttttgaataaaacctaaaagaaaaaaaattgagaaactgaattccatcaaaattttaaattttttccttctaaagacagcacttaggaaacaaaatgactagccacaaattgagacaaaatatttgcaatacatctctcagataaataattaaatctagaatatataaaacactcttacaactaaaaagtaagacaaataaccaaaaaaagtggggggcgggcaaaacctgtgaaaatgcactttaccagagatcttcatccackatggccaaataggaagagctctggtctgcagctcccagtg

SEQ ID NO: 908168 - DNA, 615 bp, Homo sapiens
aattggaagtatagaagtaaaacactctttagcaaatacaaaagaatggaaatcataacaaacagtctctcaaaccacagggcaatcaaattagaactcaggaataagaaactcagtaaaaatggcacaactacatggaaagtgaacaagctgctcctaaacgattactgggtaaataacaaactttaaggcagaaataaagatgttctttgaaaccaatgagaacaaatacacaacataccagaatctctgggacacatttaacacagtgtatagaaggaaatttatagcactaaatgcccacaaaagaaagcatgaaagatctaaaattgacaccctaacatcacaattaaaagaactagagaaacaagaggaaaaaattcaaaagctagcagaagacaaaaaataactaagatcagagcagaactgaaggatatagaaacctgaaaaacccttcgaaaaattcaacgaatccaggagctgttttttttaaagcatcaacaacatagactgctagccatactaataaaaaagaaaagagagaagaatcaaatagaagcaataaaaaatgataaagggggtatcacmactgatcccacagaaataccagctacc

SEQ ID NO: 908169 - DNA, 626 bp, Homo sapiens
tcaacaggcaatactatgtcacatttctatatactaacaatacacatgcagaaagtaaatagagcacaataccattttaactgctccaaggaaaatgaaattcttagttgtgtattgaataaatcacatacagaatctatatgctgaaaattccaaaatgctactgaaagaaatcgaagagctaaataaatggaagacactaagtttatggattgtaagattcatatagtaaagatgtcaggtcccccagattgtcatacaggtttgacacaattcttgtcaaaatcccaagaaattttcttgtagctatagacaatattattctacagtttataaggaaagacaaaagaattaaagcagataaaatacttttgaaaaaggagagtaatgtcagagaaacctgtctacctaattttaagacatactgtctagctaaaacaatcaaggccgtgaaataaatacatatatccgtggaacagaaaaggaacaaaaattcawataaattagaaatagactcgtataatatgccaaactgatttgtgacaaaggttcaaaagcaattcaaccgagccctttcaaaaactgatgtggaaaatttagacagctataggtttttttaaaaaatg

SEQ ID NO: 908170 - DNA, 598 bp, Homo sapiens
gtatgagtttaaaaactaaagacttgagaactttatcagagttaataagaatgagatatgtatgtrcatttacaatacagaattactatttaataatttacacatggcattaattctaattgtgtttaaatatcagagctttttcagtcttcattcatgtaatcaacagccacatgctaaggtactagaaccagcactggaattacaagatgaagatggcatggtccacctcccaacagtcataagctctaacctaaaaaacagacaggcaggcaatgtccatatagagtcatagataccatgacaggtatagagcagggcactactggaacacagagaagggacatctatccacttttatgtcaatatcatgggctttctggtggaggagataacataggttgatacctgaaggacaaggaaaagcttcccagatagaggaaagaggcaaaggcaaagagcctgaggtgaggaagagccctgcagagttccactccatccagtttggtgctagagcaaagggcagagtgcagtaagcggtgagaaacaaggctgagtaacttgacaagaatcacattgacatgggtgtttttatttc

SEQ ID NO: 908171 - DNA, 561 bp, Homo sapiens
gtttccctaatgttttctttcagtagtttcttgtccttgatttaagtctttaacccatttggatttgatttttgtatatagcacaagagagrgttctagtttaattattctgccaatgactttgggaggctgaggtgggcagatcatgagggcaggatatcaagaacatcctggctaacacggtgaaactccgtctctactaaaaatacaaaaaaaaaaaatagctgggcgtggtgggggcacttgtactcccagctacttgggaggctgaggaggagaatggtgtgaaccgggaggtggagcttgcagtgagcccagaccacgccactgcactgcagcctgagcaacagagctagactccatctcaaaaaaaaaaaaattctgccaatgaatatctagttttcccagcacaatttggtgaagagactgtcctctcccccatgtatattcttggcaccttcattgaaaatgagttagttgtaaatgtaaggatttatttctgggttctctattctgttccattggtctatgtgtctgttttatgccagtaccatgctgttt

SEQ ID NO: 908172 - DNA, 571 bp, Homo sapiens
taccatgagtcataaaaatatattctttactatcatcatctttgccacagaatttttgtacttcattttacttttatttttctgataattcatttttgttcctccttaaatggcacaaagttatctcctagtaaaaagtgtctaacccccttccttcattatcattccccacagtatgtcaaaaaaagtttcagagatatcatattgagttatttaggccaaagtcaataaatgggtctaggaataagactttgaaagtgatattacactctatattaggcatggtggctcattcctgtaatcctagcactttaaaaagctgtggcagaaagatcacttgaggccaggaatttgagatcagccagagcaacatagtgagacccccatctctacaaaaaaaaaatgttttttaattacccgggcatggtggctcatgcctgtagacccagctagttgggatactgaggcaaaaggatggcttgtacccagagttcagggctgcagtgaattattatcactgcacttctgcctggatracagacaaagaccctatctcaaaaaaaaacacaaa

SEQ ID NO: 908173 - DNA, 618 bp, Homo sapiens; identical to SEQ ID NO: 898938

SEQ ID NO: 908174 - DNA, 562 bp, Homo sapiens
tctgtagctgccctagatagcaattcctttgatggatttaggcaaagtaaattgaaaatctcttgaaaagatttaccactgtagatgcctttaacagtatctgtgacttggccaggcatggtggctcatgcctgtaatcccagcacttatgcgggtggatcacctgaggccaggagtttgtgagcagcctgaccaatatacagtgaaacacagtctctactaaaaatacaaaaattatctgggtgtagtggcacacacctgtagtcctagctacttcggaagctgaggaggagaatcgtttgaacccaggaggtagaagttgtagtgagccgagatcattccactgaacttcagcctgggtgacagagcgagactctgtcaaaaaaaaaaaaaaaaaaagcgacttatgggagaatgtcaaaatagtaacattaacagcagttgggaggaagttgataccaaccgtcatggacgacttcaaggggtttaagacttcagtaaacacaataactgcagatatggaggaaawagcaagagaactagaattagaagtggaggtgaa

SEQ ID NO: 908175 - DNA, 597 bp, Homo sapiens
gcttaaaggaaatcataggaatatacccaaaaattcaagaggtcttaaatcagatgacagtgtccagttttcctgttgtaatctcttttggaataatcttctttctgattttctgttttttctctactttgttaattattctttatcaaatgtttctttaattttcacaaatggatgtttcagggcctatatgaggatgttccaggagtacagaggcccctctgttacaaatactgcacatttttaagcacagattttactgaaattgtgtagaaaaagaagagtaccacaccataataaagcaaaacatacattatataataaaaattttaaactgcttacattttctgataaaacacaacctccaaagaatttttgtgaatgtcaatgtttccagaatctctaggcatgtgaattcttatttctttgcccttgggcacttgaagagagagttttgataaactctgccagaggagctaaaatcattgttagaattggcctttacctgaagtcacaaaacatttcattgcaaataatttctaaggaaattcatcctttarcacattcattgcttacaagagaaaaagcagagttcaa

SEQ ID NO: 908176 - DNA, 616 bp, Homo sapiens
cgggaggcaaagcttgcagtgagccgagatggcgccactgcactccagcctgggcgacagaccgagactccgtctcaaaaaaaaaaaaaaaaaaaaaaaaaaaaaggcataatcctagaaaactactagaagtaaacattgagaaaacactacaggacattgatctgggcaaagatttttggggtaagttctcaaaagcacaaacgaaaaaagcaaaaatagacaaacagggtttcatcaagttgaaaagcttctgaacaaaaatgaaacaattagcaaagtgaagagacaacctagaggataggagaaaatattagaaactacctatttgaaaagagattaataaacagaatataaaaggaactcaggcaactcaatagcaaaacaaccaaataacccagttaaaaaacaggcaagggacataaacagacatttctcaaatgaatgcatacgaatagccaacaagtaaatggaaaaatgctcaacattatttatcatcagggaaatgcaaatctaaaccacaatgtgatatcatcttatctcagttagaatggctattgtcaaaaagattttttttaartgacaaatgctggcaaggatgtgaagaagaaatagc

SEQ ID NO: 908177 - DNA, 615 bp, Homo sapiens
aggggaacagttcagaggctgcaatggaaaggaactgtcactactatgaggaagaaccagggctggctgattctcccaggaacagggaggagacagaaaggccacaagaaacagggaggagccattcccaggcttgcctcacagaggatcatgggggcaattagaggagcctaacaaagagaagctggcaaggtagaaacctggtttgcagtctcaagttcggcattgcaaaatgtaaaagggtggagctggggctgagagacaacagcttcatattaaactgaacaggattcaagagccagggtgacctggtgcctgggtccctcttttagactccctgtctctgtgcttctgacccacattttgttccagccttttcctcacttcacgcctctgccttaggctcctcaccactcatctgcttcctctacctcacttattcttccaggttcaagtcaaatggcaaccccctccccagggtgacctcagcctgctcccaattccttcctggamaccccgaaagcatggcttctgaactcaaccacctctgtcagctttgccttgtctgtgagagccttgggacaccagcaggctagagcacaagacccagggtcc

SEQ ID NO: 908178 - DNA, 586 bp, Homo sapiens
agagttactccaacagggtcctaaccacacccactcttgacccasaagccagtcactaacctgcagccattctgatctttccaaagtatacatttaggaatcattctccagctgctcctgaaagccctccagcagctttgcactacacttaggataaagggccccatcctcagcctggcctgcagggctgtatggggacccgactcactctccagcctcactccacctcactcacccctctgtcatttgcaggcaagacagtgaactcccttctgctcctcaaaccaaacttactccctcccaccttggctttgtctgagctgctccaggagtccccaccacctccaccctccctcccctgttgaccctcaggtcttggtatgtacacttcatggagcactcccccaacactgccagcctggggcaggccccttgccatgttctactcgacagcgctcacccatctgtgatcctacaaccctcatgtgcccatctgctctgtgtctgtgccctcagctagactctaagtttcacgtgtccagggcattacctagaccggcttactaaagtattcccaaacactacc

SEQ ID NO: 908179 - DNA, 452 bp, Homo sapiens
tgaccatttttttttttttttttgagatagagtcttgctctgtcaccaggctggaatgcagtggcaygatcttggttcactgcaacttctgcttcctgggttcaagtgattctcctgcctcagcctcctgagtagctggcattacaggagcctgccaccgtgcccagctaatttttgtatttttagtagagaggaggtctcatcatgttggtcaagatggtctcctgatctcatgatccacccacctcagcctcccaaagtgttgggattacaggtatgagccaccatacccagcccatttttgtttattctcaaaccactatctcacatctttaagaatgatacttttggtacaaggcaagtaacagtgaatatgctaagtgtatgtttaactttactatttctaaaaatgactataccacttcatacttccattagcagtcaatgcaaga

SEQ ID NO: 908180 - DNA, 572 bp, Homo sapiens
tttatgttattgcatttaagatttaagatcattaaaaagtcaggaaacaacaggtgctggagaggatgtggagaaataggaacacttttacactgttggtgggactgtaaactagttcaaccattttggaagtcagtgtggcgattcctcagggatctagaactagaaataccatttaacccagcaatcccattactgggtatatacccaaaggattttaaatcatgctgctataaagacacatgcacatgtatgtttattgtggctctattcacaatagcaaagacttggaaccaacccaaatgtccaacaacgatagactggattaagaaaatgtggcacatatacaccatggaatactatgcagccataaaaatgatgagttcatgtcctttgtagggacagagatgaaactggaaaccatcattctcagcaaactatagcaaggacaaaaaaccaaacaccgcatgttctcactcataggtgggaattgaacaatgagaacacatggacacatgagggagaacatcacacaccrgggcctgttgtggggtggggggaggggggaggga

SEQ ID NO: 908181 - DNA, 694 bp, Homo sapiens
actaatccaaaagctagcagagaacaagaaataactaagatcagagaagaattgaaagagagacacaaaaagcagccccccmaaaaaaatcaatgaatccaggagctatgtttttttgaaaaaaattaacaaaatagatagactgctagctagactaatacagaagagagaagaatcaaaaagacacaataaaaaattataaaggggatatcaccactgaccccacagaaacacaaattaccatcagagaatactataaacacctctatgcaaataagctagaaaatctagaagaaatgggtaaattcctggacatatacagcctcccaagactaaaataggaagaagctgaatccctgaataggccaataacaagttctgaaatggaggcagtaattaatagcctaacaaccaaaaaaagcccaggaccacatggattcacagccaaattctaccagaggtacaaagaggagctggtaacattccttctgaaactattccaaatgataaaaaaggagggactccgccctaactcattttatgcagccagcatcattctgataccaaaaccaggcagaggcacaacaaaacacaaaaacttcaggccaatatccctgatgaacatcaatgcaaaaatcctcaataaaatcctggcaaaccgaatccagcagcacatcaaaaaatttatccatca

SEQ ID NO: 908182 - DNA, 694 bp, Homo sapiens
actaatccaaaagctagcagagaacaagaaataactaagatcagagaagaattgaaagagagacacaaaaagcagcccccccaaaaaaatcaatgaatccaggagctatgtttttttgaaaaaaattaacraaatagatagactgctagctagactaatacagaagagagaagaatcaaaaagacacaataaaaaattataaaggggatatcaccactgaccccacagaaacacaaattaccatcagagaatactataaacacctctatgcaaataagctagaaaatctagaagaaatgggtaaattcctggacatatacagcctcccaagactaaaataggaagaagctgaatccctgaataggccaataacaagttctgaaatggaggcagtaattaatagcctaacaaccaaaaaaagcccaggaccacatggattcacagccaaattctaccagaggtacaaagaggagctggtaacattccttctgaaactattccaaatgataaaaaaggagggactccgccctaactcattttatgcagccagcatcattctgataccaaaaccaggcagaggcacaacaaaacacaaaaacttcaggccaatatccctgatgaacatcaatgcaaaaatcctcaataaaatcctggcaaaccgaatccagcagcacatcaaaaaatttatccatca

SEQ ID NO: 908183 - DNA, 595 bp, Homo sapiens
tttttctttttttttttttgaaacagagtctcgytttgtcaccaggctggagtgcagtgacacaatcttggatcactgcaacctccgcctcatgggttcaagcaattttcctgcctcagccttccgagtggctgggattacaggcgcccaccaccatgcccggctaatttttgtattgttagcagagatggggtttcaccatgttggccagcatggtctgatctcttgacctcgtgatctacccgccttggcttcccaaagtgctcagattacaggcatgagccaccgtgcctggcctaccactatttttcaaataaagagacttagtatcagcgattgaagaaacttgcctaagatttcagagttgtaagcacctaacctagaatttgtgcccatatctgtctaacatgaagtgaaattactatgttattctgcctttaaattttatagttggtgttgttaaccagatatgataatggaaaccacaaaacatgtacattaatctagatgttacagactcaatgaaagagtgactattatttggatcataaatcccaatttatgggatgaaatgatgaagtcatatgatcagagg

SEQ ID NO: 908184 - DNA, 595 bp, Homo sapiens
tttttctttttttttttttgaaacagagtctcgctttgtcaccaggctggagtgcagtgacacaatcttggatcactgcaacctccgcctcaygggttcaagcaattttcctgcctcagccttccgagtggctgggattacaggcgcccaccaccatgcccggctaatttttgtattgttagcagagatggggtttcaccatgttggccagcatggtctgatctcttgacctcgtgatctacccgccttggcttcccaaagtgctcagattacaggcatgagccaccgtgcctggcctaccactatttttcaaataaagagacttagtatcagcgattgaagaaacttgcctaagatttcagagttgtaagcacctaacctagaatttgtgcccatatctgtctaacatgaagtgaaattactatgttattctgcctttaaattttatagttggtgttgttaaccagatatgataatggaaaccacaaaacatgtacattaatctagatgttacagactcaatgaaagagtgactattatttggatcataaatcccaatttatgggatgaaatgatgaagtcatatgatcagagg

SEQ ID NO: 908185 - DNA, 631 bp, Homo sapiens
cagaacagaaaggaggctgatgtggttgaagaaagagatgatgaagattagaaagagaggtatgcgtaaggrgtaacaacaggcagtcagatcacatggtattatgtgtctttttgtgaatttgaaaatacacatctacatacatataaacacatgttctttgtttatatttttaaacaggtcagagaaagaggcgttgtagatatattgctttaactgctattctcagatcagcagttttccctccctccctcccttccttccgttcttctttccttccttccttccttcttctctctccctctttctttttccctctttctctctctcttttttgtttttggcagagtctcactctgttgcccagactagagtgcagtgctgcaatcatggctcactgcagccttgacttctgggcctcaaagaaatcctcccaccttagcctcctgagtagtttagcagatttttaattttagataacttctctcttaattcactttgtgtataaccataataatacacaggttatatactgttttctgggtggtagtattatggccaagtgagctattcctacagaactgattcaattgttacatagcactatatattgatagtattcattaagtca

SEQ ID NO: 908186 - DNA, 671 bp, Homo sapiens
  misc_feature 74: n = A,T,C or G
acagtcagtgcagtttaaagccagcttgtgtagatttgaacccaactggcttttggctttgagcaagttaaatnaaatttttaggccttggtgttcattcatgcatatccgtgataataatactacctcatagagttgttatgaggattaaatgacttaatacatgcaaggcacttgtaatagtgcttggaatattttaagcactccaaaaatgtgacaagtttttttttttttttttttttttttttaaatttcaggtcaaaaagttcttaccacagtctggactctcaatcagggaacgcactggaagttaaatgttagttccatccctttgcctgagcattattaaactgcccatacagtttttctgtctaagcatcctttttttcttaatctttttcttgttcaaaacctgcacctgatttcatacatgaggaagctatgaaatctcctttcctattgcggtcctgcctaagaaacaaattaaaacaagggccacatgtggctttgggctttgtgttttgattgcctcctgccatgttgactaagctgtgtagctactctacattgctstttgttgaattccacaggtgctaaataggtcaccttttagcgatgatgtttcttctatgtttcttctatgttcagagacttcaggcccatgccatgta

SEQ ID NO: 908187 - DNA, 527 bp, Homo sapiens
ttcttttttgcccaatactttccagatctcttttttcgagaatcayttctataaaagtaatgtgtaaatcacgtaaaacctccgaatagtatagaactctgcaaaatgaaaaacaagattattttccttctatacccccataaaacctcagttccctttacctacagagaactgctattgacagtttcttgtgaatcctttcagaaatttcattcgatgaccagactacatatggatgtctctaaaaaaaccaaacaactaatgtggtataccataaatactgctataagccttctctctttttctatataaaacatattttggaaatctttccatattcgcaggtatagataaaactcctttgattcatatgcaaaagttatacatgtttaaactgcaagatttaataagttttgacttctggataacactcataaaactgtgaccacagtcaagactgaacacctccaccccctccaaatgttttctcacgcccttcctcctgctccactgcctaaggcaggcaa

SEQ ID NO: 908188 - DNA, 604 bp, Homo sapiens
ttaaatgttctgattttttttaagttaaaacaaaagcaggactttttttcataatttcaacttttattttagatttcagggtacatgtacaggtttgttacctgggtatactgtgtaatrctgaggtttgaggtatgaatgattctgccacccaagtagtgagtgaagtgctcaataggtagtttttcagcccttcccccactccctcttcccccactctagtagtccccagtgtctattgttctcatctttatacccacgcgtacgcaatgcttagctccctcttataagtgagaacatatgccacatttggttttctattcctgtgttaatttgcaaagtgagaattttgatggtgagtattcattctaaaagcacactggggagttggtctggactttcttggttgtgacctgaccccaggaggctagggattcccacccagaattccgtggctttagtgctcattgtgtcatggcatgcctccctagagatgcagaagcctaccatggccatcaacctatctacactgaccaagaatggaactttggaatcttctatttgtctagggtatatctcccttaggtgacaagagaaaggacag

SEQ ID NO: 908189 - DNA, 620 bp, Homo sapiens
  misc_feature 586, 587, 588, 589, 590, 591, 592, 593, 594, 595, 596, 597,598, 599, 600, 601, 602, 603, 604, 605, 606, 607, 608, 609,610, 611, 612, 613, 614, 615, 616, 617, 618, 619, 620: n = A,T,C or G
agagagggtgtaccctgccttagaatccaaacaactgaagcaaatgtaaaaaataccttccaaaaagcaggctgacccaaccacagcacaggacggattgcccagcatkgggaaagggacaagagaacaaccttgtgaaaaagcagcagcaggaagaaaaatattttggcagaggtgcagccctcatgaggaagaacagcaaagctctgcgacccacctccaggcttctgagctgaggaaatagtcccagggcataataaatctctaagtgcaaaagttagatgaatacaaagctaaggtagtgtgaaaagatgcccagctccaagagacttgactattatggataaggcaacaaggcagggcacagggctgggctcttcctctgcgtaggggattcaggggatagagagattggtggttggaggaagcacactcattctgcatgtgcagggagtgggggcttgaggaaatgttaaagaggggctaaggaagaaaatagctgaaaggctaggactacgattttagcagaaaggcaccaaacagtaggttccctctctgtacctccacaccctacccccaaatcttnnnnnnnnnnnnnnnnnnnnnnnnnnnnnnnnnnn

SEQ ID NO: 908190 - DNA, 632 bp, Homo sapiens
ggcttatgcctataaatcccagcacttagggaggccaagrtgggaggacggctgtagcccaggagtttgacactcacctgggcaacatattgaaaccctatctctaccaaaatacaaaaattagctaggctttgtggcttacacatgtggtcccagctacttgggaggctgaggtgggaggatcccttgagcatgggatgtggaggttacatcccttgagccaacagcgagccactgcactctagcctgggagagacagcaaaaacctgtatcaaaaaaaccctaaacaaaacagtcttaagaaaaacaaaaacaaaaaattttaaaaatcctgttaacacaaagggtctgcgatgcacacccttcagattcttagaacatttttgtctgtttgaaaggatatgaggccccacctaacatctttgaggtcttaaaggattgtacaagaccaccccggatttgatctctgccctgaaaatagtacttgagagtttttgttttctggtaaaataagaaacatttattttcaaaaacagtcttgacatcttactgtttcctctatgtttttattaaaaactgaacagttgcatttttggcttatctgtctatttgtgtcttagcatgatgtctaa

SEQ ID NO: 908191 - DNA, 614 bp, Homo sapiens
agattcttaagcaaataggagcagaagttggcattatcaccaagccaaaatttctgagatgygaggagccccagcctgttcctaagtatgctgatattcctaaatgtcatttatttatttagccatcacccttcataagactttttttaaatcctaacactgggtatccaaggatccgttttcgattcaccttgctatcctcataatctagcactgagtctagcacacaacacacaagcaacaagactgttgaactggaataatccttgctggtggtggtaataaggtacacgtcacagaccacatacttctttacgttaaacttagtatactgcatttacttgtatgccacattataagcttacagaggactggagccatcataggtgatcaataaatatgtgttcaaatatttgaagtgttcaaatatgtgaaatatgtacatcaaatatataaagtcagagaaatgaatttctcaggaccaggatatttttttaaaactcatttgagcttattatttcaaaattatctaccaacttttttttaaatcaccattgctaaaaagttacagaatgttatatattgactttaatcgcctcttctaatcaattgta

SEQ ID NO: 908192 - DNA, 534 bp, Homo sapiens
catgcccaaacatagaaagacaaaagatacatttacgaatatctagtttcaagttcttagtagaytattgtatctattgacatctccaaaaaaatctttgaaaataaatattcccattaagttttaaaaattgttagctgcctacataattttttacataactcctaatacagttttttttgtttttgtttttgtttttgtttttgttttgaggcagagtcttgctccgtggcccaggctggagtgtagtggtgcgatatcagctcactgaaacctctgcttcctgagttcaagcaattctcctgtctcagcctcctgagtggctgggattataggcacccaccaccgcacctggccagttttttttttttttttttgtatttttagtagagactgggtttcgtcatattggccaggctggtctcgaactcctgacctcaggcgatccgcctgacttggcctcccaaagtgctgggattaccggtgtgagccattgtgcccggcccctaatagttttattctgcccaaatctca

SEQ ID NO: 908193 - DNA, 542 bp, Homo sapiens
ctatcaatttgcattgccatggcagagttttaacagctcactaggaatttactcgtgggcgaaatatggaggagacatgtagcctttcatcttctagtgatcttatttaggaatcaaaatgggaggcaggttttyatggcccagttcccagcttgacttttccctttggctaaacgagtttgggggccccaaaatttaatttccttccataccattatatttagaaaaaactactgtatattttcaatcttcttaaatttgttaaaacttgttttgtggccttgcatatgatgtattttgaagagtgttccatatgaagttgaaaataatgtatattatgcaactgtaggatgaaatgttctataaatatctgttagatccattatgtctaggctgctatttaaattcagtgtttctttgttaattttctatgtggatgatctatacattgctaatgaactccagcttttgtttttctttatagctccttcatttctgaagggcagcttcattgggcatagctttaccagtatgcaattttt

SEQ ID NO: 908194 - DNA, 542 bp, Homo sapiens
ctatcaatttgcattgccatggcagagttttaacagctcactaggaatttactcgtgggcgaaatatggaggagacatgtagcctttcatcttctagtgatcttatttaggaatcaaaatgggaggcaggttttcatggcccagttcccagcttgacttttccctttggctaaacgagtttgggggccccaaaatttaatttccttccataccattatatttagaaaaaactactgtatattttcaatcttcttaaatttgttaaaacttgttttgtggccttgcatatgatgtattttgaagagtgttccatatgaagttgaaaataatgtatattatgcaactgtaggatgaaatgttctataaatatctgttagatccattatgtctaggctgctatttaaattcagtgtttctttgttaattttctatgtggatgatctatacattgctaatgaactccagcttttgtttttctttatagctccttcatttytgaagggcagcttcattgggcatagctttaccagtatgcaattttt

SEQ ID NO: 908195 - DNA, 624 bp, Homo sapiens
taaaatgaattacagaagactaggggtagatacagtatccgattataactatttccatagtgacaaggacaaagaacaagttgtctgcagattgcaacaccactcagatactgaaataattaaggagataacttagaatcaagttagcagccactcagaaaaaactgcaagctccatcaaggcagagactgtcatattcactgctatatcttcagcatctagcgtagtggctggcacagagtaaaactcaataaatacctgactctgctgtttttatctctgttgttctcactgaaactctaatttttaattgttgttttccattctgtatactataattctattaacactgcagaaggtgcaggaatttgaaatatctaatgaaataaatggtataaattctgaaaagtctgaaatggcatccaagcatcctcagaatgatcctagacttccagaagaaatccagtgaaggatttcaatgctattctctacctggaatctttaatacgtttctgaagataactgatgtagattytcttaagaagaaatgaacagccaaactctacgcttgcataactgtgtaccactgcctttgttacttcaactaattaaggtttcagtttg

SEQ ID NO: 908196 - DNA, 560 bp, Homo sapiens
attcccaagaaggacagggacaragaagcctggactgcaaatactataataaataatttttcaatgcacagacatagacaaacatccataagcatcaagacaatccaagaaaacgtgacctcactgaacaaactaagtaaggcaccagggaccaattctggagaaacagagatatgtgacctttcagacagagaattcaaaatagctgtgttgaggaaacaaagaagttcaagataacacagagaaagaattcagaattctatcacataaattttaaaaagatattgaaataattaaaaagaaacaagcagaaattccagagttgaaatatacaattgacttactgaagaatgcatcagaacttttcaatagcaaaagtgatcaagcagaagaatgaagataggctatttgaaaatataccatcagataaggcaaaaaaaaaaaaagaattaaaaagaattcctaaaggatttagaatagcctcaaaagggcaaatctaagagttgttagcctaaaagaggaattagagagaaatagatagggatagaacgtttattcaa

SEQ ID NO: 908197 - DNA, 626 bp, Homo sapiens
gtatttctcaatttcaccaagccttttcctcctgtacttggacttttgtattcactattctctttgcctgggatctccttcccctccaaccccatttttctgcaatgggcttgagtttcagcgtaaatgtcatgcttctagaggggccttctctaaccacctgtttaaaatgtcaccccacgctgattcacatatgtaaaccatttcctgtttcaattccttgtttattttcttcatagcatttttttaaatgttaaatattcttaatgatgctcatgtttctcctttgctaatagtttaccccaaagtaagcttcacgatgtcagaaaacttctatgacaagtttgctgctgtgtgtagaatgcttcaataaatatgtgctataagaatgtatgaatttgagagatatttattagagaattgagttgtatttggaagaagtttacctctaaagctgtgagcgtctcactttccttttcctttctgtacgatctcccacccattcttactttcaaattaaaacaggasatctagaatcacaggccaccgttttcagtctacaaatatttgcatacctggcactgtgaggaaagctaaagatattagaatgactaaagctgtccata

SEQ ID NO: 908198 - DNA, 562 bp, Homo sapiens
cacaaaccttaccctccagaacattacactactccagaaagcagttcctctgtggtccctggtaacaatttttggaaagtaaaaatcaccacatggtcaatacrgatgatggagatgggagttcagaacagcaaaaagttactgttattaagaaatgagtttaccgaaggagctaatattttgtatgagttttgaaagacaaggatttatgacattgcagaaaatatagcaaccatgatctatttcacatgtattatattattaatcctttaaaacttggcattgttcatgaaaaaagtccattttccatctaagcccctttttgaaacttacatttcccttttatttggtaactagtcaattgactttcagactgattgactacatctggtgagtcttcatctcccactctaaaagcaacagtatgcatcagaataatgtcaggcctgctcaaacagattcctgggcccaagcccagaggtttgatcgagtaggtctgggatggggataaatgatttatatttctaagaagtttatagttgatgctattgctgctgtgact

SEQ ID NO: 908199 - DNA, 562 bp, Homo sapiens
cacaaaccttaccctccagaacattacactactccagaaagcagttcctctgtggtccctggtaacaatttttggaaagtaaaaatcaccacatggtcaatacagatgatggagatgggagttcagaacagcaaaaagttactgttattaagaaatgagtttaccgaaggagctaatattttgtatgagttttgaaagacaaggatttatgacattgcagaaaatatagcaaccatgatctatttcacatgtattatattattaatcctttaaaacttggcattgttcatgaaaaaagtccattttccatctaagcccctttttgaaacttacatttcccttttatttggtaactagtcaattgactttcagactgattgactacatctggtgagtcttcatctcccactctaaaagcaacagtatgcatyagaataatgtcaggcctgctcaaacagattcctgggcccaagcccagaggtttgatcgagtaggtctgggatggggataaatgatttatatttctaagaagtttatagttgatgctattgctgctgtgact

SEQ ID NO: 908200 - DNA, 593 bp, Homo sapiens
taattgagtcccatttatttatctttgtgttcgttgcatttccttttgggttcttggtcatgaagtctttgcctaagccaatgtctagagggggtttttttttttttttgatgttatcttgtagaawctttatggtttcaggtcttagatttaaatatttgatcattttgagttgatttttgtataagatgagagatgaggatccagtttcattcttctatatgtggcttgccaattatccaagcaccatttattgaatagagtgtcttttccccactctatgtttttgtttgctttgtcaaagatcagttggctgtaagtttttgattttatttctgggttctgtattctgttccacggtctttgtgcctatttttataccaatatcacactgttttggtgactatggccttatagtatagtttgaagtcagataatgtgatgcctccagatttgttgtttttgcttagtcttgctttggctatgtgggctcttttttggttccctatgaattttgaggttgttttttctagttctgtgcagaatcatgttggtattttgatggaaattgcattcaatttatagattgcttt

SEQ ID NO: 908201 - DNA, 683 bp, Homo sapiens
tggatttccctggacttgttmaacattcacccaagttaggtcttgtaccatcttccccacaatcctctgggggagtcagtgaatgtgaaaattcctagtctccaccccagacccactgaagcagcacctctggcagtagagcccaggagtcagcattaccaacaacccaggtgattcctttgaaaagatttttgtaaagctcaagaaagtaaaataatttatcaagcatacatataaacctaaccaaaaaagacataattttttgttttgagtttttcataaaagatagcaaattgcagatacaacttaagcttcttttatactcatccctctacctcttcttagtagtaatcacaatcagaaatatggtatctccttagtccatatttcatagtgtatatttaggctttccatgtgggaattcccttccaggggttttttttttaaatcatttttgcaaatcccaaatcttgagaaaaaaattaattgagaagttgggaaaatgggaagaagtattataaattctactacaggaattaaaacttaatgatcaacatagaggtattgctggttggaaggaaggaattcattaatgtcaagtagaaggcagaaaacacaagcagagctgctgatccctttaggaaccaggataagagtgtgtatgaaagaagtggtcacaggcc

SEQ ID NO: 908202 - DNA, 615 bp, Homo sapiens
agaaactgaattgtttttatgtaatagggttatattaaatgttttagaggtgtcttgaaaaaaaaaatacagggtttactattaacccatttttatcacacaaatatatttcaatgccataaaaatgatatctacatgttatacttttctttttttgagatggagtctcactgtatcacccaggctggagtgcagtggcacaatcttggctcattgcaacctccgcctcccgggttcaagcaattctcctgcctcagcctccctaatagctgagattacaggcacccgccatcatgcctggataatttttgtatttttagtggaaatggggtttctccatgttggccaggctggtctcaaactcctgacctcaggtgatccatctaccttggcctcccaaagtgctgggattacaggcgagagccaccgtgcttggccctgttatacagatttgatagaggaaaatatttttaagaaggacaytgacacaaaaaataccaataaaagtcattttcaaataaaagataaatattccacatgcaaaataaaatgctttcattttgtgttgacactggttaaattttatgagcatgtatgtacaagaaacagcacctt

SEQ ID NO: 908203 - DNA, 612 bp, Homo sapiens
taaggaagttggcctttgaagtatttgcagtagaccactggttctctatcagaactagaatcttgcttcaagataccaatctataaataggtaacacataaactggaaacatgctgatagttagctcagatttgtatctctaacccccccaaaacacatttaatataaactggcttctgatattgcctttaacctgagcagcaccgacctattgccattgaacattttcagaacacacatagtttaagttggtagaacttccagaatgcaaagattatttcaacaaatactgattgctcacttgctaaattctaggctcatgctgggctctaggaatactaaagtgcacgaaatagataaaattccctgctttcatgacacttgctgctcggcatcatgctgttcagtatggatgaagatttgccatcagagtttaaatactttaacctaattccaaattttgtctgcttcataaaattgccaacaaaaaatgsaagagtacacaaagacgggaaaaaaaaaaaaaggaagtttgttgttgttattttgccaattttttccagacgtttgactttgctttgtcctggagaagtaaattactaagtgtccgtg

SEQ ID NO: 908204 - DNA, 635 bp, Homo sapiens
ctggagcaatcatggctcagggcagccttgaccttcccgggctcagatgattctcccacctcagcctcctgagaagctgggactacaggtgtgtgtcaccatggctggctaattttttaatttttttgttgagaaggggtttcgtcatgacgcccaggctggtattgaactcctaagctcaagcaatccaccagccttggcctcccaaagtgccaagattacaggcgtgagccactgggcccggctgttttttggctcttttgtaataacacttagcttaaaacacaatactttgtatagctgtacaaaaatattttctttataaccttattctataagcttttctctatttttaaaattttaattttttttatttttactttttaaactttttgttaaaaactaagatacaaacatattagcctaggcctacacagggtcaggagcatcaatttcactgtcttctatctccatgtcttgtcccactggaaagtcttcaggggtaawaatacacatggggctgtcttctcctaagataacaatgccttctgaaatacccccttaaggacctgcccgaggctgttttactattaacttttttaacatgtaggcatacacgctaaaataaagataaa

SEQ ID NO: 908205 - DNA, 635 bp, Homo sapiens
ctggagcaatcatggctcagggcagccttgaccttcccgggctcagatgattctcccacctcagcctcctgagaagctgggactacaggtgtgtgtcaccatggctggctaattttttaatttttttgttgagaaggggtttcgtcatgacgcccaggctggtattgaactcctaagctcaagcaatccaccagccttggcctcccaaagtgccaagattacaggcgtgagccactgggcccggctgttttttggctcttttgtaataacacttagcttaaaacacaatactttgtatagctgtacaaaaatattttctttataaccttattctataagcttttctctatttttaaaattttaattttttttatttttactttttaaactttttgttaaaaactaagatacaaacatattagcctaggcctacacagggtcaggagcatcaatttcactgtcttctatctccatgtcttgtcccactggaaagtcttcaggggtaataatacacatggggctgtcttctcctaagataacaatgccttctgaaatacccccttaaggacctgcccraggctgttttactattaacttttttaacatgtaggcatacacgctaaaataaagataaa

SEQ ID NO: 908206 - DNA, 629 bp, Homo sapiens
  misc_feature 231: n = A,T,C or G
tgagtccctagatacagcacacctgaagtcagaccaccatgtaacagatcacccttcaagatccaccatggaatcagatcccccttcaagaaaggacctgctttccacctttgaggagtgtgcttggctgctagttggtagagacagcctccagctattagcttcatgggccaccagcctttagattgaggtcacactcttctgaggctgccccagccatgactgagcaanggctctgataaccaaggtcagattctttttgagggtccaagaaacaaggcctagtccagagatcctcaagctttctcagttcatggcactcttagtgtcagtaattttttcatggcaccccagaagtcaaaagaaatgcctatagttcccttttttaaatagttaggtccaaacgagtaaacagtagtagtttgtgcagtgcctgacatacgttaccgtgtttccctggaaaattaaaaataccctgcagtgcccctgagtgttttccctggcaccctggagagtcaggcrgcgcagttcaggaatcacggtcctagccattcccacccaatgcagagctccttcagagccccatgtggtgctagcagagactgtgggatctgttttgcagactggtg

SEQ ID NO: 908207 - DNA, 517 bp, Homo sapiens
acttagtaaaaacttcatcaaggttggaaaggaagaaagcaattttatggtaactgtcggctaattagtgaactaaagcctaaattggaacacacacacatacacttaaaagactttgggcttcggagaaagaaaatccattgtaataagaagtcaagcagtctcttcagttgacaccaagaattcttctcagtttttcatgtgggaatgcaatcctgtcacatcatattatccaagtagttagtaaaaacaaattcctctggaattgcttattatttcagtgatccaaataaacgccagtcacctcaacctgtgcttggtgactcccagggatgactgggccaggctgtgtggtcccagccgagctggtcagttcagtaactggctttcatgaaaatggcctgggccttccttctccaacatgatggaaataatttctggaaaggccaacatttagataaaccctgatggtttgcacctttttrtaactttccagatctgacccataagttccagc

SEQ ID NO: 908208 - DNA, 534 bp, Homo sapiens
caaaaagctattccagttgctggaggaataacagctaatgtrcatagcatggttcaaaattgacacggcattttcacatagattctaacagggtctctgcacaccattttatagatggggacacagatgctcagaggggagaagagagctgcccaaggtcacggacagagcaaggaggggacagagctggagaatgattccaaatccgagcccttcatggacagcacacaggcccccccttcatagccccttcctctctcctaacaagaaaggcagcatatggtccatgcagatgaaagaagaaagcaaaatggaaacagtgtgcagagaaggggccaggatcaagccagcatctccatctgggccgcgtgacaaaaccgaatcccttaaaagtagcaaactgaattgccaatgtgggccacatgttctattctggtctacagtgataaatataattcttggttaatagagaactatttttctcctcactatacaaagggcttacagtagcaacccccagaagccagaaaaaaa

SEQ ID NO: 908209 - DNA, 613 bp, Homo sapiens
attttaacgtttttctttaaaaactaagacacagcacacacattagtctaggctacatagggtcaagatcatcaatatcactgttttccacctccccatcttgtcctactggcaggtcttcaagracagtatcatacatggaattgtcatcttctgtaacaatgccttcttctgaaataccctttgaaggatctgctcaagactgttttacagttaactttgtttaaataaataagtggcaggaggacactctaaaataataatgaaatatatagtatagtaaataagtaaattggtaacatagtcatttaggcaatagtaatttttcagctccattaaaatcttatggtaccaccattttatatgttgttcagtgttgactgaaacatgcagcacattactgtatgttattttattaatagtagtattggtgaatggaggcgctctgtggtgattttattaagaaaaattgtgttttctctggaaaacagttgcctttaatctgggaaattcctaggtggggaacaatcatgtttacaagacttggaaagggagaagaaaacagatcagcaaataattttaatcaaagccttggtggaaaggttcctacatg

SEQ ID NO: 908210 - DNA, 618 bp, Homo sapiens
aaaagaaggcatatatgtggccaacaaacataagaaaaaagctcaacatcactaatcattagagaaatgtaaatgaaagcgacaatgagataccatctcacatcagtcagaatggctactattaagaagttaagaaataacagatgctggtgaggttgtggagaaataggaacacttttataccattggtggaaatgtaagtaaattagtttgaccattgtggaagacagtgtggtgattcctcaaagatttattaccagaaatatcatttgacccagcaatcccattactgggtatatatccaaaggaatataaatcattctgttataaagatatacacacatgtgtgttcattgcagcacaattcacaatggcaaagacatggaatcaacccaaatgcccattaacaatagactggatttaaaaatatggcacatgtacactatggaatactatgcagccataaaaagaaatgagatcatgtcctttgcaggtacatggattaagctggaagccattatcctcagcmtcctaacacagggttagaaaaccaaacaccacatgttctcatgtataagtgggagctaaacaatgagaacaactggacacagaaagggg

SEQ ID NO: 908211 - DNA, 566 bp, Homo sapiens
tatcttaaagaaggcatacaataaatatttaataaamattaaattaaaaaaactggtaggtaaccatggatcatctctagagatgatcatcgtatcagacctacatagtatgttagagcttggggtctggagtccgacggcccgaatcttcctcacagtccagctttcagtgaacctcacagtgcctcagtatccttaattgaaaaacaggaataataatagtaccttccctataagggctttagagaagtgagtgggttctgcctagtatctgacacaacaagtagtccataaaggttagctctttttaatccatcccacaggaagctctgatgtgctatgctgggtagaaaagtatatcttacaaaaatatccctgttttgctctctgaaaccctgttgaaaccttttgacattcagctacatgttaagccctgggcaaccttggagttcttccgccatctgtgtaactgtgaatcttaacgtgctaagtatacaacatacacacatcacctctcatttaataaagcaaattgttccacacaagggtagcagagctctcgtttg

SEQ ID NO: 908212 - DNA, 596 bp, Homo sapiens
attagcaaattgcctgctacatagcagatgctcaatgaatgttactgtgttattaatttatayattgtttatgctttctcagtaggagaaccaggatttaaactcaggtctttctaacttgagtcccccctattaattcctatgatgtatatgctggcttgattttatgtaatttcgcaaagaagattttgtggattattatgtagccctcaaacagcctaagtttttaaaaatatttaggaattaagtatctacaaaaatggtcacaagatttttagtaacaaaatgcattctgcaaaagtttatacactatgaatcacaattttattttaaaaaatatttagagtaagaccagatttttaaaaataaaaatggtaaaaacattattgttagatcatggaattgtgggtgattttcaaaaaataatctttaataaagcttttatgattgttcactcaaaaggtgaaaagcctgctgaagttccgggtttccttcttggcccattacttaggaattactcatttccccatttttggaaaaaaaaaaaaatacttgtgtgtaggacccatttcctaccaggaattgatttaaaaaaa

SEQ ID NO: 908213 - DNA, 613 bp, Homo sapiens
  misc_feature 287: n = A,T,C or G
acatttcaatacactgataaagactatagtatgatatacatgataaaatacttgcagccataaaaaaagaacaaggtctcatgtcctttgcaaggacatggatgcagctggaggccattatccttagcaaactaacacatgaacagaaaaccaaataccacatgttctcacttgaaagtgggagctaaatgatgacagcacatggacccatggaagggaacaacacacactgaggcctttcagagggtgcagggtgggaggagggagaggatcaggaaaaataactnatgagtgctagacttaatacctggatgatgaaataatctgcacaataaaacccacagcacaaatttacctatgtgataaagttgcacatataaacttgaatttaaaaaaaaagttaaaaaactttaaaaatattctcaactatttgtttaagaaaataaagttcttaaaagaaagactcttttaagacaatatgagaaaatatggccatttttgtctaattgacaacatataaaatatttaatattgttatcattgcatatgatatttggaacttattgatrtaaagtatttaacaggtttcaaagtttttctcgtatttgtagtt

SEQ ID NO: 908214 - DNA, 621 bp, Homo sapiens
  misc_feature 446: n = A,T,C or G
cacacaccattggttgtttctctggagaactttgactaataaagcatcataaggtaacataaagatcttcactctttttgcttacccccctcatttatgcacacgccttttctgtagacctctctgtctcagtcttctaagctgtctgcttctaggcccctgataaacaaagcaagtctttccccactgccaatgagttcatatatgttgtcatctatggaaactattcttgccacacaatatgaatgaccaagtatatcacctgaagctctgcccacatgaaaattcctcttcaccaatgtcattcatgaccacttcttcagaaatgaagtctactaaacatgttgcttatttctttatggggggagttgtgagatactgtaatttgggtttctttatgtttgaggaacatttcagaacacccccaggtcattggaccccccaancaatgcacttatcgatacgttgagtcccagaaacattatagagtatatttctcacactcttgagtgtatgagctttaasaaggcccaccttatacagtagaattagcgcatttttaatttgcaaccacaagccaatgtactcataatctttttcttggcctttgccttcaatata

SEQ ID NO: 908215 - DNA, 636 bp, Homo sapiens
ggccctcagtgatggttggagagtcaaggtaaatctcacgcccatgtttcctactgcatgcaggtcacacatcattcagtgcacatgaactcatttcttatggctaattttatacatcaacttgactgggacacaaaatgtgcccttttttatctggcctgactgattgagccaaacatctcatttcatcctctcctgtcctcatgccacaggattctttaggtgccacttcaccagctggaaacctctatggccagtggtgcctctgcttgagtttcactggtgcatgctgggcttgcttcacctactcagcccaggaggctgcactcagcttgcactaccggcctggatcccatgcccatcaatggcaagctaggtacagtgggcgaagagtgtgtgaatgagcaagtgtgaggttcggccacagtgcacagccctgcactccagctgctgtggcggtgtgggcagctccaggcagtggtgcacacacaagctccatgtgaggctcttgctggatcaggcacacctcaagcrtcttctgctgtgggcaccagcatctggacaaggggaaggtggtggtgcccaaaaactcaaagatgctagcaaccttgaagccccaagggagttttacagcat

SEQ ID NO: 908216 - DNA, 656 bp, Homo sapiens
ttctcccaggccactttgacttgaagacccmtcattggttttgctgaaactttctttattagtagtagcagtagtatactttaagttctgggatgcatgtacacaatatgcaggtttgttacataggtatacatgtgccatggtggtttgctgcatccatcaactcatctgcattaggtatttctcctaatgctatcccttccctagaccccacccctcaacaggccccagtgtatgatgttcccctccctgtgtccatgttttctcattattcaactcccacttatgagtgagaacatgcggtgtttggtttcctgttcctgtgttagtttgctgagaatgatggtttccagcttcatccatgtccctgcaaaggacatgaactcatctttctttttttggctgcatagtattccatggtgtatctgtgccacattttcattttctttatctggtctattattgatgggcatttgggttggttccaagtctttgctatcgtgaacagtgctgcaataaacatatgtgtgcacctgtctttatagcagaatgatttataatctcttgggtatatattcagtaatgagattgctgggtcaaatggtatttctggttgtagatccttgaggaatcgctacactgtcttccacgatggc

SEQ ID NO: 908217 - DNA, 656 bp, Homo sapiens
ttctcccaggccactttgacttgaagacccctcattggttttgctgaaactttctttattagtagtagyagtagtatactttaagttctgggatgcatgtacacaatatgcaggtttgttacataggtatacatgtgccatggtggtttgctgcatccatcaactcatctgcattaggtatttctcctaatgctatcccttccctagaccccacccctcaacaggccccagtgtatgatgttcccctccctgtgtccatgttttctcattattcaactcccacttatgagtgagaacatgcggtgtttggtttcctgttcctgtgttagtttgctgagaatgatggtttccagcttcatccatgtccctgcaaaggacatgaactcatctttctttttttggctgcatagtattccatggtgtatctgtgccacattttcattttctttatctggtctattattgatgggcatttgggttggttccaagtctttgctatcgtgaacagtgctgcaataaacatatgtgtgcacctgtctttatagcagaatgatttataatctcttgggtatatattcagtaatgagattgctgggtcaaatggtatttctggttgtagatccttgaggaatcgctacactgtcttccacgatggc

SEQ ID NO: 908218 - DNA, 626 bp, Homo sapiens
ggctctctgcaaactccgcctcccgggttccagccattctcctgcctcagcctcccgagtagctgggaccacaggcggccaccaccatgcccggctaatttttgtatttttagtagagacagagtttcactgtgttggccaggatggtctcgatctcttgacctcgtcatctgcccacctcggcctcccaatctgctgggattacaagtgtgagccaccgtgcccagccaagttactgtttttttaatacagctgagtttataatttcatctgtggccggggatctagacagccatagggtacccctcagccagacaaaactttagacagatttcttcctgactctactcccttttcttagagcatttactttagaaaacttgtaattttaaatcctttctctaatcctctgagatgtaatttatttaaagcttttgctagttttacaacctagggatgtctttcttgaaaatttgggggccatttttttttaaatgcaatcaagagtggtttcccatgtcccagtctcagtgagcaccttkttccaagttatcaagccaattagcaaacaccatgaccctctttaccctggttgttaaaaacctgctgcctgttgtttcaacaga

SEQ ID NO: 908219 - DNA, 593 bp, Homo sapiens
ttattatggttttaggttttayatttaagtctctaatccatcatgagctaatttttgtataaggtgtaaggaagggtccagtttctgttttctgcatatggctagccagttttcccagcaccatttattaaatagggaatctttctctgttgcttgtttttgtcaggtttgttaaagatcagatggttgcagatgtgtgctattatttctgaggcctctgttcggttccattggtttagatagatagatagatacatatatagatacatagatagatagatatcttttttggtactaatatcatgttgttttggttactgtagcctcgtagtataatttgaagtcaggtagcatgatgcctccagctttgttcttcttgcttagtattgccttgcctataagagctcttttttagttccatatgatacttaatgtagtttctttctagttctatgaagaaagtcaatggtagcttgatgggaataccattgaatccataaataactttggccagtatgaccatttttacaatatttgattcttcctatccattagcatagaatgtttttccatttgtttgtgtcctctcttat

SEQ ID NO: 908220 - DNA, 593 bp, Homo sapiens
ttattatggttttaggttttatatttaagtctctaatccatcatgagctaatttttgtatwaggtgtaaggaagggtccagtttctgttttctgcatatggctagccagttttcccagcaccatttattaaatagggaatctttctctgttgcttgtttttgtcaggtttgttaaagatcagatggttgcagatgtgtgctattatttctgaggcctctgttcggttccattggtttagatagatagatagatacatatatagatacatagatagatagatatcttttttggtactaatatcatgttgttttggttactgtagcctcgtagtataatttgaagtcaggtagcatgatgcctccagctttgttcttcttgcttagtattgccttgcctataagagctcttttttagttccatatgatacttaatgtagtttctttctagttctatgaagaaagtcaatggtagcttgatgggaataccattgaatccataaataactttggccagtatgaccatttttacaatatttgattcttcctatccattagcatagaatgtttttccatttgtttgtgtcctctcttat

SEQ ID NO: 908221 - DNA, 593 bp, Homo sapiens
ttattatggttttaggttttatatttaagtctctaatccatcatgagctaatttttgtataaggtgtaaggaagggtccagtttctgttttctgcatatggctagccagttttcccagcmccatttattaaatagggaatctttctctgttgcttgtttttgtcaggtttgttaaagatcagatggttgcagatgtgtgctattatttctgaggcctctgttcggttccattggtttagatagatagatagatacatatatagatacatagatagatagatatcttttttggtactaatatcatgttgttttggttactgtagcctcgtagtataatttgaagtcaggtagcatgatgcctccagctttgttcttcttgcttagtattgccttgcctataagagctcttttttagttccatatgatacttaatgtagtttctttctagttctatgaagaaagtcaatggtagcttgatgggaataccattgaatccataaataactttggccagtatgaccatttttacaatatttgattcttcctatccattagcatagaatgtttttccatttgtttgtgtcctctcttat

SEQ ID NO: 908222 - DNA, 621 bp, Homo sapiens
cttcttcctcatttgcctgaaagaaaattgttgccttagacttttcttttctttctccccgtactgccccctaacggctttcctttgggctagaccccagaaatgccaatgatccagcttcagtgatgcaaatgaagacctcagggatcaacagagcaatgagagaaggaacctaggtccctgaatgactctggagcagagatgccccagacatcttaccatgccccttacctcgaatggtaagaaatttacatatatgagaaataaacttctatttaagttactatatatttggaacactttgttacaacaacttagcccatactgtaacctacatttttcctctacctcttcccaaatttattattctgcctagtgcttaacatcatctaacacaaaaaatgttttccttcttttcttctcatctgtcttccttaattagaatagttcctgaaaggcaggggtttttcagttagcaataatcacctcagataaacttcactggctataatactgctactgcacaaagctgaaggcaagkgtttttgtctttgttcactgttgcattcccagcatctagaagagtgtccagttcatagtaagtgctcaacaaatatatag

SEQ ID NO: 908223 - DNA, 577 bp, Homo sapiens
tttttctgtaagtcttatataagtatttttcagggraaatcattaatgtagcatttatatctttagactttcatatcatgaggtaggaatcagtgtcttagagtcaacctggagtcccactgggtagagtgtgagacacttggaagatgcgataggcaggatcaacccctcacttctaggaataccttcttcactggcctccacttggagagataggtcagggcctagatggtggccatttaagacagaataaacattatataatctaagggaaatcacacattgataagctcatatgttaccatgggctaggatattggattgattgacctggtcttaccttttaccagttacaggggcaggccttgaaggatggcatggagcactgggaggtgcattggtggcaatcatgaaccgggcttgctgttttggaccttggagctctgcaggcaaggactctggtgactgtgccaggtgactgggcaccagaattatgttgttgccatgtcttctctaggtgcagggttccataggaggtttcattttggaaacagtgtgtaactacttagagggggtt

SEQ ID NO: 908224 - DNA, 372 bp, Homo sapiens
attattccagaaatacttccttgtatgtcctacattatcaattttgccctctctgtggatgatttccattggcatgcaaacatgctgttattttttctcttcttatagaacattaaacacarcgatcttgactctacttcctctacaattacttgccttttctccattcctttttttgagtgaagcttcttgaaattgttgcctgtgcttactgcattcaacccctctactttgttctctcagaaatcccttttggtcaagctttctccttatcacttcacccaaaggactcttgtgaggtcatcagggctagccactttactaaatccaatggctgtttatcaggtcccattttatgtcaactttcagcag

SEQ ID NO: 908225 - DNA, 606 bp, Homo sapiens
gtaagtgaatgagacacaaaaagccacttaacaattaaaaaagattagacattttgactatcacaaaattaagaactttttacatcaaaattggaaagatagtctgggcatggtgtctcaaacctgtaatcccaacagtagatcacctgaggtcaggagtttgaaaccaggctggccaacatggtggaacctcatctctactaaaaatacaagaaattagccaggcattagtggcagacacctgtaatctcagctacttgggaagctgaggcacaagaatcgtctgaacccgggaggtggaggttgcagtgagccactgcactccagcctgaataacagagtaagactctgtctcaaaaaaaaaaaaaaatagaaattaaaaaataaaagtaaaaaagtgaaaagataaactataaattagaagaagttatttgcagtacctaaaacctacaaaaggttaatatcatatcaactaagtgctcatatgaattatttttgaataaggagctcctatgaattaattttaaaaatagcaaaccaacagaaaattggsaaaaggcattaatagggatttcacaaaagagaaagcccacaaaatataaaaat

SEQ ID NO: 908226 - DNA, 484 bp, Homo sapiens
atgccttcccaacagtcccccaaagtcttaactcatttcagcattaacccaaatgtctgctgtccaaagtctcatctgaaacaaggcaagtctcttctgcttatgaccctgtaaaatccaaatcaagctagttacttcctagatacaatgggggtacagatagttgagaaaatacagctgttccaaatgggagtaattgtccaaaacaaaggggttacaggccctgtgcaagcccaaaatccagcaaggtagttaaattttaaagctccaaaatgatctcctttgactccatgtttcacatcaaggtcatgctgatgcaagaggtgggctcccacagccttgggtagttctgcccctgtggctttgcagggtataacccacctcctggctgttttcatgggctgatgtcgagtgtccgcagctttcccaggcycatggtgcaagttgtcagtgaatctacaattctggggtctggaggagtgtg

SEQ ID NO: 908227 - DNA, 639 bp, Homo sapiens
tcaacctgtcatctaggttttaagccycacatgcattaggcatttgtcctaatgctctccatccctttgttcttcaccccctgacaggccccagtgtgtgatattaccctccctgtgtccgtgtgttctcattgatcaactcccacttacgagtaagaacatgtggtgtttggttttctattcctgtgttagtttgctgaggatgatggtttcccacttcatccaagtccctgcaaaggacatgaactcagtttttcatggctgcatagtattccatggtgtatgtgtgccacattttctttatccagtctatcattgatgggcattttgttggttccaagtctttgctattgtaaatagtgcttcagtaaacatacatgtgtacgtgtctttatagtagaatgatttataatcctttggtatatacccagtaatgtgattgttggatcaaatggtatttctgcttctggatccttgaggaattgcaacactgtctctcacaatagttgaactaatttacactcccaccaacagtgtaaaggcattcctatttctcctcatccttgccagcatctgttgtttccagactttttaatgattgtcattttaactggtgtgagatggtatctcactgtggat

SEQ ID NO: 908228 - DNA, 639 bp, Homo sapiens
tcaacctgtcatctaggttttaagccccacatgcattaggcatttgtcctaatgctctccatccctttgttcttcaccccctgacaggccccagtgtgtgatattaccytccctgtgtccgtgtgttctcattgatcaactcccacttacgagtaagaacatgtggtgtttggttttctattcctgtgttagtttgctgaggatgatggtttcccacttcatccaagtccctgcaaaggacatgaactcagtttttcatggctgcatagtattccatggtgtatgtgtgccacattttctttatccagtctatcattgatgggcattttgttggttccaagtctttgctattgtaaatagtgcttcagtaaacatacatgtgtacgtgtctttatagtagaatgatttataatcctttggtatatacccagtaatgtgattgttggatcaaatggtatttctgcttctggatccttgaggaattgcaacactgtctctcacaatagttgaactaatttacactcccaccaacagtgtaaaggcattcctatttctcctcatccttgccagcatctgttgtttccagactttttaatgattgtcattttaactggtgtgagatggtatctcactgtggat

SEQ ID NO: 908229 - DNA, 540 bp, Homo sapiens
tgctcttgcaaaaccaaaccacaagacagacttgcaaaagaaggcatgcacagctcagcactgctctgttgcctggtcctcctgactggggtgagggccagcccaggccagggcacccagtctgagaacagctgcacccacttcccaggcaacctgcctaacatgcttcgagatctccgagatgccttcagcagagtgaagactttctttgtgagtatgattccttcctgtcctttctctcttcctgggactgcctgaactagacattctcctggaactataagaaccctcctcctgcgcctccacctccatccccaacacctattcccccaaacttaaattcttaagagaatcctagatcaagccatgggtttggtgagttaagctaagccagatgatacagtaaatgtgcaggaaacctgccttataaagtaaatgcgttctytctcgtgctgagaaacttataagatcctgctggcgctctatactttattggctaggagaagtaaagaaatgtctgattcgaggtgaagatgctcc

SEQ ID NO: 908230 - DNA, 562 bp, Homo sapiens
gaatagcatgttgcatttatccccctacccagtcattgcttcagaggttttcttgctcttgaaatgaagcagtgagataatgttaacatgagtsccttcctgatcagacctttcctgcactactgtgctaatttctagaagtagatatttagaaatggcttccccttggtgaaaacaagaaatgatcaagtttgtcagtagagacaaatcaagtacttagtgttctcagagcaatatcttgctaaatctaccacttaccgagtggcttggctctacagagataatctggagagtcagtaatctgtgggagggcaaggaacaaggtgtcattcagtttgggggcaactgagtctgtggggtaggatgtggagattcctaaactggagatcaacaaagcaccgcattgaggagaggactctcaggtgtagtacatatctgctttctcctgcccagttgccttcccaagtctcccaataacagacccctccaagccccagaagccagggacaggtccaggtgtgctctcatgagggtgaatcagagtcctttgggggaatttctc

SEQ ID NO: 908231 - DNA, 633 bp, Homo sapiens
aggttgttatgcttgtacttccttcatcaatacatgcattttttttttttttttttttttttttttgagacagagtcttgctctgtcacccaggctggagtgcagtggcgcaatctcggctcactgcaagctcttcctcccgggttcacgccattctcctgcctcagcctcctgagtagctgggactacaggcgcctgccacggcgcctggctaattttttgtatttttagtagagacggagttacactgtggtcgcgatctcctgacctcgtgatccgcccgcctcggcctcccaaagtgctgggattacaggcgtgagccaccacgtccggccaatacatgcattttctaagttggcataagaaggaaataagctaaccataatcataaaataatagagcataaatgttttaagtgtatatttctataattgttaaaatttttgattggccttttacaaatagcatctcagttaataatatttgagttaatctcacctaaaatataaagggaaggtttataatcacataagagacacgtgaacacaaaaaatrtactactcagtttagctattgacatcaaatttaaaatgaaaattcttcaatgtgtctttacaaatcgatgccattata

SEQ ID NO: 908232 - DNA, 608 bp, Homo sapiens
ccagctgtgtagaactgtgagtccattaaatctttttactttataaattacccagtytagggtatgtctttattatcaatgtgagaacagactaatgcactttatatcatttagttctgctctgattttattatttctttccttctactagttttggttttggtttgttttgtttttgcatttcttgttcttgagatacattgtcagattttttatttgaaatctctttgcttttttgatggggttgtttattcctataaactttcctcttaacactgctttcactgtatcctgtaagtttcagtgtgctgtgttttgattttcatttgtttaaaaaaatttcatttctgttttaatttctttattgattcaatgttcactcaggaacatattgtttaatttccatgtatttttacagtttgcaaagttcttctcagtattgatttctagttttattccattgctgttcaagaaaatacttgatatgattttgattttttaaaaatttgttgagatttgttttgtagcctaaggtatggtctatcctggaggatatttcatctgcagatgagaagaaggtatattctgcagttattggatgaaatgtt

SEQ ID NO: 908233 - DNA, 585 bp, Homo sapiens
ttctgaaatgttgatttccattatcttgttttctaaacatgatatcttacctttaaaacttacttatgattttatccaaactccaacatattctcagccgtatagtggcatgaggctgagtgatccaactgcttttcactgctaacatcttctttgtgttatttctcatctaatctaacttagattcaatagtctgatgccagtgctgcttttcacagagtctgaacaccttcgaatgacatatatgaccaaaatcaagtctagtaaaactgactaatctaacctcatacaaacttaactgttgaatgagattactatatattttatatagctaatatatattatataatatataaggtgcattatatatattaccatatattatatatttatatatagtaatatataaatatgttaaatgtatatgtaaatttaagtttatatatataaataaataaaatctgtcaatctgaacttactttaagataacaaattttaagtgtkccttagcactgcccaataatgtctcaatattttcctagttatttccatttgcaatgacctgagatgattattttatataca

SEQ ID NO: 908234 - DNA, 596 bp, Homo sapiens
gctaggaatatatatattcgtgtgtgtgtatatatatctacatatatatacatatacacataagactttttaaaaataaattttgaatagattaccaccattgtttatattaatcactgaagcaattattcttcatacatgagataagtagtataatatggttatatttatttgttcaattttttatgatttaataatttcttattttctctttgtgttcttcctgtggaatctaagtaagcaacttctccattttcacatggatgcaaggaatgaattagacatttgatctaattttcatactgcaaatataatgttcatcccactctgcaacatgctaaagtttgtggaatcatctgtgtggaagcacataaaacaaatgacagttttagcctcattcagcaaataaaacaaatgacaattttagcctcattctgttacagcctgaagacatgatagtagtgtaagggaaaaaagtaaagattaatatccctagagcagtttttttctcataaactccaaggccaaagttttatttgtctgttgatagtctaaaarctatgaatatattcaattattcatactttttataatta

SEQ ID NO: 908235 - DNA, 645 bp, Homo sapiens
aagctgtaaaaactgatccctgcaagattttagcatctttttacagcttccagtcaaaccatgaactccagcatcaccaactccagcctgataattacatgtactgaaagagatatccattgaaagactccctcgaccccccctttaaagggactttcatcaggtgctattaattaatccttgtactgttaagttaaagggttttgattcctgggtgcacatatctcatctgaaaaaggcaccaactcctactaattcttaaaatattgatactattatctgacaccatactcaggttaacaaaagccttgtcttcagacccagaagaaaggtagcatgaaaatgatctgcttttgtgagacataagactagaaattaaaactattcaatctctctaggctcagtgactactgcaggagagatgggcatgtgagattgtaagggcctgttttgagggatacaattagttcagatgctccaaatcaaggatggcacagagttacctaaacagccaacaagttgaggaattttgccactctgaattccttaactcaaaarggtttaaccaaatgcttatgtttcgtattgctaaatggctacaagtcagtatctaagaccagaattcatttctataaccttactttt

SEQ ID NO: 908236 - DNA, 640 bp, Homo sapiens
actaaatgtggaaaggagaagccagtaacagtcactgaaaaaacacaaaaatataaagaccaatgacactatgaagaaattgcatcaatgctggcatcataatgacaggatcaaattcacacataatgatactacccttaggtgtaaatgggctaaatgtcccaattaaaagacacagactggcaaaatggataaagagtcaagatccatcagtgtgctgtatttgggagacccatctcacatgcaaagacacacataggctcaaaacaaagggatggaggaaaactgaccaagcaaaggaaatggaaagcaaaaacaaaacaaaacaaaacaacaaacaaacaaaaaaagcaggatgtgcaatcctagtctctgataaaacagattttaacccaacaaagatcaaaaaagccaatgaagggcattacataatggtaatgggatcaattcaatgagaagagctaactattctaaatatatatgcgcccaatacaggagcacccagattcataaaacaatttcttagwgacctacaaagagacttagattcccacacaataatagtgggagactttaccaccccactgtcaatattagacagatcaacaagacagaaaattaacaagtagagtcaagattt

SEQ ID NO: 908237 - DNA, 608 bp, Homo sapiens
ttattttctcacattttggtagaagttgccttttttgtgatgaacaaaatwtatattttctagataaattgtgatgacatctttattaagtctagaaaagttcatgaagattgaaataccaatgaaaataattactgatatttcatatgtacataacttaaaatgtaaatgacaatatagtatttatttgattgctaaaattatgtttgaattaaaaaattatgcttaattaaagtgatacatttttatcaacaggtccttatttaggggcaaatatatttccagtgcttcatgggagcctaatgtatgctgtcataacttgattgtgaataaaattatgtggcatttgattcaggaaaggcaaagtgaattagccaaaataatttgaaaaactagtgaggggaaaatgtaacacttgaaccaaggaaggcttattaatgcacttttggtgtgaaagttgaagactctatgagctgagtctatatatttgaacccagcaactaactgttataaagattctatcctatttttgctgctacaatattaaccacaacgtggagaatgtttatagcatgtcctgtgcacacttgtctcttatcactcaatca

SEQ ID NO: 908238 - DNA, 609 bp, Homo sapiens
acaaaagacttgaagttgatgagtaagtcaggtaaatactagaggagagaacatttaagatagacagcctaggaattaacacgtcctgaaggtttgggcaggcttggtttgatttaaaagattggggaggcccatgtgatcaggatcagagacccagtggaagatgacactcagatttgagttggaagctgtttcctgatcatccctgtcatccatttttatagccattcattcttctttgagtgagataagaaatctatgaatgatttttgagcaaaaggaaaacataatatgacttagaaatgaatgaatttgaaaccctgaatgctatttcaggtaataaaataggatgaaaatttaatccaaggtagagcaatggatgtggtgataagtgataaaattctgggtacatcctaaaagtaaaaaatcatgcaggcagaagagatacagattgcgaaagaaagggagatgtcaaaggtaactcaaagggaacttgacgggaaaactaacaggatgtattagccgtcaattgagatggaaaagtggaacagattagatgyggtggagaaagattagaaattcactttcaaacatccaagttaatttata

SEQ ID NO: 908239 - DNA, 634 bp, Homo sapiens
aatttcatgtgctaatcattatataatgtatacatatatcaaatcatcacatgtacaccttaaatatatacagttcttattataaaaccaattatttttaaagaacattagaaaatatgtaaacataaaatgcaaagatgacaatattgccataagataaaaaagtaatttttaaaaaggcaatattatattgagatatattccaaataaggaaattaatcaacatacactagaataaacatgtaagtcaaagaaaaattataaagaaaatttaaaaatattttgaagtgaatcataataaaatacatcatatcaaaattttagagatgcataaagaacatttatgctataacgaaaataagaacagaacactttgaaagaaaaatatttaagaaaattaacaaagacaaatatctgttttttgaaaatatacaatttgtaaaaatcttagtaagagttatcaaacaaaaataaaccaaggatttgagagaactcacattttccccatttttccactttgtgggcagccttggatatagacttgtgtgacaagatgtcattgaaggaatgccttgacaggacatttatttttctggygagagagaataggaaaagaagaacttgtggttaaaat

SEQ ID NO: 908240 - DNA, 556 bp, Homo sapiens
aaattcttaacaaaatactggtaaaccttatccaccacgaccaagtaggttttatctccaggatgmaaggttggttcagcatatgcaaatcaataaatgtgattcatgacataaagacaactaaagacaaaaaccacatgattatctcaatagataaggaaaatatttttgataaaattcaacatctcttcatgttaaaaactctcaataaactaggagttgagaataataagagccatatacaattgacacacagccaacataatactgaatggacaaaagctgaaagcattccccttgaaaactgacacaaaacaaggatgccatctctcacaactcctattcaaaatagtattggaagccctggctgcggcactcaagcaagagaaagaaataaaggacattcaaataggaagagcgggagtcaaactatcccaatttgcagatgacatgatcctatatctagaaaaccccatagtctccacccaaaagattctaaagttgataaacaatttcagcagtttcaggatacaaaattaatgtacaattaatgtac

SEQ ID NO: 908241 - DNA, 544 bp, Homo sapiens
ataataagagctatttatgacaaacgcacagccaatatcatacagaatgggcaaaacctggaagcattccctttgaaaactggcacaagacagggatgcctcctctcaccactcytttcaacatagtgttggaatttctggctagggcaatcaggcaagagaaagaaataaagagtatttaattaggaaaaaaggaagtcaaattgtccctgtttgcagatgacatgattgtatatttagaaaaccccatcatctcagcccaaaatcttccttaagctgataagcaacttcagcaaagtctcaggatccaaaatcaatgtgcaaaaatcacattcttaaacaccaatcccagacaaacagagagccaaatcatgagtgaactcccattcacaattgctacaaagagaataaaatacctaggaatccaactaacaagggatgtgaaggacctcttcaaggagaactacaaaccactgctcaatgaaataaaagaggacacaaacaaatggaagaatatttcatgctcatggataggaagaatcaa

SEQ ID NO: 908242 - DNA, 660 bp, Homo sapiens
agcatgacatgttaaaaaaaaaaaaaaaaaaaaaaaagaccgggcttggtggctcctgcctgtaatcccagcactttgggagsccgaggcaggttggtcacctgaggtcaggagttcaagaccagcctgacctacatggtgaaacctcatctctactaaaaatacaaaaattagctgggtgtggcggcaggagagcctgcaatccgagctactcaggaggctgaggtaggagaattgcttgaacccaggaggcggaggttgcagtgagctgagatggtgccactgtacttcagcctgggtgacaagagcgaaactccatctcaaaaataaataagaaaaataaataaataaatttcattcctctgcccactgccagtatccagtcccgctgatgaggctggggtgaggtggggggtaactttttagcacctgggcccttacgtccagcagggctgtgaacagggactttttgtgccagtaacagtagaaaatacggcaactggtgtttgccactatcaaagaggaacttggagttttgttgaaggagcaaaattgtaaccacccaaggggttcaccttgcctgctgcctcgacagagccgattgatcaagacaggggaattgcaatagaagaagagtaattcacgcagagccggctgtgc

SEQ ID NO: 908243 - DNA, 592 bp, Homo sapiens
aactctgccctttcattgctgttaggcaccacccagaccctaggctcagagggtccacgagattccagtgtgtctccacaccccgtggtcccctattctttagtgaagccttgcccctgctgagacccccaccccttgtcctctttcctgctctgtccctcgaggggttctgtctgcccgcctctgtggggcaagtccctctcccgcaccctccaccaagggcaagcatgatgctctctgcactgccctgatggacttgcttaccgctctgagcttcaaagttcccctctgtctgtggggctcctgatcacaccatctgcctggatgcctcgtccgcattcacccttcagactgcccccagggcctccatcccaggacatgcctcccctgcctcccagtgctgtccctcgtcccacacctgactcagtgtgtccccatcagcggtcatgaggcacggaggacttcccacacctgcccttctctgaattgtgaccacactccccagacacctcggctttctccctcaaattcatattctcttacttaggttgagccaaatgcccttggggwacctgcagggtttgtctgaccc

SEQ ID NO: 908244 - DNA, 569 bp, Homo sapiens
ctttcttatatatccccttctgtcgtttttcttcatggaatttrtaactccttaaagctaccctattcattgtctgtttgtcagtgtattttatttgtcctattctatggcatataagcttcatgagagcagtgtttcattgaccactacatctcccaccatctagtttctacctaaaacagtgcttcataattttagtgctcagtaaacatttgtaaaatttagtagcaaactggttcaacacctagcactgataaagcaacaattttcttgaattattacagtctgagactggctgtatgtaatgttatgctatgtaaagaaaaattaagtgggaaatagtactaaattctgtctctcagttatttttgcccacaaaaatcccagaacccaggattctgtattctcttggtagcagtgtactgcattatggagagattagcttttgaacaccatcaataaacatcccacactcattcctttaacaaaactcaatggaaaaatttgaggccacaaaataagaaataaaaattcacagcataacctacaggggaaaatgtttaaggact

SEQ ID NO: 908245 - DNA, 610 bp, Homo sapiens
ggtaatgaatagatttctattttagatgaggccaaatttcttactacataaatgcaagcccagattgctactttgctttaaggaattcaagcaagttagaggaaagaactggatctcagggaaatacctcctggctccttgtccagaattttttttccctactgcccaaaattataactaggatgtgagatttactccatgtcagctgttacaggaaactatcctgaaaaatacacaatttataaggcaatgataggatgattcttgattttagacctgtcagacttaatttccatacaatgacctcatccgagtttgagtgggagctaataatcaggacaaatctattggtaaagagataagggtgatgagtggagaagtagaagataggtgggcttgggaactaaagaacaacacaggatttggggaaagattaaaaaaggggtagtacaggaaattagagaagatttagctttaaggaacctaagaggattttgagcaagtgtagttgaagatgacattagagttaagtaackggatggaagacttcagaatttaagaatagttcaacaagaagtttcttcatcttgtgtctttattcgtttaatgt

SEQ ID NO: 908246 - DNA, 591 bp, Homo sapiens
cattttctttatccagtctatcattgatggacatttgggttggttccaactctttgctattgtgaatagtgccgcaataaacatacgtatgcatgtgtctttatagtagcaagatttctaatcctttgggtakatacccagtaatgggatagctgggtcaagtggtatttctagttctagatccttaaggaattgtcacactgtcttccacaatggttgaactaatttacactcccaccaatggtgtaaaagcattcctatttctccacatcctctccagcatcacatgcagataatttttaactagcatgcatagccacactatggccactctatagaatttgagtctgaactctaaattttccatcatgtattcacatatttagagtcacagtcaatttaatgtgttacccaataaactgatgtaatcataagttttaatatgtataaagaccaggaattggggttttctggtgtaaataagaatctagtaactgtgacttcacaaatgctgtgaatgttttgaaacttaatgggtaagggagtacagtgtgaatatagtttactgtagaccttggctggatatgatgt

SEQ ID NO: 908247 - DNA, 394 bp, Homo sapiens
gcagagcttataaaacagttccatcacctagatgagcagtgcagagataagtcacaatgcccccacaggcagatccaagacaagagtccgtcaccagggtgatcagcgcaaawatatgtcacaacacccccttaggcagagcctagacaaaagccccatcacctggatgatcactgcagagttatgtcacaaagtacctttaggcagatcctagacaagagttacatcacttggatgatcagtgcagggatatgtcacaatgccactgtaggcagagcctagacaagagttacatgacctaggtgatcagtgcagagatacatcacaatgtccctgaaggcagagccttgacaagtggtacatcacctgggtgatcattgcagggatatgtcac

SEQ ID NO: 908248 - DNA, 266 bp, Homo sapiens
cattgactctgggccctgttgacccatgcaggctcccattgtggtgggttgtgtcaccccacaatgtcactgttgctragcccccatcgcctctgtgttgtggagcagttagagacacacagccgtgtctgtgagtggctctgcgtgaaggaccattttctaggtgagaggcacatctcaacacagctgactgatcagactcaggtgagtgggacctgctctcttctttttctcctggcttggggacagtcgctatcaggtgggtg

SEQ ID NO: 908249 - DNA, 266 bp, Homo sapiens
cattgactctgggccctgttgacccatgcaggctcccattgtggtgggttgtgtcaccccacaatgtcactgttgctaagcccccatcgcctctgtgttgtggagcagttagagacacacagccgtgtctgtgagtggctctgygtgaaggaccattttctaggtgagaggcacatctcaacacagctgactgatcagactcaggtgagtgggacctgctctcttctttttctcctggcttggggacagtcgctatcaggtgggtg

SEQ ID NO: 908250 - DNA, 266 bp, Homo sapiens
cattgactctgggccctgttgacccatgcaggctcccattgtggtgggttgtgtcaccccacaatgtcactgttgctaagcccccatcgcctctgtgttgtggagcagttagagacacacagccgtgtctgtgagtggctctgcgtgaaggaccrttttctaggtgagaggcacatctcaacacagctgactgatcagactcaggtgagtgggacctgctctcttctttttctcctggcttggggacagtcgctatcaggtgggtg

SEQ ID NO: 908251 - DNA, 646 bp, Homo sapiens
acatgtatcaatacttaattttaaatgtaaatgagctaagtgcccaacttaaaaggcacagagtggcaagctgaataaagaagaaagatttaatggtatactgtgttatagacccatctcacatgcaatgacacccatagactcaaaataaacaatggagaaaaatttaccaagcaaatggaaaacagaaaaaaaaaacaggggttgcaatcctaatttcacacaaaacagactttaaaccaacaaaaatcagaaaagataaagaagggcattatataatgataaagggttaaattcaacaagaagacctaactatcctaaatatatatgcacccaccacaggagcacccagatttgtaaagcaaatacttagagacctacaaagagatttagattcccatgcaataatagtggaagacttcaacaccccactgacagtattagacagattattgaggcagaaaattaacaaacatatttaggacctgaactcaataagtgagcaaataggcttaatagacatctacagaactgtacagtacagtaaattacaatacagtaaattaaaaaaattgaaatcataccaaccacasttttggaccacattgcaataaacatagaaatcaatactaagaaaatcactcaa

SEQ ID NO: 908252 - DNA, 620 bp, Homo sapiens
cttaaaacctagaagatggggttggcttccggttccaagatggccgaataggaacagctccagtctacagctcccagcatgagcaacacagaagatgggtaatttctgcatttccaactgaggcactgggttcatctcactgggacttgttgaacagtgggtgcagtccatggagtgtgagccaaagcagggcggggcatcacctcacccgggaagcacaaggggtcggggaattccctttcctaaccaagggaagccatgacagatggtacctggaaaattgggccactcccaccctaatactgtgcttttccaatggtcttagcaaacggcacaccaggagattatatctcgcacttggcttggagggttccacgcccacagagccttgctcactgctagcacagcagtccgagatcgaactgcaaggcagcagcaaggctgggggaggggcatctgccattgctgaggcttgactaggtaaacaaagcagcygggaagcttgaactgggtggagcccactgcagctcaaggaggcctgcttgcctctgtagactccacatctgggggcaggtcatagctaaacaaaaggtagcagaaacttctgcagacttaaacgt

SEQ ID NO: 908253 - DNA, 620 bp, Homo sapiens
cttaaaacctagaagatggggttggcttccggttccaagatggccgaataggaacagctccagtctacagctcccagcatgagcaacacagaagatgggtaatttctgcatttccaactgaggcactgggttcatctcactgggacttgttgaacagtgggtgcagtccatggagtgtgagccaaagcagggcggggcatcacctcacccgggaagcacaaggggtcggggaattccctttcctaaccaagggaagccatgacagatggtacctggaaaattgggccactcccaccctaatactgtgcttttccaatggtcttagcaaacggcacaccaggagattatatctcgcacttggcttggagggttccacgcccacagagccttgctcactgctagcacagcagtccgagatcgaactgcaaggcagcagcaaggctgggggaggggcatctgccattgctgaggcttgactaggtaaacaaagcagccgggaagcttgaactgggtggagcccacygcagctcaaggaggcctgcttgcctctgtagactccacatctgggggcaggtcatagctaaacaaaaggtagcagaaacttctgcagacttaaacgt

SEQ ID NO: 908254 - DNA, 497 bp, Homo sapiens
ttttcaggagatctctgctagatattttctgcctacattatacatattaaagcaaattaatagttttattccacattcttccattatatccagcttccccataacaatgactgctgycatctaagttatttcgcaaagacaacagactattcttgactggcaggtttatgttttgctaggtttttttttttttttttttgtcaaatcctgatttattttaaaactttaaatattttaaaactttaaatttgtcatcataaaatcataaaaatctccagagtttttgttcatttatcatttagtttttatatttatttatttatttatttatttattatttattttttttgagatggagtcttgctctgttgcccaggctggagtgcagtgtcataatctcggctcactgcaaccaccactttccaggttcaagtgattctcctgcctcagcctcccaagtagctgggattataggtgcttgccaccatgcctagcta

SEQ ID NO: 908255 - DNA, 497 bp, Homo sapiens
ttttcaggagatctctgctagatattttctgcctacattatacatattaaagcaaattaatagttttattccacattcttccattatatccagcttccccataacaatgactgctgtcatctaagttatttcscaaagacaacagactattcttgactggcaggtttatgttttgctaggtttttttttttttttttttgtcaaatcctgatttattttaaaactttaaatattttaaaactttaaatttgtcatcataaaatcataaaaatctccagagtttttgttcatttatcatttagtttttatatttatttatttatttatttatttattatttattttttttgagatggagtcttgctctgttgcccaggctggagtgcagtgtcataatctcggctcactgcaaccaccactttccaggttcaagtgattctcctgcctcagcctcccaagtagctgggattataggtgcttgccaccatgcctagcta

SEQ ID NO: 908256 - DNA, 547 bp, Homo sapiens
atatccaagggtgatgttactcctaatgtcacaaagaatgtacctcctgtaatattatttataatatcctaaggtgatattacttataatgtyacaggtggtgtacacatggtaatattatttgttattttctagaagtttgttacttttaatgtcacagggggtgtacacactgtgatattattcataatatcctaggtagttattacttctaatatcacagtgggtgtacaccctgtgatatttttcataatattctagggagatattacttctaatatcagtgggtgtacacacatggtgtacactgtgatgatattcatagtatccaagggagaaattactcctaatatcacagttggtgtataccttgtgatattacttgtaatattctaggaagatattactcctaatatcacaatgggtgtacacactgtgatattatttgtaatatcctaggggaatgttactactaatgtcacatgggtgtaaactcgttatattattcatagtatcctacttggatgttactcctaatgtcacaggg

SEQ ID NO: 908257 - DNA, 635 bp, Homo sapiens
ctttggtatttgcaaatttgtccccgtggcgcctggagctgactgccgggtgccacatgtgtcctgcctcaagccaagctccaggcggcacccgtgagcaggcagggatgccagtggtttctcacctgggagtttctttgcaggctcagagctctttgttcctttttaaaaatctgatttgaaggccgggcacagtggctcacacctgtaatctcagcactttgggaggccgaagtgggcatatcgcctgaggtcaggcgttggagaccagcctgggcaacacaggttggggcaactcccttccctaataaaagttcaaaaccaacccttaaagtttaaaaagtgagatgggatatttgaaggaggcaggtctgagggaaatgcttgaaattatcctctctgtccctgtgctgccaggtcatttagttccattgttattcaacataccatttgacacatgctaggagcgcaggactcggcaatataaagcgtggtaatcgatggacactgcccccagcagccagccaggggcaggacttaagccccacccaactgcaggctgtcccccgccgctgctagcctgaarttggattggttactgctgcggcctgaaattggattggttatttgcttac

SEQ ID NO: 908258 - DNA, 623 bp, Homo sapiens
caaacaaaactatcagcatagtgagcagacaacctacagattgtgggaagttattcacaaatgttgcatccaacaatgccctaatatccagaattgtattagttggttttcatgytgctaataaagacatacccgatattaggcaatttatcataaaagaagaagaagaggtttgatccacagttccacaaggctagagaggcctcacagtcatggtggaatgtgaaaggcacgtcccatatggcagcagacaagaaaagagaacttgtgcaggaaaatccccctttataaaactatcagatattatgagacattcactctcaagagaatagcatgggaaagacccgcccccacgatttaattatctcacagggggtttattccacaatattaggaaattactgaagctccaattaagatgagaattgggtggggacacagtcaaatcatatcattctgcccctggctcctcctaaatctcatgtacacacatttcaaaatggatcatgccttcccaacagtcccaaattcttaacttatttcagcattaactgaaatgtccacattccaaggcctcatctgagacaaggcaagtcccttctgcctatgagcctgtaaaatca

SEQ ID NO: 908259 - DNA, 648 bp, Homo sapiens
atattaaaattttggcatttgggcttcacttaaaaacaaaatgttttttacttattttgttattgattatttggtcattttaagatgtagcaaataaaatgcttggatatttttcttcaaagcatgytttttctttttttgaaatatcttctcttacctgatttcatgttctagtacagtaaagaatgtgttgttctttcctaaatggcttttttgaacataaatattgtgcaattgcaacaaatatttattaataagccagatttttaaaaactagaagaatttaagtacacaactattcattctttcttaataatgaataaaaaagccatgacctttatttttcaaatagtttcataaaaatattatactatgaaaatagatttgcaattaaaataaaagacacaccaaagagggtgtcggacttgtggtgataagagcctagaggatttgaagtgaggaaaaaagaatttgactgtgttcagaatttcagcatgtgtcacaattaatttttaattgcttttgagggaagatgtgtaccattccccttaagtgtttacggctttgctgagccctttggcatttggcgtcctccttaatgtccattcttcgccctgcttgcatctttcctggagcagctggctccca

SEQ ID NO: 908260 - DNA, 648 bp, Homo sapiens
atattaaaattttggcatttgggcttcacttaaaaacaaaatgttttttacttattttgttattgattatttggtcattttaagatgtagcaaataaaatgcttggatatttttcttcaaagcatgctttttctttttttgaaatatcttctcttacctgatttcatgttctagtacagtaaagaatgtgttgttctttcctaaatggcttttttgaacataaatattgtgcaattgcaacaaatatttattaataagccagatttttaaaaactagaagaatttaagtacacaactattcattctttcttaataatgaataaaaaagccatgacctttatttttcaaatagtttcataaaaatattatactatgaaaatagatttgcaattaaaataaaagacacaccaaagagggtgtcggacttgtggtgataagagcctagaggatttgaagtgaggaaaaaagaatttgactgtgttcagaatttcagcatgtgtcacaattaatttttaattgcttttgagggaagatgtgtmccattccccttaagtgtttacggctttgctgagccctttggcatttggcgtcctccttaatgtccattcttcgccctgcttgcatctttcctggagcagctggctccca

SEQ ID NO: 908261 - DNA, 648 bp, Homo sapiens
atattaaaattttggcatttgggcttcacttaaaaacaaaatgttttttacttattttgttattgattatttggtcattttaagatgtagcaaataaaatgcttggatatttttcttcaaagcatgctttttctttttttgaaatatcttctcttacctgatttcatgttctagtacagtaaagaatgtgttgttctttcctaaatggcttttttgaacataaatattgtgcaattgcaacaaatatttattaataagccagatttttaaaaactagaagaatttaagtacacaactattcattctttcttaataatgaataaaaaagccatgacctttatttttcaaatagtttcataaaaatattatactatgaaaatagatttgcaattaaaataaaagacacaccaaagagggtgtcggacttgtggtgataagagcctagaggatttgaagtgaggaaaaaagaatttgactgtgttcagaatttcagcatgtgtcacaattaatttttaattgcttttgagggaagatgtgtaccmttccccttaagtgtttacggctttgctgagccctttggcatttggcgtcctccttaatgtccattcttcgccctgcttgcatctttcctggagcagctggctccca

SEQ ID NO: 908262 - DNA, 658 bp, Homo sapiens
agaatgtataattgttaatccacagagagaaatatgtcctctctgaacaaaaaggctaaagcgatctctgaagtgctggcacaaaccactctttgcagctgttttggaagttgccagaagctgggaaaatgtgaagagaccatatgcttctatgtgacttttcttccactcatggaccaaagtaagtctagcattttcccagatgtcagtggacaaactgacccagttgttaggcactgttttcagaaacatcacagccagagtagacataaaattgaaagcataggattatatcctaggatggcattttagtacccaaaaggaaaaaacctctacattaatacagattgttaatgaagcacatatgactactgatgaaatgaccagtggaatataaaagtaagacataactttaatcaattctgataacccatggttttctcacatgagattcgttgaggaatttttatttgcttggatgaacaggattgaaataaagaaatggttgattggacacatgatcctctataggtgaagtactggcaacttgtacaaaaggcctggcaaaatctcagtaggctatcagccctttccccttcttccctgtccaaagccagtgtgacaatayggatcctattactgcttctgggaaacacaa

SEQ ID NO: 908263 - DNA, 695 bp, Homo sapiens
atttttatatctatattcatcagagatattggcctgtagttatctttttttgttatgttcttatctggttctagtatcaaggcaatgtcagacttatagaatgactttgggactattcacttctctttaacttttttgaaatacaactgtccccttgtatatacaaaggattggtttttgaactcttgcatataataaaatttgtacatacccaagtactgcagtcagccctgcaggagctgcatatacaaaaagttggccctccatatatatagatttcacatcccacaaatactgtatttatttgagtttggttttaaaaacccacatataagtggacctacacagtcccaacccatgttgttcaagggttaactgtagtttgaaaataattggaaatagttctttaaatgttccacagaattcagcattgaagacatcaggtcctgagtttttctagaaaacattcatatttactgtttcaatcttgttactcattattggttggatcacactttctatttcttcataactgtggtgggttgtgtgtgtccggcgattcatctgatcttctaagtttcctaatttgttggtgtayagttgttcataatagtcttttatgaccctttgtatttctgtggtgttagttgtaatacctcccgtttcatctctgatttatttggttcttctgtttt

SEQ ID NO: 908264 - DNA, 520 bp, Homo sapiens
aaatctctggggcaggggcaaaatgccrccagtctctctgctaaaatatagcaagagtcatgtttactacagttcccaacacgttcctcatctccatctgagaccacatcagcctagatttcattgtccttatcattatcagcattttggtcaaagccattcaaaaagtctctaggtagtaccaaactttcccacattttcctgttttcttctgagccctccaaactgttccaacctctgcctgttacacagttccaaagttgcttccacatttttgactatctttacagcagcaccccacctcttgcaccaacttactgtattactccactttcacattgataaagacatacacaaggctggctaatttataaagaaaaagaggtttaatggactcacagttccacgtgagtcataatcatggcagaaggcaaaaggcacatcttacatggtggcagacaagagagaatgagagtcaagcaaagagagaaacaccttatgaaaccatcagatctcgtga

SEQ ID NO: 908265 - DNA, 676 bp, Homo sapiens
ttatcagatggcttgtattaccttgtaggttttgaatatgactcttcctaatatgaaaaaagccaaatgactctctctataatataatggaataatgtactttgataatttgrttttcagatgtttcattaagctttcctggttactttgtagctaagcaacaaggcctatagaaagacacctgatttacctgagaaagagatttacctgagaaagagagcgagtgagagagcaatatgaattctttctgtgattattatgttttgaaattatattgaactttctagaagagtcttccccaaaatgtgtctcagaacagtaggcacatgaaatgcccattaaaaaatgacatttactttggttaagtaaatttagaaaatactgcatagtatatcgcttctattggtaattcacaatgtgtaggaaaggttctgagaaatattgcttggaggaggcatgttaaactggttatttcccactacttccaaagcttgtttacaacagaactttatttttacatataccaataaatagactatgaaagtagtaatttatgaaagacctagggtaaatgctggtccagataaagaggtattagatgagcctagtacaacctaagtgttactcttgtgtctgttactagacttatggagataaaaagagaagaaatgggata

SEQ ID NO: 908266 - DNA, 613 bp, Homo sapiens
catcttgtgtcagagagcaaaaaaaagtgctcaaaaaatgatgggggcatgtcaaatgacacaraagcaaacttgaaggggttcccactggctaaatataagacaatttgagcatcaaaataaataatgatactcattggaatataagccagagactaaaacagaaatcttcctatgtgaagctcttacctagaggcatcttgtggtttaccaaggaatatggccctcaatttggcctaactaaacttctgatcaacaaattggataaagactgaaggtttgcttactaaacacacagaatttataatgctgggagagacagccagtaccttggatgagatgctctggactcaacgagatgaacaagtagaaacacataggttataatttaaaatgtgaattcctaaactcagtttcaaaaaaaaagttgtagagatgcagaattggcaagacctgactaaaaagcatttcttgtgaaaaaagatccatacttgcaatttgagtcagcaatgtgacatagcctctcaaaaaataggatcctgggctgcattacatttttgcccacaaaaatgaactggtcctagtgtcctctgtgctggtcacatcatatttg

SEQ ID NO: 908267 - DNA, 555 bp, Homo sapiens
acatttcagttttactgatasagaacagagacattgagaatttaagtaacttgcctcaagtcccatagcaaataaattttaattcagttatgtttgattccaaagctctggccctctctactatagcatgtgatctctctgttttaactatgttttacctttttttttaattttattttttggaaggagccctatacccagatggaacatctggaaggaacaaaaatgatgacatggttcctcctgggaaaaactacacctacgtctggccggtgagagaagaatatgcacctactccagccgatgccaactgcctgacctgggtgtaccattcgcacatcgacgccccaaaggacatctgctctgggctaattgggcccctgctggtctgcaaggaaggtaaggagctttgtttccaggtaactagggagttgaaatgtgaataagattcaggtcttattttgcctacctcctttgctccacacagaatgtgcctcttccaaatttctttagaaattctgacatggaagatcaatctgacaccatagcagaggg

SEQ ID NO: 908268 - DNA, 667 bp, Homo sapiens
gcaaagcgattggtagcattttacccctgccctagagatctgtagaactttgaacttgagatagatgatttagggtatcaggcaggaaaaatttctaagaaccaagcattcaagaggtgacttgggtgctgtttaaagcattcggttttaaaagggaaacagcataaaagtttggaaaatttacagcatgacaatgggatagaaaagaaaaacccattttctgaggagaaattcaagccagctgcagaaatttgcataagtaacaagcagccaaatgttaattgccaaggcaatggggaaaatgtctctaggccatgtcagagacctttgaggcaacccctccccatcacaggcctggaggcctacaaggaaaaaatggttttgtgggctgggctcagggtccccctgctgtgtgcagcctagggacttggtgccctgcatcccagccactccagccatggctaaaaggggccaaggtacagcttggaccatggcttcagagggtgcaagtgccaaacccatggcactgagccttcaggtacacagaagtcaagaattgaggtttggaaactkctgcctaaatttcagagcatgtatggaaatgcctggatgtccaggcagaagtttactgtgggggttgggtgctcactgagaacctctgctatgg

SEQ ID NO: 908269 - DNA, 686 bp, Homo sapiens
attataggatcaaattcacacataacaatattaacatttaatgtaaatgggctaaagtctccaattaaagacaagacagataaattggataaagaatcaagacccatcgatgtgctgcatcaggagacccatctcacatgtaaagacatacttaggctcaaaataaaaagatggaggaatatttaccaagcaaatggaaagcaaaaaacagtaggggttgcaatcctagtctctgataaaacagactttaaaccaacaaagatcaaaaaaggaaaagaaggacattacataatggtaaagggatcaatgcaacaagaagtgctaactatcctaaacatatatgctcccaatacagtggtatccacatactgggatatgagccaatataccacccagattcataagacaagttcttagaggactacagagagacttggactcctgcatagcaatagtgggagaatttaacaccccactatcaatattagacagatcaacaagacagaaaattaacaaggatattcagtacttgaacttggccctggaccaagaagacctaatagacatctgcagaactctccaccacaaatcaacagaatatacattcttctcagtgccacataacacttattctaaaattgaccacayaattggaaacaaaacactcctcagcaaatgcaaatgaa

SEQ ID NO: 908270 - DNA, 620 bp, Homo sapiens
actaaagtagccttcttaatattagtttccattatgggcttttcattatcttcccatatcttaaatattgatattctatggtatcctgtcctagactgccatgtattcccatataatatatgaccacaaattcaaaaccctacaggaatcaggcaggtattgcaaatgagttaaataggctgaataagaactgtaccaacctggatagcacattacccacctacataaggaaagttactactcatttgcagttgattattgccatacaggaatgttagactaggactgtttcaccaaaaagtccaaatttttatcttcattctaccaatttttaaataatagaaagtcataattcagagcatatttaaatgctctgatggccaaacaaaatatatctatgagtcataattagttcaatggctattagtttgctaacttttctctacatactctttatgcacaatttcatctgttcatctggttttaacaacccagtaaattctgatctctctcattaccttcagatccatatatatcccacctcttgctattcttctayaccaactccacttgaaagtcttataaacacatacaattcaatggagctaaaattgaactta

SEQ ID NO: 908271 - DNA, 622 bp, Homo sapiens
tggtctgagagactgtttttaataaattcagttattttacatttgctgaggagtgatttacttccaattatgtgatcaattttagagtaagtgccatgtggcaatgagaagaatgtatattctctggtttttgggtggagagttctgtagatttcttattttattttattattattatactttaagttttagggtacatgtacacaatgtgcaggttagttacatatgtatacatgtgccatgctggtgtgctgcacccattaaaagttctgtagatttctaacagttctgcttgattcagagctgagttcaggtcctgaatatctttgttaattttctgtctcaataatctgtctaatattgtcagtggggtgttaaaatctcccactattattgtgtgggagtctaagtctctttgaaggtctttaagaacttgctttataaatctgggtgctcctgtattgggtgtatatatatttaggatagtagctcttcttgttgaattgaaccctttaacattatgtaatgcccttctttgtctttttaaaaaatcttttgtgktttaaagtctgttttgtcaaaaactagaattgctttttttctgttttccatttgcttgata

SEQ ID NO: 908272 - DNA, 659 bp, Homo sapiens
tacccattttgtgtatgacatcaatactatttcttctgtagaaggaagtcgtggcttaggagaactaaaagaaaaagccaatttctgttcccagggattcagagaaaatggaaggagagaggagcaggagataaaataggtatcatttgcttatccttaggaaatatcccccttttttttcattttatgtctgaatctgtgggaaaatgtactgtagataagaattaggtaagaattcaaatgtcatatattacaagcagttcttcaaaagagaaagttagctcaaagatttaaatgctttctgagtaaaaaaggagccacactgtgtataaagaatgggggtggtgctggtaagttcatttttggaatactaagttgatttctgcaaagcctagtgagctcatttcaagtttacatgagcaaattcaatttcctataataggcataatttacaggctttgtggttatcacatgtattgcacttaagattacattttaggagattaagataatatcttgatagtaaactccacagtaacatgaagggacacttgcccatttttttcaaatgaaaatatgtgcagaactataattataataaaaataaatggagyacgattagctttcattctaagttaagtctttctgtcagtagtact

SEQ ID NO: 908273 - DNA, 598 bp, Homo sapiens
ctactgattctttgaaaatcttagaggaataggaagaatcactaaaaaatgaaaaccattttccttggttactgctcaagctttttttctggctttgactgtgacttcaactgtggaaacggaagcttatttattggtataataaatgatccttgttacatttctgtgcttttctatttgggttccttttatgacctttaaaaaaattgaaatatttttctttgggtgctatagcagcagaaagttcttagaagaacttaagatataattatttacagaaatgcttatggaaataagtctgccataaatgtgggtagaataaaggggatgcttgttctaatatgttagaatgatactagtattaagtgggacacccaccttcaatgatccctcaaagacacaaccagaacagggaagagtaggtttgattgagaatctctaaggcttgtttatttgatctctgtacttgtactagccattttctagagtgaaccttttgataattccacagtgttctccttttctgaatggtgaatctatttcaagccatcagagtccctttgctkcctttttaaagccttcctaagaatatttatat

SEQ ID NO: 908274 - DNA, 586 bp, Homo sapiens
cccagggagcatcattttctgacagttgcagctggattagcaccacgtgggccagtagcctcagagaagggagtgtgcaatatcagcttcctccagagagatgccgatgggtccattctgggcccccgtttccatacctgtagcctcttaggggacacagaatgactgggaggtgctgcctattcacctgtggaatgtgggcacttctggggtctgactttctcctatatagctctgtagcttttgaatacctataataattatgtacttgtattaatttttaaaaatctattaaaaagaaaaaaaataaaggaagaggggctgagctctgctgtggaaatcagatctatttagaaagcaagaaggtctgtggacaatccaatacaaggtggcccagcctccataccacctccagctgtccccaggctgctttgcagtaacaacctatgggcaaatggcagcgtgygcctccgtctttctgccctatatgcctgaagtcacagcggtccttcaggagtgttatgactcattcccatggggaggtgggggcgtgctaggtgtcttagtccattgtgtttgctctcat

SEQ ID NO: 908275 - DNA, 586 bp, Homo sapiens
cccagggagcatcattttctgacagttgcagctggattagcaccacgtgggccagtagcctcagagaagggagtgtgcaatatcagcttcctccagagagatgccgatgggtccattctgggcccccgtttccatacctgtagcctcttaggggacacagaatgactgggaggtgctgcctattcacctgtggaatgtgggcacttctggggtctgactttctcctatatagctctgtagcttttgaatacctataataattatgtacttgtattaatttttaaaaatctattaaaaagaaaaaaaataaaggaagaggggctgagctctgctgtggaaatcagatctatttagaaagcaagaaggtctgtggacaatccaatacaaggtggcccagcctccataccacctccagctgtccccaggctgctttgcagtaacaacctatgggcaaatggcagcgtgcgcctcygtctttctgccctatatgcctgaagtcacagcggtccttcaggagtgttatgactcattcccatggggaggtgggggcgtgctaggtgtcttagtccattgtgtttgctctcat

SEQ ID NO: 908276 - DNA, 586 bp, Homo sapiens
cccagggagcatcattttctgacagttgcagctggattagcaccacgtgggccagtagcctcagagaagggagtgtgcaatatcagcttcctccagagagatgccgatgggtccattctgggcccccgtttccatacctgtagcctcttaggggacacagaatgactgggaggtgctgcctattcacctgtggaatgtgggcacttctggggtctgactttctcctatatagctctgtagcttttgaatacctataataattatgtacttgtattaatttttaaaaatctattaaaaagaaaaaaaataaaggaagaggggctgagctctgctgtggaaatcagatctatttagaaagcaagaaggtctgtggacaatccaatacaaggtggcccagcctccataccacctccagctgtccccaggctgctttgcagtaacaacctatgggcaaatggcagcgtgcgcctccgtctttctgccctatatgcctgaastcacagcggtccttcaggagtgttatgactcattcccatggggaggtgggggcgtgctaggtgtcttagtccattgtgtttgctctcat

SEQ ID NO: 908277 - DNA, 552 bp, Homo sapiens
gacagccacacaataacataggggacttcagcacccaattgacagtgccaaatagatcattgaggaagaaaactaacaaagatattctgaacttaaacttgacacttgcccaattgggcctaatagacatctacagaatattccatccaacaaccacagaatatacattcttttcatctacacatggaacatagtctaaaatcgaccatatgcttggtcataaggcaagtctcaataaattcaaaaaaaaatttaaatcatactaagcacactcttggaccacagtgaaaaaacaaaaaaacaaaaaacaaataacaaaaaaaaacaagaatatctctcaaaactgtataagaacatggaaaacaaacaatttgcttctaaataactatttattaaatagtaataaataactattgggtgaacaacacaattagggcagaaattaaaaaggtccttgaaattaatgaaaatagagagacaacttaccaaaatctttggaaagcagcyaaaacagtgttaagaggaaactttatagtgctaaatgccatcatg

SEQ ID NO: 908278 - DNA, 660 bp, Homo sapiens
cagtgtaatacatgtgcaaggatagaaaaaatagaacaatgaaacaatatagaaatagattccatatctacactcacacaatttttggcaaagatgacatcacagtgccatagggaaagagtggtattttcaataaatgatgctggatcaatcgagtatccataaagaaaaaatcatgaagcttgaattatagctcacaccgtacataaaagttaattgcagataggttgcaggtgatgacatgaaaggtaaaattatatgtttttcaaaataaaacaaaagacaatatctcacaaacttgaggtaagaaaatgtgtcttaaataggacaaaaacacactaaatataaaaaacaattaataaactggatgctattaagaagttttctcataaaaagacagagtagggaaaaaattcgagatgtatatatcttacaaaagactcatatccagaatatataaggaaagagacagatagtccaatagaaaaatgggcaaaataattgaacaggcacttcccaaaagaggatatcaaaatggccaatatacatrtgaaggaatgctcaattttataagtcattaaaaaagcataccaaaaccaaaatggaaaacacagaatacgccaagtgttggtgaggttgttgagtattcagaactctcat

SEQ ID NO: 908279 - DNA, 691 bp, Homo sapiens
gcttgtttgtgcttcagtatcttctatgtggaaggttaatgttcattacctctcactaagtgttgacacaggtatccctttgactgaagtcatctaatgtgcttttcaagtgttcttttgggaaaactgtccattgactaaggatgacaaccaataagatcatcacatttattctggtcagtcttatatccaccttacccaagctggtgctcttcaattggcatgtggtaacgatgcacaacagacattagatgtggtgcaggtagagatagattacatttttgccagggctatgccagtttcaacttgaaatacactgaaagaattggatccttagaccttgaggatttttgtggtttctcgtgtttcagtggcttccttcctccatatttgaccttctgtctaaagaggtaaaccacagttagtaattagcagagacccatgaagattacttcagtaaagcattcacaacttatgtaggtatccttcctccagtatgtcctttgatcttttgaagtcaccattattaaatcaaaccctgttagattatgaagcacctgactttagaattagtggtcgatatgtttttcactaaaacaattaactgattcactcawcaagcagctacaaaaaccaagtaagttgactaattctgtcaaataagcattgcctgtgttaaccatgaacccat

SEQ ID NO: 908280 - DNA, 682 bp, Homo sapiens
gtattcactgatggttgtttgtatttctgtaagatcagtggttatatctcctttatcatttcatattgtctatttgaatattctcttttcttccttattagtctagttagctatctattttattgatttttgcccccaagggtttttcatgtccatttccttgagttccactctgatctgggttatttcttgtcttttgctagctttggggtttgtttgctcttgattccctagttcttctaattgtgatgttagggtgttagtttgagatctttctagctttttgatgtgggcacttagtgctataaatttccctcttaacactgctttagctgcatcccagagattctggtatgttgtctctttgttctcattggtttcaaagaaattcttgatttctgccttaatttcattatttacccaggagtcattcaggagcaggttgtttaatttctatgtggttttgtgattttcagtgagtttcttaatcttgcattctaatttgattgtgctatggtctaagatacagttggtaatgatttcagttaytttgtattagttgaggagtgttttactcccaattatatgatccattttagagcaagtgccatgtggtgctgagaagaatgtatattctgatgttttgggttggagagttctgtagatatctatcaagtacact

SEQ ID NO: 908281 - DNA, 597 bp, Homo sapiens
tgttttcctaagggacacagacagtgacaccaatacgtggatgagaacaaacaaaacaatgaattgtcaaattacagacacacttgtcagtgctcttaaccagtatcaaagtttactagtaagttcaaagatacattgtttattctgatctgctcccttagtatttgttgagagaataactatatttcagcaggaaaaagaaatctgagcaggtttctgctgtatttcctcagatcacaaaactttctctatattttgtttctttttcccatttctatttctaatactcaaagtgtttcccttcactctatttggtcattaatcaactttgtccatctatgcatgtcagaattgtctggatttttggattggagaaagtactcagcaatttataagtccaattcatatttctttgctacgagaaagttacacagcttgaatcacatgaagtacaactaaattcctaatgcagcatttttcatgtgaaaaaaagtaatgaattatttcacgtccaaaatccctgttgctagtcttgtgattgccaaaagcctyaagtgacttcactaatggaagtctcaaggcgcttcttcctgctcc

SEQ ID NO: 908282 - DNA, 605 bp, Homo sapiens
ggtggaacgaaagcaaaaatccagaatttgaaggaggggtaacattaccctggaaggtatggggacgaaaggagtattcaygatcttttgtcttttagaacagtccctggagtcttcctccagaatgcaaacaacctggtgctgctgtttatcttttcaatgatgtctgaaaacaagggaaccaatgtgagcctgcatctcatactgcctgcggtactatgagtcataaagtactctatctttgacccaagtgtatcatatcttcttccaagatctaggaaactctggcaggcaaggaagttagcttgcaaataggataaaatctccaagttttcccagtgtttgatataaacacaaaataactaaagagacttcagtttaattatattctggctttccaaattggaaattgaaaatataggaataaaaacaataatattggcatctagatgttttgtaaacagtgctttcatagatagtttatcagtgaagttcacaaaatatattaacaatgtatataatatccctccatgcatcctcttggcacttaattcatgtagaatctgtggtggacagttaaatatgggttttgattttccagatgc

SEQ ID NO: 908283 - DNA, 590 bp, Homo sapiens
aagaagatctcacatgacaaaagatttgaattaggctttgaaggaggagagggcaaagattgctaagttagatgtaatggtgtatgcaaaggcacaaagtctggaatgaacaaaccattagcaagcaaactacttccgaagacagatgagatgtgtgggccaagctgagaggaataaaatttcccatgttttgagtcgagaaatcagataaataactttaaaaagagaatgaatggccgggagcagtggctcacgcctgtaatcccagcactttgggaggctgaggtgggcagatcacttgaggtcaggagtttgagaccagcctggccaacgtggtgaacccccaaataaaaattagctgggtgtggtggcaggcgcctgtaattccagctacttgggaacctaaagcaggagaatcgcttaaacccggaaggtggaggttacagtggtccgagacggcaccaatgcactccagcctggatgacagaacgagactccgtgtcagaaaaaaaaaaaaaaagagaatgagtayccttctgcagaagttggacttaataaacaaaaaagaagaaaagaaaaggaaaagacca

SEQ ID NO: 908284 - DNA, 651 bp, Homo sapiens
cactgttgatggtaatgtaaattagttcaaccattgtggaagacggtatggtgattcctcaaggatctagaaccagaagtaccatttgacccagcaatctcattactgggtatatatccaaaggaatagaaattattctactataaagacacatgcacacatatgtttattgagcaatatttacaatagcaaagacatggaagcaacccaaatacccatcaatgatagactggataaagaaaatgtggtacgtatacaccatagaatacgatgcagccatgaaaaggaatgagatcatgtcttttgcaggaacatggatgaagtagaagccttcatcagcagactaacacagtaacagaaaaccaaacatcgcatgtcctcactcttaagtaggagttgatcagtgagaacacatggacacagagacaggaacaatgcactccagggcctgttgcggggtggagggtgaggggagggaactttgaggatgggtcaataggtgtagcaaaccaccatggcacacgtatacytatgtaacaaaccagtacattctgcacgtgtcccggctttttttttttaagaaaaagtttaaaaaatgtagtctatatgtttattccaatagtgtccatgagcacatactaatccagaatt

SEQ ID NO: 908285 - DNA, 578 bp, Homo sapiens
tatatactattttttctgctttttcacttaatattgcctcctaagaatatttccatattgctataaaccctcgattaatgtgataattaatggctgccttgtatttagaagttaatgctaacttatttctctagaaaaggatatttacagttatttctaatattctaatatcatatgactgctataaatatctttgtttataaaagtttttttccacatttggaatatttttccctaggttatattcccagatatggaaccaacagataactttcaaagtcaaggataatccaaaacagcctgatctatcttggaagatactgagtttctcatccctgcagctgatagtgaaaaggtggtatgatatttgctaagggtgtggtaaaaagataataagttagactaggtgacttttgaggccccagaaacccatgagattgtggttctccaaatttcaatttacaaacgtgagcctattctttgtcccaaatcactttcttacttgctataaaagttatctaytgctgtgtgataaaccactccaacacttagcagctaaaacaatatccattttgttt

SEQ ID NO: 908286 - DNA, 619 bp, Homo sapiens
cagcacccgtggggatggtggaggatgaagatcccaattggaactctagggtgaaaagatttcagggatggggcgttcttgctgcactgattcagcaaagattttgctaaaactgagttttacaaggaagtgcacagatgagttgaggagacgtttcagaagcctgactaaaatttggctaagcaaagaatctttgttaatagctgcgaggtcccttgaggcctaaatttggaaatagtatactgcttttaacgcatcgtatacttgttgtcagaccaagttaggccaatcaatgagcagtgaagttacattgcagaattatctgtgtgcagaaatggaagaaagtattgtgaataatttttgcaaacaatgtattattatctatcttagggacaaaataattcttgtcctttgcatatgtgaaatgtgcttttgccccttctctcaaagttttatcccattagccgttcaggcttgaactccaggacctcatgatctaaatcatgtctagaattagatgacacacaaaggtatagctcttgaagtatatctcttcttgatctagagatctctgaacccaaaaraaaagttatttgctctccacatgctcaatatctcc

SEQ ID NO: 908287 - DNA, 633 bp, Homo sapiens
cccgctgatcctaatgcagcttcctgaagcagtggattttccatgatgttgtcactatagggattttatgttagaaatgcaatctaaataagctttggccttaaattgtaatcatataaccatataataaagaatagaaaattatagtaaaaatacaagtgtacatataacttttacagtctgtaatagtgaattcctgtgatagtgtgttattaggattatatatatatttttaagatggctgccacgaagtgaaagtcaaagaaatatcaaaagtacgcctggtacctcttgagtgtttttgcattgtaggtggaataggaacattgttatgatacacatggacaatgttccctagtcatttctattccagtggcaactatgtttgtaacaccattgactataagggtaccagagctggacccaaaaaatgtgagctgaaagggtggggtcaaagacaaggaacatgaaagaaagaagttagaagctagaggagaatgggaaaattgtgtgcagtctgacgtaacagtggtcactctgytaaaataagcttatttccttgataaagtcattggcaacacctggaattatgcaattttatttgcagggtgatttccaaatagttggtgccct

SEQ ID NO: 908288 - DNA, 696 bp, Homo sapiens
tagccttttctttctactctatttttttctctttgtatttaaaagcccttgcttgttctttgggtagaaggaggaaatacttaacatttttctaacacatataattcatgttcttatttactacataaggccctatgctatttacttttaatacctctgtgttctaatctttggaatctaagtttaggcacctgtctgctacaaagaaattcccctgtggcttaatgtctttcgactgtatgaatttatactcctgcatccattcaggtccagcaaaacatacattcataacatactttgctgtttacacagtatttttatataaattttaatgtcagagcctcatggaaattaagattcagaaatggttagttgtttggccagtgtcacacaactagtgagctgttgaactaaaacctagcgtgagaccctgtccccaccaaaataaattaattaaattaaataaaatctaggttagctagtcccatttcaatgtataaactcattttacatctctgataagtcaaagaaaaaatgagttaattatatagataaaaaatatacatttaattatgtattactgaatatataatcacacacatgtagtcaggtaagcatktttttttttccccctgtccttggcatttcattagttctctcagcatttttgtgagtttgaatagcaattttcatttt

SEQ ID NO: 908289 - DNA, 616 bp, Homo sapiens
taatgatttttactgtaataattattacaataacagcctgtgtccctggagtccatatttccatctgaccctgaggcccaaatgcattctcacctttccttaaatratcttaaattacttgaatgttgaacttacactgcaattagcattattattgcaaaatcataaaattttgctatttctggtataacagtggagaatattttttctgcatttacatagccctgaggactggatgtcagagttcttcttttatttgaggaattatcccattagcagcatggggaataacacaagcaagaatcctaacttttaacaaagactgaaatgactgatccacaacatcactgttgacagaaactcattcacatgggaagtaaaggtgcaacaagcagtaaagtaggaacagtgttgaaaaaataaatgtcaaaaaacaattacatgataacatttgttttatagttttgtttcagttgctgttcctgcattttatatgtctatcacctcagagcacagaatactttatattaaagtgctacagagtcctgccactttactatgctcaagataaaggagacatttgtaaccttgctaaactgtacccactatttcattc

SEQ ID NO: 908290 - DNA, 660 bp, Homo sapiens
ctccagaataccagtgatcagcccaattatgaaatacaatctttaataaatcatagattttcagratcataggttttataatcatgaggacttatgttgaagaagccaaagttgcaaacaggtattaccttcattaaattgggatcttacttaaatgagagataatcaatgtaaatattaatacagtacaggaaaagattaatatgatactctatgattgtttatatgtcataaactatatttccgtgaagttggtatcacattcagaaataacacctataaaaagaaatatttctcataatatatagcttttaattttaaagattttgtactttataaagatgttcatgcatgttggattgatcttaacccaactagattcaacattttaatccttacttagccaaaaggtacatgagttgtgcctgatttgtaaaaattttgatttgactccttttagattttatatttaaattcccaataaacccaagaaaactcgctttcaaggattagaatcactgtatgaaaaaatttacattgccacagaagatactcaatgacaatttagaatcattcaacaaaagtttgaataatatgatcaagaataggttgattgacacttttgcataaaactaatagtacaatgatttctttcgtgga

SEQ ID NO: 908291 - DNA, 650 bp, Homo sapiens
attccttcttacatagctttgcttcctgtgttttacctaccctgttcaatgccaatttatagaggtgagtgacggctacctctgtattttttattcaggaactttcccaagagtagagagaataaaatcttcgaaaagaatatttcattcaacataaaactttgttttccattccatttttgaagccaaccttaacattgtaggggatgcctggcttaggcaaaagcattctgtctctctctcttgatccatgcccatggctctctgtacataacgtgtataaggtgtgtagtggtttcagaagaggagggggagctgtagggaataaaaagttcatgttaagcaggagtaacacgtgccgggtaaaggaagattaacctcattcttagaatatgtgtttttcctcaactcacaaagaaaaatcatttcatagataagaagagtgtcaatccttgtcacggagccttttgaagtcatcatttatagtgcttatttgagtattgttatcctttctctctggatactgcaaaatcttyagtgtgcttggatttccatggccaactctacaagaatttagatcagtgttgcttaaagtggggaccaaggatctatgtgggtcccagaactgtttgttagtacctgatgatgag

SEQ ID NO: 908292 - DNA, 650 bp, Homo sapiens
attccttcttacatagctttgcttcctgtgttttacctaccctgttcaatgccaatttatagaggtgagtgacggctacctctgtattttttattcaggaactttcccaagagtagagagaataaaatcttcgaaaagaatatttcattcaacataaaactttgttttccattccatttttgaagccaaccttaacattgtaggggatgcctggcttaggcaaaagcattctgtctctctctcttgatccatgcccatggctctctgtacataacgtgtataaggtgtgtagtggtttcagaagaggagggggagctgtagggaataaaaagttcatgttaagcaggagtaacacgtgccgggtaaaggaagattaacctcattcttagaatatgtgtttttcctcaactcacaaagaaaaatcatttcatagataagaagagtgtcaatccttgtcacggagccttttgaagtcatcatttatagtgcttatttgagtattgttatcctttctctctggatactgcaaaatctttagygtgcttggatttccatggccaactctacaagaatttagatcagtgttgcttaaagtggggaccaaggatctatgtgggtcccagaactgtttgttagtacctgatgatgag

SEQ ID NO: 908293 - DNA, 598 bp, Homo sapiens
tcttttcattgagggaaaatacacaactatgcaaagcttacaatttacatcccacaagaggacctctcagcttacycccatatcctagcctccctatagctccccttcctattaatgataatcctctctaatctcccctatccagaaggaaataagcaaagaaatctccaaaggaccacaaaaacccccaggttatcggctatgtccccttcaagctgtagggggaggggaatttggcccaacccgggtacatgtccccttctccttctctgacttaaagcagatcaaggcagacctggggaagttttcagatgatcctgataggtacacagatgtcctacagggtctagggcaaaccttcgacctcgcttggagagatgtcatgctactgttagatcaaaccctggcctttaatgaaaagaatgcggctttagctgcagcctgagagtttggagatacctggtatcttagtcaagtaaatgatagaatgacagccgaagaaagggacaaattccctaccagtcagcaagccatccccagtatggatccccactgggaccttgactcagatcatggggactggagttgtaaacatctg

SEQ ID NO: 908294 - DNA, 598 bp, Homo sapiens
tcttttcattgagggaaaatacacaactatgcaaagcttacaatttacatcccacaagaggacctctcagcttactcscatatcctagcctccctatagctccccttcctattaatgataatcctctctaatctcccctatccagaaggaaataagcaaagaaatctccaaaggaccacaaaaacccccaggttatcggctatgtccccttcaagctgtagggggaggggaatttggcccaacccgggtacatgtccccttctccttctctgacttaaagcagatcaaggcagacctggggaagttttcagatgatcctgataggtacacagatgtcctacagggtctagggcaaaccttcgacctcgcttggagagatgtcatgctactgttagatcaaaccctggcctttaatgaaaagaatgcggctttagctgcagcctgagagtttggagatacctggtatcttagtcaagtaaatgatagaatgacagccgaagaaagggacaaattccctaccagtcagcaagccatccccagtatggatccccactgggaccttgactcagatcatggggactggagttgtaaacatctg

SEQ ID NO: 908295 - DNA, 535 bp, Homo sapiens
attgatgctgggaggtgtgtgacttgctttggccaatgaaatatgagtagacaygatggggtgccagtttcaaaccaaagacagcctctgttctttaattctgagctccaaaataagatatgtgaggcagacctacaacttggagcctggccaactaagtccagctggatcagccaaactaagccaatctgcagacctgtgcatgtgagaataagcacaccttgttataaggcactgagtttgagggtggcttagcaacaagattattttgaaaatagttcagccatatacttcttgtttatagcaaatgacactagctttttcattgtcggtaatgacaaaagcttttataaaaatattttattaaaaattataaatctatttaaataaaaatattgtcatattagtttaggtgttacatagatagtttaaaatatgtggagatttgaatagtagactgacttctggggactgtttcacttgatgaaattcaaggtcccttccagcctaatattttaggcacgtgggcatagaa

SEQ ID NO: 908296 - DNA, 427 bp, Homo sapiens
tattgaggaaatagtttacatttttcatatcttgtcttcaaattttagtgcgcattttacacttatagactagctacactaactacatttcaactggtcaatagccacatgtggccagkggctactgtgaaggagaaggcaaccctaagacatgaactgggtcttgagtagggagagttagaaagaaacaagaggaccctattcttattaggtactcacttgtttcttcactttcttcagatctctgcaaaatgataccttaccagaaagatcactgatggaaaattgcagctccccaccatcattctgtatctttttatccttataaaaagtttcttcatgacacttataattgcctagtttgtctatcatcaagtttttttttgttttttttttaactagaattgaagagtatgagagctggtat

SEQ ID NO: 908297 - DNA, 685 bp, Homo sapiens
ttttcaggatgatgtaccagagctagaagaatatttcctggtgaatttaacttacgttggacttaccatggctgcttcaacttcatttcctcccagactaggtatgaggggtttcttgtttgtttctttttgctcacttcaaatgaaatgaagaaacttcatttttgaatcagaagtgatcattgtgctgttttgttaatcttagctatgtgttaaaatatgatgggcttttatatttatttttgatactctcatatattgcaatttttacaatgaacaatgtaaagacattaaaaattattgtgtgatgctctttaaattttacaactattttataaacaaatttgtaatcctcaaaatagctctttggaaggtattttcctttcattttcttttaaaattagctgttttcagtagatctccaaactctcagatgtttttattttcttttaggttaagcagtgctgatatttgcttctttgttgctttattgtgttctctgcttctttcatgaccttttatctttttcttttcatgcttttagaaaagactcagttaattcattacagactgaaaggtaaaacctgarccttggtacaaacttatctagattcctttgaaaagatgtattcctatgtttaaacacaaactcctctttcagtgtggacatttactactgggaaat

SEQ ID NO: 908298 - DNA, 615 bp, Homo sapiens
gtcgttattggtaaatagtctcttgtaggcagcatatgattggatcttatttttttttaatacattmagccattctgtgtcttttgatgaatttaatcaatttcattcaggataattattaataggagcagacttgctactgccctttcattatttgttttctgtttgttttgtagatcttttgtttctttcttcttctgttgctgttttcctttgtggcttgatggtttcctatggtggtctgcttttaatcctttctttttatagtttttgcttccacagtagttttctgctttgtggttaccatgaggcttacataaaacatcttgtactcagaaacagctattttaaattgataaaaaattaacttcatagcaaacaaaaactatatttttatgttctctcccctaaaacttttatgattttgatctcagaattttttttgtaatttgtatttcctaacagtttattatagctacagttatttttaatagttttgtcttttaaacctgagagataaatttgctttatataatcaccttacattattagaatatcctgaacatgactatattacttataccattcagttttctttaaattttctcatgtttt

SEQ ID NO: 908299 - DNA, 580 bp, Homo sapiens
actcagggtaggcaggactgcaggctatgctgcatagatatgcatggacatgggcttgcctcccatactagggtaaccttaagcacagcactgaggtttggtttagtagctgtttagctgctgtagttgagcagagtcagatgctcccctcagaagacattcacacacatgcacatgactccttgcctggcaagggcttaaggagagccccaggatttggttggattgatgctcactagctgagtctgggcaggactagattcagataattgctgacctgcttttaacttctagcttggagcgaagttaaggaaagtactggggcttggctaagtcacagctctgcagctgggtctgagtagggtcagatgctctctttggataatccgtgggtctgggaagggtcagagggtccctttgtggataatgctgacctgcccttgcttcttggcctggaagtggctgtgaaggagatcaccagggcttggctagrtcacagctctgtggctgcatctaggtggggtcagatgctccctctgtgaatgatgacaaatgtacccctgccttctggcctgagaaa

SEQ ID NO: 908300 - DNA, 671 bp, Homo sapiens
ttgtaggttttgaatatgactcttcctaatatgaaaaaagccaaatgactctctctataatataatggaataatgtactttgataatttgrttttcagatgtttcattaagctttcctggttactttgtagctaagcaacaaggcctatagaaagacacctgatttacctgagaaagagatttacctgagaaagagagcgagtgagagagcaatatgaattctttctgtgattattatgttttgaaattatattgaactttctagaagagtcttccccaaaatgtgtctcagaacagtaggcacatgaaatgcccattaaaaaatgacatttactttggttaagtaaatttagaaaatactgcatagtatatcgcttctattggtaattcacaatgtgtaggaaaggttctgagaaatattgcttggaggaggcatgttaaactggttatttcccactacttccaaagcttgtttacaacagaactttatttttacatataccaataaatagactatgaaagtagtaatttatgaaagacctagggtaaatgctggtccagataaagaggtattagatgagcctagtacaacctaagtgttactcttgtgtctgttactagacttatggagataaaaagagaagaaatgggataaatcatattccttctcc

SEQ ID NO: 908301 - DNA, 585 bp, Homo sapiens
  misc_feature 249: n = A,T,C or G
cgtcgggggcgcagggcgcacagtggactccgggggcgctggcggtgctgggggtgctgacggcgcggggcgcgcgggcggtgcgcacakcaagatgcgaggacgcagacccggctcccggaaaggctgtgcctctgggcccccaggtgcctggctctggggcgcaggaggcggcggcggcggcggcgtggggagtcctggccccactgcgcctagggcgaagcagcgtttccgcgcgtcggagactcntggggcgcccgagagcccccgcgctccccggctgtgtccgtgccccctcttgggggaacggccggcgccactgggactggcaccggcaccggtaccgggaccggctgcagccgatgggtcctgtcccgcagcccgttggtggctacggcgcggggctcgggcgcttccaagtccagtcggaaagttttatagccgttcgcgcgccgcgccggctccttgcctttccgcttgagcttcttaaggccgttcagctccttcacgcacacggtcttccacggcccgtcctcgaggaccgggatgtgcttcatggcgcgggcggcgcgcgaggcaggggcg

SEQ ID NO: 908302 - DNA, 634 bp, Homo sapiens
gtcttgtagactttctctattcctgaggcatgtaagagtcacstaacattgtgctgttgaatttgctttgtgcttcagtaattttgattccagctgacacatatagaaatacaataagtaatagatgctttatcctgttaatgtgttcattctctatctgtgagattaaaacttcagattatgaaggatatggcacttaaagttgagaaacaaaacaaatgctactccagctaccatgttgaaaatactgaattctacaacctgtagtgaatggaaaacaaatgtggtttcaatgtattaaaggggaaagtttcttttcaaataatgctaatttgttagcagtttcttcaatttcaatcaatgtgctaaaaaatccaaaagaaaatagaaaatagaaaatacccattttacgactagtattcctgtgaaattgtatttttatttaatgaatgagagttagataaaatataatgataattaaattaacattaataaatcactgttttaaatacttgagaaattttctctacttataaaaagttaaaaatgttcagaattatgagatttgtattccttaaatctgttgcccttcatgacatatcattttgaaaatatattatgaaaatatgtggtt

SEQ ID NO: 908303 - DNA, 611 bp, Homo sapiens
ctaaaccaacaaagatcaacaaagacaaagagtggtattacataatggtaaaggtattamtgcaacaagaagagataactatcctaaatgtaaatgcacccaatacaggagcacacagatttataaagcaagttggtagagacctacaaagagacttaggctcctacacaataatagtgggagactttaacaccccactgtcaatattagacagatcaatgagagagaaaattaccaaggatattcaggatttgaactcagctctggaccaagtggacctagtagatacctacagaagtctccaccccaaataaacagaatatacattcttctcagcaccacatcacacttattctaaaattgaccacatatttggaagtaaaactctactcagcaaatgcaaaagaacgaaagtcatgacaaacagtctctcagaccacagttgtaatcaaattagaactcaggattaagaaactcactcaaaaccacacaaatacatagaaactgaacaacctattcctgaatgactactgggaaaaataacgaaatgaaggctgaaatgaataagttcttggaaaccaatgagaacaaagacacaatgtaccagaatc

SEQ ID NO: 908304 - DNA, 618 bp, Homo sapiens
agattcatcatagctaagaattgtatttccaaactttataatttaaaactgtaactatcatagaatattatttaataagttatcattagtaatttttattctaagtaacagatataagatacatgtcttacctgaagcatatttacatggagactcaagaatctgttagactgttagaaaatacactgtaagaggagaacaccacaaagatactccttgagaagagcaatcccaagacacataatcctcagattcaccaaggttgaaatgaaggaaaaaatgttaagggcaccagagagaaagatcgggttacccacaaagggaagcccatcagactaacagcgcatctctcagcagaaaccctacatgccagaagagagtgggggccaatattcaacattcttaaaggaaagaatttcaaaccagaactttttgtccagccaaactaagcttcataagtgaaggagaaataaaatcctttacagacaaggaaatgytgagagattttgtcgccaccaggcctgccctaaaagagctcctgaaggatgcagtaaacatggaaaggaacaactggtaccagccactgcagaaacataccaaattgtaaagaccatcgac

SEQ ID NO: 908305 - DNA, 571 bp, Homo sapiens
cagaaactgaggcagaaataaatagcctaccaaccaaaaaaagcccaggaccagacagattcacagccgaattctgccagagatacaaagaagagctggtaccaattctactgaaactattccaaaaaatagaaaaggtggtactgctccctaactcattctatgaggccagcattattctgatacaaaaacctggcagagacacaacacaaaaaagaaaatttcaggtcaatatccttgatgaacatcgatgcaaaaatcttcaacaaaatactggccaaccaaatacagacacacatcaaagagcttatcaacaatgatcaagtaggcttcatccctgggatgcaaggttagttcaaaatatgcaaatcaataaatgtgatccatcacataaacagaactaaagacagaaaccagataattatctcaatagatgcagaaaaggccttcaataaaacccaacattccttcatgttaacaactctcaawaaactaggtattgaaggaacatacctcaaaataataagtcatttatgacaaacccatggccaatatcatactgaacgggcaa

SEQ ID NO: 908306 - DNA, 646 bp, Homo sapiens
attcataggcagaatcacagcccacggcagccccaaactcctactctctgcctcagcctcctgaatagctgggactacaggtgcactccaccatgcctggcttctctgggtttagttaagcatgttttatgattacattttaattttttctattaacttattttatacatcttttaaaaacattttaatggttctcctagggtttatagtatatatttttaaataatttggggcctcctttaaatgaaattatactgtttccctttcagtataagaaccttgtaatagtatattcccaattctcactgatcctttgtggtcttgtattcatatatggactacttttacatatgctggaaaaacactatatattattgttttaaactgctagttatcttttacagcaattacctttattttatttttatgcactttatttctttgtgtaaacacaagtttctgacatatataatattcctttggcccaaagtactttttttttttttttttttaacatttcttgtagtgtccacttgatggcaatgaattccctccattttattttttctaagcatttcgacattgattttgataaatatgctaattggttataraattgtgagttggcagcatttttttatttaca

SEQ ID NO: 908307 - DNA, 660 bp, Homo sapiens
tgcagttgggctgtatgccttaccttggctttcctcattagatgtacctgccccagtgtcattggaatgttgggattttgaaggaccctctctctgctgcagggactgcaaagtcaagatcatggggcaacatgactgcagggctagtggtgttgtccgggggtcagttgaagccactcttgttagggttccttcctttctcacttctttcgtttattcagtaagttaatatgtagtattgccaacacagttgggtgctgcggccaaagagaacgagtgggacagagctcactgtactgtaagcctcgatgtctagttttcagcagttggggcaacagtgtttgcactagaccacttgcatcaaaactctgggcataattctatactattttccctgaccctgattttctagcctttctggcagttttgtgagtttccccatttttctgcttaaatcagactgagctgtttctgttgctttagctaataacattaactgatactctaggtgtgggtaatacaaaatccagagacaaatcttagagagaagataaattttattagtgaatgaattttggaattttataatgaaaactaccagaaagatacatttgggtatatttgaaactgtarcgatgcctaagtatgttttaggtcctc

SEQ ID NO: 908308 - DNA, 649 bp, Homo sapiens
gtaaggcaggtagagtgtgggcatgaagtttgacacatatagagtgctcagtaagctsttcaaaaggaaggagtaggaagagaaatcatagctacagctcactaaatacacaagaaaaatcacattcgatgagcacctgctctgtaaaaggagttcatccttgtctacactgtattgtcacttcagcatccaatgagctctccaaatgctcaacaacaggctggaggaaggaaaaggcaccatggcaatgagaaccagcttttctaagacacaggggtttagaggtgagcagattttagacagtgaattgactattctgagcagaggaaatgcaaggaagaagccaccccagggagagggaatgggccagcctggccacagggatagctgaagcagcccttttaattattctacctctatgacccaatggccagaatagagaatatgttcagggctttggcattagactggctggagttacaatcctggtctgccacttcagacaatggggcctagagcaagttactcagcttcctcatctgtaaaacaggatggccttatttatagggaccatgctgagcacatgctagacatagagtaaatgctcagttaatggtagtttgttactaatatgagcagggtctataaa

SEQ ID NO: 908309 - DNA, 690 bp, Homo sapiens
ttatataacacgttccctttgaaataaaccctaccaattttaattaaaaatcatttccctcaaaataaacaaataattmatcatgaccataaaataaaagcagaatgttaacgaatgtatttgatgacttttcttccctgctgtttctgggttttagcaataatttgctaaatttaggcagtgtagaaatatgatttcgattgtggcatgttggtggtttaatgtccattgacagcgctttaatattcctttcatatcttaacagcagaacagggtatagaaactattttgaaaattatatttgactacagtcttctaaaagaatttcaatcttctcataattctaagttataaataaaatattacattttaaaagaaaatttttaaggtgattattgagttataatatttatattatatattatatatgttatatataacatattataactctataatagactgatataactctattatagactgatgaaacatacatattattgtttagaatgaagaaccaagggaagaaaaagaacccaactgaagataacctgcatagtgtttctaataataagacaaaactccaggagtagaatgatagttaagctgcagaaaggttacaaaaaaaaattacaatatcaaggcaaaactttaggttcctaatttagaaaattaaatttcatttaa

SEQ ID NO: 908310 - DNA, 633 bp, Homo sapiens
acaactcaaaaacaaattaaccaaatagcccaattaaaaaatgggcaatgaatttgaatggacatttttctaaagaaaacataaaataaccaacacattgaatgaggaaaagcaggatggattccctttgaaaactggcacaagtcaataatgccctctctcaccacttttattcaacgtagtattggaagtcctggccagaataatgaggcaagagaaagaaagaaaaggcatccaaataggaagaaaagaagtcagactctccctgtttgcagatgacatgtttctatctaggaaaccccattgtctcagcccaaaagttccttcagctgataaacaacttcagcaaagtttcaggatacaaagtcaatgtacaaaaattaccggcattcctatgcacatacaacagccaagccgagagtcaaatcaggaaggcaatcccattcacaattgccacaaaaagaataaaataccaagccgtgcatggaggctcacacctgtaatcccagcaagattccatctcaaaaaaataaataagtatataaaatacctaggaatacagctaactagggmggtgaaagatccctacaatgagaattacagcacacagctgaaataaatcagagatgacac

SEQ ID NO: 908311 - DNA, 623 bp, Homo sapiens
ccctgaatctaaaatagtggttgaaaaaagaaagaaatttgagcatttgatttaatgttctttatcctccctgcattattacttttgccagtctataagaatttacagttcagaatagcctctgctaagtagaatttctttatcccaatcttattagaacttctcgaaactcctcactaaaattctcaagaaagagaacaacctacaacctggaaaaatcagagttcacagaaagtctgagaaagaattcacaatctaggattcaatagatccaatcatctggggggaaaacaaaatacaaacaggtaagaatcttaacttttgaggaaaagtatctgaattgtaattacagaatacttagaagccaataataatgagaactatgtatcaaatttagggaattccatcaaagattcatttagaggaaaactcatagccttgaatgaattttattattaaactgagatgttaggcaaagaacaattaaaktaattggagaaaatgagaaaaaataaatctgggaaacattgcattgaaaagtctaatatttcctttatcacaatatctgtctaaaggttttctatagttacacctggtaatattgcaaaatcaggaacagcgat

SEQ ID NO: 908312 - DNA, 653 bp, Homo sapiens
cccttttactatgtggagaatctgtagtgatgtccccatatttatttataatatkattactttgtgtcttcactttgtcttttatgatcagtctggccagaaaattgtcaatattgtttatcttttagcaggagcaggtttttctttcagttattttctcattgttttcctgttctgcattttattaatttgcaattatattttaaacattttgcttattttgggtgaatttgtccttcagatttacatttttatagtggaaattaagtgcattgatttgaaacctttcttcattttgcacataggcattcagtccttttaatttccccaattactagtttagaagcattccagaattttgatgaattatgctttctgttttatttaggctaggatattttctaatttctattttgatttatcctttgacccatgagtttttgaaagtgtattatttagtttccaacttttggagagtttctaataacctttctgttactgatttttacttcaattccattgcatcagaaagcatagttcgtatgatttgaagtattttaaatttactgagacaatttgatttgctgaaaaatatttcatagttgtcagtgcacaaatcttgccaacttttggtaaatgtctcataggctttt

SEQ ID NO: 908313 - DNA, 619 bp, Homo sapiens
gtgcaatgtccgctgcacccactgtcctgcgcccactgtctggtactccctagtgagatgaacccagtacctcagatggaaatgcagaaatcacccgtcttctgcgttgatcacgctgggagctgtagactggagctgttcctattaggccatcttagctccatctctggaagtttttatcttacaaggagtttttcattttatctaagtcatcaaattgttcataataccctctgatcacccttttactatgtggagaatctgtagtgatgtccccatatttatttataatattattactttgtgtcttcactttgtcttttatgatcagtctggccagaaaattgtcaatattgtttatcttttagcaggagcaggtttttctttcagttattttctcattgttttcctgttctgcattttattaatttgcaattatattttaaacattttgcttattttgggtgaatttgtccttcagatttacatttttatagtggaaattaagtgcattgatttgaaacctttcttyattttgcacataggcattcagtccttttaatttccccaattactagtttagaagcattccagaattttgatgaattatgctttctgt

SEQ ID NO: 908314 - DNA, 586 bp, Homo sapiens
attggtttttcagactgtaaaatttctattgacctatcttaaattcactaaatctgtcttctgccatctcaaatttaatattgatcctcyctagtaaattactgaatatgatctagcacatttttaattcaaaatactgcatcatgacaagtaaattttattatattaatgcaagaatagttcagttttataaaatcaactgacataatttgttacatctgaaattacagtaaaactaaataatatcagtgaagattgaagacactgttgataaaatttaatgactaacattgttaaaacctaagttatgagaatatagaaaccaaatatgataaactaagaacaaatagtactctaaatagcaaaacattaaaagcattttaaattttctctctcattagcagttaatattattttgaatattctaccaaatacactaagaaaaggatcacaaatattgcaagagataaaatattgtatttttgctgatagcgcaaatgttcagatagaaaacctacagaactccaggtaaaacaaaaaagtcctctgagaattaacaagagacatggcatggttggtgcatatt

SEQ ID NO: 908315 - DNA, 644 bp, Homo sapiens
tgccctttaacgggcatgtgtgagaatttctctgggagacacatgggttttcagggtcataggacataaatactggcaggttgcttttctgaatggttcatcaacttacactcagtgtatgaggggtctcattcaccaatcagtagtatcctcccttccaactttttctcgtcctgatgggtacagaataaaatttcatgtttgctttaattcatatatatgttattaacaaccagtgtgtgagcatctcttaagtaagatcttagccattcaactttcccttctgtgaattgcctttgtttcaaagacaaaaaaagcagatcattcaattttcccataagctatatgggaaatcctgtaggaactgtgaaaaaaatgtatctcacctctttctgttgtccaacttacacttctctttaaataatgttacaggctgtcgataagctgatagatttgttcattccttttagaaatatgttcaggcaatatataatatgttcaggatgtagaggggrgtataagtcacatgatacctgccctcatggttttcctgaattgatggaagagatgggccagtgttttgttgtcttactttctggaggagtaaacgtcaaggcgtgagctattcatacttcgataaatga

SEQ ID NO: 908316 - DNA, 612 bp, Homo sapiens
tttaggttggctgtcctcgtcacctctgcccaggaaaggcccgaggcctgactaggcccccaaggagccagccccctccygaggcacctccctcccaaggagacacatccacgtggcatggaaacttttcggtaaacgctcaaaagtgagagctggttcccttaccttggaggggacattcagggatggtaagagataagacgtttctaggaagaaaagaaaggggaagtgagaagataaaagtcttcacataagaggcaaatgagaaaagcattttctgccaaattgtgaaaagtgaaagaaatgaaagcaagcttgctttggagacagaaataaacactaggcaaaaagaaacaacttttccataaagcgttttgtaacagttaggaaaaactcaaaggtaatccatgatattggtccagggatgcctagaacaaggtctgcttaggtgactggaaaagacacttgcccctgtgaagaaatttcagaggtaccaggaaagttccctgacccccaaatgcctcaactgtttggttcatgacccgcacaaaggcctgaggctgagaggcttgtgggatagagacccagcttgctctccactagttaacctgt

SEQ ID NO: 908317 - DNA, 607 bp, Homo sapiens
gttctcttggatcgacagtgatgagcaactctgatgcgcatccttctgacttcctagttaaaacgtttaccgtctcatacttttagtctttttataaaccatcttagaagttatgatttgtagataacatacttcactaaaactacatgaatgaaaaaggatgatcaggaaaaatgctttgttttggggacattcttaaattggaaaacactaaattaacatttccacagtgtcttctacagaatattatttcctaaaaagacaagaggtgtttaaagacagaaagagtattatagacccaataattctgagaaaaaagcgagatttttgaaacatcaaccgggactcttttctccaagatttttcaaaactcatagtgtgctggtgtgcattttgaatctcaaaggagggacacaatgtgaggctttaagtactgactttttatgtggattattttatgggtctggaatttgmcagcacacagattaggaatcctggctaatccaaaccctttatctctcgcttcatctggaaacccgtgctcttgttttagtactagtcttattagcttagtcacactttcaaactcacaaggaatttgcttata

SEQ ID NO: 908318 - DNA, 588 bp, Homo sapiens
cacctctacatataatgactcagcttatcagcccaataaaagccctgttttcacctttgttcaaggtggcattgctttgagatccacccccagtttcctccttacttgctgcaagtaataaaatccgcttgttaaatcctcactggttgtggtcattgtaactgccaagcaatcagaatcaatttataaatatgtaggaggataaaatacagatataaatccactgaaagacgtttcattaatagtagcatactctgcacatactctgaatcattttttgcttacctgcagctaagaccaatcgtctgcctggagccacatgcaatcccagcacaggcatttggaggcttagtagtcctcctctcctttttcattcattttgttttttctcttattcttttgtctctatactcttcaacttttatattttttattgactacactaagcttttcttgagctccctagatttgataaagttgtccttctggcatgtttttgccagctgtcatggctcatagtgcaatttaagcctctgttgcacactattgtaaatccaggtaatgaaagscacaaacttctcacaagca

SEQ ID NO: 908319 - DNA, 595 bp, Homo sapiens
aagagattattttggagatttaaggactgcgatgacggccccactgggttttggatttgcatggggcctgtagcccctttgttttggccaatttctactatttagtatgggagcatttatccaatgcctgtacccctattgtatcttggaagtaattaattgcttttgattgtacaggctcatacatggaaaggacatgccttgtctcagatgaaactttggatttggacttttgagttaatgctggaatgagttaaggctttgagggactgtcaggaaggcatgattgtgttttgaaatgtgagaaagacatgagatttgggagggcccaggggcggaataatatggtttgtttctttgttcacacctacatctcatcttgaattgtaatcaatccccatctgtcaagggaaggacctagtggcaggtgattggaacaggtgagtggtttcccccacgctgttattgtgataatgaatgagttgtcacaagagctgatggttttaaagtgtggcacttcctcattcttacamgatttctttcttgcctgccgcaatgtaagacatgcctccttccccttccaccatgattgtac

SEQ ID NO: 908320 - DNA, 500 bp, Homo sapiens
ttgcccagaattttattcctaaacactgtaacattctaaatggtgaggttttwgttattagtattgttgaaaacttagaagatcaccctaaatggaatagaagccatcttgaaggaattccactatccaaattagggacaattaggagggaaaaataacaattatggtagtaaatgtaatggataaaaaataagtaataagtccatttgatacacacaatacacaagctttgaggagaaaaatttcttctatagaacaaaaaacaccccatgatgtatcaaaacattatattcattgattactaattaactacaaaaaacatctacaatttttacatgaagaaatctggaggacactgcatgattcatatgatcaaacaacatcaacaataatattacaaactgactttacagcctcactcgaacaataaatgacacaatattagttgcatagtattcttgacaaagttgtttattctgaataggcggaaaataatcaga

SEQ ID NO: 908321 - DNA, 500 bp, Homo sapiens
ttgcccagaattttattcctaaacactgtaacattctaaatggtgaggttttagttattagtattgttgaaaacttagaagatcaccctaaatggaatagaagccatcttgaaggaattccactatccaaattagggacaattaggagggaaaaataacaattatggtagtaaatgtaatggataaaaaataagtaataagtccatttgatacacacaatacacaagctttgaggagaaaaatttcttctatagaacaaaaaacaccccatgatgtatcaaaacattatattcattgattactaattaactacaaaaaacatctacaatttttacatgaagaaatctggaggacactgcatgattcatatgatcaaacaacatcaacaataatattacaaactgactttacagcctcactcgaacaataaatgacacaatattrgttgcatagtattcttgacaaagttgtttattctgaataggcggaaaataatcaga

SEQ ID NO: 908322 - DNA, 595 bp, Homo sapiens
ccgcctgtcttctcaaccacctgggatatcagactaagctttcccaaacctgattcctgatgcactcccargtgtgcttttccacacagtcttcccagcttgctagagaataactccctttttctatttgggcaggacaaaaacccggagtcaacttgtattcctccttttctgtcaaataccaaatcagcacattggccaatttggctagtcctactcaaaagacgctgagatgctgagcaatcctccccacctcattcttcagtggcctgagccaccattatctatcacctgaatgagtccaatgtgcttctttcttatccacttttgtgccatcatcaacaaagcagccctaagattctcttagatcacaagctagatcatacctaccacaatcactcattatcttttcaaccaccttacagaagacccacaatcaccaacaagcacttaccaaagaaagaacattttgtcttcatataattctactggagcggttttcctcttatttctcacacttacccagcattccccatcctgagcaccttacaggacctgtttccactgcatgaaggctcttccccagatgccctca

SEQ ID NO: 908323 - DNA, 601 bp, Homo sapiens
tgtgctttataagctatccaatgtatggaattttggtacagcagccccaacagactaagatattaataaaataaagatrtaagatctctgttgaaatgcacaaataatatctgagaagaagtagactatctttaggatatttcatgaaatttcatttgagttggttaattattatttggccatatataaagaatctaatcctgagaatttcaagcggaaagccatatccagtacttggatgaaccaatgtcaccctaaaatgccttaatgaggtgagactaatgcatggagagcttaaggtaaaacggcggggggtgggggaacatgtgatcccttctgcctgagaggttctggcatctggttaagagtctaccatcagccagtgaaacagataagtcaaccattaacccctgcctaagtactaacctacacaagtacatcaagtgctataggagttaaatgaaatggaagattattcttatataggactgagcacagattcccaggagttaactcttgacttagaccaagaaagatgaacagaaaagacatctgtaagcgaaggctgccaccagactaaagcaggaggttgtgaatgaac

SEQ ID NO: 908324 - DNA, 601 bp, Homo sapiens
tgtgctttataagctatccaatgtatggaattttggtacagcagccccaacagactaagatattaataaaataaagatataagatctctgttgaaatgcacaaataatatctgagaagaagtagastatctttaggatatttcatgaaatttcatttgagttggttaattattatttggccatatataaagaatctaatcctgagaatttcaagcggaaagccatatccagtacttggatgaaccaatgtcaccctaaaatgccttaatgaggtgagactaatgcatggagagcttaaggtaaaacggcggggggtgggggaacatgtgatcccttctgcctgagaggttctggcatctggttaagagtctaccatcagccagtgaaacagataagtcaaccattaacccctgcctaagtactaacctacacaagtacatcaagtgctataggagttaaatgaaatggaagattattcttatataggactgagcacagattcccaggagttaactcttgacttagaccaagaaagatgaacagaaaagacatctgtaagcgaaggctgccaccagactaaagcaggaggttgtgaatgaac

SEQ ID NO: 908325 - DNA, 623 bp, Homo sapiens
ctggagtacaggggtgtgatcatggttcartgcagcctcaacctcctgggctcaagtgatcctcccacttcagcctcccaaatagctgggactacaggtgcatgcccttctaatttttttatttattttgtagagatggggtctcaatacgttgcccaggcataattgttgaacaataggataatcgtggaaaatccattcaaatgcttgtgtgtagagaaagtaaatcaaataggaatcttcagtaacacagagcaatgttcattcaatttattttattttatttttatagatcctgggggtacaagtgcagttttgttacatcaatatattgtctagtggcttttagtgtgcccattgcctaaatagtgaatgttgtacccaataggtagttgttcattcaatttaaatagttgaaaaataagtttacaaaaaaaatagtaattaagggaaaaaagggaagatggtctacaagtgctgtgttgtttgtcagagaataatgaggatatgtggtggggtctgttgattatatctgatgtgaaataaaacagggcactattgaacattatagaagattgaagatgaaaatgaaaaggatttaacacattaactttgcgtggcaa

SEQ ID NO: 908326 - DNA, 643 bp, Homo sapiens
tataccacctgtgagatgtcacctacatgtgtcacccaagcatattgcttacgttactatcacctgagcatgtcatcagggtagcagttgcctaaacatgacacctgtgtcgctatcctataaacacatcttctgcagccatcacctaggtggtggttacctgcacgtatctgcctgggtgtcaaccatgttattattatcttattacctcacctggagagctgccagctacacatgtctcctgagcctgtttctttacagagctgtcacctgaacctgccacctgaactcctttcacctacaaaagtcatttaagcaggttgtctttataaccaacacctatgagtgtcaccaagtgcaaattctgctcctactgtttgtaagccatggggtcttgggtaagtcatgccatctctctctgagtctcttttttttttttttatctaaaatatgtcactccaggtgactgtcactcagtaatggcgcctggtagagaggctattttttcagtctagctgagttacaaacaaagaaaatcattcccagaggggagactggtcccctgctgttcccatgtcactgcgctctttattctgagatcarggagtggagggggacggcgtcttctcaacaaagtccccct

SEQ ID NO: 908327 - DNA, 629 bp, Homo sapiens
attttgggggtgagattctagattcctactccttctgcctctgtgctctcaccccccagaaacttcctttccttccttgaacttgcctctggtaatagcacccaggataccgcrtatgagaacaatgtatgtggccaacacgtgtagagcagctcacaggtaactgtgtgccaggcactgggctacgaacttctggatgtttttctcaggagttccacaacaattccttcacatgtattgttacacagacacgccagacacacagaggaggcctgcggcttagggtgttgagaatttgcctccctccctcactgacagcttctgaatcctcttgggacccatcctcaggacaagagaaggccaattcttctccatccagattatacaaggtgggaaccaggaatctgcatttgtagcaagtcccctggccagtcattgttctctccctggggaaactgagtcttgaggcagggggtggtggtatggtttggctctgtgtccccacccaaatctcatcttgaattgtactcccataattcccatgtgttgtgggagggacccagtgggagataattgaatcatagtggcggtttctcccatactgttctcatggtagtgattaagtctca

SEQ ID NO: 908328 - DNA, 631 bp, Homo sapiens
gcaaatactctaaaatcaatcacatgttcacccataaagcaattataaacaaatttttaaaaaagctgaaatcataccaaccatactctcaaaacacagagcaataaaaatagaaatcaaaactaagaagatctgtcgggccaggcacagtggctcatgcctgtaatcccagcattttgggaaggcaacgcaggaggaccacctgaggtcaggagtttgagaccagcctgaccaatatagtgaaaccccatctctactaaaaatacaaaaattagccaggcgtggtggcaggcccctgtaatcccagctactgggaaggctaaggcaggagaatcgcttgaacccaggaggcggaggttacagcgagccaagattgcaccattgcattcgaggctgggcaacaagagcgagactccatctcaaaaaaaaaaaaaaaaaagaaagacagaaaaaaagaaaaaaaagaaaaagaagatctgtcaaaaacatacaattacatggaaattaacctgctcctgaatgacttttgggcaaacaatgaaattaaggtagaaatcaakaaattctttgaaactaagaaaaacaaagaagtaacatgccagaatctctgggacatagctaaagcagtatt

SEQ ID NO: 908329 - DNA, 648 bp, Homo sapiens
cctttggatttgaacccagcctggtctgccatgatcctccttacctcctcaatatgctgcctacaaaaaaatgttcaaacatgtataaacccatacagggtgcaagtgcaaattattccttctgtggaagtgcaaaatagccaagtggtgacgggaacttggcagggatggagtgaaatgagtcagggacagctttttgaggtaggagagctgttctgtggggctgagagaggaggaggcatggcaggcagcgggtgaggggagagaattttagtgggagcaagacaggggaagaggggatggtacagtgtggcctgcttgcagtgctgggctgcggacgggagcaatgagaccaggggcaggatcagctggaaaggccaagcaacgtctgattaatgtgggctcccaggccagaactgtgtatgtgggtgtgtgtgtgtgtgtgtgtttatgtggaacatgggtatgtgtgtgggatgtgctgggggtagtgtgtgatgtgtgtgttcgtgtgtataagttcaggtagggtactgggcatatcagaaagtttccagctttaggtttctactattcttctttcttttcttacytgtggttagatactgcccttcatccatatatacactactcagtgttaaacctaca

SEQ ID NO: 908330 - DNA, 639 bp, Homo sapiens
tttgcaacgaagaagcccgcagtgccacacgagccctgaggcatggactggagccccaaaggcagcgcacaccctgctcctgagcctgctgstcatttcctctctgtgactccatacctagcacagatgttgcactgaggcttgtgtatgccaggcaaggccaagctggctcaaagagcaaccagccacctctgcaaggatccacctggagcaggtggaccagccaccaacctcacccacttaaggaagcagggaatgtgtgtttgtaccatgcattgcactacaagtacatttctcctgagtttggtggcctaggttttcttctaggttttttatggttttaggtcttaagtttaactcttcaatccatcgtaagttaatttttgtataaagtgtaaggaagtggcccagtttcagtattctgcatatggctagccagttttcctaacaccatttattgaataaggaatcctttccccattgcttgtttttgtcaggtttgtcaaagatcagatggttttagatgtgttgtgtcatttctgaggcctctgttctgttccatttgtctatatatctggtttggtaccagtaccatgctgttttggttactgtagccttgtagaatagtttgaagtcagg

SEQ ID NO: 908331 - DNA, 591 bp, Homo sapiens
ggctgtctcccctctggaggttccgggggagaatctgttcctgacttccggtgtctggtggctgccagcattccttgccttgtgaccacatcgcttcaatctctgcttctatggtcacactgattttttcctgttctttgatgaagtttccttctcaatccctcttataaagagacttgaaattgcatttagggcccacctggataatccccaggaaaatctccctgtctcaagattcttagtcacatctgcatagtcccttttgctatgtaaagtaacattcacaggttccagggcttagaatggggacatctttggaggcctttattcagcctactacagtcagataaagcacacagaaaagctggtgtgggttttatttgtatgttgtctctgagtgttttcaaggttaagatctttcaaggactaaagaatattggttaattcctaacatcctgggctatacaattagtgtagaaagaatacgcccttttggggtggatgagtcaaaatactcacactttattaaaaccattttagtgaattttactgtttgttctgtggatgytacagaaaaaggcatattctctg

SEQ ID NO: 908332 - DNA, 596 bp, Homo sapiens
ccttttattgttatcttttaagccatttatattcactatgccaagtcaggtatagtcttattttgccattttattttattctttgtgatttatacttattgttttcttcttccctatacattatatgtcattgtagctcctctttcttcctattagttattttttctacaaattttattctatattcccatttgtagaatgcacatttttgttctacagttatatatatattcacatatgcacattatatgtatataaaaatatacatatacacagagattagcatatatatgtaattttcaaccaattataagaatggaagactattactggttctcctatataagagacttatcacacttttactttcctcttctctactcctgctcaacatgtattaattaattagttttttaggtcaaattcctggtattaaaaatattattttttattttgtttattttctttcccaagaaatatatttgatacaagaattatgtaacatattgatgttaaaaactagtaattatttattaatgtgaattttaatggrtgcagtacacataatcaatttttaatatcatattacctcttga

SEQ ID NO: 908333 - DNA, 530 bp, Homo sapiens
aaatatgtctttgaaactagtgctgacctttccttaaggattaagcattgaagagtggtagattgttaagattgatcattggtagcatttctttattgagatgattttttccataacattattaagaacttaaggctctttggtttattttttaaaataagagaatactctttttctgtatctagagtattaagaattgtttagaagatgtatgataagctacatttaacatgaattttataacatatgaaatgcctttgtaagattactgtgtgtgacaggatttctgtgaggacttacccctttaaatgtgctttcatttgtttacttgagaatgtatcagaaaatcctaaattaaacattcttttacttaaaacttagcttataattagaaatatttgtaaaagccttcaaataaaaatgtatgttaatatttcatattatwatgtcaatttagtggatgcaaaatattatttcattgtggttttaatttgcacttttcctagattttgaataagattagacatttt

SEQ ID NO: 908334 - DNA, 647 bp, Homo sapiens
attggttgagaagctcagcaatgggtgtcctctgcaaactgggactgatggtaggagatgctgttaaagaacagggatcccaagtagagatgggatgatagtatccccaaaacagaagtaattgtagttgttgtaatgagcagtaaggttagaatagcaactaggaaagattgatctgcaaaactctattgtcatggctagtagaacatgactttcttaggggaatattagatgggaggtcaacaaaagtatttcttaatatatgtaatcaaaggaaatcaagtgtaaatcaaagagaatgaccaaggttagcctcaatcgttttaagaggtttattggccaatgttaaggatgcatctgaggaaaagaacacagaaccacaggaaaaatctgtggtccatcttttctccgaagagggtctggagacttcaatacttaaagggaaaagagccagtactgggggaaagaagaagaaaggaaaaaaaaaagggagggtagacacaagaggcaagcagttgcagttgcattcttttgagtctttgatcagtgttcacagcatatacattttacatgtgagaggggtrgaggaatactcacttatgcattcatctagtactcagcgaatctgcattttaaaataagataaa

SEQ ID NO: 908335 - DNA, 590 bp, Homo sapiens
agtctcagaaaggccctcaaattttgctagttgttttccttcaagagccttattaacttctcatagtaaagatacaagcaaaaactctgatagttgctgtaaaccaaataattatctaagtctcaatcaatttacagatttattgtgccaaggttgagaatattgacccatgacacagcctcaagatgtcccgagatcatatgctcaaggtgattggttttgtgctttagggcaacataagacatcaatcaatacatgtaaggtttacactggttcagtctggaaaaggaggatacctcaaagcaggagcttacatcttttaggtggattcaaagatttctgattgtcaattggttgaaagagttaagttatataaaagtctggaataaatagaaataaacttctgggttaagataagggattgtgaagaccaaggctcttaattatgtagatgaagtctgataagtggccacccttagaggcaataggtagcaaatgtttccttttcagacctttaaaakgtgatagactctaagctaatcccttcaatcagaaaaagttctggaaaggaaagaggattctctatacaa

SEQ ID NO: 908336 - DNA, 610 bp, Homo sapiens
taacagagactatttgttttattacagtgaaaatcttttcaggggaataaagtttttgaaatttgagttaggctcccacttggtcagtgctcaatgaatactaattaatttctgcctttaatagtcaaaaktgtatcatctttagatggcaagttaatgtctttttctgtatcttcacatatgctgtattagtttggtagggctgctgtcataaattgctacaaacttgatgacttaaagcaacggagatttattttctcacagttctcaaggcaagaagtttaaaatcactgttggaagggttatgctctttctttgaaggccctaggaaaaatttcttcccttcttttcctaggttgtcatgattgttgtcaatatatgtctctctctcttttcaaatgacatgattctctctgtgtctgtgtctccgtgtctacatttccctcttcttataaagatacaagtcatgttgaatttagggctcaccataatgcagtatgatctcatcgaaacttgattacatctgcaaaggccttatttccaaatatgactctattcagtgggcatgaattgggagttgggtattgagtaaatccaggatatattgcta

SEQ ID NO: 908337 - DNA, 534 bp, Homo sapiens
ctcagaggtataataacagaatttcccaaacctgagatagatagaaatattcaagtacaagaaggttatagaacactaagcagwtttagctcacagaagactacctcaaggcatttaaagtcaaactcttaaaggtcaagggtaaagagagaatccttgagaaagcaacaagagaaaagcaaacaatttacaatggaggtccaatatgtctagcagcagacttgtcattggaaacttcacaggccaggagagagtgaaataacatacttaaaatgccaaaggaaaaacttttatcctagaatactatgtccagcaaaattatccttcaaacatgaaagagaaataaacactttccaaaaacaacaacaaaaacaacaacaacaacaaaacaaaaacaaaaacaaaaccccaagcttggtgactgggagctgaagctgactcccagcgtagaatagctgctctaaaaaaacgtggccagactgctttaaaatgagtccccagtcctgtttctcttcactgggtgggatctctcaa

SEQ ID NO: 908338 - DNA, 600 bp, Homo sapiens
ccacacatgagatatcaccctcttccattacattgatgacactatgctgattgcacatagtgagccagtagcagcaaccattctagtcttattgataagacatttgtgtcagggggtaggaaaaaatctgacaaaaattgacaggtcttctttctcagtgaaattactagagacttgtgatgtgagagacacgtcaagatatctcttctgagatgaaagataagttgctgtatgtggcctctcctacaaccaaaaaagaaacacaatgcccagtgggcctttttgatttgggaagcaacatattttttattagcttgtgttattttgacttatttaccaaatgatctacaaagcaaatagttttgagtaagtcccacagtaagagaaggatctacaacaagtcaaggctgctgtgcaagctgctctgccacttgggccatatgatccagaagatccaagggaacttgaggtgtaaattgcagatagacatgttgtttgaagactttggcaaacccctataggtgaattacagtgacagtacaggccttcaggattttggagcaaagycctgccatcacctgcagatgagttctctccttt

SEQ ID NO: 908339 - DNA, 675 bp, Homo sapiens
tccattcagagttctgagtccccatttccaggccctagctcctgaataacaataccagacacactttgggcyagaaggaagctgccactttgaaggaaagaacccagtcctagcagcattcctcacttgctaactgaagagccctcaggctatgaataaccagaaacaatacccaggtactatgttatcagcttttggtaagagtttgagacttgctggcttcaagtcccggctcagtcagaaggaggtagagcacaaagcaggctcttgggttttcagaatctaggacatggctcttagacagcatttctagaccttccctgggccagaagggagcccagtgccctaaagggtgagtcccaggccaggcagcattcaccacaaactgactgaagagcccttgtgctttaagggaacattggcagtagtttaacagtacttctcatgggcctgtggtggcagtggccacagagtgaggttcccctgcctttggtgaagaaagggaagaatgaaaagaactttgtctagtgctttgagtgccagctcaactacaatatactaggacaccatggtagacttctaaggttttaaatctagtctctggtgcctggaaagcacctctagacctgcctgggcctggaagaagtcactacactgaaaggaaggacatagacc

SEQ ID NO: 908340 - DNA, 641 bp, Homo sapiens
ataggaacctaagtcctacaatgcaagaggatgaatgttgctaacaatctgaatgagtccggatgtaaattctttcttagagcctccagttaggtgcccaggccagcggacatctagattctgtccttgtgagaaacagagcaaaataaacacttaagactctcggatttctgagatgtattaatacaactgtgacaaaataagaatgtgttgttttaagttactattttcttttgtaatttattataacagcaataataaattaatacaatcctcaaaataatgaggagaagaaaacctcttctgctttagtgaacagacagtgctcactgccttagaggatcttatcttctaattgcagtagtgtctttgtcatttgcgctgctgtaacagaaaaacacaaaattgcatcatctataaagaatagatatttatttcttacagttgtagaggctgggaagtccaagattaaggcaccaacaggtttggtggctggtaagggcccaattttcactactaagatggtgcctgattgttgcwtcctttggaggagagcctgtttctcccttggcagaagaggagaagagagtgggtcccctcccacaagccctttttatatttatattggcattaattcattc

SEQ ID NO: 908341 - DNA, 671 bp, Homo sapiens
tttaaattgtaataatccccacatgccaagggcagtgctaggtgggcataattgaatcatgsgggaaatttcccccatactattctcctggcagtgaataagtctcatgagatctggtggttttataaatgggattttcttgcacaagctctctcttgactgctgccatgtaagacatgtcttgcttccccttccctttccaccatgattgtgaggcctctccagacatatggaactgtgagtcaattaaacctctttcctttataaattaccaattctcaggtaagtctttattagcagtgtgagacagactaatacaccagcctgcagaactgtgagctgataaaattctgtttattatatgtcactcagtctgtggtattctgttttatagcaacagaaaaaaaacagattaaggccatatatatatataaaatttagcaatttcaatttcagtgtttagaatagtctgtcatgttaggtaaaaatctaaaagatttctgggcttctaatttagaatatataacagatttggacttgaggttttaatttataaaaatgttactgcatttgtaaacagtatgtgattgtgccaaccaactaattatttatagcatagggaatactttattgtattaagttagtaaatacttgacaagttttgatttctt

SEQ ID NO: 908342 - DNA, 632 bp, Homo sapiens
taaaatttaaccctacttggccaattccatattgttggaattgatttactaaaagtgcattaagaatttttgcatctatgtccatagtattattagcctgtacttttcttttcttgtaatgtcttagactagttttgggatgagaataaaaaagaaaacaacaacaaaaaaaatgcagtatttcctcttgttcaatattctgaaaaagtttgtgtagaattaacatattcattcttatgtaaatgttccattcaattcaccagcgaaggcacctgggcagagagctttccttgtgggatagtttttaactatagatacaattctttaataaatatgaggctattcatgttgcctccttcttgagcaaactttcggggttgtgtctttcaaggaatttatccattttatccaaggaatttatccattttatctaagttgttgaatttattggcataaaagttgtttatactgttttctttttatcttatttgtatctgtagacactgtagtgaggttacttctttctttcctaatattagctgcaattttgtctcctctcttttttttccttttcagtgtagctagaagttgattaacttcaycaaacttctcaaagagtcatctgttggttt

SEQ ID NO: 908343 - DNA, 646 bp, Homo sapiens
ccatcagactaacagtgtctgtgtctcagcagaaaccctacaggccagaagagagtggaggccaatattcaacattcttaargaaaaggattttcaaaccagaatttcatatctggccaaactaagcttcataagcaaaggagaaataaaatccttttccgacaagcaaatgctgatgaaatgcgttaccaccaggcctgccttgcaagagctcctgaaggaagcactaaatatggaaaggaaaaactggtaccagctgttgcaaaacacaaaaaaataaaaagaccaatgacactatgaagaaacaccatcaactagtgtgcaaaataaccagctagcatcatcatgacaggatcaaattcacacataacaatattaaccttaaatgtaaaagggctaaatgccccccagttaaaagacacagactggcaaattgaataaagagtcaagatccatcaatgtgctatattcaaaagacccatctcacgtgcaaaggcacacataggctcaaaataaagggatggaggaaattttaccaagcaaatagaaagcagaaaaaagcaggggttgccatcctactctctgacaaaacagacttaaaaccaacaaagatcaaaaaaggcaaagaagagcaatacataatgct

SEQ ID NO: 908344 - DNA, 667 bp, Homo sapiens
tttaaatgaacaaaaagcaaggtggtttcagatttctcctgcccaaggtaaaatgtcaaaacataccacacagacaaacaaacaaagattcctagggcaatatgaatataaatttaaggagaaaggcttcaacaaaataaatatgtacccaataaaatagctatttctagaagcccaaagagaggtaatataatcccatggtttcaactaaaaaaatattaataatctcagccagcaaagaaaaaaattgagaaatactaacttaatttagaaagtcatgatatgaaaagcctagtcttgagcactaaagagagataaagatacctttataattatttaaattttggtaacaaattaaaatttaaatattaaacttattcttgaaattcaaatgataaccacatctcttatgaatggagatctacatctaaaacttcaaaatgaaatagcaaagaaaaaagtgacttacctgaaataatgaagacaacagatcaatattttattcctaacttttataatcttagaaatattgggaattagtttttggaaatcaaactgtcattattagttttacttaagacacttttttctttcaaaatcattagtaygtttttataaaattaacaacttagtatatgtagcaagagaaaaaaaggaacagaacaaa

SEQ ID NO: 908345 - DNA, 585 bp, Homo sapiens
tatctttttccatcaatttgctgtcagtctacctatatcattgaatttgaagtgagtttcttgtaaacaacacatagctgggtcatgttttgtaatacactctgccaatctctgcattttaatggatgcatttagaacatttacatttaagataattattgatatattaggactaagtctgatattttattattatttgttctctgattgatccttttgtttattacacttttgtttcttttttcttgccttcctgtggtttacttggacattttttgatgtttcattttgatttaattgtgattttttttttcggcatatcatgttatgttgtttccttagtgcttattatgtttggaaactctgtagatggacagccttccatgatggggaggaagctgcagggcctgggtctccttatgccactggatggagtctggggagacacagggcttcacagtggctgcttctgtgggtgaattaggccatgtgctgtgtcyaagttgtggactgggggccaggactgtccagggctttgctgctgctactattgctgctgatgccactgctggcagatcaatctct

SEQ ID NO: 908346 - DNA, 362 bp, Homo sapiens
atcagatctctccgcagctcccaaaagtgtcccaagggttagcactgaccagcttgctgggtttgraggaaccacaatgcatcgggtgtggctctcttcctgctagctgctccgaagtgagctcctactgattctattcagttggacgctcacattcagcgagtccagggggtttttcatgctttgagcatttttaagagtctgctatttgcccagttcagtgaggggcactcaggatgtatcagtggttcaggctgacttggttcctgcctaggggaagacccacaagaccagtacccaatgcagggatggcatggatggtaggggaggcttggaggccctaacccactcttgaagggatg

SEQ ID NO: 908347 - DNA, 362 bp, Homo sapiens
atcagatctctccgcagctcccaaaagtgtcccaagggttagcactgaccagcttgctgggtttgaaggaaccacaatgcatcgggtgyggctctcttcctgctagctgctccgaagtgagctcctactgattctattcagttggacgctcacattcagcgagtccagggggtttttcatgctttgagcatttttaagagtctgctatttgcccagttcagtgaggggcactcaggatgtatcagtggttcaggctgacttggttcctgcctaggggaagacccacaagaccagtacccaatgcagggatggcatggatggtaggggaggcttggaggccctaacccactcttgaagggatg

SEQ ID NO: 908348 - DNA, 362 bp, Homo sapiens
atcagatctctccgcagctcccaaaagtgtcccaagggttagcactgaccagcttgctgggtttgaaggaaccacaatgcatcgggtgtrgctctcttcctgctagctgctccgaagtgagctcctactgattctattcagttggacgctcacattcagcgagtccagggggtttttcatgctttgagcatttttaagagtctgctatttgcccagttcagtgaggggcactcaggatgtatcagtggttcaggctgacttggttcctgcctaggggaagacccacaagaccagtacccaatgcagggatggcatggatggtaggggaggcttggaggccctaacccactcttgaagggatg

SEQ ID NO: 908349 - DNA, 563 bp, Homo sapiens
cagaaacaagattggcaaaatgctgactgttgttaaaatgggataatgattacatatgaattcatgttacatatttgtgatgtttgaaaatagctaaataaatttctgtaaatgtaatcagaaaaaaatcaagttttcacagttgaacataaaacacttgctgatgcattaaactgctaagataacccttctagaagaataacttgttgaatgaatccaggtaatatccaaatcacttatagtccaagttaaagttgtcatttaaatccactctgctttgagacaaatcttgctggatataggaatctgttatttttgcctgtttccccttgtttggtaatggtgccccaacttttcctttagaaacattcctctaccattttgtgtgcctttgatggcctgccaatcaccccagtgaaagagtagacacacctgacttaagcttggagcaaatctgactccctcccaagaacataaatcctgagcrtatcattgcttgaaaacagaactgaaccattcaacaactgagatactcctagttggctactctaagatgtgacagt

SEQ ID NO: 908350 - DNA, 614 bp, Homo sapiens
acaaaatctttctaaatcctttaaggtttgcgactcactacacttctgattataaatgaatattaagctagctaaaaagaagtagagtgcaaattaggtactgaaatggagaytatcatggctctgcaataagaaagaatttagctttctacaattacttgagccctatagcctccgtgtcacctggaatacatgtttaatactgattttcaacgttaaaaaaaaaaaaagtcacaaaaacaaactccttttaacactgtttcactggccctagtatttacaatttttttaaattaaaaatcttgataattcaagttttcctataacctgtctttatagattttttttttagatttaaatggtcataagtgttatactacctcatatttctctctgtatgataagcccaaatattccttaactgtgtttgatctactttgtggtcaaaatttgggggataggagagaggtcctcatcaaaactcaagatcagcaaaagctgaggaattttatcaacaccagacctgtcatataagaaatattaaagggagttcttcaatctgcaaaaaaaggatgttaacaagcaagaagaaattatctgaaaatgagtagaat

SEQ ID NO: 908351 - DNA, 599 bp, Homo sapiens
acattgtaattgaggtgtgtaaaacacttatatctatattaagaagactaaaagataaaactattaaaaaataatagctgcaaaaatttgttaagagatcagaaatattataaaaatgcaaattatggcatccaaaattcaaaatgtggagtaagaaaggtgttaatacataaaaaatttatttgtgtttatgtttctctttttttgtaataaatgttcacgtcagttttaaataccttgttataacgaagtgttttagtatacctcatggttaccacaaagcaaaaatctataatagacacagtaaaaacaaaaaacaacaacttaaaatagactaccagagaaaatcacttaaccacaaaggactatggtaaaaaaggaagaaggaggaaaggagtcacaaaacaactaaaaaacaagtaaccaaaatggcagtagtaagtctttacctatcaataatattgttgcgtgcaaatgggctgcattctttcattaacaaacagagtggctgaatagattaaaaagcaagacccaactatatactgcytacaagaaacttacttcacctataaaaacacacataaactaaaagtgaaagt

SEQ ID NO: 908352 - DNA, 561 bp, Homo sapiens
ttacatggcatagttaaccttaacatagagagattttacatagaaggggtgactaatctaatcatacaagcccttaaaagcagagaactttakctggctggtaggagaagggaaagccagaaagactcaaatcataagaaggtttcaacatgccattgctggtttgaagtgagtgagccacatgagaaggagcacaggtagcttccaggagtggtgagcagcccctgttgacagccagcaagaaaactggtacctcactcctacaactgcaagtacagctccttgaacaactcgggctggggcactgatccccggcaaagacaaaaatctacctgtaagttttgactcccccaaaactaatagcctactgttgaccagaagccttattgataacacagccaattaacacatattttgaatgtatttcatatgtagtaggtactgtattcttacaataaagcaagctggagaaaaaaatgttattaagaaaatcctaagagaaaacataattattattcattaagtggaagtggatcatcataaaggtcttcatcctcattg

SEQ ID NO: 908353 - DNA, 588 bp, Homo sapiens
tgttgcccataatgtcttccctaaaagtctayggaagaaatgctggacttggaataaggatttctgggttacagcaaaagttctctgacatcactaggactgtgattttgggtaaatttcttgagattaacattaaaccctacaacatcagaccctctcctaagtttcttatatattctttataactatctgcctgttgtttggataaaaaataaggaaaaataataataataaatagtctcagaaaaataaagttattaaccaatgatatgcaactagttaatgacagattgggaatcaaactcaggtatgattccaaaatttatgctgctttcttctcttaatgtgtgcttcaggattctcatgcgaaaaattgcaaaaaaaaaaaaatgctgaagaggagggaggttaaatggaactataagccttacattacttactgctctgaaattccatgattcaaagcacctatcaaaaaccaacaaccatgagacactttggagagggactactgctctttaaaggcagtgggtttacccactggctccccagagaaaagcaatcaccagcaatgatagagctactaat

SEQ ID NO: 908354 - DNA, 515 bp, Homo sapiens
tgctacgtgatatttatctctacatatgccccagtgccacaattagattcaagacctttaagacctgcagtcatttcatgtacatcttggcttccctagaattcaaggatgtgttgtgtatagcaggaacttgtgtttatgataagaagcgttggtcttcctcctgctgatcaaaataaaggaaatgtttcacatgtttattcattatttaccctctctaccctagtacttccaaaaaaggatctgagatggcttatagtaagacacttgaaaatactgtcagattagtaatatttttaaaggaaaaagcaaatatgcccaaaatgtacgcccatgtactaagagcgtcattttatattatttttctgggcttagtggaagccaaagcagaaaggaaaatgagttttatgataatgattgawgtttaaagtacacatactagctgtttcaatgaaaacatattttattggtaccaatctacaatgtgtttgctcatttccaaagagtattggaca

SEQ ID NO: 908355 - DNA, 574 bp, Homo sapiens
tagaaacaagggggggctaatttccggtccacagttcttttgcctggccgctccayttattatgtaagaggggaaatccctatttaagacggaccgaccgaatgtaaagcaaattcaacactcaccgttctatttgggggaaggggggaattatggggaggcagggtgcgagtagggattaatgagatttgaaaagtgctcatgggtttggtgacagaatactggcttctcacaaatgcctggaaaaaggcctgaatccgccctggtgttggaactgtgcctcaatttccaggcccaccagcacgcaagtgaaacccgcaacgttaacaagtgtccgtttcgctgatttctgggtaaataactcctgggtgtgtgtttatacaaatccattctgatacaaaccctgggcaggagagggttgtagtaaaaaataattcgggattggggaagcaggcggtgtggattgcgctggcaagggggatgggaaagagtggcaggcatgaccagaccagccgcggacagcagggcttccctattgctaggtcgccggcgtccttagttaccactgattgga

SEQ ID NO: 908356 - DNA, 629 bp, Homo sapiens
ttagtttatattcatgaatgatatggccctgtagttttcttgtgatattgttgtctggctttgatatcaggccactaatggcctcataaaaagagttgggaagtgtttttacctcttctattttctgaaagaatttgtgtagaattggtattatttcctccttgtttgatcaaattcattagtgaagccatctggacttgaacttttcttggttggcaagctaattactaattcaattagtgtacttgatacagatctattcagattttctgttgttgattgggtcatatttgatccttttttgccttttgggaacgtattctttttatgtaatttgttggcagaaagctgttcagataacctcctggttttcagccttcctactcattctctcctttggtatctgccaaccctgataccagagccttttctagtggtctcccaggcagattgttttccttcctgtatgagttttgggctgtggtgttttaaactgtttcgtctgtcctctcttttatggtttggctctgtgtcccyacccaaatctcatttgaattgcactcccataattcccatatgttgtgggagagacctggtgggacataattgaatcatggggatggtttctc

SEQ ID NO: 908357 - DNA, 615 bp, Homo sapiens
caacacattagataacctggatgaaatttacaaattcctagaaactcacagattaagaatactgactcaagaagaaatggaaaaatctcaatcaaccaatagcaagtatagattgaatcagttattaaaaaccttcccctaaagaaaagcccaagactagctagcttcgctgatgaattctaacaaacatttaaataaaacttaacacaaattctaccaaactcttccaaaatatagaagaggaaggaacacttcctaacacattctgtgaggccaccatcacttgagaccaaagtcagacaaatatagcacaaaaaataaaattacagaccaaatcaattaatgtaatatatcctgttaataaaatggagggagaaaaccacacatgattatctcaatatatgcagagaatgcacttggcaaaatttaacactttttcatgattaaaaaaacactcagcaaactagaaatagaagccaacttccttaacgtcataaaggacatttgtgaaaaacccacaactaaaatcatcaacaatggtgaaagactgaaaactttaccctaagaatcagaaagaaggcaagkatactcagtttcattacttctgtttaacat

SEQ ID NO: 908358 - DNA, 644 bp, Homo sapiens
tcaccaccctgggagtgagcatgggaacatggctgaacaccaaaagtttgggttctttttttttttttttgagacagagtctcactttgtcggccaggctggagtacagtggtgccatctcagctcactgcaaactctgcctcccaggttcaagagattctcctgcctcagactcccaagtagctgggattacaggcacgtgccaccacacccagctaatttttgtatcattagtagagatggggtttcaccatgttggccaggctggtcttgaactcctgacctcaggtgatcctcccatcttggcctctgaaagtgctaggattacaggcatgagccactgtgtgtggccttgaagttggggttctttcccaccacatggcacccctccaaggagatgatggcagggcctgagacacccctgggaccacagcagaacttctggaacctttcccaccactgaccaaggtgctaggtgccatcctaattgttgacacaaccctctgggtaggcaccaatacaattccactatgaagatggggaaactgaggcacagagcagcctgctctcacctrgggtgggatagccagggctgcggcccagcagtctgaagtcagaacctatgcttttcacccctgttccac

SEQ ID NO: 908359 - DNA, 581 bp, Homo sapiens
aaagaggcagagcacagaggatttttarggtggtgaaactgtaatcctttgtatgatattataatggtagatgcatgccagtatacatttgtccaaacctatagaatgtacaagatcaagagtgaacccacatgcaaactttggactttgggtggtaatgatatatcaatgtggtttcatcagttgtaacaagtctatcactctggtgtaggatgttgatagtggggaggctgtgggtctgtggggacagagggaatatggaatatctcggtacctttcacttcattgtgctgtgagcctaaaactgctctaaaataaagtcttttttttttaaaggcacatcaggtgaatttgctttaatatataatttggaaaacgaaagtttagtactcagcatgagagctttttttggagaaacatgatatcaaaacaagggcccagttagtgaaaagattccagcaagtatattccctgttgagaagagcctgaggagtcatcagagaaaaggcaattaattcccctctccaggtggactgttggaatggagggtgtaataaaacgccagcaaacagatctgtctg

SEQ ID NO: 908360 - DNA, 696 bp, Homo sapiens
tccttagcaaactaacacaggaacggaaatacaaatcctgcgtgttcacactcacaattgggagccaaattatgagaacacaaggaaacatagaggggaacaacacacaatrgggccttttggaagatggagggtgggaggcagtagaggatcaggaaaaataactaatggatactaggcttaatacctgggtgatgaaataatgtgtacaacaagcccccaagacacaagtttagctatataacaaacctgcacatgtacccctgaacttaaaataaaagttaaaaaaaatttaaaaaacagaaaaaacttcttctgacaccatcaacaaggaaatcaatcaggaataaacacataatttgagagaatcattgtggccaaataaatgtgtattctactggtatttcacatcacctgacaccattgcccatggctaaatgcttaatggacctccctgatattcaagttaaatattttaatatgcaatgtgacgtgactcctaggcagaaaaaaaatagttacattactcctattgtagcatatagctggaataaaatactgttttttcttatgaagcaatgaagagctcatacataatgacagttagaggaggcaaaatatagacacagtaacccagaaaactattatggaaataggctaggaacaatatggaaataacataaagaaaacataaaa

SEQ ID NO: 908361 - DNA, 657 bp, Homo sapiens
atgagacagaaaattaacaagggtattcaagacttgaactcagctctggatcaagtggacttaacagacatctacagaactctccaccccaatcaacagaatatacattcttctcagtgttacatggcacttattctaaaatcaactgcataattggaagtaaaacattcctcagcaaatgcaaaagaactgaaatcataacaaaaagtctctcagaccacagtgcaatcaaattagtactcacgattaagaaattcactcaaggggctgggcatggtggctcacacctgtaaccccagcactttgggaggccaaggcaggcggatcacgaggtcaagagatcaagaccatcctggccaacatggtgaaacccatctctactaaaaattacaaaaattttccggtcatggaggtgtgtgcctgttcacagctactcgggaggctgaggcaggagaatcacttgaaccaggaggtagaggttgcaaaaaagaaaagaaacaagaaattcactcaaaaatacacaactacatgraaattcaacaatctgcacctgaatgactcctggataaataacgaaattaaggcagaaatcaagaagttctttgaaatgaatgagaacaaagaggtaacctaccagtatctctgggacacagctaa

SEQ ID NO: 908362 - DNA, 650 bp, Homo sapiens
taggacttttgcttctagtgtggctaacactcccwcttttataacttttagcttaagtgcagacactgcacagaaaggctaaaacactggtagaaaattcagtttatctaagaggagagccggaaagtaaaagaggaatattgcaaaggagagagctaaaagggggctgccccaaatgatatgcataaactctgctcaagtacctgacggaaaatgaacaaagcatatatgcaaagcattcacaaactagcccaactgtcactcaacttttgagctgtcacccaaaaatcagtgtttgcaatttgagttaaatgaagttaattgccttttaaaaccactgaaaactccgaaggaacattaccagacataagtctccacaaaaaaaggaaacagacaaacaaaacattcataaggcgcaggatacaatccaaaattatacatataatggtacagaaaaatttaataagactagagagaaaagacgaatgccaaaatgaactagatgttggaattggcacacaaaaactttaaagcagccatttagtaataggaaatatgcttgcaattaatgaaaaagtaagaattttcaagttatgagtagaaatatgtaataaaaattctacagcttaaaatataatatctaaaattta

SEQ ID NO: 908363 - DNA, 591 bp, Homo sapiens
taagctggggaaaaataaagataaatttgtcacatctctcatgatgaatgatgtgtgtgcaattaaacagccagcctggcgctgtgagcaccttggtgtgttatatttttatctgcagggccgttactctcatgtttcctgtcacagaatctaaacatcacagatctgcagaggacaggcgaggatgctgagtgatgccaagcagttctgaaagtaggtcagtgggtcaccatgcggacctgaacagaaaggacatgtacctgacccctgagaggccaaggctcccacagccagggcagtggctggtggaaaccctggatgaggaagctggagccaaggcagctgcatcccagggggcaggattgccctggtacacacctgaggaaagccaggctttaaagtggggctgcaggaagagtgaaagatggggctggaagggtccctctggagttatgcagctgcagacacctttggcayggaacaagagaagagtgtatgtgtgtttgggtgcccacatttggaggaaagacatagggtctatgcacattgtgtggagcttactaaaggacaagcaggtgaaacactgcttaa

SEQ ID NO: 908364 - DNA, 624 bp, Homo sapiens
atgaaactgagtgatttcaaatggaggttcaatgtgaaagtcagagawtggggagagattgagtttatatttttcatttccagccaagttatggattagagtgtttcccaggaagagaagtactagctggggttgagaatcaacttctaggactgaaagaaacttgaaatactaggcaagttttatggtagacagatctaccataaagttaagaatcaaagtggaaactcaattctgtgaacttacccagcacaggatggggacatggaaagccatgattgggagctatacagaaatctgggaattgctgtgatccctcagattgaggtttccaagacaaagaagaattggttaggtggagagaagtggagacacccggcactcatgctgggtcatgctaagttaaaaggaccatggcttcattccaagtctgactcaatggtaaagaaacagttgtaccacttccttagtcaggctttgcacatgaactaggctagagctagagtaaccatcttatctgttttacataccagttctcttttgaatatagaagaaatcaccttaataattatgtctggaccatagtcaaaagcttggattttctaggcagactgagacatattg

SEQ ID NO: 908365 - DNA, 624 bp, Homo sapiens
atgaaactgagtgatttcaaatggaggttcaatgtgaaagtcagagaakggggagagattgagtttatatttttcatttccagccaagttatggattagagtgtttcccaggaagagaagtactagctggggttgagaatcaacttctaggactgaaagaaacttgaaatactaggcaagttttatggtagacagatctaccataaagttaagaatcaaagtggaaactcaattctgtgaacttacccagcacaggatggggacatggaaagccatgattgggagctatacagaaatctgggaattgctgtgatccctcagattgaggtttccaagacaaagaagaattggttaggtggagagaagtggagacacccggcactcatgctgggtcatgctaagttaaaaggaccatggcttcattccaagtctgactcaatggtaaagaaacagttgtaccacttccttagtcaggctttgcacatgaactaggctagagctagagtaaccatcttatctgttttacataccagttctcttttgaatatagaagaaatcaccttaataattatgtctggaccatagtcaaaagcttggattttctaggcagactgagacatattg

SEQ ID NO: 908366 - DNA, 632 bp, Homo sapiens
atttttctgctaagattttgctaagataaagcaccttgccaatgtcagtaatctattgccttttttaaacatagtctcctctggtaatctctactcactgattcttcacctaggagccacttctcatgttaacaatcaagaaacaatgtcatcagtgatgctcagcatcatcttgaaccttctgcacactatagcaccacatggctgtgagtgagtgatgccaactctatggtacctggcatggtgctgagatgactgttacattgtgctgagatgctcagcttggctactggactatatccctgcaggaagtcttagaaacatttctcatgcagctcaagacatattattctaaatttttttctcaatttagtatgtgtttattttaaaagtcactaattttgctactatattccaacaaagagtaaagtcataacagaaatggagagcaagatgtatcgtacttacaaaaagcctgttatgacaacacctcaaagctgcaatgggttggcaaatacacatgttctaatatcatcrggaatagatataaacaccttttcctcagtggtaacatacagatatatagatatagattagatatagatatatagattcagatatagatatagatg

SEQ ID NO: 908367 - DNA, 578 bp, Homo sapiens
tacacgtaattaaatgctgcagaaggctaattcctttgatgacaaagcagaatttaaagtagagggaatttcaggcaaaaatattacccttccccatgagctttaacccacttccttttaacattagaaatggatcatattcaatagacatcagtatttcaaattctacttgaaatttgcaagtgctaaatcatcagcaatgacaccctgtattccctaggtgaaaataaaacaagtggaaatctagaagaaattaaaatggcctatgatatgttttggttctgtgtccccacccaaatcttattgcaaattgtaatccccacatgttgagagagggatttggtgggtggtgattggatcatggaggtggggaggaggtttctcccacgctattctcttgatagtgagtgagttctcatgagacctggtggtttcaaagtatgtggcagttcctccctctcgctctgtctttctgacaccatggtaagaagtgcttgcttcctttttaccttctaytatgattgtaagttttctgaggcctcccagtcatacttcctgttaagcctgcaaaactggga

SEQ ID NO: 908368 - DNA, 632 bp, Homo sapiens
atttttctgctaagattttgctaagataaagcaccttgccawtgtcagtaatctattgccttttttaaacatagtctcctctggtaatctctactcactgattcttcacctaggagccacttctcatgttaacaatcaagaaacaatgtcatcagtgatgctcagcatcatcttgaaccttctgcacactatagcaccacatggctgtgagtgagtgatgccaactctatggtacctggcatggtgctgagatgactgttacattgtgctgagatgctcagcttggctactggactatatccctgcaggaagtcttagaaacatttctcatgcagctcaagacatattattctaaatttttttctcaatttagtatgtgtttattttaaaagtcactaattttgctactatattccaacaaagagtaaagtcataacagaaatggagagcaagatgtatcgtacttacaaaaagcctgttatgacaacacctcaaagctgcaatgggttggcaaatacacatgttctaatatcatcgggaatagatataaacaccttttcctcagtggtaacatacagatatatagatatagattagatatagatatatagattcagatatagatatagatg

SEQ ID NO: 908369 - DNA, 633 bp, Homo sapiens
tttgtcttgcaataaacctcaggccccctaacgtgatttttttcatgacttggcccctgctttcctctccctcttacttctttaaaaatctcccttatttgctacactctatccatatcataatatttatatttcctcgaccgctctttatcacgtctctgggccacctctcatgctgttccagcttcttagtcatgttctcatcctctttgcttcctctcatttctgttcgtgttttagttctcagcttacatataatgtcttctaggaatctcttgaaatcccttaagtctagttaaagtttcccagcaactttccccatgatagtacttgctatatatatatatataccataattgcctatttccttacttgacttttgtattggcattgaacctctgaaggcaggaatgtgtttaccattttaaatctggaatccagcttctctcacagtatctggcatagtctagcttcttaatatgttcttgttaaataaatgaatagaagcaattcatgagattttaaggtttcctttattagctatatgaaatcattgaggtttcaaataaattattttttcttgatraacttagtaactctttggacagacagagtcatgatgatggcattgct

SEQ ID NO: 908370 - DNA, 601 bp, Homo sapiens
gcaaaatagaaacaaatcacaggaatgaygatcttgagacatcaatttaattcgtacttactcaatttggggtagctgtgaaggataaagctttttcagtaaattaaaaaataagtggtttgaaaaagctcacttgatatgaaaatgtttattaaattgtaatgactgacagctggattcattaagtgaggacattttccatgcaaacatgaggatcattatatcaaagaaggttggtttcagctgtagttggggaatagtcacatttttaggattcagtcattgtttctgatgtcagagctatatatttaaaaagtagaaaattcaagaagagtaagaggccatgacaaatgtgtattttaaagtctgcattcaaaatattcatattgaatattccaagccactacaatatttaaaattgtagtaatgagcgatgtttccattttgtactctgaagcaactccatcctttgtgacatgaagggttcccattaactgcacaagaacatgaccaaggaagtttgacaaatgtttattggccgagctgactggtaaggtgtgatagattgaagacgggaatgatgagtaatagaaaatctcag

SEQ ID NO: 908371 - DNA, 625 bp, Homo sapiens
aacttatttcttctatgtaactgtttttgaaccccttaaccaacttctctacattctactccttcccttcccatcctctggtaaccaccaatctactctytactgtcatgagatccagttttttagttcccacatataagtgagaatatgcaatatttgtctatctgtgcctggcttattttgcttaatgtaatgacttccagttttattcgtgttgctataaatgacagaatttcattctttatagtgaataatattccatatttgtatatattgtaaagaatccacactttctttattcatttctctgctgatgaatatataagttgatcccatatcttggccattgtgaatattgctgcaataaacatgacaatatagacatcttttcaatataatgattcctttcttttggatatatacacagtggtgggactgctgaattttatgggagttctacttttagttttctgaggaacctccatactgttttccataatggctgtactaatttacattcccgtcaacagtatataagtgttcccctttctctgtgtccttatcagcttgttatattttgttttgataatagccattctgagctgagatggtatctcattgtggt

SEQ ID NO: 908372 - DNA, 524 bp, Homo sapiens
tatcatagacaaacttctgaataccagatacaagaaacccttgaaagtagtaagaaagggccaggcgcggtggcacaagcctgtaatcccagcactttgggaggccaaggcaggtggatttcctragctcaggagtttgagaccaccctgggtaacatggtgaaaccccatctgtactaaaatacaaaaaattagccaggcatggtggtgcgtgcctgtactctcagcgacttgggaggctgaggcaggagaatcgcttgagcccaggaggtggaggttgcagtgagccgagatcacaccactgcactccagcttgtgctacagagtgagactccgtttcaaaaaaggaaaaacaacaaaaaaagaaaaagtagtaagaaagaaataacactttacctctaaagggagcaattcgagtgacagcatgtttctcatctgaaaacagagaggccagaaaaaactactacagtgagattccaatactgaaagaaaagaactctaaacccataattcatacccagtga

SEQ ID NO: 908373 - DNA, 583 bp, Homo sapiens
ctactataaagttagactactttgtacttcaagcaaatattgcctatagttttataaggtaarcaccaaagcagctgtccagactggtcatgctgatcacaacacatgaaataagtcaatggtgcagctctgcctgtcaatgacactgcaatgcctatccagacatcttttcaaaaaataagcagaagaaaaaaaatgttcagattttggactttatttattttttaaaaaaggagttagatatgacagttttaatggactttaaagtctccctattcctataagttttaataacatgaatagaaactcaattaatagtatttttaatgcacaaagatttatgaattttatgccagttttaactgtaccttccctattattactagatatttgtaattcagtcattgtcaataggcttccctcggttcacctttggataccattactgggaggtggacgtggggacaagcaaatcgtgggatctgggtgtttgcaaagaatctattaatcgacaagaggaagttctgctgtcttcagaacttggctgtggactgtggttttgagaaataaaaagctcctctga

SEQ ID NO: 908374 - DNA, 685 bp, Homo sapiens
tgatatctattgagattagagrctggattcatcagtttatttaatcaaaacaggttatctcagaggaattattgagtcctcagagaggtgggaaataatcccttccctgatatcaagtggaaatggtcctttgctccttgctcagctcctcaatcaataaattgccttttggagattgatttcttttaaaatattacttgcctcaaaagatggcttcccctagaggaacagttcttatttgcaggagagataaatgtaaagtctaagactttttcctcttgccaaatgtgtgcaaaacaaagtctgccgtacactccatacaacctacaccccctttctaaataggaattgcataagattaatagatactggtttaaatatgccagctatctataagtgaccctcctttgtggttacgtttagctgcccacttcaaggtagaggcaataaagtatagtggttcaaagaatgcacttcagggccaggtggaaatggttgaaacccaggggctgctctgcgctatctgtggaaccttagactaatgaacttactgtcagttttctcatccataaaatggggtatttacttcctggagttgatgggcagattgagtgaggtactggctacgagacactagatgccagacatgcagaaaggctcaaacagtaaaagttatattgctatt

SEQ ID NO: 908375 - DNA, 718 bp, Homo sapiens
aaaagcaattgcaacaaagataaaaattgacaactggaacccagtaaactaaaaagaaactgtcaacagagtaaacagccaacctacagaatgggagaaaatatctgccaactatgtatccaacaaaggtctaatatccagaatctataaggaacttaaatcaacaagcaaaaaacaaacaatgctgttttgttatcaaaaagtatgtcttattcattcctttcaattttttgtacccgttaaccattcccacttccccctaataaaaaacgtgtaaatgacatgaacagacacttctgaaaggaagacatacacatggtcaacaagcatatgaaaaaatgctcaacatcactaatcattagagaaatgcaaatcaaaatcacaatgagataccatcttacacatgtcaaaatggctattactaaaaagtcagaaaacaacgtatgttgtatcagaaagataatccaccatgatcaagtgggtttcataacaaggatgcagagatggtttaacatacgcaattcaataaatgtgatataccatataaacagaattagaaacaaaaatcacatgatcatctcaatagacacagaaaaagcatttgacagaatccaacatcctcttatgattaaaactctcagcaaaattggcatacaagggatatgsctccatgtaataaaagccatctgtaacaaacccacagccaacctaatactga

SEQ ID NO: 908376 - DNA, 605 bp, Homo sapiens
agaaatctgcaagtgtgggagctcctctgggaaatttctgaaggacatcagcaggctgtattttttcaagaagtaagatagtagaaactgtgcttacgccttttcctaggctttagttcagaacasttttattaatattactattattatactttaagttctagggtacatgtgcacaatgtgcaggtttgttacatatgtgtacatgtgccgtgttgttttgctgcacccattaactcgtcatttacattaggtatttctcctaatgctatccctcccccatccccccaccatgacaggccctggtgtgtgatgttccctgccctgtgtccaagtgttctcactgttcaattcccacctatgagtgagaacatgtggtgtttggttttgtgtccttgcaatagtttgctcaaaatgatggtttccagcttcatccatgtccctacaaaggacatgaactcatcctttttatagctgcatagtattccatggtgtatatgtgccacattttcctaatccagtctaacattgttggacatttgggttggttccaagtctttgctgttgtgaatggtgatgcaataaacttatgtgtgcatatgtct

SEQ ID NO: 908377 - DNA, 496 bp, Homo sapiens
cagctagaagagacacatccccctacacaaaacccacacaagaatatcaaaatctgtttgataatgaatttaaattttaaaaaaatccatacgctaaaatcatttttatttttaatttttccctcttttttcaaattcatggacataatgtttcttattgcaacgcagaaacatctcaaaatagctgccagaattttacaaataaacataaaaccaaggcttttgcagtacaaaaatagtcctcacttctgctctaaaggttggttgcccttctaaatctttgttagggttgggactactttggcagcttaggcaagccgccacatttaaataatttttctaactggagatattcatacatacaggagtttatgtctttactctcaaatatgtatgtgcattaatttttttaaaaaagagaagcagaatatgactagaaagttaaaaaatatagatgaaatcrattcaattgcaatgtaataactctttatgttat

SEQ ID NO: 908378 - DNA, 656 bp, Homo sapiens
acctttttttgtttttgtttttgagacagagatttgctctttattgcccaggctggagtgcaatggctcaatcttggctcaggctcactgcaacctctgccttctgggttcaagcaattctcctgcctcagcctcccaagtggctgggattacaggcatgcaccaccacacccagctaattttgtattcttagtagagatggggtttcaccgtgttggtcaggctggtctctaactcctgacgtcagtgatcgtctccgctgcagcctcccaaagtccagtgtctacagacatgagccgctctgcctggctcaatgagacactaatctgctgctacagaaagcagatcagtgacagcctcgagactgacgacggagatcaggagggctgcgagggaaggcttatagagtccggcgacgacttttgctgataatggatgtgataattttcctggctgtggtggtctgtgtatgtcaaaacttatcaaattgtacacttaaaatatgtgctgcttattgtataccaatcatacctcaatagagctgttaaaaattgcatattgaatatataatccrgttcttagtaaccaacctaataatgataactgctggtagttacatgtatgctgtagcctaaattaagatggaaaagaatagg

SEQ ID NO: 908379 - DNA, 661 bp, Homo sapiens
gacacatcacagctagtggtggttaagtcttaaatataaatctttttactayagatctcacacactttccttacccaagactctctcccatttgctgtgacttctgggtatccccacaaaaccccaaaggggcctgctaatataacacttgcacctattaatgtgcctgcctcctcacagcagactgtgaatttctgtatgctaagaaccacatctgccttacttttatatagccaacacttagcgtaacacctggcacatagtgggcacctactaaatgctcactgaatacataaagaatgccacctcagggttagttgcatatttattctttgtaaaaatattaagagttagtagaattatcaaaggtagcacatggtgaaatgatgttattactaaatattgaaaggaaagatcatgagaaaattcaggtaatattatagtcagcatagtcaaatttgagtattctcataattgtttattaacaaataagtaagaagttgagaatatagaaattagggcaatatactttgataaagtcctgtaactggtcccaaaattgacatcatattcctattcaatgatcctgtcattacacaggagtgtgaatgaagtggtcaaaacaaagaaaccacagtttttaatatagtttaaattaaaa

SEQ ID NO: 908380 - DNA, 689 bp, Homo sapiens
tagataaggaagcagagaatcagagaatttcccagtagtaagcaaaagagataagaattaaatggttattgaattaataaatgcctggcctgagcctatataaagtctttggcacaaaataaacatccaaaggcaactccttttcatttaattgtcaggtcaattgtcattttcttcaagatgtcttcttgaaacactagaataggctaaatctctttattttgtgcctttctagtcctgatttctcttttagcatttatccaacttaaatagttttataaaactgtcttcccaacagatctagaaagaactgccttactttaatcgcaacccaaacaagttccagacattccagcaactatttgaaaatatcatgagtatatcttgagtatatcatgagtataccttatttacctttgtatctacccagacctggcatagtgcctggcgtttgctagatgaatgaataataaatgaataagactaaagtaaagtcggtacacttaatttgggttttagagtatggtttaaatccaaagagagaataagataaaatgaatgaagtaaacatgatattctgtagcagagtayacaaacaggtatctaaccagatagaaaaagaagtgattgtttatagattaaaaaactgatgggaaatagacagtacttggaagaaacttcaattactt

SEQ ID NO: 908381 - DNA, 585 bp, Homo sapiens
atctcctcatccatgacatctgatcctacttatcttctgttcacacattcctggcctgtctttatagtacttgtcaggaagatgacaagtaagtcaacttccatggctcytaacagtgattctgctccaaaacttcagttctgaggtttggggtggcatacctgaagctgtgttctggaatatattctctagaagcctatcaaggaaattagaaacagacttaaaaactgagatgggtttacaacccagctgtgattcaccatatccatttgtcttttgctattctcctcttatattgctgctagaagttcccttttattgccatcattttttgatatatatctgtgcttgtgttaatcatgaaggaaaagttaagacgtccataaattctaaatacattcccttcattagttgtctcactacttctgcttaaaagaaaaataacttcaagagaattgtccaacattgttaaagaacatttagtcaacattatatttattaagaatgttatatgtacctcataaagatgtacaaacattaatattttgtaccaataaaacatttttaattgaaaaatggctttgg

SEQ ID NO: 908382 - DNA, 643 bp, Homo sapiens
aacagtctcacagagtttaaaaagggcacatmataaagaggctgctagattcatcaatcagaaaattctgatggatatttaagagatgattgagcagatccgttgaggcagacaccaagcagaaacatttaagaaatgtttgcacacaagggaattaagagcagtcaatgtaggtgtgaaatggagaaagcatgtcaatttaatggtacaacttaagggaaaatttaaggcagattttcatagaatggagaatcgtaaccatttttctatgtggagatagcaaccagtgataggagaaagggtgaagttcctgggaaggagctgatcaatgcatcataaccaaggacgatgtaggaatccatgggaaggagaccacagtgatacattttagcattagaagaaaaaaaaaagactcaagtgacattgagtaaagagaaaatggaagacatttttaaatgtgaaatgtgagagaagtgggtggagtttatcccttaaagccttcactttgtttgtgtaaagaaaacagtgtgtttgtaatcaccaagaaaggggttgcgtaaggaccttggggaagaataaaattttcaccacagggataagagatagattgcggaacaattgggaaggccctgctgagctcaga

SEQ ID NO: 908383 - DNA, 609 bp, Homo sapiens
tatatattatatatgtttatatatatttatatagatattatatgtgcatttataatatattcttcaagttatctacgtaaacaatcctgccccctgtaaatatgactatcattacttagtcattatatagcaccttttaatatattggattcaatttgctaacattttgttaaggatttttgtgtctgtgtttgtgaagattattgatgtggacctttctttttgcctattgtttttgtttcatagtgctcatagagtaatttggaagtattttctcctcttccattttgcaaatattttgtatagaattgtttttatattttgtttaaatgtttggcaaaattcaccactgaaaccatctgaaactgatattttctttgtgaaacgtattataactacgagttcatttaaaatagatataggggtattgaagtgatctatttattcttgagttagttttggtggtttgtatctttcacatatttgttcattccaattaaattggaaaattaattgacataaygatagtttttatagaatctgttgagatatcacctatcttaatcataatattgacagtaattcaatttcattaattttttcaatggg

SEQ ID NO: 908384 - DNA, 581 bp, Homo sapiens
ccaggacacaccagcacagcccaaggagatggcagaaagtgacctgaaattccctcctggtgatgccaccaacacatctgagcacgcacaggcactcttggacttgggggtgctatctctgttgctgctagccacccatcctccccatccttatgcaccccccacccacctgcccagtgccagctggataccctgcctgttctcacctggcagccttctctggctacctgaaactcctttgctgcgtaggcagaagccaaaagtaccaaagaattcacggcctctgggaacagcccttggatgtgttcctttcaccttcataacagccctgagacacaggtactatcagtatcatcctgctgtacagatgaataaggtggggcacagagagatgggatcactggcccacagtcccacagcttgtggctggcagagccaagattccagctaggccacctgtcaccaagtggcactcatagctgttcatgcctcctcatagttgtacccagctatgcccagcatgtgtgctcatgcyattcacctgccctgacgttgggctgcttccagccatctccatgggc

SEQ ID NO: 908385 - DNA, 701 bp, Homo sapiens
aatatgtatgcatgcaatagaggagcactcacattcataaagaaagttcttagaggcccacaaaaagacttagactcccaaacaataatagtgggagactttaacaccccactgtcaacattagatagatcatcaagacagaaaattaacaaagctatacaggacctaaactcagctctggatcaagaggacctgatagatatctacagaacttttccccaaaaaacaacagaatatacattcttctcattgccatttactgtaaaagtgatcacataattggaagtaaaacacttcttagcaaacacaaaagaactgaaattataacaaacagtctctcaaaccacagcataatcaaattagaactcaagattaaggaattcactcaaaaccacacaactacatgagaattgaacaacctgctcctgattgacacttgggtaaataatgaaattaaggcagaaataaagacgttctttgaaactaatgagaacaaagagacaatgtaccagaatctctggaatgcagctaaagcagtgttaagagggaaatttatagcactaattkcccacatcaaaaagctataaagatgtcaagttaagaacctaacatctcaatgaaaagaactagataaccaagaacaaacaaaccccaaggctagcaggagacaagaaataaccaagatcagagctgaactgaag

SEQ ID NO: 908386 - DNA, 686 bp, Homo sapiens
taaattaattaagtacactgatactggtaacttgggcagaaaggaagaattcaatagaaggatatgtagaagaacttatagatccaaaggaaaagctgaagatattttcttctaaaagaatagaaaccrgaatggcttccgtgagtcttttcagaacaccattttagaggagacttagcttatccttgggaaatttcacttaaagctcaacattcccagcgaaaaaaagaaccagatttgcctagtttgaatcctgtgccccttggctggtaaagggcaggcagccttgactgatatgaagaatgcacacaatgggggagaaggagctacaccaagtaaattgtgtgctattactggaagaagagggaatcgttgctgggcagacagaagtaacagatgtccgctacagatgcctactggtggaatatatgaattttattctaactttatacaataaatattcatctgtgtaaaaaatttccatataataatgagtaaactcctaaactttctcttattctttcatttcaattgatgacaataatcttaaacctaaaattttagtgtgatattctaagaatgcaggccttaggttttagaaaagaaattttcaggaaaaaaaaatttaaagaatgcaattttatgaagtgaaaaggaagaaattttaaaaatctcttaagatacca

SEQ ID NO: 908387 - DNA, 509 bp, Homo sapiens
atcctcctgcctcagcctcccaagtagctgagactacagaaacatgccccatggccagctaattttcatattttctttttttttttttagaaaagcatcttgctgtgttgcccaggctggtcccaaactccttgcttcaagtgaccctcctgcttcggcctcccaaagtgctgagattacaggtatgagtcaccatctctggcctatgattctttcttaaactgacacttttttttctaattatttaagagcactctctcaaatcgttagaagaaaagatcacattaataatgttaacactagctagttctgaaaaaaaaatagactaaatcctcttcaattctttaaatgtgaacttcctagaatttcattctcctttaaccctccattccaaggcatgtgccagaatgataggcattaccggctgggcgcagtggctcacgcctgtaatcccagcactttgggaggcygaggtgtgtggatcacttgaggtcagtagttcaagacca

SEQ ID NO: 908388 - DNA, 641 bp, Homo sapiens
cttttatgaactatctgtattgaagtattaaaagaaaagactaaaaaacaatgcaatatcacctacttccaagtttacaatcttgcatctgccactaatttatgactggctctaccagattcttctctcttggaaccagtttactgctctttgttttcttgtttgaagtagagggatttaagtgcaatgggtttgtttggacttttacagtgttgatcttatcaacctttgggattgtttgtttctaaactccaggcatcaaacaaaggtggaactattggtcaggtaatttgaagtcatagatggggatactcaggtggcagtttgttttatcaaactagtgaatgtgaaataatagtttagaattaaaatttagagctcatttaaaaatgatggaattctgaagatttgggtttagcttaaaaacatttccccaatgatttttcagttttaatgcttagaaaatattcgccactaccctcaatcctttttctactttactgttcttttagaagaattttgttattactcagataggaattactttcccatgagcaagttattatagatttatctaaattaaatctcaytccatttaaatttttccacctaagatcttccactgtgcttgcagttctttc

SEQ ID NO: 908389 - DNA, 596 bp, Homo sapiens
ggaccagagtgattcacagctgaattctatcaaacacataaagaagaaygggcacgagtcctactgaaactatcctaaaaaatcaaggaggatggaatcctttctgattccatgaggctagtatcattttgatacctaaccttggcaaagatgccataaaaagaaaacttcaagccaatatccatgatgaaggtagatggaaaaatcctcaatgaaacactatcaaagcaaatccagcagcacatcaaaaagctaatgcaccatgatcaagtagactttcttcctgggatgcaagacttgttcaacataaacagtttaataaatgtgattcagcatataaaaagaatgaaaaacaaaaatcacataatcatcccaatagatatagaaaggtctttcaataaaattcaacatcctttcatttataaactctcaacaagctctgtcatgaaagaagatatcttaatataattacagccatatacaacaaacccacagccaacatcatactaaataggcaaaagctggaagcattccccttgagaacaggaagaagatatagatgctcagtgtaatcacaactctttcactacttctag

SEQ ID NO: 908390 - DNA, 636 bp, Homo sapiens
ttcactatcacgagaacagcatgggaaaggcccaccccataattcaattagctcccattgggtccctcccacaacacatggaaattcaagatgagatttgggtgaggacacagccaaatcatatcattccacccagcccctcccaaacatcatgtcctcatatttcagaaccaatcatgccttcgcaatagtcccccaaagtctttacttatttcagcattaacccacaatccaaagtctcatttgagacaagtcccttctgcccatgagcctgtaaaattaaaagcaagttagttacttcctagatacaatgggggctcagttattgggtaaatatagctgttccaaatgggagaaattggccaaaacaaagggtccacagcccccatgcaagtccaaaatccagcaggccagtcaaatcttaacgctccaaaatgatctcctttgactccatgtctcacatctgggtcacattgatgcaagaggtgggttcccatggtcttgggaagctctgcccctgtggctttgcagggtatagmcttcttcccagctgctttcatgggctggcattgagtgtctgtggcttttccaggtgcatggtgcaagctgtcagtggatctaccattctggggtctg

SEQ ID NO: 908391 - DNA, 556 bp, Homo sapiens
gttctttttaacaaccggcttttgcaggaagtaataaagtgagaactcactcactaccaagccattccagagggatccaccaccatgacccaaacacctccaattaggccccatccgcaatactgaagatcaactttcaacctgaggtttgaaagggaccaataaatcatagctaaactatagcactaactctttgtttaactctttaactgcccagctattttccaaagtagctgcatcattttatatttctaacagcaatgtatgaaggttaaaagctttctacaccctcaacaatactggttattgtttgtcttttggatcatagccatcctagtaggtgtggagtggtacctcaccacaaaattgttttgaatctccctaaatgtcagcaaatgttgagcactattttgtgtgcctgttgaccacttttgcatcttctttggataaatgtctatccagattatttttccattttttattaggttgtatttttgctattgygttatgagtttttttgtatcttcaagatacaaatcatgtattagatacataa

SEQ ID NO: 908392 - DNA, 633 bp, Homo sapiens
agccagggtcaaatggagcttccgactggagactgggcctcctcacctgtatgcaatgcttcaygcagcaaagtggcagccattcaccaattcatctctgcgtgtgttggagatcagttcgagtgttgtacatccagaaaggtggttgctattcactttgtctgggatgagaaagtatctggtggttgcttctcttccggatcactttttcctccctgtatgtgtatatgtcagtggtggggatggggtggattggcttttcaatagagaaggaattaaatgctattactaatgtacggacatgaatttaccatgaagtttttaaagcttgagggacttcttaagggtgaatcctaacaatatattcacttggtcatgtcattgcaaaatatatatatatgtatattaataatgttatatattaaaaaatatatattttaaccacaattgattttaagagcttataacataatattaaaaacatgatattcttaattattaattttctaacttacccataacatttttttatacttttgacttcatactctggattcatctctgctaatgcatttgatgtgatttctccattcctgagaattatgtgataagatactttagtgaattcagtca

SEQ ID NO: 908393 - DNA, 647 bp, Homo sapiens
tgaagctaatttattttttctaatacttgcagctaatttttttcatagacagaatttaatattcwccttcaaataaagatttaaaagactaacaattaaaacaacaataaatttttaaaaaacttgccaagttcaaaaatctaattattcaaagccaaagtataaaaccagttctgtgtggctcagggaatgagtttctatctaccactccggaatcttccaacactaacatggcatctgtataacttaagattttttatttgcaaatcttaagagtttacttagcggaagactgaaacaaactcaagatgttgggaaaagttgtgttcatttaaggaatgaatacaattaataagaaacaatgactgacatgatgcctaagtcattcaaagggaaaacacaaacaaacccaaaaatatgaatgttgacgcactcactgagccagaatgtgaatgcagtattgcagaaagttctgactctatttaattaatatgtgcttttggcaaaataagtgaggatttggcccaagataatagcttagacatctgtgtactaggacctctgagcaagtgctccgtgtcatctatattcagcatcagacaattttgttataatcaagttttcttgtcagtcatgcaatttaaaat

SEQ ID NO: 908394 - DNA, 630 bp, Homo sapiens
tattgggatttggttacttaggttgaatcaagtggagatgaggtcaaggaactgaaagggcaggttgtcatctgagcaaaaataaagacattgcatttccttaaratagctgttaggttttgcatgggaaaaacaaaacaaaacaaaacaaaaacttgagttgggttgctaaagttttcagcaaattacaggaaatgatttgaatgtgagtgaaactcactaggaagcagaatgaagagatagagctgagtgctatgatctaaaagtatacgtgtttgtacccgagttgatctgcggtggcttagcaaattccctgagaattaaaatcagaggacaatgacgcataatattccaatgggaattctaaatattgtacatttcatgaaaatccttagttcttgacacctcttctttaaaaatttaagcagttttactacagtataatgattataaagtacacatattttaactgttaattggcacatatttacaaaatggactttctgtgtaatcaccacccagtcaagatatggaattacctataacccttgctttgtacacctaatcattatccatactctgacttttataatcatggattggttttgtctatttttgtctgcttttata

SEQ ID NO: 908395 - DNA, 570 bp, Homo sapiens
aagagagcataaaggagtttctcaacctactaacgcctcagtttatttatatggtgataataatagtaactacctctagggtagatgtatgtaatgtgcagtagatatatgtaaagtataattagtataataataaactctcaatacgttccctccttctcatctttcttcctttcatttattctttgcctgtctttatgtctttccttatgtatatagctctgttttctacattcctcccttgttcccttcttctctcttttccttcctttctctctttctttctttcctcttttttcatatatttatttatctttcctcacattactgaaatatattttgaggtgctccacaactcacacagcatagccatcacagactatctgtgaagagggcatcactgccatcttccataatagacttagtgtgagtagggttactttggcacaaagctattctctattgtcctgggttccaggaccctgtggtttcaatgcttacctcgcttgggtcagtcctccwgagagactgtgggtgtctggctactttcttactcgccttctcacttta

SEQ ID NO: 908396 - DNA, 669 bp, Homo sapiens
accctatctcaaaaaaataaataaataaataaaaacttttagtaaattgttttactaaacaatgatattatcatttccatgtttaaaaatatttatcaaaagaatatcgtgttaaatacattatagtaatgttgcgaggttttttttgcaagttttttcttttattattataccttaagttctagggtacatgtgcacaacctgcaggtttgttacataggtatacatgtgccatgttggtttgctgcactcatcaactcagcatttatattaggtatttctcctaatgctatccctcccccagttcccaacccccaaccaggccctggtgtgtgatgttccccaccctgtgtccaagtgttctcattgttcaattcccacctatgagagagaacatgcggtgtttggttttctgtcttggtgatagtttgctgagaatgatggtttccagcttcatccatgtccctacaaaggacataaactcgtacgtttttatggctgcatagtattccatggtgtgtatgtgccacattttctttatccagtctatcaytgatggacatttaggttggttccaagtctttgctattgtgaatagtgctgcagtaaacatacatgtgcaggtgtctttatagtagcatgatttataatcctctgggtatataccca

SEQ ID NO: 908397 - DNA, 648 bp, Homo sapiens
tggccacatacatgtgttctgttctttcaaaaagtgttcatgttgtttgtctaatttttattttattttatttatttatttttgagatggagtctccctttgccgcccaagctggagtgcagtggtgcaatcttggctcactgcaagctccacctcccagaatcaagcaattctcctgcctcagcctcccaagtagctgggcttacagccaccacacccggctaatttttgtatttttagtagagacggggtttcaccatgttggccaggctgatcttgaactcctgacctcaagtaacctgcccacctcagcctcccaaagtgctgggattacaaaagtgagccaccgtgcccagcctgtttgtgtactctttaatggggtggtttgttttttgcttgttagtttgtttaagttccttatacattctggatatcagagatttgttggatgcataatttgcaaatattttctcccattctgtgggtcatccatttactctgttgatagtttatttttctgtgcagatgctctttagtttaattaggtcccatttgctaattttttatattgttgcaagtgtttctggtatcttacttgtgaaatycttgccaaggcctatgtccagaatggtatttcccaggttatct

SEQ ID NO: 908398 - DNA, 562 bp, Homo sapiens
tattaccacattgacaaatttccccctatgaatcttgaagaggacacattcaaaccatcgcacccmcttcctccttgctgttgtctgagtcagacacttgctttgtcttaaggccacttccttgcagaggacctgatgggctagtatacaattgccacagcggacctgattagggcagccttaggggactcatgggagagagcagcaccctgaaactagagtgtttcaattaaagaaaaaaaaaatcattcccaaattgtaaagcgcaaattttgactttgagacaattttatctccatctgggcctagaaatatttcttcatatttccactcaagtgagaccaagcaaatatcttggtcaatttaaaaaatcagtaatcccaagaatctgtgcatgaggcatacagcaatattttttaacatatataccttctggaccaaaagtagaggcacatggctaaacaacatgaatatcctcctgggttcaatctgaagtccagggaggtaagaagtgtgctagcttgcaaacatccctctggctgggatctggatttaaacactc

SEQ ID NO: 908399 - DNA, 581 bp, Homo sapiens
aaataaaaacagaactaataaatttagcaaagtttaggatataaaatcaacatgyaaaaattggttacatttgtcactagaaaatgagttatcaaaaagggaaatttaagaaaaaataatttacattagtatcaaaaagaataaaatgcctacgagtaaagctaaccaaagaggtaaaaacttgtatactgaaactacaaaacattgctgtaatcaaagaaaacacaagtaaatggaaatacatcccatgtttacgaactggaagacaacatttttaaaaatgttaatattgctgaaagcaatcaacagattcaacaaaatcccctttaaaatcctaattgtattttttgcagaaacaaaaataaatttttctaaaatttatacatcaagaggctgtcaatagccaaaataatttataaaaataaagtcagatgactcatacttcctgaatttgacacatattacaaagctacaataattgaagctgtgtggtactgacatgaatgcagacatattcaccaatggattagaatacagtccagaaataaaccctagtgtatgtggttcagtgatcatcaacg

SEQ ID NO: 908400 - DNA, 640 bp, Homo sapiens
gttgactctgaggcttctaattagataacaggtwtagttttattttcctgttttttgttttgttttgtttgtttgtttgtcttttgagactgggtctctgtcacccaagctggagtgcagtggctcaatcacaactcactgcagccttgacttcccaggctccagtgatcttcccacctcagcctcccaagtggctgggaccataggtgcacaccatcatgtctggctaatttttgtatttttgttagagacagggtttcaccatgttggccaggatggtctcaaactcctgagctcaagtgatccacctgtcttggcttcccaaagtgctgggattacaggcgtgagccactgtgcctggccaccagatatagtattgtggtgtttcagcaatgaccacaggctttgagaatctgtagcacttagtcccattttttttttccatctaaattttctgacctggtttctgttttgttccatgttttgtctgggcaaaccctttccgaggagaccagcatcctgttgatgcacattgccttcctgtgtgtacttctatcacaagtttcaaaagccatgcccactcccacaaagccgagttccttctctccatctgctccatgttgtgagacagacacataga

SEQ ID NO: 908401 - DNA, 643 bp, Homo sapiens
atattaaatttacatagagggacagctagaactcttcyttttaaaaatacctacctgaataaaatggtaaccataaattgcctagccttaggcctgatacaataaaaatgcctcttcctccctgtatctgtggatttcaaactatgcctctctctctggtgctccttaccacctagccctagatggtaaatgttccacaagcctttatggaaggcctaccatgtgtcagaactatgctggaacctccagaacctgcagcctagtaaaggacaaaaaaaagtagttggaaatttctacatggtagtaaaacacaaactgtcttaacagggtccttagcctaccctggaaagtcaagaaaaattgcctgaaggaggtgactcccaagatgacccttgatagaattcaccaaatgaggcctcagtgattataatctggtactaaaagaggaataaactaagggattgataatagtctggtactgaaagagtaataaactaagggaagctgaaatggaaagtaagtatctgtttataccccacaagaaggagccaaactaagactttatcctgataaacccccttccctcaaaattttaaatttgaaaaattcaaacctacagacaagttgaaaaattaatacatga

SEQ ID NO: 908402 - DNA, 674 bp, Homo sapiens
tagggcaatccaattccctttcctgcttaggaagggaagaggattggattgccctattctgggttacatgctcactgcttggctatgggagagaggagtgccttgattgacaatctcttttattgtacacattatggaagaggtattggtattttcccacaaggaaattatggcgctatcatcagaaggtgctgtgtgaacatgaataacacgtgctaacaggtatgcctttttgtccccagtcattcattcattacaggtgttaagttatataatgtatgactaagaataaaaattagaataagtaattgaagaatacgtacaacatttgattaatagtattaacctgggtaataaattgactgaagcatatctatctcattaccattgggtgctatgaatgttccattgataaacttcttggagactataagaagcttcttatttaaagaaaaactattttaaagaaaccattttaaagaaaactattattttacttattagtttaacatgccccctcccactgcggtagtatagtttttaggcttcttgacattcattgcactttcccatggcagcattacmccagttttccatttgtctcaggggaaaacaacttcatctccagcaccatggttgggccctgatgaactgaagccaagatttttcacctg

SEQ ID NO: 908403 - DNA, 625 bp, Homo sapiens
acttggtttactgtagagaaaaggatccaaaggcttagggagattgggatggtgaaatgtattagtcactttggacctactcatcccagctgggagggtccagaagatataccctttaccaatcctttgygacatagatttgtgagggcagcacctgcatctttgcagagccctgtaattgctcttctctgtatgtcagttctaaagggtgagaaccacagtcactcaactacaaaatttaaatacaacaggaataattggatcccaaggtggcaggggccaaatggcagcactcaaccatcaaagccaaggtggttgtagctactgtaatggacagcagaggcaaagcaccaatcagaatagcctgacctgtgtagagttctggcattgactaattaatcacagttttcctagaagtgaaattgacaggaagcctactgtattcctacttaatttatataagcagaaaacttccaggtcaaatggacaaaagactaatttgaattataaaaacagaaaatcatggcccctcaatcaatttacagatttgagccagtttacagacccagaaccccttgaaggaaggggaggccgggtccccttggggaaggaccccactacactg

SEQ ID NO: 908404 - DNA, 503 bp, Homo sapiens
cttgacagcacttcacatcaaatgcagtacatacctgttgctttttactctagccttctctgcctctaccaaataggacttctgcagactattgagactactcagtcatactgacacatacacaaatccgaaagagcagaagagttaacacccaggggaatactggtaggatgggagctagtggataaatactcctctgaaatgttccttagatggacaaatctgaggcgcattttacacagtagccagcaagtccccagtaggattgagcctgaatgacccacagggaaccagctcaccaagacagctttagcttgacttttctttctttccgttttttttttctttttttaacttctctactttttgagatctttttctgaataatccagtttcataaaagctttagtctcagattctgctttgggggtgaggcataagcaagmtgagacattttcctaccttatactactttggcattgtgcttaaatctccacctcgcc

SEQ ID NO: 908405 - DNA, 632 bp, Homo sapiens
agtcagagtgggtggcaaacttcttggattttctagcaaaggctatcaaactagaactkcctgggaatcttccttcaaaactattctgaaagcttactcccaatccaccagaacaggagcatttatttgaaatgaattttagcaatatgagcagtccgtaggagacataatggagaggtatatacttgttattaaaacatcacgattaaccagtttcttggatattaatttttcctctttattggtgatttattcttagtcctagatccaagtatcccatttgtagaaatacttctggctctttatttgactaatccataccttccccttcatcctcctcaccactttataacagaggatacataatttcccttggttaatcctgtgttagagtcaggatttgacctaagtttgacttcaaattcgggactcatatattccaactagttattacagtgagtcagacctttcataaaataatcactcctttcctttccagactcatctgtcatcattagtctacatgtctcactcctcccctccaaattgaagtactgagataattcagaattttcaaaaattaccatggatatttattcagaatgagccaaactgttaggtttgagggcaca

SEQ ID NO: 908406 - DNA, 606 bp, Homo sapiens
tatgaattctaatcactgcaaacatttgagaaagagggactgtggattctgtgaaaaaaactggtatacaattatatcatgtttcttacaaaaaaaaatgaacatacaaaatccaagttgttctttatgcttttagcatagttgatggagctaagatggctgtgcgggctatagtgggtcatctgtttctgcattctctgcaccggccttcatggctggaatgttcattttccttcatcttccccacagctcatgactcccccaagacttggaatcatgtgttcccctctcagccaggaaaccacactccagccttgctgcacccacttcctacctactctcgggacttctctctgccatcttcccagctctgcacaccatcatgggctgtcttcaagtacagcgccattgtcatctatcagcccttccatcattgtgcttggctgcccacagcactaagcctcttaggggctcagacagtacatgctatatactatttcagagagactagaaatcaggaaaaggaacaccgtgaagccagagtgtataaagtggmatgaaggacatactcagtaagcataccaaaatcaaggaagacagtcagtg

SEQ ID NO: 908407 - DNA, 629 bp, Homo sapiens
gctcacacctgtaatccagcactttggaagkctgaggtgggaagatcacagggtcaggagtttgagaccagactggccaacatggtgaaacccagtttctactaaaaaaatatacaaaaattagcctggcatggtggcgtgtgcctgtaatcccagctactcgggaggctgaggcagaagaattgcttgaacccaggaggtggaggttgcagtgagctaagatcgcaccactgcacttcagcctgggcaacagagcaagactccatctcaaaaaaaaaaagaaagaaaaagggaaaaaccctaggaccagtctcaaagggagagtgccaagagaaaaagagacaatgtgtgtactttgtacagtacctgtcatatggtaatcattcacaaaatataaagtctatgaaggcggggaccttttctttgctgctcactgctgtaacacagaacatggcctggtccacagcaggtaattaagaagatgagttaagagttttgtttattcaacaagaatgcgtaaatacatattttaacccctggataccatgctctaatccaataaagaataagcctcacgaaggggctctaggagtccactgtctattaaggagaaacaagaaaccaataat

SEQ ID NO: 908408 - DNA, 603 bp, Homo sapiens
aagtgtatgctccacacagtggctkcagtcacttttaaaagacacgattcagacagtatctttcatctgcttcgaaccctgctgtagtgaccaacacacttaagataaaaatctaaagtccttaatgtggcctaaaagcccttgcatggcccggcctctgcccacgcctctggccttgacacgcacctgcctcccttctaattctctgggctctgttagttctccactctctctggcctcaggactttcaagtgtgcccctcctcctgcccacacttttcttcctctatcagcccccttcactgaattagcttctccaaaccgttgagggttccacttaaatgtcactgcctcagggacctatgatgtactaacccctgttttagaattctagcagcatcacactccttttcttcaagtcacttgttgcagtttatgttcatgtttgtttgtgcatgtgtgtttttcaacatctctgtgttccctactagagccaaattctatgaaatataagtatttcgctcaccattatatcgtcagtataatgcctggacacagtacccactgaatagatacatatttattcagtgaatggatgaatgat

SEQ ID NO: 908409 - DNA, 646 bp, Homo sapiens
cccaatttcactcctttatttgatggatgagaaaactgagaattgcagaaattaactaatttatgccaggtagccaatagggagagagatatcattcctgaggggaaatctaagtgcaggtagaaagcagcaattttgtcaaaggcaagctggatttgcctgatcaaaaatcacttcttttttttataactgtttttttattgtggtaaaatatatacaacatacaattcacattttggccattttcaagtgtacaattcagtgccattaagtacattcacgttgctgtgcaaccatcaccgccaccatccacctccacaacttttccttctctcaaactgaaaccctctgcccactgaaaaataactgctctcccccgcctgcaggtaaccaccattctgctttctgtctccatgaatttcactattctaggtacctcctacaggtggaatcacacaatatttgtccttttgtatctggtttatttcacttaggaaatgttaaggtacatccatgttgtagcatgtatcagaattgcattattttaaagactgaatagttttccattgtatgtatatamcacattttgttcaaccaatcatctgacaatggacattagggttgtttctaccttttggctgttgtg

SEQ ID NO: 908410 - DNA, 562 bp, Homo sapiens
aggacagacattcccagtaacatcctcatctggttggaaagaattgatggggaagtgaagttgggagttctttcatcttttgtgctaaatgtgaatgacaaaaggtagacctttttagaaggaaattgctcctcctcttttttttctctatattatagcacagagaaaataagttcctgtaatttctctaccttacagggaagggcagagaagacatattacttctctctgttccccaaagcaggatgagtaaataatctgacctgtgttgggatgcatttcaatagagaatagaagcactgtggaaaggtcatgctcttggccttctgaccactcgtactggcctgaacccagactgagtggatgctcacatgattttgccttcttgcttgctcttaaattttcttttttctgtatgttatactcatctggcctgtcagggcttccaggatctctgcaactttgcaacattttactggtgtagacattttgtaaaacatgcattgtgcacctaggggcattgaagctggaggtraaaatagctttttgttttcttgttcaa

SEQ ID NO: 908411 - DNA, 502 bp, Homo sapiens
tgatgcctagtaggtgttatggaagtgttggctrttttcttcttgatgctaccaaaacttcatatgtggtgtgtgtcatcctgtattttgatttctcatcatttttgtcatttgctcttctgtttttctcacaaaactatgattttccaaaagggaatgaaacactatggcccatcttgaaatctgtcctgcagactactcttttataatccatgagctgagcatgattatttttttaccttttaaaaatattgttagacataagaatatgcaagcgagaccatgtgtggttcacaaagcctaaaatatttaacatctggctcttaatagaaaaatatgtcaaaccttgttctagagaaagggaccatatttcattaattgttacattcaatatgtgtttgataaagcaaaaaaaggataaagaatagaaaggctggaagatgcccaagaaaaatacatgtaaacactgtggaaggagcaattaattctgttcatgcacatc

SEQ ID NO: 908412 - DNA, 599 bp, Homo sapiens
attaataccaatgatgctcttcataaaaatagaaaaaaaaatcctaaaattgatatggaaccacaaaatagccaaagccatcctgacaaaaagaacaaaattggaggaatcacactacttgacttcaaattatactatagagctatagtaaccaaaacagcatggtatgggcaggcatagaaacagacacatagaccaattaatggaacagaatggagaacccagaaacaagtccacacatctacagtgaactcattttcaaggtgtcaagaacatgcttggagaaaagatagtatcttcaataaacggtgctgggaaaactggatatccatatgcagaagaatgaaactagacccctgtctcttaccacatacaaaaatcaaatcaagaaagattaaagacttaaatgtaagatctcaaactatgaaaatactacaataaaacactgggaaaactctccaggacactgaagtgggcaaatatttttaaagtaatacccaaaagcacaggcaaccaaagcaaaaatggacaaatgggatsgcatcaagttaaaaatcttctgcccagcaaaggcggtacttgtactcctatgtttattg

SEQ ID NO: 908413 - DNA, 599 bp, Homo sapiens
attaataccaatgatgctcttcataaaaatagaaaaaaaaatcctaaaattgatatggaaccacaaaatagccaaagccatcctgacaaaaagaacaaaattggaggaatcacactacttgacttcaaattatactatagagctatagtaaccaaaacagcatggtatgggcaggcatagaaacagacacatagaccaattaatggaacagaatggagaacccagaaacaagtccacacatctacagtgaactcattttcaaggtgtcaagaacatgcttggagaaaagatagtatcttcaataaacggtgctgggaaaactggatatccatatgcagaagaatgaaactagacccctgtctcttaccacatacaaaaatcaaatcaagaaagattaaagacttaaatgtaagatctcaaactatgaaaatactacaataaaacactgggaaaactctccaggacactgaagtgggcaaatatttttaaagtaatacccaaaagcacaggcaaccaaagcaaaaatggacaaatgggatcgcwtcaagttaaaaatcttctgcccagcaaaggcggtacttgtactcctatgtttattg

SEQ ID NO: 908414 - DNA, 659 bp, Homo sapiens
agtggagcagtgctcataactctcaacctrtaggttaaaattacctagtgatcttactaaaatgcagaatctgattcagtaggtctgggtcagggctcaagagtttaaatttctaacagatgtcaatggcccaaagatcaggcttttcacagcaaagccaaagaattaacatagagctaattaatttttccactggattcagttgcagcacattgctttgatttggaggtaagtaaccaaagaaagaattaaaagaatatgtttctaaaaatctctgctttggcctaagatagaagttctcaaactttttggtctttacactcttattgagggcctcaaggaccttttgtatatgtgggttacatagagtgttatttgctgtatacaaaattaaaactgaaaaattaaaaaatatgtgtttatgaattgatttaaaattagcaataaactcatatgttaacataaataggaaatttttatgaattattactctattttcccaaacaaaaaactccatgagaagacattctttttacattcttggcaaatctctttaccctctggcttaatggaccacagctggcttctcatatctgcttccacgctaaatctataatgatagtacatgtcatatagtatctggaaaatgccttgataca

SEQ ID NO: 908415 - DNA, 594 bp, Homo sapiens
tgccgttgaccagtaccagtacrgggttcattcctgccacattcccccagctcctgtacctgctcacctgcatgctccctctcaggcagggggtttgagcatggtggcagtcaaataagtgggccacacccctttcacaagtcctgcaaaggggtcaagggaactctcccgtctcaatagcaagcagtcagagagtacaggactaggagttaggaaaccagggttctagtttagctccaacaattagcgattatgtaatgtctcagcttccattgtgtggattgcctctgcctcttcagcaggtagttacgaagctcatctgagaacagatgaggaagaaaacgtctggtgtactgtaaaacccaacatgtcatgtgggttttgtgccagggcaatatatacattcattgagtacctactgtgtgtagactctgtgctaagactacatattccaggagtttcaaaagtaatcagaaagcttatgcctacaaaaagacttgcataagaacatgcacagcaattttcttcataatagctgcaaactggaaacagcgcaggtgaccatcgataaggaaatagattaaaaaattgtgg

SEQ ID NO: 908416 - DNA, 604 bp, Homo sapiens
ggaatcaaactcagacacatggcaaaacccttgatttttcaacctccctatgacctccctggcacaaggaaggtgggtattcagtaagagggtattgggcctccttgagtctccaatttttctcagttaatgagtgttcagggtgctgctggttctcgagaacttcttctccatttacagtcactgctaatagctgaagggtgcagtgaggtccacccaaatgacagatgctcaggaaagatgagaaggacttggaatacctgctcctttgcagaagtgttgctccctgtccggtgccactctgatatcaccggcttgtgtgttacacacactcagtgggcatttagtacatgcatttacagcattaattgtcaaggacaaagactgacaaatgggggagaactggaccggaaggtttcaaaccatcatcctgggttgggatcccaatggtagatcctagtgaggcaacacccctgatgctggagaaatatttgcttctacaatctcrgtccctcactaacgttgactgtgaacctgctgttgggtgctgtgaagaacacaaaaatggacatgatgccatccaagtttatagttcaccacggag

SEQ ID NO: 908417 - DNA, 571 bp, Homo sapiens
cagtatttacatagctgtagctatgagatgcagcatattccaactgatgacagtaaggggtctcaaagacatggcaatttgtctgataygtttttacttagcctggtgaggtagaaaggacactggtcacagccaagaaagctgtgctttgcccttattgggggaaagggatttgccttagtacatttgtggcttatttcctcagaagagaatagcaattaagagagcagactggagtaggactaccttgactccaatctactgctcattagctgtgtgctttggggcaagtgacttaacctctctgttgctctgttttcctatatgtaaacaacaatagtaacctaactcagaggcagtgagatgaaatgatgctgtacatgtaaaacatttacaacagtgtctgtcctgatataattgttcaaatatccaccattttattgtctataaccaataggattaaatgatatactttctaaaatcccttttgactctaaagccaagatagcaatgttgctcttctgttttatgacactcaaagttgctacctggcaatcgcatggtaacatta

SEQ ID NO: 908418 - DNA, 623 bp, Homo sapiens
tacaaaaaattagccaggtgtcgtggcaggagcctgcaatcccagctactcgggaggctgaggcaggagaatcacttaaacccgggaggtggaggttgcagtgagctaagattgcaccactgtcctccagcctgggagacagtgcaagactctgtctcaaaaaaaaaaaaaaaaaaagtccaatggatcatttgaagtctgacttatttcacttaacgcatctgagagttattcaagttgttgtattgaataatggcttgctcctttttactgctgagtagttgtccattgtatggatacaccacacacagttagtttatccagtcagccacttttgggttgtttccagtttgggaccatactggagattttcagacacctctctcaggaactgatagaatatgagatccaattaattaacaatatagaagatttggctttgattaaccaacctgacttaactgaaatatacagaatattcactctttttcaagggcatatggggcatttatcaaaacagaacatattttgggccataaagaakgtatcaacagatttcagaaaatctctgcctgatgtgtgattaaattggaactcagcagcaggagggtagctagaaaatc

SEQ ID NO: 908419 - DNA, 685 bp, Homo sapiens
taattgaaggagagctggtaaggagaaacattgtttccctatgccatagtaatgaagttagatgtttcctaamtaatatagagtagtgggggcaaaagatcaatatggacctacttagctattagcaatattgaattgtaaaatatgtagtagaggccacttttatttagttttagaataaagggaaatcactgcaaacaattttaggaaagactttagaagtaggacccttgaaaaggctgtgggaaatgtatagcatccatttagaggcaggtagggtgattttataagtgaaggcaaagctgaaaatactcaagagtattctgagaaataaatacagctacctggtggatacagctacctggtggatgcagctacctggtggaaactgtctgtggagtataagcaggaagaggctgggaccagatgatcatctcttctatccccaaaacaagagaccaaaggtttaagaagatgacatcattgataaaaggagtgtcttaccaaatttaacacaacatagtatagaataacttatatatgggagtgagacagattaataagtatataatgtccaggcatgagaaatcggccacaataatatcagtgaagattagaatgggaagatacaagatgacctgtgaggaaatgtaaggccactttatccccatttagtcctttagaa

SEQ ID NO: 908420 - DNA, 630 bp, Homo sapiens
cagagctattttatccatcagtacaacagcgtagtgctcatagactgtargattttcaatagccaatgaaagtatctgaggctctagaaaaatatttcacttatagccaaagaaacaacaactccaaaattacaattttaactttatgtctgccaaatgtaatataatgacaacttcattagttattaatttcagtgttcaaaaaaccatacatttgaaaatactttgtggctttgagttttatataagataaatgtcaaaaatatgtatgacgattgtcaaaaaatcatacgaacttataaattcattaacttattcatgacttaataagcttaaaatattaattttcattcatccacttatttattaacttaatacaaattatttcacaaacaagcacttaatttatattaggtcagcagtattcaatctagactgctggtatccttagagaacaaagagactttgtcaggaggacatacatataaatagtttgatgtagattaattttcagatgttcaactttcatgtgtactcattactgatattgatcaatctaaaaacaagcctgttcctctggttccattttctcactgccttgtctccaatcaatcatctttctttccattg

SEQ ID NO: 908421 - DNA, 656 bp, Homo sapiens
tctggagtggacctccagcaaactccatcagacctgcagaagaggggtctgactcttagaggaaaaactaactaacagaaagcagtaacatcagcagcaagcaaaaggacacccacacaaaaaccccatccaaaggccatcggcatcaaagatcaaaggtagataaatccacgaagatgaggaaaaaccaacacaaaagggctgaatattccaaaaaccagaatgcctcttctcctccaaatggttgcaactcctctccagcacaggcacaaaacaggacagagaatgaatttgacaaattgacagaagtagggttcagaaggtcggcaataacaaacttctctgagctaaagaagcatgttttaacccaatgcaaggaagctaagaaccttgataaatagttacaggaactgataactagaataaccaatatagagaggaacataaatgacctgatgcagctgaaaaacacagcacgagaacttcatgaagcatacacaggtatcaaactatatcatagagtgaagatcaacttaatgaaataaggcatgaagacaarattagagagaaaataatgaaaaggaacaaacaaagcctccaagaaatatgggacaatgtgaaaaaaacaaaccttccattggttggtatacctgaaa

SEQ ID NO: 908422 - DNA, 658 bp, Homo sapiens
ttttcggcttaggatgctttcacattcaggtattttattcacctagggggcacccttatatgtgatgtcagcttagttgttttccatattatgagcccattttcccaaacatgacctactaaatgatctgttctttcccccacagatttgtggtgtcaccatatgtacatgcatctgtcttggagttttctacaaattcaatggtgcatttccctgtttttgccccaatatcatatccgttttactaccatgaccttgtaatacatcttaatatctggtaaggcaagtacaccttctttcttctttttttttaatcatttacctaatatgtgaaggaaaaattaactcaacttatgtttttcttctgtccttacgccacaacaatcaacacaaaagatttctgggactaaacgtatgaagatttctctccacacaccaagcaagcaatcagttcttcagatgacacctgctgtatgtcctccaactcaatccagttctaacactgtctacctggagatatcctcagacascacagggcaagggctcagtcttacaagactgccccctccctcctagcagtcacaggtctgggcctctgaaaattctgactaactggctacaagttgggctttccacaatccccactttgggttcaatt

SEQ ID NO: 908423 - DNA, 604 bp, Homo sapiens
cccatctgataagggactaataaccagaatacataaagagctcaaataactctataggaaaaaaaatctaataattcaatcaatagataggcaaaagatttgaatrgacatttctcaaaagaagacgtaccaatggcaaacaagcatatgaaaaggtgctcaacatcattgatcatcagagaaacagaaatcaaaaatacaatgaggtatcatctcaccccactcaaaatggcttatatccaaaagacaggcaataggaaacactggcatggatttagagaaaaggggacatttgttggtgggaatggaaattagtacaaccactatggagaacagtttggaggttcctcaaaaaactaaaaattgagttaccatgtgatccagcaatcccactcctaggtaaatagcctaaagaaaggaaatcaatatatcaaggaaatatctgaactcctatgtttcttgcagctctgcttataatagcatagatttggaagtcacctgtgtccatcaacagatgaatggataaagaaaatgtggtacagatacacaatagagtactattcagctataaaaaagaataagatccagtcatttgaaacaatat

SEQ ID NO: 908424 - DNA, 586 bp, Homo sapiens
attctagtcatcaagttttagattcattgaaaaaggttaaaatctgagawgaaatcaaatcttgagtaatggtatttgtattgtgacacttatcttactgaaagtgtaaaacttcaaattattacccacaagttctataattgtgctagaaactttcatagttccataggtttgggaagtgtaccccaactaaatgttaatctacatatattaaatgttctgtcattttacatttagatgttatttttctctttttaaaagtattgtgaggtgagaagaaagtatatgataatgaagagcaaatgtcactttatggatataagacattagaatatgataacagttggccttgataaattcagactgacatccaattaactttttcttgactgcctggttatgataacagaaatatttctgtcataaatatatatatatatatatatatatatatatatatatatatatatatatatatactggaataggtatcaggatatgggttttataccaactctgccaattaaccaagtttgcaactttagatagcacgttaatctttatgactaaatttcctcagatatag

SEQ ID NO: 908425 - DNA, 550 bp, Homo sapiens
atgtctcagtctctgctcacttccattatttgaaaaatgtagatcttgtagartctcttcatttggtgtaatgaaaattaaaagtggttcaaaggaagtaataattctgttttcaaaatccgattggtaaatacttcagaggtatggctcaatgcctttaaatacagtatcctcattcaacttcaaaatcaaatatcttaaattgaacccttcttctcatactgtgttgctctttcaaagtagagcattaagtttgaaaaaacaataacaagtatcttaaaattataaacattaagatgtttataaacatttgagataattaactcatttgacactgaagtatttaatttaatttaattatttatttttgagatggagttctgctctgtcacccaggctggggtgccgtggtgggatcatagctcactgcagcctcaaactcctggcatccagcattcttcctgcctcagcctccctaagtgttaggattacagacatgagccactgtatcaggcccaaagtattttaaaaataacttttctgacaccat

SEQ ID NO: 908426 - DNA, 629 bp, Homo sapiens
tgaagagaataaacctggaggcatcacgttacctgactttaaactatactacaaggctacagtaaccaaacagcatggcacacacagacacatagactaatggaacagtttagagatctcagaaataagactgcacatctacaaccacctgatcttcgacaaacctgacaaaaagatgcaatggggaaaggattccctaattaataaatggtgttgggaaaactggctagccatatacagaaaatggaaactggaccccgtacttacaccttatacaaaaattaactcaagatggattaaagatataaatgtgctggacgcagtggctcacacctgtaatctcagcactttgggaggcagaggtgggtggatcacctgaggtcaggagtttgagaccagcctggctaacatggcaaaaccctgtctctactaaaagtacaaaaattagctgagtgtggtggcacatgcctgtattcccagtttcttgggaggctgaggcaggagaatcacttgaacccargagacagaggttgcagtgagccaagatcacgcactgcattccagcctgggtgatagagggatactctgtctcaaaaaaaaaaaaaaaaaaagaaaagaaaaaagaaaaa

SEQ ID NO: 908427 - DNA, 665 bp, Homo sapiens
ttattattttctctttgttcttctgggcttttgtttgtttattttgttcctctgtttcactttcctggccatcctgtgtgttactggaatattttttataattccattttgatttatctataatgtatctttttgaagagtttttttactggttgctgtacatattacattttacatacataacttttgatctacctatcagtgttgacattttaccagttgaactaggtatagaaaacttacctatattaggtttctttattagtctatctttatacttgtcttaaatatattgtctatattcattgagaaccatatcggtaagattataagttttgcttcaattgttgaacataattcagaacactcaagaggagaaggacaatccattacatttacccatattttaactcttttcattgttatttctttatttctaatgtttcaagtttccttctttttatttttttttagacgaagtcttgctctgtcatacaggctggagtgtagtggcatgatcttggctcactgcaatctcygcctcctgggttcaagcgattctcctgcctcagcctcctgagtagctgggactacaggctcatgccaccatgcccacctactttttgtacttttagtagagatcaggtttcgccatgttggccagg

SEQ ID NO: 908428 - DNA, 533 bp, Homo sapiens
agtgatgccatgcagtgtctgcctggctcttggcacacaatctctggaagatttatgttaagatattttctttcagaatccagctgccattctgtgagaagctcaaggcaaaggaaggccatatgtaggttctctggttaacagctttagctgaggcagacatgtgagtgaatgatgaaacctctagatgatggtgtcatttgaagcaaaaaaaattttaattgtgaagttcaatttatctatattttcttttgttaacttgtgcttttggtgtcatatccaagaaaccattgcctaaagcaaaatcacaaaaatttacttctctatttttttataaagggttttatagttttaactcttaatatttaggtctgcagtccactttgagttgcctgtagtgtgagatgagagttcatgtttattcttttacatctgtatattcagttcccagcactagtttttgaaaatactatttctccccactgaattttcttagtgctcttgtagaaaamattgcttggccataaatgtaa

SEQ ID NO: 908429 - DNA, 667 bp, Homo sapiens
tcactggcaatggtaaaagcaggcaggaatggactagagtctgaaagattccaaaatctaacaatgttttacttagtattgcaattattctcctctcttcaacctctgaattttgttcaaaaaaaagagcaaataacttgagaatgtaaagcaaaaaggactcacatagttcaatgttcttaaagctgcagccaagatccccaataaactcaaaattcagtagaaatctgaaagatcaccagtttactttatctgtttataaggaataagctcacatactttgcaaaatgtaaaagcaaagtggtagtctacttcaatctccactatttttctattaatatacacaaaatactacatacaatcaaatctaattagacaaacaaagaatacaaatatgttgagaaaagaaaaaatgcaaaagaaaaatcacaaaacctaatctataaagatcccaggtattgaaattagcaggcatggatttaaaataactgtataactattttaaatatactcaagaatttataaggaaagatggttacttggtttttttttcaaatatgrctctagtaatatctcacatcatgcttttctacgatatgactttgaccttcttcccatccagaaataggaactatgccctctcagcttgcatcctggccaacttatt

SEQ ID NO: 908430 - DNA, 647 bp, Homo sapiens
ttaggaaattccctacacatttgtggcctttacctcaggaacctatcagattctcacaatgaagatctgagaacaacccctccaggctgtaacagtttgaggggaagagtaatcattgagaaagatgcctagagcactcctcatgacaaaagccaactctcaagaggttgtggcatggcggaaattagagaaatacctttgcctcctactccaggccctccagcccctttgtgtcacctatggggaaaaaaatacagtcatctgtaagtatgtaccacaggagtaggaggttgagagggggaaggagaaattccctggatgctcaattctttatatcaaataaaatggtatttacattaaacctacacacattctcctttatactttaagtctctcaattatttacaatacctaatgcaatgtgaatgctatgcaaatagttgttatattgtattgcttttttatttttattattttttattgttgtcttgctatttttatttttcaaatcttttcaatccatgattggttgaattgaatctrtggatgcagaaaccctagatatggaaagctgactgtgcaaggggacttcaaaaagttcattaaaaaatggaattaaaagataaaaatataaatgttatttctca

SEQ ID NO: 908431 - DNA, 530 bp, Homo sapiens
tgcctgtaatcccagctactgaggaagctgaggcaggagaatcacatgaacttggaggcagaggttgcggtgagccgagattgtgccattgcactccagcctggcaacaagagcaaaaaatccatctggaaaaaaaaaaaaaaaaaaaaaaaaaaaaaggcctggcgcggtggctcatgcctgtaataccagtactttggaaggccgaggcgggcagatcacgaggtcgggagatcaagatcatcccggctcacatggtgaaaccccatctctgctaaaaatccaaaagattggccggttgtggtggcgggcacctgtggtcccagctgctgggggagtggggctgaggcaagagaatggcttgaacccgggaggcggagcttgcagtgagcagagatcccaccactgcactccagcctgggcaacagagygagactccgtctcaaaaaaaaaaaaaaaagagaaagaaatatagctattagaactctcctctactgctggtgggaatatgaaatggtacacactctgca

SEQ ID NO: 908432 - DNA, 612 bp, Homo sapiens
gaatggccaaggcaatcctaaacagaaagaacaaagctggaggcatcactgtatttcaaactatactataggactgcagtagcccaaacatagttggcacaaaaaaaatacacrtagaccaatggaacagaatagagaacgcagaaataagtcctcacacctacaactatctgatctttgaaaaacctggcaaaaacaagcaaaggggaaaggattccctatttaataaatagagctgagataactggctagccatatgcagaagattgaaactagaacccctcccttataccatatacaaaaattaacttaagatggattaaatacttaaatgtgaaaccccaaattatgaaaaccctagaagacagcctaagcaataccgttcagtacaaaggaatgggcaaaaatttaatgacgaagatgtcaaaagcaattgcaacaaaagcaaaaattaacaaatgggatctagccgaactaaagagattctgcacagcaaagggaactgtcaacaaagtaaacagacaacctacagaatgggagaaaagttttgcaaactatgcatctggcaaaggtcaaagaacatgaacagatacttctcaaaagaaggcatgc

SEQ ID NO: 908433 - DNA, 646 bp, Homo sapiens
acatatttctgactcctttttggtaccatcctagagctgattttgagaaagcaacttggtacagtacacataagtttatatatattacataatgtttgtagtaaactgtgttagagcacrgaagtagaggttgaatgcaaaatgaaagtaattattttatgttcacccttaggtttgaatacaagttattttgttcacttttctctatggcccatatatttgaacgtaatgagcactataaaatacatccattcttaaggaccagttcaataggggataattttctgagaacttcagccaaagggagttcttaaatacaaagtgatatattggtttatgaaatctgagagtttcgtgggtttttagatacccaaattgtttctaaggaactaaaattgtcttttcaatgaactactttattgacttgatcttcataacttattagacttattttccttgagagaaaaaagaaagagcttgctcacacatttttctcttctcagatttaacagctctaattaggctaataatctctctttatgggaattgcaaagaaaatggggacaatgcaactccaaagaagtattattaaaatgtcagcctcaaaaaaagccatgtattttaaagcattcagtttgctcgtttc

SEQ ID NO: 908434 - DNA, 606 bp, Homo sapiens
aacttaaagtacaataatattaataattaaaaaaaatatttgttcagcatgtaataagaaatttatggcatttatggagaatcagatgtgtggtagtataagagtcaaagggctatttgaataattaagtttgcttaaagggaagctctagggctatggaaatatccattatcaaacaaaaaaaaaatccgttccaaattctgcaactcccatttgaggcaataaataataattgcactcatctattgtattgctaagtgttgctgctttatattcccctttcactgaggcaactcaaagacttaagatgcttatagatataaccaagagaaaagaaaagctccggagagtataacaaggttcaaaattgaagaaaaaactttgaagagagattttttgtttttttgttttaggagaatagaagaggtaagtcaccacttcaattacagtttattcagtacttggatattctaacaatttaaacaagatgtgacataatgcttacctaagtctattttctycctaccatgcttagctctaaataatcaacttaccacagggaaaatctgatctgaatttagagagggttcttatatcccttacaca

SEQ ID NO: 908435 - DNA, 640 bp, Homo sapiens
attaactcatctaagtttttgagacttacagatttcactaatttggagagaaaaatggatcctgaaaatcatstaatttctccaaatccattctgtgcaacactagtctcatgagttgcgttttgcaaaacaaatgttttcctgatcaggtaagtttgggaagaatgacatattctcctcttggaattttcaagcacactaaaggtgctgagaagtccagtaatgaagaaacctgccttaacttgttctgttacacacagcatttccaaaacctactcaaataatcttttctacacccaccccaaacaccttttaacatttggctgaatacttccaagaaaactgatgtggtccaaatttcccattatatggatttttaaaactagactctaagagaggtgaatttaccccagattacacagctgttaaagacagaagtatgtgtggcatcacccttgattccatctccaaagacaaatatccctaaaggacttcagctctctctccctaagcccatgtgtagtctcagaatcttgtacaacacagtcaccccatcaacagaagttggcatgtgagagtaaatttacttgtcattcctaaactggcttccacgtgtttggactctgggtttctaaagtaa

SEQ ID NO: 908436 - DNA, 660 bp, Homo sapiens
gagtcgcaaatgtgtcaaagtaatgtagaaattcattgcatagaatggtataaataaaatcaaattgtataaacatttgtttttccaaggcggaaaattaagcttatgccagaggaagagggttgtttttatctctaatgtcctgtgcgaaggtgttagagaaatggacttagtgtctccattattaaggtttcaggaaagaaagagctgaggaaagtttgaaagcataaaattctctattaatacatatgtttaattaggaaaatttattcacattgtagataaaacatagacgagaattaggtccctttggttctatagagtgtttttctatgccaaaaggaaggaatggatcttgtcattcaatagaatggtaactctcataatatatgaccattttcattatcatcattcccctgaggccaaatctccattatgttcattaaccaaaaaatctttgtttaatgttcttttttatgtttcatagtagaattattatttttcatattgaaatgtatttggaaatcataggtatccacaaaatgtacaacagttctaatgtagattcgaaagtacaatatagggaaatctcttatttttagaatgcattataacatatctttagttttattattcattwaacttgcatttggttgtatt

SEQ ID NO: 908437 - DNA, 629 bp, Homo sapiens
tgggctcagaacagtggactgagagggcacaygacatactgagacaccagctggggcagccaagggagtgccggcatctcccctctgctatcttcaggctgcacagctcacagatccaaaagagacccctatctttcacttgaggagaggagagagaagagtggggaggactgtgtcttatatccaggataccagcaaagccatagcaggacagggtgccagtcagagttgtgaggcccgaggtcccagacaaagtttctagacacaccctgggaaagaagggaacccactgcgttgaaggaaaggacccagtcctggcagcattcatcagctgctaactgaagagcctttgggccctttctgctcttccctacccttcccatagccacaaccagtccagactgcaaggagtactcccagactactgcagatgttcccttcaggcccaagtctcttaagtcagctcgtcatgatcttttcctggcctgggactccccattcagggtagtgggctcccctgtggcccagggaaggtccagaaataccatccaagaatcaagtctcagaactggggaccctaagagcctgcttgttgctctaaccccctgtggctggtacctaagtttcaa

SEQ ID NO: 908438 - DNA, 608 bp, Homo sapiens
tttcttgtctattgttgacttcctcaggctttggctgtgcatagactagtcagcttccagttgtgtgactagaacaaggctccatgtttcctcaagcttcagccatgcatggaccgaccagcctccagtgtggtcggagcagggcagttgtccttgtcagcagcagcttggtttcactgcaggatcagccgtgtcgggtggtctgggttttgttgactggtccactggtcctgggaggtggctactgctggtttcagccagctatgatgaacccaaggtgtgatacctgaaactttaacagcagtgggggtagacaagatcacaatatggggaccatctcataaaggccttaaagtggatgggttccatcatttgatctagacagagtctccaggttggaagtgatgtactgcatctgtgaggctaacaggtatcctttctcttacccacccttgtatttcctgcacggcctcacctaaggcttgcatttgccttcttaaggttaatcccccaatttcttttaaatctccttttatctgagttatgatagggggtggtcggctgaacamtctcatagagtgaatacccagttaatttagtaggggtgc

SEQ ID NO: 908439 - DNA, 575 bp, Homo sapiens
cattgttttgttttatttcctaagtcctcctgtttcttatctaatctatttgtcttttgaatttatgcaaattcctcttaggacaataacaaattggctctatctccagaaaaatctctccccatcttctttttatcttttatacctttaggcacctttaaaaattctttaattctagagagatattatgaaatctatttcagattgctgaatctgatatactttctggcacttcttcaggttaatgttaaacacaataaaataaaaataatttaaaagcattaattccaaaccacaacttaaaaatgtttagaattataaattttgttatataatcataattaaaaatttaaaaataaaatgaatatataaaaaataattctacttaatatatgtgagtgttattgtagaaatttacagatttcttgaaggaatattttatgtatctaaacttatttctatttgcataattaaatgaaaccatagatgtactatatcatatctaattgccatctacttgtaacrgctgtgcaaatgtgaatgtctgtatatgaaactgcaggcactcacattac

SEQ ID NO: 908440 - DNA, 565 bp, Homo sapiens
ttctttttgagcaatccaaactgtaaacatttttggaagttaaaaaagaaacttaaaaacttggttgaatttctacttaattccattagctaaacttcaagagctagtaaccaaagctggagatcccacagaaccatcatttttggtctggaatagggccataccctgtccattcccctagccttcagcccaatggtttgcatcttggcaaacttctaaaacaaaaggatgggtaagaaaggcaccattaatcttctcctggctctcagactgcagtagttgtctattttccacagtgggaacatatattcctttcctcagtgtgtgtctgtacactgtaatatacaggggagggctcttgatgtttggtctctctgaatctcaatgctcttcttttgtttttacctccttatctttgtagtcactaatcctaggctcaggcagagaatttatcttttccaattttgctcggatccaagtcactagaatcataaccatttgaattacaatcattcagcctaaagagtctctgatasaaatgcagtttacctttccccaaccttat

SEQ ID NO: 908441 - DNA, 387 bp, Homo sapiens
cagggacaaaatgccaccagtctgtttgctaagacatagtgagtcacctttattccagttcccacaagatcctcatctccatstgagacctcctcagcctggacttcattgtccatatcactatcagcattttggtcaaaaacattcaacaagtatctaggaagttctgaactttcccacatcttcctgtcttcttcggggccctccaaacctttccaacctctgcctgttacccagttccaaagttgcttccacatttttgggtatctttacagcaatgccctactccttggtaccaatttgctgtattagtccattctcatgctgctgtggagaaatatccaagactgaagagtttataaaggaaagagatttaaattattcaca

SEQ ID NO: 908442 - DNA, 619 bp, Homo sapiens
tttttctcattaagtttctatcatataaagtacttgtgacattatgctcttaaacatgtccccatttaaaattttttttgagaaattgctatattctttgcrtctgtatttggtaatactgtttattcattaaggtataatttctggttctgaataagattaataccatttacgaattttagatgaaatttatactgatcctggagtctaatacatgctaaaataactaaagcattagaaattttagcacgcaggccccaaaggtattttcattctaagccagctagtgtgatgataggtaactaaaaatgggttggtatgaaatttttttttaattctatattctgttctttcttcctccttaatcctttctttaaaaaaaataactatagatagcagtcacaatgaaggcaacataaatcagactgccttctcttcattttcattttcatctccaactgagctactttttctgagccaggcagctactgatgcagatagacaggtgggacgcagagggtttcagccaagaggcctgtggtgatgctttccttcttctgagacaaactcaagcctagaaacaatggaagggagcccttacgaaagatttgaggagcag

SEQ ID NO: 908443 - DNA, 602 bp, Homo sapiens
ttcagtttcctgtctcaattacagccttccactagttttgatatctggagtatctctagtacacttctataaaaataaatttctgtctcacgcctgtaatcctaacaccttgggaggctgargtgggcggatcacctaaggtgaggagtttgagaccagcttggccaacatggtgaaaccccatctctactaaaaatacaaaaattagccaggcatggtcatgcacacctgttgtcccagctactcggaggctgaggcaggagaatcgctcgaactccggaggcggaggttgcggtgacccaagatcgcaccactgcactccagcctgagttacagagccagactccatctcaagtaaacaaacaaacaaacaaacaaacaaacaaatctctgtctccagtggaccactagaaacctgattgcacagggttgtgatggaaactggggtccaattggctctatataccatcttcagacagtcttcacatttcacccactgtgcctccctgcttgaactgtgctctccagtaccctgtctttagctgcctttttgggagttctacatgttgaatgttcttttttttctactaagtcagttatca

SEQ ID NO: 908444 - DNA, 640 bp, Homo sapiens
atttccttctgtaatcatgtcattatataatgaaaaagcaatccaggaaaaggatataacaattctaaatatataagacccaacactggagcatccagattcataaagcatatattacaagatctaaagagatctagtaaatctttcactacatggcagtgctggagtctctctgaatctgctgtgattctggggctgcctgattcatgaatcatttattgcttaatgaaactcctttcaatttaattcagctgaacttttaacaggtagatccactgatatcttgcaccttgtccctggaagagctgcaggcactcaacaccagtctgtgaaggcaggtgcaggggctgtacctgctaaaatcacagaagcagagctctccaaggctgtgggagcccacttcttacattaggtgtcctggatgtgagacatggagtcaaaggagatcatttttgagctttaagatttaatgactgtcccactggattgtggatatgcatggagccaatagcccctttgttttggccaacttctcccatttggaacaggagcatttatccaatgcctgcacacccrttgtatcttggaggtaactaacttgcttttgatattacaggttcataggtggaagggacttgcc

SEQ ID NO: 908445 - DNA, 617 bp, Homo sapiens; identical to SEQ ID NO: 905448

SEQ ID NO: 908446 - DNA, 500 bp, Homo sapiens
aaatgtaaaacctaaaactataaaaaccctagaagaaaacctatgcaataccattcaggacataggcatgggcaaaggcttcataactaaaacaccaaaagcaagtacaacaaaagccaaaatagacaartgggatctaattaaactaaagagcttctgcacagcaaaagaaactatcatcagagtgaacagaaaacctacagaatgggagaaaatttttgcaatctctctatctgacaaagttctaatattcagagtctacaaggaacttaaatttacaagaagaaaacagccccatcaacaagtgggcaacaaaggatatgaacagacactttgcaaaagaaggcattaatgcggtcaacaaacatatgaaaaaaagctcatcactggtcattagagaaatgcaaatcaaaaccacaatgagataccatctcatgccagttagaacggcaaccattcaaaagtcaggaaacaacagatgctggtgaggatgtggagaa

SEQ ID NO: 908447 - DNA, 398 bp, Homo sapiens
tttaggtaaaagagaacatattccctcatacaaggcaaactgcatggactattttaacatttgaaaaggttttcattctagttctaatacatttgtgatccaaaaatcattaaaattgcctacaaaacaggaatgcagacttgtctcaattaattttgttcaattaaggaacaacaaaaattttacatgtacagttattctcatccagtctccctcctcttcctccccactgcctgccacttttccatgctgagatttgatatggaaagatatccataaatctatcagccacaagggaaataggtcaccttttcacaggatttgctacrgtggatctatgaaatcttatttaagtaactgctctctgggaggtaaattaatcagaagaaaaaaggaag

SEQ ID NO: 908448 - DNA, 589 bp, Homo sapiens
tagtacaaatccattttgttttattgaggtcaaactacattcccttgtcttgttccccaggagaaggaaattaggtaaaaattagctcactgtggttgtattctctytatattgctgcataaaggagacagccaacaaaagggcaagctggtaacttgcaaggatcaagcactttatattaggccagagtttctatgttgtaaggggaaaaaataagaaagtgcaaaagacaacctaaaaataaaagagtctaagaatcaaagaagatagggttattgactttgaaaatttttcttcaaaatgtgtatattttatgtataaccacattaattattaagctacacagaaagtcaacttaagtaaataaatcacactagaagtcaacacatgtaaatagacaccacacatatacagtgggtgttggaggttagcattctttttttttttggaaagaaagaagtaaaactttttttatactttaagttctgaaatacatgtgtagaacatgcaggtttatgacataggtatacatgtgccatggtggtttgctgcacccatcaacccatcatctacattaggtatttctcct

SEQ ID NO: 908449 - DNA, 599 bp, Homo sapiens
ggtcgggcgtggtggctcatgcctgtaatcccagcactttgggaggctgaggcaggcggatcacaaggtcaggagttcaggaccagcctgaccaacatggtgaaaccccgtcacagggctgggcgyggtggctcacgcctgtaatcccagcactttgggaggccaaggtgggcagatcacaaggtcaggagatcgagaccatcctggctaacatggtgaaaccctgtctctactaaaaatacaaaaacttagccaggcgtggtggtgggcccctgtagccccagctacctgggaggctgaggcaggagaatggctagaacccgggaggcagagcttgcagtgagccgagattgcgccactgaactccagcctgggagacagcgagactccgtctcaaaaaaaaaaaaaaaaaaaaaaaagaaacccatctctactaaaaatataaaaattagctgggcatggtggtccatgcctataatcccggctactcaggaggctgaggcaggagaatcgcttgaacctgggaggcggaggttgcagtcaactgagatggtgccattgcactccagcctgggcaaaagagcgagactccatctcaa

SEQ ID NO: 908450 - DNA, 634 bp, Homo sapiens
tcctggatttaagaccatttagaagtctgttgccaaaatacagagaaaagacaaarctggactagattgaggagtgttggtgcatatggagaaagatttataaagaaattcaatttaatgtgcttttcaggtccctaatgatttggggaagggaaggagatggaggaagtaaagatgactttgacttaggcaaagggtgcgtggaaatgacattaaaagaatgggtaaaagagtgcacctttgaaggcgcaaacatgctttcagtctgagacatgttatatgtgagacgtctatggattacttgtgtaaaaattcaatagcagagtcaggaatataatagagatttttataatccactgagggaattatcttgattgcacaggataagaaatacaatggtaatttttaggatttactttgggattgatcccaattactaagaataaaacccgagaagccccaataattaaggaaagagcatagagtaaaacctgaaagggaatttgtaaagaaatagccagacacttaagaaatataaaatttaacaatatagtattatagaatccaaggaaagcagatgccatatttgataggtaaagtaatggctctgaaatgagattcacattctaaaccc

SEQ ID NO: 908451 - DNA, 546 bp, Homo sapiens
tcttatgagaaagtgaaagacttgcccaaagccaaaaactatccagcaagaacttatatccatagctttctttcttttttttaacttttaatttcaggcgcacacaygtgggtttgttgtatagataaattgcgtgttaccagggttttgtgtacacattattttgtcatgcaggtaatacacatagtacccaacagatgacagtttttcaatcctctccttcctcccatcctccatcctgtagtaggccctggtgtctactgttcccttttttgtgcccatgtgtactcactatttagctcccacttataaatgagaacatgcggtatttggttttctattccgagattagtttacttgggataatggcctccagctccatccatgtggctacaaaggatattatctcattcttttcttatggctgtgtaatagtccgtggtgtatatgtactacattttctttatccagtctaccattgttgagcatttaggtagattccatgtctttgctactggggatagtgctggaatgaacatacgtatg

SEQ ID NO: 908452 - DNA, 584 bp, Homo sapiens
cagagtctagtattgcaacccctgcttttttttggctttctattatttgcttgataaacattcctycatccatttgttttgagcctatgtgtgtctttgcacatgaggtggctctcctgaatatagcacacctatgggtcttgactctatccaatttgccagtctgtgtctgttaattggtgcatttaacccatgtacatttaacgttaatatcgacatgtgtgaatttgatcctgtcattatgatgctaactggttattttgccaattagttgatgcagtttcttcatagtgtcgattgtctctacaatgtggtatgtttttgcagtggctggtactggtttttcctttccatatttagtgcttccttcaggagctcttgtaagacaggcctggtggtgacaaaatctttcagcatttgcttgtctgtaaaggatttcatttctcctttgcttatgaagcttagtttggctggatatgaaatactgggttgaaaattcttttctgtaagaatattgaatattgatccctactctcttctggcttgaagggtttctgccgagagatcagctgttagtctgatgg

SEQ ID NO: 908453 - DNA, 581 bp, Homo sapiens
catgcccctggccttgtgcagctcttaaatatttgcagttgccctgaccstgtacccatttcaatggcaagcctactggcttggagtttgccttccaaccggatttcttccaccaattctggttaaagtgttgccagcatttatacccaattatttttttatgtaattctgagtcacttccttgagtggtccaaattattttctgaggtgccaatattatttttgctagcaatatactcccaaagttgcatatgttttgagtgaacttcctagaatcaatttttcccacaagttctattatttaggtgctgttttgttttgcattgtgaggattacaagttgcatatgtcttattatgaactaaacctcattttacgaacatgaacctctccaactctgtattaccttatagtttctgaaagttataatgtgttgaatggtttgcaaattgcaaaataacttacttcctcagagagattatttcatttctttgataccactagtgttgtatttgttttgtattaccccgctgtgtaaagcccacttgggttactatttttaaagcctgcaagacttctaac

SEQ ID NO: 908454 - DNA, 711 bp, Homo sapiens
tttccaaataagattatgacacaaagcctgagagttgatatacccctggggtaggagagtaaaggtatattgctggtcttgccagctgaaggcaaattgcttctggtgggccttatggacaggaawggagaaaaagacatttgccaagtcaagggctgcataacaggtactaggagatgtgttaatttactcaagcaatgaaaccacatcttgtacagaagctgcaattggagtcaccacttggttaagcttaatccactgtcattctttaagatccatctgtcttctgcacaggccaaataggagagttgaatggggatgtggtgggaataaccactcctgcatcttttaagtcctcgaggcatgcaatattgtttttgattcactatttttctatgtagaggcagctctaatggcttccatttggcctttcccaccataatagccctcaccttgccagtcagagagctaatgttggggttctgccagctgctaagtatgtctatgctgattatgcattctggcactggggaaatgaccacagaatgagtctggggaccccctggacccactgtaagtcggacctgagctaaaactctattaattacctaacctccataagcacctactttaactggagggccacaatgacattttaggtaccctggaatcaacatcagctcagagccagcatccagtagtccccaaaat

SEQ ID NO: 908455 - DNA, 617 bp, Homo sapiens
aaatctagaagacataagcgagacacagaaagacaaatacaacatgatctcacttatatgtggagcctaaaagagtctaactcatagaagcgaagaatagaatggtgggttccaggggatagggggtggagggtagaaggggaatggaaagatggtcaaaaggtacaaactttcagttaggatgaataagttctggagatctgtattacagcatggtaaccatagttaataataatataatttatgattgaaaattgttaagggagtggatattaaatgttctcaccacacacacatgcacaaatgttagctatgtgaagtgataaatatgccaattagcttgattgtggtaatcatttcacaatttatacatcaatcaaaacaccacattgtacactgtaaatacatacattcacttgtcaattatacctcaataaagaaaaaaactgaagacgtaataataaagttgtcctctgctatcaataaaaataaaaattagggtcaaaagcagtggctcacgcctgtaatactagggctttgggcgtccaaggcaggcagatcacctgargtcaggagttcgagaccagcctgacctacatgcacaaaccctgtctcta

SEQ ID NO: 908456 - DNA, 626 bp, Homo sapiens
cctgcagaaccgtgtgccaaaataaaacctcttttctttataaattaaagcagcatgggactggtataaggatgcacaatagaccaataggaataccagtcaggtattcctttatagcaatgcaaaagtggcctaatgcagtgtcaaaaaaaaaataaaatacttagtaatacatttaacaaaaggacaaacttttatactctgaaaattacaaaacatgttgaaagaagatttaatgaaaagaaatcccatgtttatgaaccagaaaactaagtattaagatggcaatatttcccaagttgatctatagaattaacgcagtccatctcaaaatccctagctggcttctttgcagaaaatgaccagctgatgatataattcatctggaaattaaaggcggcccagaatagccaaaacaaacttgacaaagaacaatgtcggaggactcatgcttcctgatttcaaaacttattatactgctacagtaattaaagctgcatgggactggtacaagaatgcatataaaccaacaggataccataggatagaatagcccagaaataaacctttatgtatrtagtcaattttcaacaagagtgccaagagtactcaatgagaaaaagaca

SEQ ID NO: 908457 - DNA, 624 bp, Homo sapiens
agagagagggtgaggggggaagtgccacacctttaaaccatcagatctcatgagaactcactcactatcacaataacaggatgggggacacaaccgcmatgattcaattatctccactgggtccgtctcacaacacatggggattatgggaactacaattcaagatgagatttgggtggggacacagccataccatgtcaatggaccaaaacacagacctggccatccctccccactaatggcatagcaagatctgaacactccttggtatcttccctgtggagagtaaaggagtgagaaaaatctaaaatctgacttggtttaacctgaagtcaatgagaagaataaaaatcactaaagcaattgagtttacttggaagtgacaagattaaatgttctgcttcagagagtttgggagactcaagacagaaattcagttcagtgggaacacgcacacacacacacacacacacacgcacacacaaagctaatatgttttcacccttgagaagatgctgggaaattaataattactacattggcaaagggtttagcctatggtaagtgctccctaaatgggaaataaatacatactatataataaaaacagaaaaatcgaaagcc

SEQ ID NO: 908458 - DNA, 597 bp, Homo sapiens
tctcaaaaaaaaaaaaaaaaatatatatatatatatatataatgttataggaataatctgtgcatagaggggaaggacagcagagagaagaagagagggagagatgcaggtttacactgtgctgagggaagcaggagagtacaggtatagatgtgtgttctggttcctctgttggtctcagtttctgcacatagagtaggcatcacaccccactcactgtgtgtgattctagtgtttctaaacacacttttaaaatatacacattacacaaacaccctttatcggatgttcaaccagagaaacagcaatgtgttttagtgctggagggaaaactgtttgactcactccgtgttcatctccaagatggcgcctctgttaagagatctttaagagcatctttgcctctatgtgattttggcctccagcctggattctagactcaccctcagctgtgatgcatcaccccagcagaattacatgctacgttgtcttgtgtagagagyaagacctaaaaaccgtgctcagaaagaaggctctatgaaactagatgagacaggggttgctgtatggaggaagcagatttgaatcaggtcttga

SEQ ID NO: 908459 - DNA, 617 bp, Homo sapiens
agccaagatatggaagcaacctagatgcccattatcaaatgaatggataaagaaaatgctgtatatatatatacacaatggaatattattcagctttttaaaaggtggaaattctgtcatttgtaatcacatggataaacctggaagaaattatgctgagtgaaataagccaggaacagaaagccagatagcacatgatctcacttatgtggaatctcaaagtcaaacccatagaggtagagagtatattggtggttaccaaaggttgggggaagggggtggctgagggagggaagatgttgatcaaagaatatacagttttagttagacaggaagaatacactttagtgatctattgcacagaaaggtgactataataaaaatgcattatatatttcaaagttactaaaatagtagattttaaatgttttaacccatcaaaataataagtatgtgagctgacagatttgttaattagcttcatttatccattccataatgtaaatttatatcaaaacatcacattatrtcaaataaatatataatatatacaattatttgtcagtagttgaaatcaaaaagaaaaaaattacttgaagatgttttttgtatagtct

SEQ ID NO: 908460 - DNA, 612 bp, Homo sapiens
taacaaaaatagtacattctcaaggaatgatattttttcctattttgaattctattaaatytctgtaagaggtcagctttataaatgcaggcattcctcctatttacaaaaatcttacttgtaagcagccatattgtattcccttcttgtcacacatcaggtactcactgcccatgacaaggcagaaaagggcaaagcagaatcctgctggaagtgttcccctctcttagtggggatcagggggcaagtgtccttccctgtggtggctaaactcagcccagcccctgaactaatccttgtctgagcagaaatagccagcagctccaggaacattgtcatatggggcctgttggtcacaggggcataaagctaatgtccagtatcaccaggatttgccctgtgcccaggggtaacctcctagctgttttcttcttccagtgagctggccagttccacagctcagcttctgccttttgtttccttacttatgacttgatttcctacctgtgactgcaaccttcttccaaatacctaagttaattccacaaaaagtgatagtagagtgtttgaactaagaaggaaaccccattccagaatttgacatacatttat

SEQ ID NO: 908461 - DNA, 485 bp, Homo sapiens
ggattgtgaagacgtggttctaagaattaaaaaaaaaaatcttcaagactgacatcttttttatctttctgacttaatatgagcagtgtcccataatctgttctcagctttgtaattttaaaagctcagttgccygacccatgttttcaatgtttattaggttttcagagcatcaccctcatggtaaccaaattcacaagacactgatagataaagtgagtgcctccgctgtcctgtaaatgggaataaacatttttagtttctcttttgtaggcagaccactcttttctgattaataaatgcttcgttgcaacaggtcataaatacagggcctaaatttcttcttttaaattatttgatcactctactcagatttgtcttgggcactttcaaatctacatatttgtagctacaaatttatcggtaatttctagaattactttaacatatttttctcctcctttgtatacaaataatttaaatca

SEQ ID NO: 908462 - DNA, 655 bp, Homo sapiens
ctattaataaaatcatgcaaatattcatcacaggtttattggccatttggtattctgttatgtgaaatttatgttcattttttaaaaaaagttaactccttatacttatttatagtccaatytataatgtattttctttatgattaatgcttttttgtgtcttagtttaataaattgttgctcatcttgggtaataagatacactcctatattattttctggaggcgtcccctccccctttcacatatatgtctacattccacctagatctgatttttttttttggtatattatatgagatagggtccaggttcatttaaaaatatatatatccaattgatcagtactttttattatatatacaaggtcgtttctggactttgtattctattccattattgtattcttgcattgataccacaatgtcttcatagctatagatgtatgatgtcttgatatcttatggcatgagttctccaattttgtttttttcttcacgattgtcttgactatccttgacctactgcattccaatgtaaattttagaattatcttgtcaatttctgcaaaatgttctgttgggatagttttaattttagaagaattttatacttacagaaaagtttcaaagagaacacagatttctcatataccc

SEQ ID NO: 908463 - DNA, 621 bp, Homo sapiens
taagcttgttgcaaaccagaaacttcaaggatcccatgcaaacaatattactaccacttgcagcacgtactcatgcaggtatctaaagttagtactaagaygattaaaaacagccaatgctgctgtaattatattttctgaatccctagttgggacataagggccaatacattatagcacaatgaagctactgaaacagaatatttgacatcgaggctgtcttggaaaattgggaatataccaccttgcaataatagtaataataaaaaataacatttcttgaaaacttacattttgcaggagaatttcctaagtgctttacttgtattaatacatcaatcctcaatataaccctatgatgtgggtactactattgtccatattttacagagggaaaactgaggcactgagttgtcagtaacttgcctgagatcccacagctagtaactatgtaagtagagtcaaattgaagcttaggccatgctgaaccagaacccttgctcttaaccatcaatactctactacctctctcccattcttggcagcaaaatctctgttttaaccctcctaggaggatacttgaacttcaaatactatttccagaaatacaaatacatcaat

SEQ ID NO: 908464 - DNA, 435 bp, Homo sapiens
aaacaccaaaagcaatggcaacaaaagccaaaatagacaaatgggatctaattaaactaaagagcttctgcacagcaaaagaaactaccataggagtgaacaggcaacctacagaatgggagaagattttcacaatctacccatctgacaaagggctaatatccagaatctacaaagaacttaaataaatctacgagaataaaatcaaacaaccccatcaaagagtgggcaaaggatatgaacagacacttctcaaaaggagatatttatgcagccaacagatacatgataaaatgctcatcatcactggccatcagagaaatgcaaatcaaaacygcaatgagataccatctcacaccagttagaatggcgatcattaaaaagtcaggaaacaacaggtgctggagaggatgtggagaaaggaaacaggcagac

SEQ ID NO: 908465 - DNA, 435 bp, Homo sapiens
aaacaccaaaagcaatggcaacaaaagccaaaatagacaaatgggatctaattaaactaaagagcttctgcacagcaaaagaaactaccataggagtgaacaggcaacctacagaatgggagaagattttcacaatctacccatctgacaaagggctaatatccagaatctacaaagaacttaaataaatctacgagaataaaatcaaacaaccccatcaaagagtgggcaaaggatatgaacagacacttctcaaaaggagatatttatgcagccaacagatacatgataaaatgctcatcatcactggccatcagagaaatgcaaatcaaaactrcaatgagataccatctcacaccagttagaatggcgatcattaaaaagtcaggaaacaacaggtgctggagaggatgtggagaaaggaaacaggcagac

SEQ ID NO: 908466 - DNA, 680 bp, Homo sapiens
aacactgggtgcagtgttccaaacccatccctactctcctgacaattatttggaatccaggtcatctcctaagcacaggccaggagtggctgcgggaagktattgctttgcttcatgaggacaacctcccgggtagaggttttggcatagggaagggaaggggtgggggctctttaaatcttgtttcccttagtacccacctgagtctgcacaatcctcactgtggcaaatgccccatattaaacctaattctacttaaccactatcgcctttagtattattgggctctttttgttgttacagtaggtcccttttgatcatcacgaatttcgggatttctgagcaaatccaattcactctccccaccacttgctgatactgaaggttttgttactaccctgtccccagcctttacccttccaaagctctctgtcagccaaagctcaccacctttcttggccttctccgatgtcccacacctccctccaccacagggttctatgcaccagcagccagaaccacatagagcataacataagaaccaggctgtgtgaggcgctcaatgagggtgtgcgactccaccccagacccgtcagggatccttcggggggcacttctgaaagcatcagctgtgactactcgcactttcaaaccacctctcatgggaggagagcacctcc

SEQ ID NO: 908467 - DNA, 680 bp, Homo sapiens
aacactgggtgcagtgttccaaacccatccctactctcctgacaattatttggaatccaggtcatctcctaagcacaggccaggagtggctgcgggaaggyattgctttgcttcatgaggacaacctcccgggtagaggttttggcatagggaagggaaggggtgggggctctttaaatcttgtttcccttagtacccacctgagtctgcacaatcctcactgtggcaaatgccccatattaaacctaattctacttaaccactatcgcctttagtattattgggctctttttgttgttacagtaggtcccttttgatcatcacgaatttcgggatttctgagcaaatccaattcactctccccaccacttgctgatactgaaggttttgttactaccctgtccccagcctttacccttccaaagctctctgtcagccaaagctcaccacctttcttggccttctccgatgtcccacacctccctccaccacagggttctatgcaccagcagccagaaccacatagagcataacataagaaccaggctgtgtgaggcgctcaatgagggtgtgcgactccaccccagacccgtcagggatccttcggggggcacttctgaaagcatcagctgtgactactcgcactttcaaaccacctctcatgggaggagagcacctcc

SEQ ID NO: 908468 - DNA, 583 bp, Homo sapiens
cgggaggatcatgaggtcaagagatcgagaccatcatggctaacacggtgaaaccccgtctctactaaaaatacaaaaaattagccgggcatggtggtgggtgcctgtggtcccagctactcrggaggctgaggcagcagaatggcgtgaacccaggaggcggagcttgcagtgagcagagatcacgccactgcactctagcctgggcgacagtgcgagactccgtctcaacaaaaaaaaaaaaaaaaggagaaatgctgacattgcagatactaagaaaagctaagatttttctgactccagattttaaaagaaaattctcattgtaactttgtatatgaaatatgagatactaagtaattagtaaattttaccctcaacaattatgtttataatatttgctggaaaatcttatgactattatttattttattatatgatacaggcttattattaaaattcagtgaagatgattatacatcaggtcaagttattacggtctttttggtctaatttcttccaaagaccactgttagagtagctgggaaagtagttctaaattctatgtgagctatgaaccctt

SEQ ID NO: 908469 - DNA, 549 bp, Homo sapiens
agttctcagaaataagcctcagacacaaggtctctcactgaccttctcctgcctctcccacttctccttctgaagtacagggagtgagtggcttgctctgaaattcccttatctgactgaaggaagttcttccaaaagaaacacaactggccgggcgcggtggctcatgcctgtaatcccagcactttgggaggctgaggcgggtggatcacgaagtcaggatatcgtagccatcctggctaacacggtgaaaccccatctctactaaaaatacaaaaaattggccaggcttggtggcgggtgcctgtagtcccagctactggggaggctgaggcaggagaatggcgtaaacccggagggcggagcctgcagtgacagtgagctgagatcgcgccactgcactccagcctgggcgacaaaaaaaaaaaaaaaaaaaaaaraaagaaagaaacacaactgtcttcagccccctccctaagaatctcatcaagccgtcagggaagattaatcacttgagaaaagattgcaagtcatcactacacccaacaa

SEQ ID NO: 908470 - DNA, 623 bp, Homo sapiens
tttggggaccatgactgagacaggagatgataggtggtgtggtacccmtggtggatgaagaatggcagggctttttaaaagataggtaatttgagcatatttataatttgcatgaaaggactcaggaaaggattaaacagttataatataggggagaaagaaaggtacaagttcctgatcttagagaaatcagaaaagggggtgatcaagcatgcagattaaagggttggccttaaaacagggaagaatataaatatttctcttaaatttagaagtttttttggtgaagacacaggcaggtggagacgaggtataaagtataaagaaaaacttgatggatttcatacctaatagacctaatattcacaatgaaacaggttaagccaaatgttggaaagaatagaatagatttgtgttgtaagcttcagaaaaaatggtgttaaaaaagacaaaattacaacaaatctaactttgcagatcttagttggcttttatttgtgactttagactcaattacagtccaagtcaaaagtagttcagaatgctctgccctaccacgtgtgcaggttatatttattgatagagaaaagaaagtgatatacagaaaatggaagtggggtata

SEQ ID NO: 908471 - DNA, 570 bp, Homo sapiens
ctcaggcagtgttatttccccacacagtgtattggtagtccctccaccaattcagtgctgcctgtgctataatctgcagaaattcctcaaaattgctggsatgtgagtgccacaattccctagcttccagggataaggtgaatttttaactctacacagtttattttctttgataattttagtggaaattttgttgaggcagggaacatcaagcattaggtctatgatcacattcttcaccagaatccattctttgtctttcttatggtgtcatagattgtaacttagcatatcatctccacaattaggctacatacaaagttgaaatatgaatatgcataaggtttttaaagggttggaatcactttatccatgaatttccagaagagataaacatcagtgtgcttagagaagtttgggtatctaggatcataaactaaccttaagaaaaggggaatttttataagaattgtatggaaactggatctggatccagaaaaccaccagtacaaatggtagggtgcagctactctctcagcctctccagaagccacgtggtttctcataatg

SEQ ID NO: 908472 - DNA, 616 bp, Homo sapiens
tgtgtgtcatatgtgtcatatrtttatatataaaagagctctaattaactggcttagaaaaatgaacaattaaataaaatattttgtcagaaaaatagaaactttaatgcctttttgttcacgtgactttagtaatcttttggaaataaagacaattttaaagattataggtaaagtaaaatgtcttcaaaatgtagacatttggtctaaattaagaccagatatcagatttactaactactttaaggtcaaactgtttctttgacttttgaaaattgttcaatttaccttccttaaagccattagattctagataaggcctggggacatgtggagttagccacacccctaactatgctagagagtcagctcttatctacacttctgcctggtgtcctagactagactccacacctagtacacaattaaaattgcttactaaccagggttttcaccaaaagtaaaagttactaagagttaatattataacatgattaaaactactaaagaaacaactttatatgcaaggtgtgtaaagaaagtaaaatgtgtttttggtgaaatattataagaagtcatgggaatgtggattttttcggcctagagtactaaagga

SEQ ID NO: 908473 - DNA, 653 bp, Homo sapiens
ccctttgcagattctacaaaaaaagttttcaaactgcttaatcaaaagaaaggtttaactctgtgagccaaatgtagacatcacaaagcagtttcacagataacttctttccagtttttatcacaggatattctgtttctcactatagaccttactgcactccgaaatgcttcttcatagattctacaaaaagagggttttaaaactggtgaatcaaaaggaacttttacacctttgagccaaatatggacatcataaagtagtttcacagataacttctttctaatttttatcacaggatattcagtttttcatgataggtcttcctacgtttcaaagtgtccatcagcaaatcctacaaaaagattgtttccaaactgctgaatcaaaagaaaggtttaagtctgtgagttgattctacaagaaacaaggcagtttcacagatagcttctttctagtttttaatgtgggacattgtgtttttcactataggccttactgtgcttcaaaatgttccttagcagattctacaaaaagagtgtttccaaactgctgaatccaaagaaaggtttaactctatgaactgaatccacacatmacaaagcagtttcacagatagcttccttttagttttcatcgcatgatatttggtt

SEQ ID NO: 908474 - DNA, 603 bp, Homo sapiens
ccctagtatcgcttcacagattctacaaaagcagcgtttccaaactacacaatcaaaagaatagattaactctgtgagacgaatgcacayatcacaaatcagtttcctaaaaagcgtctttctagtgtttatctgaagatatttcctttttcaccataggcttcaatgtgctcacaaatatcccttcacagattatacaaaaacagggcttccaaactgctccatcaaaagaaaagattaactctgtgagatgaatgcacacatcacaaatcagtttctcagaaagcttctttctagttcttctctgagcataattcatttttccacataggcctcaatgcactcccaaatatatcttcacagattctacaaaaacagttttccaaactgctccataaaagaaagggtaaactctatgatatgaatgcactcatacaaagcagtttctcagaaagcttccatctagtttttatctgaagctatttcctttttcaccataggcatcaaagcactcctaaaaatgtctaagcggaacagtgtttccaaactgctcaatcaaaagaaatttttaacagtgagagttgattgcaaactactcaaaac

SEQ ID NO: 908475 - DNA, 610 bp, Homo sapiens
cttggacttttgggtgaatgctggaataaattaagattttggaagactgttgggaagkcatgattggttttgaaatgtgaaagggacatgagatttgggaggggctaggggtggaatgatgcggttagactttgtgttcccacccaaatctcatcttgaattataattcccataattcccataatgcccatgtgtcaaggaaaagatcaggtggaggtaattggctcataagggaggtttccccagtgttgttctcaagatagtgaatgagttcttacaagatctgatggttttataaagggatctttccccttcagttggcccttctccttcctgccaccctgtgaagaacgtgccttgattccgcttcaccttctgccatgattgtaagtttcttgaggcctccccaaccatgctgaactgtaagtcaattaaaaccctttatgaattactcagtctcagacagttcctcatagaagcatgaaaacggactaatacagttcatagcatgtatatttggatttttcagaatgagattcagtatcatcattggattctgaaaatgatctctgatcaccaaatagtttaaaaaccatagattgagaccaaa

SEQ ID NO: 908476 - DNA, 664 bp, Homo sapiens
ccctctttttatttctgcccaaacaagtcacccagaaagaagctgtctataaataaatagctattcataatttyaatataaatttaaaacttaaaaatatctgaacactaaataacaaccctaaggaagagtcaactacacctcctggttctagctgtcttttactaactaataggagttccccaaaacagctattacattttgagtatatacaatataccagcagggtctgaaattttccatacataatctcatgtaatactgtctttcatcatgctaggtagttatatgtaatcttattttatagttggcaaaagttgttcatatttctttcctcctacaaacaataaggaaatcaatgtgattcaatgaattcacataaaaggtatgtctttttaattattattataatttctatttgttaattcaaataaatccttaatacaggaatttcaggtttgggggagaaaatgggagatgcaagaactttctccttaagctgcaacaggtattgctggtatggtcaattgctaaggtcagccaaaatacatagaaagaaacaaagacatgcgtatgggccttgttctttatattttatcatagttagagggaagatgaaaccctgaaagataactggatggttgtgactatcctagactaacac

SEQ ID NO: 908477 - DNA, 651 bp, Homo sapiens
gaggtctaggtaaatgatggaaagaaggaacataaaaataggaaaggcttgttgaaagaggtttatgatggctgtgtacagaaagggtagagaggaaggccctatgtcccaaaaggtactctaaagtcagagaaaacctgggctgtaatatggccacatcctcatttaaatttaaaaagacgtgtgtggccaggtgccatggctcacagctgtaatcccagcactttgggaggccaaggcgggcacatcatgtggtcaggagttctagaccagcctggctaatagggtgaaaccccgtctctactaaaaatacaaaaattagctaggcatggtggtgtacacctgtagtcccagctactcaggaggctgaggcagaagaatcgcttgaacccgggaagtggaggttgcagtggaccgggatcgcaccactgcactccggcctgggtgacagagcgagactcttgtctcaatggttgctcacacctgtaatcccagcactttgggaggatgaggcaggagaatcgcttgagcctagaagtttgagactagtcagggcaacatggcaagaccctgtctctacaaaaaaatagaaaaattatccaggtatggtggtgtatgcccatagtygcagctacttgggaggaaggatca

SEQ ID NO: 908478 - DNA, 542 bp, Homo sapiens
gctcactgcaacctctgcctcctgcattcaaatgatcctcgagcctcagcctcctgaatagctgggattacaggcgcacaccatcacgcygagcagatttttttatttttagtagagacagggtttcaccatgttgcccaggctgacctcggactcctggccttatgtgatctgcctgcctaggcctcccaaagtggtgggattacaggtgtgagccactgtgcctggcctgataattttgagattcatccatgttgctgcatgttatagcagttgtcagttcctatttatttattgagacagggtcttgctctgtcccccaggctggtgtgcagtggtatgctcacagctcactgcagccttgacttcctgggctcaagcagtcctcccacctcagtctcccaagtagttgggattacatgcatgtgccaccatgcctggctaatttgtgtgtgtgtgagtgtgtgtgtgtattttttgtagagatagggtctcaccatgttgcccaggctggtcatgaactcctggactcaagcgatctg

SEQ ID NO: 908479 - DNA, 623 bp, Homo sapiens
agcacacagcttaatgggctgcttcccaaaagagagaaatggtggtggacatctgttcttaaaaatgactgacatgttccccaaactagcattttctctatggcttttatgccatttatcactatcactaaatacaattttaaacctttcaaaaaggatttgaaagagttaagagattataatcctcaagtatgggccaagtatatcttctttctaacgttgtgttgctgtaattaaagttgctagagagtaatggccccaagtattcttcctgttagccagtgattctgtaaaaataaacctcagtgctttttgacatatgacaaatgagcatcttctgccctggatatctaccagggatatactttaaattattctgaaggcctgtaaagtgcttttaagtcttccgtggggctttcacatgaatggtactttaccactttgagcatagaaatgtggctgagttcagacagaagcctctccagaagagctgcatcctttgaaaagaagacagcagatcatagccaaaaccgctgttaagtctaagataagttcttgccatgtttcggggatcctatggtgcccatyccacagtgatcaagggccatcaagctgcaaaggtg

SEQ ID NO: 908480 - DNA, 569 bp, Homo sapiens
gctaaggaaaagaatgtgtatttgtgtattctgcagctcttggataagaaaatgttctgtaaatatcttattargtccatttagcctacagtgcagaataaggctgatgtttctttgttgattttccattcggaagatctgtctaatgctgaaagtggggtgttgaagtctccatctgttactgtattggggtctacatctctctttagctttaatattttcttgataaatctgggtgctccagggttgggtacatacatatttaaaattgttatatcctgttgctaaattgacacctgtatcatattataatagtgaccttctttgtctcttcttatagtttaggtctggaaatctattttgtctgacatagtgattcctcctttttttggtttcaattggcatggaatggctttttttatctctatatctttagtctacatgtgtctttatggtgaagagtgtttcttgtagcaaacaatcagtctggttttttcatccattcatccagtctgtgtcttttgattggacagtttcgtccattttcattcaatgtttttatttataag

SEQ ID NO: 908481 - DNA, 576 bp, Homo sapiens
gctagaaagtcagaaatatagtcatactttcagagaagaaatacttttttctcacccctcctaggttctgtgattgaagacctgtgaattaaactggcaaaagatagattagaaaaacaaatacgtgtaattatatttgaacgaaaattcacagaaaaatatatgactcataggaatagttagatttgtggtttatataccatcttaatagggcaagaggttggagagaatggtacttaagagaaaacaaatgactatttgggaagataaataagcccttaggagaacagaggggagataagatagttctgtggcaatgtaggtttcaggtggtgtagaaacttctcatctccagtaacagtcaatcttgcctggttgcttttgggaggaaatttatcataattgtgttcttttcattcttctggaaggctctgcttttgggcagatgagagatttcagkaactcaaatgccttctatttgaaatcattctttatttttattttggccgcagtggtgtattctggaccccttcaatatgtaactgggtccactgatgtgctttcctatcaatacaa

SEQ ID NO: 908482 - DNA, 571 bp, Homo sapiens
ggcacaaacaagtccagactgcaaacactaccagaaatagctaactcttcaatgcccaaatatagatgaatgtccacaagcatcaaaactatccagggaaacatgacctcaccaaataaactaagtaagtcaccagggaccaatcctggagaaagagaggtatgtgacttttttagacaaagaattcaaaatagttgttttgaggaaactcaaagaaattcaagataacacagagaagaaattcagaattctatcagataaatttaactaagagattgaaataattaaacataatcaaacagaaattctggggttgaaaaatgcaattgacatatagaagaatgcatcagatttaacagtagatttgactaagcagaagaaagaattagtgagcttgaggacaggctatttgaaaatgcaatcagaagagacaaaggaaaaaagaataaaaaacaataaagcacaactacaggatctaaaaatacccccaaaagggaaaaatgtaaaacttactggctaaaaagaggaartagagaaagaggggtagaaagtttattgaaagggataattt

SEQ ID NO: 908483 - DNA, 611 bp, Homo sapiens
tataagcaaattccttgtgagtttgaaagtgtgactaagctaataagactagtactaaaacaagagcacgggtttccagatgaagcgagagataaagggtttggattagccaggattcctaatctgtgtgctgkcaaattccagacccataaaataatccacataaaaagtcagtacttaaagcctcacattgtgtccctcctttgagattcaaaatgcacaccagcacactatgagttttgaaaaatcttggagaaaagagtcccggttgatgtttcaaaaatctcgcttttttctcagaattattgggtctataatactctttctgtctttaaacacctcttgtctttttaggaaataatattctgtagaagacactgtggaaatgttaatttagtgttttccaatttaagaatgtccccaaaacaaagcatttttcctgatcatcctttttcattcatgtagttttagtgaagtatgttatctacaaatcataacttctaagatggtttataaaaagactaaaagtatgagacggtaaacgttttaactaggaagtcagaaggatgcgcatcagagttgctcatcactgtcgatccaagagaacctgc

SEQ ID NO: 908484 - DNA, 523 bp, Homo sapiens
gcctgccttacaagagctcctgaaggaagcactaaacatggaaaggaaaaaccggtaccagccactgcaaaaacataccaaatkgtaaagaccatcaacactgtgaagaaactgcaccaactaacgggcaaaataaccagctaacatcataatgacaggatcaaattcacacataacaatattaaccttaaaggtaaacaagctgaatgccccaattaaaaagacatagactgacaaattgaatgaagagttaagacccatcagtgtgctgtattcaggagacccatctcacgtgcagagacacacataagctcaaaatacagggatggaggaatatttaccacacaaatggaaagcaaaaaaaaaaaaaaaagcaggggttgcaatcctgatctctgataaaacaggctttaaacacaaaaaatcaaaagaaacaaagaaggccattacataatggtaaagggatcaatgcaacaagtagagctgactatcctaaatatatatgcacccaatacaggagtat

SEQ ID NO: 908485 - DNA, 521 bp, Homo sapiens
cctgccttacaagagctcctgaaggaagcactaaacatggaaaggaaaaaccggtaccagccactgcaaaaacataccaaattgtaaagaccatcaacactgtgaagaaactgcaccaactaacgggcaaaataaccagctaacatcataatgacaggatcaaattcacacataacaatattaaccttaaaggtaaacaagctgaatgccccaattaaaaagacatagactgacaaattgaatgaagagttaagacccatcagtgtgctgtattcaggagacccatctcacgtgcagagacacacataagctcaaaatacagggatggaggaatatttaccacacaaatggaaagcaaaaaaaaaaaaaaaagcaggggttgcaatcctgatctctgataaaacaggctttaaacacamaaaatcaaaagaaacaaagaaggccattacataatggtaaagggatcaatgcaacaagtagagctgactatcctaaatatatatgcacccaatacaggagta

SEQ ID NO: 908486 - DNA, 719 bp, Homo sapiens
ttgaaagaaagctttcttaattttctgaagcacacatctgaaagtatcctaggccctgtctatgaatatcaaaaataaacacttttttctgctaggtgacatatgtcattactgttttgaccctatatttaaatgaatcatgagggccagcctagccttactgagcaaaatagtcctgctcttattaaatacccctcacagacttaaagcaaaagcagccagtcaggtagttttgctaccttgctgcataaaaagtaggaaacttaattgggattcagactatgaccgttcttaaaatacactttaatttcagcttcatttcattctgtccacaatcaattattgaatgacagctttgtctaagctacattgcttaatagtatagacaaggcagtaaactctgggagggaaggaaccagtcctgttttattctttagcccatgttggcacatcatgggtacatcataaatatttgtaaaattaatatgtaaatgaatgaatgacaggagagaaggaagaagaaaagaataggtgaacactaggaatactaaaataactaagacatttccttaccttcagagagcttacagtctcacaagagggatatgcacataaatagccattattgaaataaaattgagtgagtraaataagattaagaaaaaaaagagcttaggcatttcggagaaagacctagggaggaattcactgtggggagt

SEQ ID NO: 908487 - DNA, 614 bp, Homo sapiens
ctgcagaatatgttgtcatggaatggccaccccaatggctgtcaagcagacatttttcttagccaagtcacacagrtaagtaacaaggtagattcaaggttgataaaaagcaaaagcaaatccacacttattggtttcctggtgtgacattgagtatactttgggatttcacagaagggttagtcagagtattccttcctatattttgatcagttgctaatacaggtttgattcctctttcaagtagaaatgactcagctataaatttatagctgcctctgtaggtagttaatgcaggtggataagcaatattgacagcatgactaagtctagccaaagcaggtgcatgaaaaattattagtccattctgcaaaaccctaggccatctattctgtaggatttatctgtcttttccattcccggtatcaagttcttaactactaaattaagcttatactgaagaggaggagctaggaaaatcttccttagatattcagatactcaatattccattaatcgattaattaaacaagaaatcaattaaatcacaatttatttgtgcacttttcatgtgacaagcatttcgctggttctgatctcacaagagataaaca

SEQ ID NO: 908488 - DNA, 626 bp, Homo sapiens
tgatgacctttccatacgcagttgttaatgaagagtctgactcttgctaaaatcctatgtgtgggttctcaggctccaccaggtcattcctggcaggccacacaggggaaaggtggcctccccgcagcagacttggtgcacttctagtgcattacagtctctaaagggagttgcagtgcaggactcaggcctcccagaccagccatgctgttatgcgtgtttacattcctaacccaggcacctccattaggaggcctctttatcaggtgcctctgccaagaggacatcctaatctaggggagaggggaaactttgaagacactttctttccccactcttagtatccggtagttttaatttttttctttatttcttttttctttcttctcttttctttttttttaacatatttttggagacaggatattgctctgtcgcccagactggagtgtagtggcatgatcatagctcattgcagccttgaactcctggacagttcaagcaatcctcctgcctcagcctcccaagtagctaggactacaggtttgcatcacaatgcctggctgatgttttwttattattattattattattattattattattattattttgtagagacagat

SEQ ID NO: 908489 - DNA, 681 bp, Homo sapiens
tattcactgatggttgtttgtatttctgtaagatcagtggttatatctcctttatcatttcatattgtctatttgaatattctcttttcttccttattagtctagttagctatctattttattgatttttgcccccaagggtttttcatgtccatttccttgagttccactctgatctgggttatttcttgtcttttgctagctttggggtttgtttgctcttgattccctagttcttctaattgtgatgttagggtgttagtttgagatctttctagctttttgatgtgggcacttagtgctataaatttccctcttaacactgctttagctgcatcccagagattctggtatgttgtctctttgttctcattggtttcaaagaaattcttgatttctgccttaatttcattatttacccaggagtcattcaggagcaggttgtttaatttctatgtggttttgtgattttcagtgagtttcctaatcttgcattctaatttgattgtgctatggtctaagatacagttggtaatgatttcagttaytttgtattagttgaggagtgttttactcccaattatatgatccattttagagcaagtgccatgtggtgctgagaagaatgtatattctgatgttttgggttggagagttctgtagatatctatcaagtacact

SEQ ID NO: 908490 - DNA, 631 bp, Homo sapiens
aacccctgcttttttttgcattccatttgcttgctagatcttcacccatcaatttattttgagcctatgtgtgtctttgcatgtgagataagtctcttgaatacagtacatcaatggtcttgactctttatccaatttgccagtctgtgtcttttaattgggcatttagcccatttacatttaaagttaacattgttatgtgtgaatttgatcctgtcattacaatgctagctggttattttgcccattagttgatacagtttcttcatagcattgatggtctttacaatttggcatgtttttgcagtggctggtaccagttgttcctttccatgtttagtgcttccttcaggagctcttgtaaggcaggcctggctggtgacaaaaccactaagcatttgcttgtctgtaaaggcttttatttctccttcatttatgaagcttagtttggctggatatgaaattctgggttgaaaattcttttctttaagaatgtggaaaattggcccccattatcttctgacttgtaaggtttctgcagagagatccactgatrgtctgatgggcttccctttgtgggtaacccgacctttctctctggctgcacttaacgtttttccctttatttcaa

SEQ ID NO: 908491 - DNA, 575 bp, Homo sapiens
acataatttctgttcctaaccaaatactaattttactkaaacacgaaacctctaggatttcatatatatgaaattctatattatatatatataattaaactataggagatgattcaaactaaaacaaaactatatctggacatattataacgtcattgaaaaagaataaacctgaaaccaggttgttttctcaagtacattgttatcacatttccaatacctaaaattaccctcatcgtgttttttcattgtttcttataatcaacatgataatgacacatctttgacctaagcccagaagaagagttggaatgttatggaataatttcactttcttagaagaatgtagtgaaaaaagtttcagcttggagttccttgtacacccctaactctgtaagatgttgccaaaatgaataacaactacaattatagtcaaaataacacaatgtattagttgggattttttaaagggtcgaaaaagatctgggaatatccaatttttaataatgtattttggaccggctaaaacagaaatttatctattcacttccctggggggtcaatcctgtagaaat

SEQ ID NO: 908492 - DNA, 556 bp, Homo sapiens
aagttgagaaatccaaaatgtgtactaagttggtacaatgtattgaataaagcaaaatgatttcaaggaaagcgtccctcttatatcccttagaggaatcagtctaagagcttccgtgaacaaatcgagaagycttttttttccaccaataagaaaatacttaaacaatctgtcctgaaatagaggtcaaagctgattgataaaaagtagttctagaagttacattttattcccatttctctccatttgccatgccatgttggaagatttatgtgatggtcatctcacatacagattctcacactctctctctcctttgccgaataaatattgataaatttattttatattcttagatgtttaggaacctaaaacaaaatgtgcaactacagtatcaagggcttataactatctgatcaatttaagctatttctcagtttcttaccacacacctagtctcttctacctacctaaggaaaaaaaataggatgtcattgatcctctgaaatcctgcctgagttgatggcatcaaacaatgctttctgtttctttaaca

SEQ ID NO: 908493 - DNA, 604 bp, Homo sapiens
aagttatttaccaaacccaaccacataggtwtttttcttaatttttcattctagaacttttatattttcacatttcatttagttctataatccattttgacataaaatttgtgtaacatgtaagatataggcctaggttgatatctttgcatatggaaattcaattgttccagcatcatttagtgaaaagactttccttttacctttgaattgcttccatgccttcatcaaaaaaatcagttgactatatttctgtgaatctatctctgagctccctatctgcgaatctatctctgagctctctgttttgttccattgacctaagtgtctatttttgcatcaatatgatactctcttgattaccatagatttgcagtaaatggttgaaataggacaatgtgagtcctccaactttgttcttctgaagtattatgttggctatgctaagtactgtgcctttctatataacattgaaaagtaacttgtcaatattgacaaagtcactttctgggattttggcaggtattgtgttaaatttgtgcatcagttagagaagaattgacattttcatcatatggtaataattatgaacacagagcatcac

SEQ ID NO: 908494 - DNA, 680 bp, Homo sapiens
aggaccatttgaaagctatgtttctaagtctgatcaaaaagagaaaaaaagaaaggccctggtmaagggctacagatttgcatgggacctcatgaaccaaatccagcttctagattccctttcttctctgagctcaagggtgaagatacagaattctgaatttcagggaagctatgcagggagaagagtacctgagatcctttcaagtcaatagcaacagaggtctttttttgtatgtttgtttgtttgtttttcatacatagcattcctctttttttctagcaaatatcttgttggatttacaagtaattgggattatttttgttgatactggaatactggaaaagagttcacacagtcgggtgctgaatgggggagcaagtctaataggaatattggtaccaaattcctaaaatctcatcaggaattagaagagggcatccagttttgtttttgatttttttaaatagactcttcttgaagttgtaattaaatgcaattaaataattaatgaaataaaacatatggatcatcaattttagattgtgaaaagttgtctccatatagcacatggaaaagtttatcccacttcacaacttttgctcaacgttatagagactgataggtggaagaacacagcacacagtaataggtgtagtagggataaatataatagacat

SEQ ID NO: 908495 - DNA, 699 bp, Homo sapiens
ctagagtaatgtttttatggacaggataaataatccgaaatggtatatgccacttgtttctatgtagtatttggtgtgtgcatttttaagttttttcttatctgtattttctattttttagtctcattgtaaagrtcttaaaatcttatgttgctttttctttctatttttattctgattgtatatatcttataataaatgactaaaattataccatgtccttccaagttctgaaaataaatacttatcaaaacacaaaaaacaaagcatttggaagtttcagaggaatttttattttaaatagaatgactcgtgcaaactgtaagttatgtcatatcactaaagacatctcataaatactaaggcagaattttacattcggcatgaaaggaaactgaattaaagtcatgtactgtataagcaagacaatgtatcagtgttctcacttgccttgcccaagatcacactgaaaatggtaaaaggaattggataggaaatgtctgaaaagccagacccccagccagagtgtggctatggggaatttcacaactaaaggctggcagggaaatatcattggaatggttatgaaacattaggacatcttcctgtttcctccaggagcaagagaagaagcctggattctgctattagccattattttgagatttctgttatgatttttaggcttgaaggcacgga

SEQ ID NO: 908496 - DNA, 692 bp, Homo sapiens
gctggaaatttactgaacctttatgctctgctttccttttaaacataagttcaaattccaaaccatgtctcagtgaatgaataaaatactatgcagccataaaaaaggatgagttcatgtcctttgtagggacatggatgaagctggaaaccatcattctcagcaaactatcacaaggacaaaaaaccaaacaccgcatgttctcactcataggtgggaattgaacaatgagaacacttggacacaggaaggagaacagcacacaccagggactgtcgtggggtggggggaggggggagggatagcattaggagatatacctaatgtaaatgatgagttaatgggtgcagcacaccaacatggcacatgtatacatatgtaacaaacctgcatgttgtgcacctgtaccctagaacttaaagtataatttaaaaaaattgaatgctttaaagagcactcaggtcaccccttgaatgctttgatgcttagaaatttctttcactagatactctaaatcatctctctcaagttcaaaattccacagatctctagggcaggggccaaacactgccagtttttgttgctgaagcatagcaagaatyacctttgctccagttccagattagctcctcctctccatctgggacccagcctggactttattactatcagcatattactatcagtatttt

SEQ ID NO: 908497 - DNA, 647 bp, Homo sapiens
catacaggttaactgcagcttgatgttagaggcattggagattaaaaggtgccattgcaggatatgaacccatacacaataatagttacagattcaaagctgtgattcctcaatgtttgaaggtttctataggaacaacacgattgtgtgttctgtttataagcttaaaatatgtggtggcaagaaagtgctgctgtaacaaccatgtgaggataattcaaaagatgaaagcctgtaaaaattaatgatcagagaagaatgtggcctagtaaatcaacaaccacattattaaaaacagaggaaatataattggccacatatggtcacactataacaaggcgagagtcattgcattctttaagccagttacccatttacacctgcaccgtgatggcttatggagagagcaacagacacgccaacagccttgtggaaatgaaatcattctcttattaataccatcaatgacatccaattagctattaagaaaatggcttagaagtgcaaacaggtacctaaaatgaaaccatcctaatgaattacaaccatcacatttgcttataagtagagcaggttttggaaataatagaytccaggatgcaggggttgagcagtcatgtaacaattcaaataaaatgaaatcactg

SEQ ID NO: 908498 - DNA, 538 bp, Homo sapiens
aataggctctcaacctattctggcttataaagtttctgctgagagttctgctgcaagcctgatgaggttccctctatacgtgacttggcacttctttctacctgcctttaaatttttttcttttgcgtgtactggtaaatctaacgactatgatttggggatgatcatcttgcatagtatccagctggagttctctgtatttcttggattttcatgtcaacctctttaggaagattagaaaaattttcactgactgtatcctcaaatatgttttccaggttgtttattctctctcattctctctcaagaatgccagtgagttatagatttggtctctttacataatctcgtatttcccagagattgtttatttttcttgaaagatcctcagagaatactaggaaaactctatgcacacaaattaggaaacttagaggaaatggatatattcctggaaaaacacaatctccaagatcaaatcaggaagggattgaaaccctgaatagaccaakaccaagctctgaaattgaattagcaa

SEQ ID NO: 908499 - DNA, 645 bp, Homo sapiens; identical to SEQ ID NO: 907257

SEQ ID NO: 908500 - DNA, 605 bp, Homo sapiens
  misc_feature 599, 600, 601, 602, 603, 604, 605: n = A,T,C or G
agtcagaagggtaagagtctggccatggctttgctttcttctctcacgcttccaaccaccctcgtctgaaagctacatttcaccttgtgaaagttctgcccttctgtttccaaatacragatgctgtaagcctgaactcagatctaaaaccaaacttagcattttgtttccaaaagattgactacatattttaatttcccaacctctctcagtggcactgctctcctctcaaatcccagaagccgcagtcagggtcatctttgagccttacctctacatttgagttgtccttcctcccatgagtcccgatgacttcttttcttcattggtctctgatctgtcttcactctcccctgcctgagctgttcagagcattatcaacatctacctaaaatttgaatttcattctctcactgtttagggaacagcagcgacttggacctgtccagtgacactcttcaatgctggacacttgctgtaatttgctgctggcctcagtgtttcagatctccacttccaccccgaggctggctcctgctctgagctccttccttgcaggttgctatggtctgaatgcctgtgtgcccctactgaattcnnnnnnn

SEQ ID NO: 908501 - DNA, 613 bp, Homo sapiens
tgtagaataaagacctttgagagcaggggccttgtcctgtgtttcatgtttcatttctccacagttcccagtaacgttccaaaaacacttaaaaataagagaaaagggtaaattttatttatattgttggttttgaagagagcagatagttctatctcacagttagaaatatgaaatgacagctagctgtggttagaatgagccatgcccagaggcctaatttgagttatcaaaaatgcaatttcagcagcaggagcaacaaccactgtaaccaccatccgtttggagcaaaatatgataggccttacactcaaaaaggctcagcatttgtgataaagaaaaatcgaaacagaagccaataaaaggaatggtcaaagggtcctttggtgctgttgatgtcttcaccagcagacaggactgaacacgggatactggagttggggggattctgagccacaccttgtgtgaaaggggcttaaattttcacttcarcttcctaagaggggattcactaacataggtctattttcttcttgcagatttggtgatgaataaggcaaagtatagaagagggagaaggcctcccttttctggcacacaatacaaatgtggc

SEQ ID NO: 908502 - DNA, 617 bp, Homo sapiens
attgctgggttgaatggtaattttgctttgmgttctttgagaaattgtgaaactgatttccaaaatggctgaattaatttacatttctaccagcagtttatgagtgttccattttctctgcaaacttgccagcatgtattatttttggacttcttgataatagccattctaactggtatgaaatggtatctcattatagacactctgtttctcttgatttgagagttcaatctctttacatttaaagtaactactgataggggagttattaccattattatcgtgcgaattgtcttctctcttataattttttgcacgtcttttcctctctgtcttcttttgtgtttcattgatttttttttttttggtaatgacatgctttgatttctttctcatttttttttgtatatcttctataggtgttttatttctgtttaccatagggcttacataaaacatctaatatatataacagtatattttgaactaatgatgacttaacttcaactatgtagaaaaaactctacgcttttgttgtcccacacagaatttatgttgatgccacaaattacatctttttattttgtgtattcattaacacattttatagttatttt

SEQ ID NO: 908503 - DNA, 555 bp, Homo sapiens
ttttctggttttgatactgtcctacagttgtgtagcaggcaaccactgggggaaactgagtggaaggtaatactacttttttccattttcaacttcctgtgaatctataatttaaaaacaaaacacatttttaagtcatttcttgccatcttagcttgaattataaaacagacaatataatatttttcctttctttcctcaatacattttttcattatttatactctacaattattcttaactggtaagtttgttccaacactcagtaaatgaagctatttcagcaatcttttctgcttttccaatagtagtaaagataaggatatgcagaataaattttgcaattcctctgcctaacagcaaggatagctaataacaaagtgtactgaggttcattgggaaagagatatactcatgtagaaggagtgtttaaaacccatttaaaatgttttgtctactgcytgaaagagagatgactgtcttttttggaaatatagataattacttttggcaattgtaattgagacactatcaaactagaacttccttccacat

SEQ ID NO: 908504 - DNA, 590 bp, Homo sapiens
ttgtagtgccagaatgtaataacatactcaaaaaagaaaataaaacaaacaaaaaaaaccccaacaataatagtatgtcaaaaggacacaaagccaactaaaagagcttccaatagtcaaggctgaaacaatttgagcaaggacatacataaagtagtgttagattttaacccaacataaaataaatattcatgtgcctatgttgacataaacatataatttgagttgatcaatggcaaggaagatacaaatgtcctctgcagaaaaatctgaaataatttagatagctagctactctgttatgaaggaggttaaacatagctcctcacttcttaactgtgggctatacatagtgatttccttccaacaaatacaatatggaaaagggaaaaagagtaaatttacagtgaagaaacctgataaaaactacctcaaccagatgatcaaggttagcatcatcagtgataactcatttgcatagtgtctaccctcgatatgatgtactgagaattgtactttatctatgtagtcttctgccccaacacccataactttgaccctgaaaaaawttgcaaacagatcccaattga

SEQ ID NO: 908505 - DNA, 595 bp, Homo sapiens
ttaatgttttttttttttaaatcacattacatgggttgttttgtgatttactttcwcttaaaattacattatttacattgtgtcctgcatagtacctatttctattttattaggatgtacctcaatatattaaaatacaaagcagtctttagtaatttttctaatttaagatcccattacaagacttttaaaaaatcctgacaagtgtgatattttagggttatgctattaccaggctgaagattcaactctaaagttctcatggtcaatatagaaaaaaaatccccatatttgaaataactggctgtaaacttgaaaattaataacttgcactatctccttttgtcagcttttttgtagtaaagaatgttagcaatgtcaggatctcttgtcttctcagaattctccacttgactccttccaccacagatttaaaaactcaacaatgtaagggatgttccaaacaaaagaatactgttagttatgagagtgctttgtctcctatgcctgaaattaaaaccccaaatgtggtcagttttagatttgaccttgacactccaagcatcccattaggccccatcttaatcttggcccc

SEQ ID NO: 908506 - DNA, 683 bp, Homo sapiens
atgtgttgcttattttacaaaaaaattatactattacatttattattaattataatgcactgtctttataggcttctcctttaggaacttctaagtactcaacatacatcatctgcctaatgatgtattctgcctcctgttaagaatgttatgcatactgagtacatcgcctaagtattatagaagattgataaatattatataattaataaatagattttacttatttttaaaaacaattttacacattaaaattcctcaagaaatgtgttttgttcttattacgtagcaacaagcaaacatccaggtcttctccactcaacacatggaaatcatcctaggcttttaaagggattcatcccaactagttcacagctgcaacactaatgtcattttatattttactggtaactcgattgagcttagaaaggaataactgtttaataacatctgaagaatgctacaaagtcaaagggaagaacctgaatcattttttgctccaaagacgccatttggaccaaactgccaagttttttttaccacgtttacccagatattggctgcaccggtagctaaaagttgggagaaatttatggagctcaggaaccatttttatcattgstatgctgttctcatttttactttaatatgagattatctttcatttagtttttaaatatatt

SEQ ID NO: 908507 - DNA, 563 bp, Homo sapiens
tttttttggtttttgtttcgtcttttgttttttccatgcttaatgaacatgccagattcttgaaatagaaagaagatgagaaaacccagtaagatggaatacctctagaaaagaaactaggcagggacctgatggtaaaggataaaaacacattccaacaggaattctacttttagggagagtatgagttattaagaaggatgtggaaggcacattttggctatgaaagctggtccgtggactcctctgccagtctcacatcagacaggatgcaaccatccccactccattccttcgacaacttcccagagcacattcaatcagtgtcccttaaattgaggacaatactatatttgggtttaatactgtgaggacagtcatttagttttcctgtggcaggatgataaatttcctgggaaccaaataaggattctcattgcattcttctgcttgatactatgaatgcagaagaataaagaagagggtgtgacaaatcatattttccaaaggtcgggtgtggggaggttccctaacrtttaaaagcaaccagttgttagcaaagt

SEQ ID NO: 908508 - DNA, 616 bp, Homo sapiens
gcttggcctcttcagagaccttttaatcaactgaaacttttaattttctttacttttaaaattcatttctatatatttttwaaaaacttagagacagtagagacagggtctcactgttgcctgagtggaagtggtgcaattatggctcactaaagccctgaactcctgggctcaagcgatcctcccacctctgcctcctgaggaactgggacaacaggtgtgcaccaccattgctggctaattaaaaaaaaaattgtagagacagcgtatttctatgttgctcaggctggtcttgaactcctggcctcaagcaatcctccagcctcagcttcccaaagcactgggattacaggtgtgagacactgtgcccagccagaagcttttaattttaacaaagtcaagtacatttgttttgtctttctttttattttctgtttaagaaacatttgcctacttgaggttcatagaataattcatcctatggtttctttcagatgatttattgtttcagttgtcacatttacatatttgtgccatctcaaatgaatttttgtatatggtacaaaccagtggggtggggcggtggggggattgtactcatttattttccagtgct

SEQ ID NO: 908509 - DNA, 619 bp, Homo sapiens
cccagcacaatccaccccttttcccgtttaaacccacaaaatccttgcaacacatatttagcttctaaccaacaccagcaacaaattaatgagtctgcctaatatgatgtgtctgctcttatataaatgtagatgcactcacccactcttggaaaggtggagactcaaagtttcccttcagaactgtagccatctctggatagtgttaattctccttctagtttagtcacagtccttctttgataatcagtaaactaaaaattaaattacaaattaatcacaactaacaaacttctgtatggaaaagagaagataagaagatgtacgtacatatgcaagaaacaatacatagttaacatggtcctcatttttgcaagcagttacaaggccatacttaggctttaaacttctttcttctacaacccactctgtttcctttacaatcaatcagtcagcatctaagccagtcatagctttttatctgttggaataactcaaatctctactcctgaargtgcctgtagtgggttgctgtatgcttccactaacttcctgcataaggaatgcataccaataaatcccctaggctcccaacacaaattccctaggctccacctta

SEQ ID NO: 908510 - DNA, 652 bp, Homo sapiens
tcaggtccgacctgcccctaacacacataccttcaaccaaagcagtgctgacsaatgaactgtgggaaattgttagtaacatataaagcaccagggactgatttcatggaagacagtttttccacagccatgggggttggggaagatggtttccaatgaaactgttccacctcagatcatcaggcattagttagattctcataagcagcacgtaacctagatcccttgcatgcacagttcacaatagggtttatactcctatgagaatctaatgctgctgccaatctgacaggaggcggagctcaggcagtaatgctcacttgccagccactcacctcctgctgtgcagcctggtttctaacaggccacagactggtaccagttcgtggcccaggatttggggatccctgctataaaggactgcataagttattactattaataacaacaataacaaaacgaacatagtcttaactggtttagatttgtatccttttgacttcgtcatttacttctgtttaaccaagaaaagaaagatcattttgtatcttgccaaggtctaaagaatgttgagtaatgctcatccttctaagcttatgccattctgtgattataatatatttgaaagcaccttttctgcacctgcaaatgc

SEQ ID NO: 908511 - DNA, 588 bp, Homo sapiens
aattgtaaaagatttaaaattatattaggacatgagaaaaaatctatttactacatattataacaaagtatcatttctaagagacttgtgaaatcaataaaaacacaaatatgctttttacggaaaatataaaaaggaaatgaaaaagcaattcacagaagaactataaatgtccaataagcctagaagaattcatgagcctcagaaatgcaattaaaatttcactgggatttcattttatttattaaattggctaggatcataaacaacagtaaaactctgtgctaagcagcacaggaaaaaatggttgctttttttttttttttttttcttaaagacataaaaaatcagattcccatttagaattcttaatttttttttttttttgaaacagggtcttcctctgtcaccaaggctggagtgcagtggtacaatcatagtttactgtagctttgacctccytggctcaactgattctcccacatcagcctcctgcgtagctgggactacaggtgtgtgccactatgcccagctaatttttattttggagagatgcggtctccccatgttgccagggctgttctcaaa

SEQ ID NO: 908512 - DNA, 642 bp, Homo sapiens
tggaaataccaaaaggagatcctaagagagatcaggacaaatgtagatgttcacacagtggtaatagttgaagacaacatggtggagtgtgtttaaacatacaaagaaagagtggagcatggggatgggaataagtataagagaggagatacaggatttgaagaaatggttttatttaaaagaaaggacaaggggaaatgtagaaatataggaaaactaggacgctaaaacgcagaggaagatgagcaaagagagatttttatacagaagaggcaggacaagagtgacaaatgttcctggaagtaaagatcaacactgtaaagatgtcaataaattccaggattaggagaccagtagtgtcatgaataaaggtagtttaagtgaagcagtaagagataaaaagcaaatttcaaggagtcaagaagcaagggttacataaatgaataaaaaacttcaattgtgacatgtttgaattttaaaaggaaaaaaattgtaagaatcaaggtagataaaaagcttatttcagtatatagaagacytgagtatttttttagggaaaatgtacccagtagagaaggaaagataaaagataattcccacactactcaacagagtccgaggatacaatgctatttgtcactg

SEQ ID NO: 908513 - DNA, 635 bp, Homo sapiens
tcagtatgatgttggctgtgggtttgtcatatatggctcttattattatgaggtatgttccttcaatcctagtttattgagagtttttaacatgaagcaatgttgaattttattgaaggtcttttctgcatctactgagacaatcatgtgattttagtctttagttctgtttatggggtgagtcacgtttattgatttgtgtatgttgaaccaaccttgcatcttggggatgaagccaacttggtcatagtggataagctttttgatgtgctgctggattcagtatgccagtattttattgaggattttttgcatcagtgttcatcagagatattggcctgaagtttgttgtggttgttgttgtatctctgacaggttttggtaaaaggatgatgctggcctcatagaatgaattagggagaagtccctccttttcaattgtttgggatagtttcagtagaaatggcaccagctcttctacctcttgaagaattcagctgtgaatccgtctggtcctgggcctttttttgattggtaggctatttattattgcctcaatttcagaactcgttattggtctgttcagggattcartgtcttcttgattcagtcttgggatggtgtatatttccaga

SEQ ID NO: 908514 - DNA, 594 bp, Homo sapiens
catggaaggccctccatagtgaggtccccrctgactcctccagcctcactcctccaattcctgccctcactatcttgtaacacaacaagactcgtggcacagcacgtaagatgcagtttccagcctccatactttgcccagctatccccctcccctcctgggtaggaagttttcctgacaccccaccaagaccaccacaagtcaggatcttttctgggcattgtttgtttgttttgttttgttttgtatcagaatctccctctgtcacccaagttggagtgcagcggcatgatctcggctcactgcaacctctgtctcccaggtccaagtgattctcgtgcctcaacctcccaagtagcttggactacaggtgtgcaccaccatgcccagctaatttttgtatttttagtagagactaggtttcaccatgttgaccaggctggtctcaaactcctgacctcaagtgatccgtccaccttggcctcccaaagtgctgggattacagacgtgagccaccgcgcccccagccatttcttggcattcttaagataacctgtgcatcctccaccagggcactcatctggaaattagagg

SEQ ID NO: 908515 - DNA, 576 bp, Homo sapiens
atctagatcagcacctgatgcatagcaggtgttcaatgaactagaaactcaactgttgtcaatactgtctcttcatgatgtatttttcttctttgtgccaactcaacttctctgatccacagcagagagctttacatcttactgctttatttgctaaagaaatattctctctcttggtattttcatgtcaaaaaaattccagaaaaggaactcattgaaagagaaattttacattattttaataaatagagcatgaaatgctgccagggttccctatgaaaccatggtgccagcttgctctttaaagttcctgctcaaaaacaaaaacacaaaacagaacagagaagtgctgctattagacctacctcaaatgtaattatgattggacacaattaccgtcaatgattcctacccaagaagaggtctgaataaagaagttagaaacagatcctcttttgaaacggataccaggttgcatcccatctcctctatyattctttcaaaaagaaggggtcaaagatttgctcattcatctgaaaaaaaaaaaaaagactttatcttccagccaaagacttg

SEQ ID NO: 908516 - DNA, 634 bp, Homo sapiens
gtataaggatacagctatttcactggaaaatgtaatgatgaaatgcaaagtgaaagcacttgctaggcctaaggaaggaaacaaagtatggttagacccattaatatgctgaccacttgataaatccccaatctgatagcactgattggagcaactatgccccaccttacagccttctgccaaatagataatcattcattaccaagaaaactggcaaatttcctcctcaatttcctactgaaatgttctgaagaaaaagaatgcacttggaaattcttcagaagaaaagatgtcatgtgttgacagacaacaaagtgatatgtctgttttgtaaaacaaaccagaaacaaaaccacccagcaaacacacatcaaaaaaaaaaaaaaaaaaaaaaaattccaggatttattccaaggttgtggcatgtgtagcaagagagtatttccaaaaaaacaaaacaaatatttttgctcattaggtattactagttgcctggggcttcccaccaactgaataagtggtatttatgggcagggccaataggcatctgaaccgaataggcaactgaagagtttaatggatgtttttaactcacagcagacacaaargctgaaagcaaagtgcttctgattta

SEQ ID NO: 908517 - DNA, 717 bp, Homo sapiens
tttttgagaacattggccattaatttkttcattgtccttagagacaacatggaatagcagaactttcagtgaaatgtgtgataagaaaatctacattcctgtcccagctctgatacttacaagtgctgtaatcttttacaaggcacttgatttctttgagtatcagttttctctgaaagataagcaggttggaccaggtggtttcaactaccttttctaggttcaagtcgtcataaacttctgacaatagtctctctgaatagggtgacagggtgtgtctgacagctacctagtctctctgctccaaactcacctttctatgctctggctctgtgatcctcggggcagggactctacaaaccacatttctcctttgccatctgattttatctcagattctgtaatcaggaggcactagagggagactgcaaggctgaaggaaggaaatgggacttgctcctttctgtttgcttcttgttccatgagcagcgtctatcaatcataagttgtcccagaaatcggtttctgtatccagctaccttcaacactacttctttttcagtcctctaccacctgtttagccatttatctatatcatattctgcactgccgtttccagttctctgtctggacttagactggtatttagagcatggtgcaatggatagagccacatctatcaagaggtcatgaacctaacttatttaccttattcac

SEQ ID NO: 908518 - DNA, 730 bp, Homo sapiens
aacaatagatgcagcagtgaataaggtaaataagttaggttcatgacctcttgatagatgtggctctatccattgcaccatgctctaaataccagtctaagtccagacagagaactggaaacggcagtgcagaatatgatatagataaatggctaaacaggtggtagaggactgaaaaagaagtagtgttgaaggtagctggatacagaaaccgatttctgggacaacttatgattgatagacgctgctcatggaacaagaagcaaacagaaaggagcaagtcccatttccttccttcagccttgcagtctccctctagtgcctcctgattacagaatctgagataaaatcagatggcaaaggagaaatgtggtttgtagagtccctgccccgaggatcacagagccagagcatagaaaggtgagtttggagcagagagactaggtagctgtcagacacaccctgtcaccctattcagagagactattgtcagaagtttatgacgacttgaacctagaaaaggtagttgaaaccacctggtccaacctgcttatctttcagagaaaactgatactcaaagaaatcaagtgccttgtaaaagattacagcacttgtaagtatcagagctgggacaggaatgtagattttcttatcacacatttcactgaaagttctgctattccatgttgtctctaaggacaatgaamaaattaatggccaatgttctcaa

SEQ ID NO: 908519 - DNA, 530 bp, Homo sapiens
tctctactaggatccaggtcgtctatggttctttcctaccctctaaaaattttagctcscacaaagctttgcagccattacacagtcactaaataaacatttcttgagcatatgctatgtgcagataccctttccctcacagggaaagttaaagaaaaattgcactggacacttactaaaaatgaccagacattttattcatgctactgcagtagggaaaagagacttcagtgtagaactgcagtgaacataattaaaacaaaaaggcaagagaatttttaaggtaaaactctcaacgtttaaggatttaggtaagctagtggaaaagtactagagggtgttaggggagaggttggtcaacgtaattagggcatctgtgtttgctaattggtacttatcaaagttaggttcctaccccctccacagagaatgggaaatacaggctctatatttcttggtgattacatttcaaaggaatggctcccaggtccttgagaaagtcattcctggcttataaaaccagcgagagt

SEQ ID NO: 908520 - DNA, 610 bp, Homo sapiens
agtaggatgtttaaatgtttggtaacattcagcagtgaagccatcaggtcccaggcttatctttgctaggatactgtttatggtagctttgatctggttacttcttatttgtccattcaggttttggattttttcgtggctcaatcttggtaggcttcatctcactaggcattttttttttcatttcttctagtttttctaatttattgcctgacagttactcatagtagcctctaatgatcatttgaatttcagtggtattgggttgaaagtctccttttccatttctaattttatttatttgggtcttctctctctgtattttgttagtctggcaagagttttctcaattttgtttatctttttaaaaacaaacttttcattttagtcatcttttgtattgttttcttcatttcattttcattaatttttgctctaacctttattattactttttctttaataattttgggtttggtttgctcttgcttgtctgattctttaagatgcaccattagtttttttttttatttgaagtttttctacatttttggtggaggcgcttatagttayaaaatgtcctcttagtactgcttttgctgtatcccat

SEQ ID NO: 908521 - DNA, 600 bp, Homo sapiens
cacttataagtgagagctgaacaataagaacacatggacacagggaggggaacaaacacattggggcctgttgagggagggcagggggtgcagagcattagggaaaagagctaatgcatgctgggcttactgcctaagtgatggtttgataggtacagcaaaccaccatggcacatgtttctctatgtaacaaacctgcacatcctgcacatgtaccccagaatttaaaaaataaaatacaataaaagtaactggatttcatcaaaggagaggtaaacacaagcctcagtacacaccagatcaagataagggctcataaatacctaatgtaaactgaaaagcatggcctgctaccttggtaatgaatttctctaaactgcaggtgtttacaccctgatgccagtccttgacatttagtcttacaatggtttatgtctcatggtatcaacttctaaggtgctagccatgcagacactcagggaggcagtacatatattttgtacacaccccaagtgactgactgtctcrggtcacatgcctcctttgcagaaagggctcctctaaccttacaacactgctaacaacagactctctctatca

SEQ ID NO: 908522 - DNA, 653 bp, Homo sapiens
tatctgggaagatttgccaaatgcatcctgacggtattctgacagaaacttgcagcagttacaaattatcaacaataagttcagttacgccatagtgtaattctatgctacatgaagaatgaatgytatttattcatgtgatggcagaaacactctaaggaatttctgtcaaagagagttgggtcattatttgttggaatgaaaaagccattaggcagcacaatatataaatctcaactaagaaaaaatgcttttttggtctcatctccataactttctacagcttaatgcaaagcaaaggagataatcagctcttaagaatccatatcaatagtaaaaaaccagtcatcctgatattttgcaaaaaggtatatatttttctttaaaaagtgatgtgcgtgcggatatataatttttaaatgaagtaattaagtaacatggtaaactcatggcaattttctttccttcctattagaaactgaaaaggcttgccaggcatggtggctcacacctgtaatcccagcactttaagaagccaaggagggaggatcacttgagccaggagtttgagaccagcctgggcaacaggacgaaaccttgtctctactaaaaatacaaaaattagccaggcgtggtggtgcatgcctgtggtc

SEQ ID NO: 908523 - DNA, 639 bp, Homo sapiens
tcagattcagaagacttgaagcgaacamcacttttcaagaaaaaaacaacctgaggttttcgtggactgcaagctcagcgtgggccaacagtgtgataaggctgctcaaaaaagttactggaacttttactaatgggtagtaatttatggatcaagggaatgtgagcatatcattgatttctggtagattgtagccaattctggatgtcacgcacatttaggtactacattggtaaaattgaagtttcttaagaggataacatcacagaaaaatttcagcacatcataggtgttgaaaaatagttatcagatccaaaaatattgagattggagtaccataatagccatgccctttgctagttaatgtatagcctttgcgcaaaaaaagagaaaagccgctctccacaagtaggggaagccccataccaggtttcccactcacactactctgcacagccatattcccttgttcagtgcacaacttacacaattgtatgtggcaaccctgttgatagcaagacttgaattcttgataagatgccttgtggaaaatggtgtagattttttccatgtatccacgcagagcaggacgtgggcgactggtgggaaggagttatagagagacagtgttaggcttaa

SEQ ID NO: 908524 - DNA, 586 bp, Homo sapiens
gtgttgcctaggttttttcctaggatttttatgattttagtccttaacgtttgagtctttaatccaccttgagttgatttttgtataaggtgtaaggaaagggtccagtttcagttttcttcatatgactagtcagttttacctacatcatttattaaatagagaatcgtttccccattgcttgtttgtgtcaggtttgtcaaagatcagatggttgtagatgtgtggtgtcacttctgaggcctctgttctgttccattggtctatatatctgttttggcaccagtaccatgctgttttggttactgtagccttgtagtatagtttgaagtcaggtagcatgatggctccaactttgttctttttgcttaggcttgtcttggctctgcaggctcttttttggttacatatgaactttaaagtagttttttccaattctgtgaagaaagtcaatggtagcgtaatggggatagcattgaatctataaattactttgggcagtatggccattttcatgatattgatttttcctgtcsatgagcatggaatgtttttccatttgtttgtgtcctctcttgcttccttg

SEQ ID NO: 908525 - DNA, 579 bp, Homo sapiens
tggtatcacagtacttgtgtccaatagctcttattcttaacaatggccctaaagctcaggagtagtgatgtaaaacactttctcattgttttactctttgcagtttcaattacccatgatcaattayggtacaaaagcattacatagaaaattccaaaaataaataattcataattttaaagagcatgccattctgagtagcatgatgaaatctcacaccatccccctccatctcacccatggtgcggattatagctttgcccagggtatccacgtatgaggaaagtgcaacataacagcgtcagtcctgttacttactacacagtttttggatctgtagaatggatattacaataaaaccctgtcacccagggctgtagtgcagtggtatgatcttggctcactgcagcctctgtctcccaggttcaagcaattctcctgcctcagcctcccaagtagctgggattacaggagtgcaccaccaagccctgctaattttttttttggtttttgttttttttgggagaaatggtgttttgccatgtttgccaggctggtctcaaactcctgacctcaggt

SEQ ID NO: 908526 - DNA, 602 bp, Homo sapiens
aggatgggatgctggttcagtagattagactgaggtcaagtagaaggttaacaatgggaatgtacgaggatggtggcagtgggataagtggaaatgtgtggatatgaaaaatatgctggatgtagagattagagatttcaggaaatattttttacagaagtatatgatttaaagtgattcttttggtttggaaccactgaggttggatgtttaaaccagagaaaaaaattaaaattatccacttatcttgaagtacttatagggtagtaatgtgtgttgtttttgtttgatattagagggggctaaaaaaaatacattcctgggatgaggagacactgaaaaagtcattttgtttattctcctgtctcaaggtaagagtatactaaaaacaaactaagccgatatttatttgacttattaaaacaactttaaaaattacaaaagtgacatatttcattaatggacaaaatatagggaaakaaaaagaagataataaaatcatctataatttcattactcaaactattatttttatgtatatatgtgagagaggcagcagaaaggtacagagtgtggggtctggataaaactaactgggctgg

SEQ ID NO: 908527 - DNA, 605 bp, Homo sapiens
cagcactctaggaactgattttattattaaaactatcttttctaaatcttaatttctggatctccagtttcagagtcacttgttgataattgttgaaaatgtagattcctgactctcacttcatgcttactaaatcagaattactggaggtgggaccaggaatttgcatttatttaatgaaaaagataagtgtttcttaagcacatgagggtgaattcaaactcagctttgttttttttctttttccccccgtgaatactgtaagatatttctgtgctttatgttagtgctaccccttgagtagttgtgagtgtgtttacatatacatgtgctatgatttaagcaattgatttaagcacttaggcactgaagtttatgaacagacatgcttaacactgcaggaaagaaatttacaaccaataacttctgttcacaatgaaagaaaaactactaaagaaatggaactactttgtagtgttgatgatttcttatctgaatyacactgttaatatcctacatgtgatgttacataacactaaatgacattaatgttgcagaggtctagaaactagtttattttgattgcctttgtgggttcatagtga

SEQ ID NO: 908528 - DNA, 649 bp, Homo sapiens
ccttaatgttggaacagatagaccaacttcagtggtctgagagagtatggagctcactcccaaaggaatccttactatgtgtcccagatgacatacacagcattgactggcacccacgctcagagcagtcttctccaaaagataaaggacacatccaaattgaagtccttcgatctttgagaataattaaataactaactaaaggaaaatgttttgataaaatgcttgccacagtacctccctaaatatctataaagacagaagattctgattataaaacacttctgacaaagtgatagtaaatattctcatgtatttctgaaaaaaaaagaaagcactgatatccttctcttgacttcagtgtttcaggcccttgatccctgacaagttgaagtccctgggacttccaagtagatggttagatgtagccttagacagtaatattggtacaaatgaattctagatttatctcacttaacgatatctatagtatgtttacatactgttaagtattttctatgtggaaatggtaagattgtcattgaaactgttcattgctaatctgtaaggtagacaattacatattcttctattaaaaaaawttgaatctactattaatactggaaaataagaattgttataaactaat

SEQ ID NO: 908529 - DNA, 609 bp, Homo sapiens
atcatgtggtttttgtctttggttttgtttatgtgatagactatgtttattgatttgtgtctgtcaaaccagccttgcatcccagggatgaagcccacttgatcgtggtagataagctttttgatgtgctgctggattcagtttgccagtattttattgaggattttcacattgatgttcatcaggaatattggtctaaaattttttttttgttgtgtctctgccaggctttggtatcaggatgatgctggcttcataaaatgagttagggaggattccctctttttctattgattggaatagtttcaaaaggaatggtaccagctcctctttgtacctctggtagaattctgctgtgaatccatctggtcctggactttttagttggtaagctgttaattattgcctcaatttcaaaacctgttattggtctattcagagattcaacttcttcctggtttagtctcgggagggtgtatgtgtccaggaatttatccatttcttctagattttctagattmtttgcataaagatgtttatagtattctctgatggtagtttgtatttctgtgggatcagtggtgatatctcctttatctttttttattg

SEQ ID NO: 908530 - DNA, 619 bp, Homo sapiens
cttaactgtctgggaattcggcctcattttacctagctcctattcaagatgcagttgctctggtttcaatgcctctgacaagtgggtgagtagcatctccgagcccacagaaccataggatattagaagccacctccgctaagcctcttcgtgtgctaaagtgaaatcagtatctaataaccacagatccatggtgtacatcccaaatgcatgagctggcatttatttccataacaatgctgtcgtgatcacactctgtgggctgtcagccttacttgtaaattaagtctaaatcaacaaaatatgaaatctggtttgcattatacatttcctactttatcctcaaattggaaaacaatacaaaattatttaaatgtgtatctttttgactctgacatgcaatattgagtggagattctagaatttgttttttcttgtaataaaaatacatgattaaaaaaaccagagatcacaaacaagtaaagagaatatagagaacaagtaagtccacctacccacaagtgacccctttattaatatcttcaagcagaccttccctggkcctttcttatgtatgtgcatggacatataaatacaagtatctacaaaaaagacaagc

SEQ ID NO: 908531 - DNA, 610 bp, Homo sapiens
aggaagcaaggtaggtggtctctatgattgtcctagcatactgcctggagtgagtttccatggcttggtgcaagggaaaacacacacacacacacacacacacacacacasagagagagagagagagagagagagagagagagaaagtcccagaagattctctgagttaagtagatggagccaggaaggtcaagatagctgacgtttacaggcagagtacctgatgggaaaacaggccacaaagatgtagatacaaagatctagatatctgtgttctcacttataaatgggagctaagcattgagcacacatgtacataaatataggaacaaggaacactgtggcctactagaaggtggtggttagggctgggttataaaactacctcttgggtagtgtgctcactaccagggagaagggatccattctctaaacctcagcatcacaccatattcccatgtaacaaatctgcatatgtaccccatgtaatccctgtatctaaaataaaagatgaattttttttttaaaaagaggatatgctcacatttcaatgagtattgattaattatatgaagatatgacctgaggtcaggtagagaactacctgaaa

SEQ ID NO: 908532 - DNA, 514 bp, Homo sapiens
cattgatggatgtttgggttggttccaagtctttgctatcgtgaatagtgccaaataaacatacatgtgcatgtgtctttatagtagcatgatttaaaattcttygggtatatacccagtaatgggattgctgggtcaaatggtaattctagttctagatccttgaggaatcgccacactgtcttacacaatggttgaaccaatttacactctcaccaacagtgtaaaagcattcctatttctccacatcctccccagcatctgttgttttctgacttgttaatgattgccattctaactggcatgagatgataccgcattgaggttttgatttgcatttctctgatgatcagtgatgatgagcattttttcatgtgtctgttggctgcatagatgtcttcttttgggaagtgtctattcacacactttgcccactttttgatggggttgtttgtgtttttcttgtaatttgtttgagttctttgtagattctggatattagcactttgtagga

SEQ ID NO: 908533 - DNA, 657 bp, Homo sapiens
aaaacctagaggaaatagataaattcttggacacatacaacctacaaagactgaaccagatagaaacagaaaatctgaacagaccaataatggggaacagattgaatatgtaataaaaagattcccatcaaacattaaagaaaagcccagggctgcatggctttactgctcaattctatcaaccttataaagaagaactagcatcaattcatctcaaactattccaaaaaattaaagaagagagaattcttcctaacttattctacgaggccagcagtactctgatacaaaaccagacaagcacacaacaaaaaaagaacactacagaccaacatcactgagaaatacagacacaaaaatttttaacaaaacactagctaacaaaaatccaacaacacaacaaatatataatacaacatgatcaagtgggatttatcccagggatgcaaggatgggtcaatatatgcaaatcaattaacacgatacatcactttagtagaatgaacaacaaaaatcatatgatcatctcaayagatgcagaaaaaagcattagataaaagccaacatcccctcctgacaaaaactctcaacaaattaggcatagaagaggcattactcaacataataaaggtcatatatgacaaactcacagctaac

SEQ ID NO: 908534 - DNA, 619 bp, Homo sapiens
ccagggaggacatgacccactgcgacaccagccaggctggctaaggaagtgctggcmtcatccctccccaaccccaggctgtacagctcaagactccaaaaaaggccccttccttcctcttgaggaaaggagagggaagagtggggaggactttgtcttgcctcttggttactagctcagccacagcaggatagggcaccaatcagattcatgaggccctagctccagacaacatttctagacacatcccaggccagaagggaacctgctgccttgaagggaaggacccaatcctggcaggattcatcacctgccaactgaagtgccctttggccctgaataatcagcagtgaaactcaggtactatgtcaggactttgggtaagactctgagacttgctagtttcaggtaagactctgagacttgctagtttcaggtaagactcagcacattgtcagctatggtggctgtagggtgaggctccttccacttaagaaaagcagagggaaaagtaaaggggactttgtcttgcatcttaggtaccagctcagccacagtggggtaaggtgtcaagaagtttcttggggtccctgattccaggacttggcttttggacagt

SEQ ID NO: 908535 - DNA, 693 bp, Homo sapiens
gacatgcaaaaccagctttttttctctgatctcatcctaacctcctctttgctaattccactttagttacactatcttctttttgtcccttgaacataccaggcatattttgccctcaagacttatcccattcttctacctggaatgatcaactccaaaaaactaaatggctcactattttattacctttacctggtgaaactttacttgcttaccccgtgtaaaattcaagcacctttcctcttcccctagatttcctgtctccctttcctttacatgttttctgtaacatgtattcattaatattctataaatcttctttatttatcctgcttattgcctaccactcccacactagaatgtcagctttataagagcagaaacctgtgcctgtttttttcattgcgctatgctcaacacctacaatagcacttggaatatggttggtactcaatattcatttgtagagtggattaataaaccattcagtgaggagaagtttaacaaacagagatgaattagatttagatgcaaaaattatggataacctgaaggacattatgctaagtgagataacamactcacaggacaaatactgcatgattccatgtatatgaagtatctaaaatagtcaaactcacagaagtagagaggagaatggtggttgttaggagctgggggaaaggggaattg

SEQ ID NO: 908536 - DNA, 568 bp, Homo sapiens
agctgtaaactactccaaaggccaargttgttgtgattgtcaggattagagtgacacagaagggctttccaacacaggcagtgtgtacaatcttggccttctttggacgctctgtttatgctggtgggttgttatagataaacattatcagtgctatgtttcttttgctagtcaactttcaatcctttgatggaacaaaatttcttcctattcttctttagggtccaggaagaatttcttcctgttggcatccaatttcaaaagatcttgtaaataaattgatatgaataatatactcctcactctaaagcaagctatgaatttgggccactgcactggaaatgtataatatccttttattaaagaaatgtataatatccctttattaaatagcatgattatataatgtttaaatttttttttaccttttagtatgtataggaaatagaatactaatattttgcttcagtggttcttaagaacagctctgctatttgttttttacatgatcacaaaagtctttaacttagttttaacccatatagtcatgcagtttttgtgatgagtt

SEQ ID NO: 908537 - DNA, 656 bp, Homo sapiens
tttaaaaaaatcttgaaattatttattaaatatttaarcaaaatgctttaagtaaaaaaaatcatccaaaaaacacatactttaaccttgaagaatgcagcagaaaagcctctataatgtcaggctagaaaaacaagacatggcctctaacagcctaagagaaaaatgctgccagaagtggattcttattcactggcagtgcaatgcaaaaccagttttgtattaactgctggtaaatacaccgtgtaaatgatccccactggtgaatccaatatgaatctcactgtgcctgggcaaagaggcagccaaatttaaagcatcacagatgtctgacgagtttatccatttcatttgtgctgtgtgagattccgacattacatcactgggaaatgggacaaaagggcgtttcactggtaaatcaagctgtaattcttttcccattcccaagtagatcaccactaccacctagtggatcacttggcaccatcacatctctccaaaagaataccaaaaatactaaaaataagatagtatctttttttatacgatcatttcattcactttataaatactgggctcagaaataaagaaaattacaatctttcaaaacattttaataattctttgtgactcatttattttcttggtttcatcag

SEQ ID NO: 908538 - DNA, 696 bp, Homo sapiens
tgtgtattcctactaaaaacacatttcttcaatctaaccatgagaaaaacatcagatacattccagttatgacatatwctacaaaacatacaatgtgtactcctcaaacctgtcaaggtcattgaaaacagaaaagtctgggcaactgtcatttatagccaagagaagcctaaggagacatgattgctaaatgttatataatttcctgaatgggatcctataaccagaaaaatgaagattaagagaaagctgaacaaatctgaataaagtatgtacattatttaataccaatttaacaatgctatttcattaattgggacaaatataccatactaatgtcaaatgctaataatgggaaaaactgagtgtggagtatataggaactctctgtactatgctttcaatgattcagtaaatctaaaactgctttaaaataaaaagtgtatttggccaggcgtggtggctcttgcctgtaatcccagcactttgcgaggctgcggcaggcggatcacgaggtcaggaaatcaagaccatcctggccaatatggtgaaagcccatctctactaaaatacaaaaaatcagtcaggcgtggtggtgagcacctgtagtcccagctactcgggaggctgaggcaggggaattgcgtgaaccagggaggcagagattgtagtgagctgagatcacaccactgcact

SEQ ID NO: 908539 - DNA, 630 bp, Homo sapiens
agtctcactctgtcgccaggctagagtacagtggtgcaatcttggctcactgcagcctccgcctcctgggttcaagtgattctcctgcctcagcctcccaagtagctgggactacaggcacctgccaccacrcccagctaattttttgtatttttagtagagatggggtttcaccatgttggccagaatggtctcgatctcttgacctcatgatccactcgcctcagcctccagaagtgctgggattacaggcatgagccaccatgcccggccacaacaattagtttttaatacatgttttttatgtttgtgttccctagagatgtacagggcaattgttatttgataaatatagcaccaaacaccaatagagccattttaaacctatcctacaatttacaaactaacatggctttgttttacttaggctcaccaatatgcttttttatttaaagtttgactgatggttgtgtgtccttaacttattgtagtctgttgataagcaagacctttattcctttaactatattcaaatctcaggtatgaagaaggtcccataaacaaaatccatcattttagtataagcacattcataactgtttaaaagaaacacaacttatacttcaaatg

SEQ ID NO: 908540 - DNA, 584 bp, Homo sapiens
tgtcagccaggctagagtacagtggtacagtcgtagctcactgcaaccttgaactgatgggctcagcarctcctcccacctcagcttcccaagtagctagactacagacacatgccactgtgcttggcttttttcttttttcttttttttaagacatggttcttactatgttgcccaggctggtctcaagtttccagcctcaagtgatcctctcacctcagcctcccaaagtgctggaataatagacaggagccaccgtacccagccttaagtaattcttttgatgctagtgtaaatcgaattgttttcttaattttatttttggaatttcattgcttgtataaagaaatacagtttatttgttatattgtcttatgttctgcaatcttgctgaacttgtgctaattctaatagtttttttgtgtatttcgtaaaatgtttatataagatcatttcatctacagatagagaaacttttcttcttcattccaatctgaatgtttaaaccgaacaccttttaaaaataaacttaatggctctaattagaacctccagtacaatatttaatagaagcagaaggagta

SEQ ID NO: 908541 - DNA, 612 bp, Homo sapiens
agtaataaatatcctacaagcaaaacaagcccaggaccagatggattcacagctgaattctactagaggtataaagaagagctggtaccattcctactgaaactattccaaaaaattgagaaggacctcctccctaactcattctatgagaccagtatcatcctgataccaaaatctggcagagacacacgcaaaaaagaaaacttcaggtcaatatttttgatgttcattcaaaaatcctcaatgaaatactagcaaactaaatctagcagaacatcaaaaagcttatccattatgatcaagtaggcttcatttccaggaaacaaggttggttaaatatatgcaagtaaataaatgtgattcatcacataaacagaactaaaggcaaaaattacatgattattaatatctcaatagaagcaatagctggaagcattccccttgaaattgtcacaagacaaggataccctctctcactcctcctatttaatacaatatcgaaagttctrgccagggcaatcaggcaagagaaataaataaacaaatagaaagagaggaagtcaaactacccctgtttgtggataacatgattctatatctagaaaaccccat

SEQ ID NO: 908542 - DNA, 683 bp, Homo sapiens
aaggaaggaaagaagaggaatctattgcaatcaaaatcaattgtgatgaaggctggtttcctaattttttacatttttcctacctaattttatttacacatttttattttctaaggctaaagaaagtgagactggaacaggcaaaaaaaatgcaattgtttctcatttatttccaatactcacaatgtataattacaaagtatattgccaatcacttaaacattctaatgcctcaaataatgtataaggtattcagccaaaactaacctttgaaattaaagaaaaacattgtaagaggaagtttttaatatcttgtccatttaaaggaagttttacttaaagtaatttatacagttcagaactcgccactaaagttcaacatttctaagagctatacctttctgtgacttcatttttctcaagtgacattacaaatttctggtatttataacttttaaaatgtacttgttagggaaaataacaattaagttatttttaatgttctttgcaaattttaattaggacttttttattatcaggcttgattaaggaaataatttattagagcagaaaaaggttttagagagcaaatgtttatactattaattaatrtcagttagctatgtgcttacaataaatttttaattttcagacctattgttattaaaggcacggtggtttaa

SEQ ID NO: 908543 - DNA, 603 bp, Homo sapiens
aactataaaaagttgatgaaagaaattgaagaggacagaaacaaatggaaagacattccatgctcatggattagaagaattggtattgctaaaaatgaccatactaccyaaagcaatctacagattcaatgtgttccctatcaaaataccaatgtcatttttcacagaaatagaaaaaaatcctaaaatttgtatagaaccaaaaaatatcttgaatagccagagcaatcctgagcagaaagaacaaagtggaggtatcacactatccaacttataaatacatacaagtctatggtaaccaaaatagcattgtataggtataaagagagacacatagaccaatggaacagaatagagaacccagaaataaattaacatatttacagctaatggatttttgacaaaggcaaccaagaacatacactgaggagaagacaccttcttcaaaaaatggtcctgggaaaatctgacatttatttgcagaagaatgaaactggacccctatattttatcaaataaaacatcaatttgtctgggcgtggtggctcatgcctgtaatcccagcactttgggaggccaaagagggcggatcacctgaggtca

SEQ ID NO: 908544 - DNA, 585 bp, Homo sapiens
tcagagcaaagttggggctgagcctaggcactgctgcagcctggctgggtgtgcacacacttggagcagtgctgacacaccagctccttcttgccacctcagcccrctccagactttgggcactgacaagcataggagggaagccgaggagagtttgagggcatctcagcgctggcctgcaggcaccccttggcacctacagcctggatgccatgaacagcggcagaaggcagacagttcctgggtggaagggggcaggtccccagtgaggctctcaccttcaggtcagggagggcctgaaggctgggggccaggctgccagtcccgtggactggagtgggaacttgtggtgccttttttgggcttgcccgtgaccacccatgggccaaatggcatgaacttcctcccctctgaggcccataaaagcccaagctcagagctgagcatacatcaggatgaccagctgcagagaggagcaacccactctagggtctcctctctgctgagagctgcagaaatgatgggatgacctgcctgcagagaggagctacccactctagagcctcctctctgctgagagctgca

SEQ ID NO: 908545 - DNA, 580 bp, Homo sapiens
  misc_feature 270: n = A,T,C or G
ggtcttgaactcctaggctcaagtgaccccccccacttcagcctactgagtagctgggactacaggcatgtggcactgtgctcagctcaagaartattttaagttgaatgaaaacaagaacccaatgtatcaaacatgtgggatgcatctaaagaagtagtacatgtgtaatttatagaattaaacacttacattaggaaaaaagaaagatctgaaatccatgatctagatgttaagaatctagtaaaagaggattaaattaagtctcanagtaaacaaagaaaagaaaaaagtaaagataaaagtgaaaatcaaaaaattaaaaaccagagaaaaatagagaaaatcaattaacccccaaaaatagattatttcttaagatcaataaaattgataaacctcttccccagacgtaaggggccaaaaaaagaaaaacccaaaatttattaatatcagaaatgaaagaagggaacattcactattaattctatagacattaaaaggataagggattattacaaaaactctatatatgtccacgtatttgataatttagatgatatgggtaagctccttgaat

SEQ ID NO: 908546 - DNA, 570 bp, Homo sapiens
  misc_feature 273: n = A,T,C or G
ttttgcagtttgatagatgaagaagacaatgaagctcagtgaaatctatttaaatttctctaggtattgtggcaaacaagtgargaaacaggatttgaaactacatttattggtgatgattttaccaatggaatttccactactacgtaatgcatttggtagtcatagaaaagaaacccattctcctcatttgtgataacttggatgaggaagaatgaggactaggagacataaagaacctaatggactgaaatgctgacatgacttgctgtnctctttttttttttttttttttgaaacagtctcgccctgtcacccagcctggaatgcaggggggtgattacggctcactgcaacctccacctccagggttcaaatgattctcctgcctcagcctccccagtagctgggattacaggcacacgccaccacaccccgctaatttttgtatctttagtagagaaggggtttcaccacattggtcaggctggtcttgaactcctgaccttgtgatccacccaccttggcctcccaaaatggtgggattacaggcatgagccactgcgccca

SEQ ID NO: 908547 - DNA, 638 bp, Homo sapiens
atcaacccatcacctagttaccagtttccaataggtgacacaaccaaatggattttcagcttagcgtgacataacttgaaaaaagtgaataatcactgtgttatttacaccagtgctctaaaatttttaatgtatttacacactgccggaggatcttgtttaactctaggttttaatttagtagggctggggaaacatgataaagtgcacgtttagaaagtgctactgacctgaaaattgcattttgaggagcagcgctttttaccgatccaaaccaaagtttctcaatctaggttaagaagctagcagcaattcaatttcaaaacatgataagacagtgaaattttgcttgtaaaaataaaaaaatgtattagcaaattgaattcggcagtatattataagaataacaaagcatgactaatagaaattcaagaaggattcaacattcggacttttaccaacataattaattatatcaacaaatataattcatttaatcaatagatgccaaaaagacaatttcaaaaattcagcaactattactaataaaatatttcttgcataatctaattaaatatgatgaaaatayatttgtcaaaacaaataataagcatcgtatgttgaaatactgaaatcat

SEQ ID NO: 908548 - DNA, 603 bp, Homo sapiens
gatgttagctgtttcaccccttaaagacaggtagtagagaattgagtagagaataaagtagagctggttccctaaaatctctgtaaaacatgaaaaaatataagcaatcatagcctatgtagcagaatgtagtactttccataattttgataattattgacctctgtggtcacattactgaagtagcaaaccaatccagcctctgtgtacaatgaagaaaaaaaaataactatataagagctgaaacatcagagcattagaagaaagacatatcctcacaatcgctggagtaggagaaaagataaatggaggactacttgtgttatccaagaagagtatgcaagaggaaatcgtactctctgcttatcagttgaataaatgctttcagcgatccccatggggacagcttgaagtctgttggagaaatctgagagatgtcaaaacttctgaaatcttatggatagtggcaacaccagaaaaatactattttattactctggagtcattatatttactcctagactagtttattttggaaatttgggtaacaaatrtctattgtttgggaatttcttcttcagattattctcataatgatttcat

SEQ ID NO: 908549 - DNA, 620 bp, Homo sapiens
ttcttctcagcaccatatagcacttattctaacattgaccacataattggaagaaaaaacactcctcagmaaatacaaaagaatgaaaattaaaaaaaaaaagtctctcggaccacagcacaatcaaattagaactcaggattaagaaactcactcaaaatctcagaactacatggaagttgaacaacttgctcctgaatgactactgggtaaataactaaattaaggcagaaataacgaagttctttcaaaccaatgagaatgaagagacaacatagcagaatctctgggacacagctaaagcagtgttaagagggaaatttataccactaaatggccatatcagaaagctgaatagatctgaaattgacactcgaacatcgcaattaaaagaactagagaagtgtttagaatggcgatcattaaaaagtcaggaaacaacagatgctgccatggatgcagagaaataggaaggcttttacactgttggtgggagcgtaaattagttcgaccattgtgaaatacagtgtggcaattcctcaatgatctttaatcagaaatatcatttgacccagcaatcccattactgggtatatacccaaaggattatgaatatttct

SEQ ID NO: 908550 - DNA, 608 bp, Homo sapiens
gattcttggaaacagttattatcttgaaaaaaggtctgttacaatgtggttacatttttggtcttctctcctgtaatggataatgagataacagggagaggaacaaaaacaattgttctcattggtgagtcagtcctatctttatgtggataggggaagtctctgccacttgttgatctctaaagatttttgttgatctttaaagagttttaattaagaatactgattataccagggagccatattttggaataaaatagttttatttccttcaaagttaagctctcttttctttcaaaagcttcttctaatttctctagtcctcattaatctctctttgaattcctacaagctctttccagaatttagtaattatttatatatattttcagggcaaatagaacaatacttagaaaaacgtgattaatccaaatttatcattttctagctgtgtaaatttgttcagagtttctggacttagtctccttacctttaaagttgaggagttacataatttctgatgcttgggaaaatcttagcaaagtattatacaawaaaatgtataataatagatatggtgtaacttgctactgctacagaatctttta

SEQ ID NO: 908551 - DNA, 581 bp, Homo sapiens
tatatactattttttctgctttttcacttaatattgcctcctaagaatatttccatattgctataaaccctcgattaatgtgataattaatggctgccttgtatttagaagttaatgctaacttatttctctagaaaaggatatttacagttatttctaatattctaatatcatatgactgctataaatatctttgtttataaaagtttttttccacatttggaatatttttccctaggttatattcccagatatggaaccaacagataactttcaaagtcaaggataatccaaaacagcctgatctatcttggaagatactgagtttctcatccctgcagctgatagtgaaaaggtggtatgatatttgctaagggtgtggtaaaaagataataagttagactaggtgacttttgaggccccagaaacccatgagattgtggttctccaaatttcaatttacaaacgtgagcctattctttgtcccaaatcactttcttacttgctataaaagttatctaytgctgtgtgataaaccactccaacacttagcagctaaaacaatatccattttgtttgct

SEQ ID NO: 908552 - DNA, 616 bp, Homo sapiens
cacccgtggggatggtggaggatgaagatcccaattggaactctagggtgaaaagatttcagggatggggcgttcttgctgcactgattcagcaaagattttgctaaaactgagttttacaaggaagtgcacagatgagttgaggagacgtttcagaagcctgactaaaatttggctaagcaaagaatctttgttaatagctgcaaggtcccttgaggcctaaatttggaaatagtatactgcttttaatgcatcgtatacttgttgtcagaccaagttaggccaatcaatgagcagtgaagttacattgcagaattatctgtgtgcagaaatggaagaaagtattgtgaataatttttgcaaacaatgtattattatctatcttagggacaaaataattcttgtactttgcatatgtgaaatgtgcttttgccccttctctcaaagttttatcctattagccgttcaggcttgaactccaggacctcatgatctaaatcatgtctagaattagatgacacacaaaggtatagctcttgaagtatatctcttcttgatctagagatctctgaacccaaaaraaaagttatttgctctccacatgctcaatatctcc

SEQ ID NO: 908553 - DNA, 584 bp, Homo sapiens
cagaaatcggctgagcttactgtatggaaatcagggtgtgaaagtagggcacagayccaacatgagatctaagcagccatgagtcagaaatcagaggaacatgggaaatgagaggtgcttgggtttctcctttccaaccaatcctcactggggattgggctagggctgggatcagggagggcaactgagcggtcactgtgtgctgcacaaaaatctagagattttatacacgtgatcccctctaatccctccaatagcagcaagatagacatcactgtacccattttacagatgaggaagtgaaggcttataaaaacaaaagcaacatgttcaaggccatagagttggtggcaatgtcaggagcagaatctagatttttcgtctcaaagtatgatgagttggcaatattgatctgagcagaaattcaaggaaatcagtttcacagggagaggaagtgtttggtctcagggttagaggagggaatggaaaaagtgtcatcagtgaatttaggtccaagttatctagaaagagaaagagaaaacaaggagaggaagctgatgatacagattaaagcttcactagga

SEQ ID NO: 908554 - DNA, 608 bp, Homo sapiens
attttttatttatgtcatcatagaagtttmatgctctgtaatgcattttctatctcttccatctatttggcctcacacacacataggccatactttttattgagggttaatgactttggggtcacgattctgcaagatggacgtgccaacagcattggagagcaagtagagcagtaacaagtaaatcattcattcattcattcattcattcaacaagtgtatgttaagtacagcgtctgccatgtgccatgcactgtgctatgtgccagacacgcactagtgggcagagaatgaataacaattttaatacatctgattacagattataaaatgagataaacaggatgtcttgaggatatatgggaaaactatggaatccagagataactgagaggaagttcagaaaagacttcccagagtaaatgatatctcacttgaatccccaaaatagcaaaagtgttccacgggttgaaaaacagtcaaaatatttagaacatagaatggattgagagaagatagaatggggtaggagaaagccagatcaccaaaactctgccttttcattttaagggatttgcagtttacctaaggacaataaaaagaaagat

SEQ ID NO: 908555 - DNA, 584 bp, Homo sapiens
ttaacacttatttttttacatgcttaaatgtttgtgtttggacttctaagttatgatagtgagttttgattgattctttttcctattgttgcattttaagaatgtgtttttccaggtgagttgaaaatcttaccattgtttaattactcagctaatatttgttgagtgcatactatgtggaggaaactggtctagtgcttgggattcctcattgaacaaaagtgataaacatccctgacctgctgcttacatttaagcaaggagggtgagtcaataaatcatgaatacatataatacattagaaggtaatatatgctgtagaaaagtgatgacataaagcagaaaatattggaaatgctagcatcagggagcagggtgtagtattaaaaggtcagagtgggtctcattgcaaagggtagatttgagcaaaggcatcagaggtataaagaaattaggcatatgaacataggaggwaaaaacattttaggcagatgtaataaataatttcaaaactgaaagacagtcttgtatctttaaaaagtgtttatcttctggtcaaaaggctcattgtagctgttttgttg

SEQ ID NO: 908556 - DNA, 666 bp, Homo sapiens
caaaccagatgctcctgcttgtctgtgtctctagttccaaaatcccgagcttacacaagtagtcagattgacagattcttgggtgtatctttcagtctcagttataaaaaaagaatattagaaaagttgttttctggtttttactctgtggaacaaattcaagcggttcaatggtattggggaggagcaaataaaataaccaagttacaagatgtgaagtgacttgttcatgagcattcaggaaagaagcagcaacatcacaattccaattaagttctttgctccctgagctcaagctattcaccaccacaggagacagccaaagtgtgtagatagtaatcgaacacaggagtgcagataaagttgctaggatgctgtgtaaaacaaagaaaacaactgacaatgagtcattagcaatcccatattttaaaatgtgggagaagagaccctattaaagcagactaagagggggaagagaatagaaaaaacagctgggaaagaatgagtgtcaaagatctcaagtgaaggaagaaattcaaaaagacatttgcaaggggcattaacaatagctcagaagtcaaaggagaaaataatatctatatctatatctataactatatctatatctatawctatatctatatctatatctatatctatatctat

SEQ ID NO: 908557 - DNA, 669 bp, Homo sapiens
ttctgttctttaagttttggaaactatgttataactaaaccttagcagactgatcctataaaatgggggtgcacgagctttttctttaaggctggagagtcaatatgttcagcttcgagggttatgcaacctgtcacagctcttcaactgtgccatgttagcaggaaagctgccagacacaataagtacacaaacagcgtggctgtgttccaaaaaaactttatttacacacactttgtttacacacataggtggcaagctgtaatttttttatgtaatttatggtattttgccatagtttgctgactcttgatacaaatatggagacttttaaagtgagacttttttaacaattaagatgctgtcatatatctcagtagccagctgtttcaagatgattttttgtacattcataatagcttctttgtgaaaacattttaaatataatttgtaatggaatggaaaagtaatggtggtacattctgttattaggtacccttgtccttgaatagaagattatttatatttctaggataaatagaagtgaacaatgaaaaatgaaatatgttacactaaataaaattttgttattatccgaattacttaaaattgagaatagtctgcctaataaaccagaygtcaaacatattaaaataaaagtgatacaat

SEQ ID NO: 908558 - DNA, 576 bp, Homo sapiens
actgaattttaggaatggaaaaaataccgcagtgaggaggagtgagacactgtgatacagcagaaggatcccgggtttaaattctgacaccactacttcctaattgtgtgaccttgaataacattarttttccgtaagtttgaattctcttgcatataatagagttgtcataaaaactaagagacaatttatgtccaagtgctttaacatctataaagtgctgtggaaataccactggttgccttctgcccaagcccctcttgttgaatagactaaaaaactatttaaaaatttgattttcttttctttcagagattccacatctggacataaacctcatggaactgtctggtataacatacatcaacagggtaatacttgctgtcatggggtgaactgtgtccccacaaaattcctaagcagaagccctaaccctctgtccctcagatgtcactgtatgtggaatagggtctgtacagaggtgattaaggtaaaatgaggtcattagggtgggccctaatccaatgtgactgatgtcctaaaaagagattaggacacagatgattaggacacaga

SEQ ID NO: 908559 - DNA, 597 bp, Homo sapiens
taaggaagaggaattggtcaagaggaagcaagtgattgaattagcaatcacgatgggtaagaggtttggctctttattttttagatgcagtggtctggtaagtttcagctccttgatactatctgggtaacctgatgattagtttccagagaaaggaactcagataaaacaattgtaaatttctcaagtttgaagactaggagggacactttttatgtttattcagaaggaaccataaacatcagttctatgggaaaattgagcaggtttcatagtcaaacctaaatttttattctctacttcagcatatctacttgctatgcaaccttgggcctcagctttccaccaatgaagtaaagttgtaaaaattagacagcgaaatgtgtgataaaatacctgatttaataaataatagtgagattccatacacatgcaatcttttaaatatttctgtttcatggcctaaaaaatgtttttgtattcatagtaaaatttattcaaataatcgaaaaagattccatctattgtctttattacaaatgaaaaataataactcacaattttttttytaaaagttgatgttagtttatttttttc

SEQ ID NO: 908560 - DNA, 605 bp, Homo sapiens
tctgttcatatacttcgcccaattttttatgcagttgtktgatttcttcttctaaatttgtttgagttcattgtagattcttgatattagccctttgtcagatgggtagattgcaaaaattttctcccattctgtaggttgcctgttcactctgatggtagtttcttttgctgtgcagaagctctttagtttaatcagatcccatttgtcaattttggcttttgttgccattgcttttggtgttttagtcatgaagtccttgcccgtgcctatgtcctgaatggtattgcctaggttttcttctagggtttttatggttttaggtctacaatttaagtctttaatccatcttgaattaatttttgtataaggtgtaaggaaggggtccagtttcagctttctacatatagctaggcagttttcccagcaccatttattaaatagggaatcctttccccattgcttgtttttgtcaggtttgtcaaagatgagatggttgtagatgtgtggtgttatttctgagggctccgttctgttgcattggtctatatctttgttttggtaccagtacaatgctgttttggtttctatagctttgtagtata

SEQ ID NO: 908561 - DNA, 605 bp, Homo sapiens
tctgttcatatacttcgcccaattttttatgcagttgtgtgatttyttcttctaaatttgtttgagttcattgtagattcttgatattagccctttgtcagatgggtagattgcaaaaattttctcccattctgtaggttgcctgttcactctgatggtagtttcttttgctgtgcagaagctctttagtttaatcagatcccatttgtcaattttggcttttgttgccattgcttttggtgttttagtcatgaagtccttgcccgtgcctatgtcctgaatggtattgcctaggttttcttctagggtttttatggttttaggtctacaatttaagtctttaatccatcttgaattaatttttgtataaggtgtaaggaaggggtccagtttcagctttctacatatagctaggcagttttcccagcaccatttattaaatagggaatcctttccccattgcttgtttttgtcaggtttgtcaaagatgagatggttgtagatgtgtggtgttatttctgagggctccgttctgttgcattggtctatatctttgttttggtaccagtacaatgctgttttggtttctatagctttgtagtata

SEQ ID NO: 908562 - DNA, 606 bp, Homo sapiens
tacatagtcccctggaactacagtgtggtaagacatagtcttgcttgccagctatgtgtgagaccttcccttacccccgaccaccagggaatctaccccatagccatctacagtcttggtctatcttgycgctagacagaaaagttttcgttgtcattttgtgcctcgaagagtgcaagagatgtgtatcaatgatcagactatccatcccatcttgtagctccccttgtccactcatttcacccaccaaagcggctaactcaagtgagcctgccaggaagtccactagttggttccaattacctttcgatcatgaaggggaattcttctcatgggcatgaatatgtgtcactttaacgtgtcccttaaattcacagagtgatttctatggaatcacgccccatacaagaatccctttaataattcagttctgcattgcccatcttcctgaacatatggtaaggccaatgccactgataagtgggtaaagacctaaatattaaggttcttgctattgttcaactatttcatctctacaaaaaaaaaaaaaaacatgaaattatgactactcacctgctttgttcttatcgtcaatcagggtttttt

SEQ ID NO: 908563 - DNA, 604 bp, Homo sapiens
atctttcaagctctgcaaaaagtctttattaacatartgacacagttcattgttactgtcaggtttgtattattaaaccaaaacttcataattacagctgtctgaaactcttccagggacagcaaaagagaagctaccttatacaatcatattactattatatgtagccagctgtaaaataacaaggctaaattttttttgttttttgtttttttataatcaatccttttcttcccatacaatttgccataaccttaatattaaacaaatgaaaaattcatgtgtatatcaactctttttccctaatagtaacgagtcatgctataaacttgccacaacacaaattcaagtcaaattattacaagtcaaatattagccacttgattaaaattaaaatattccttagttcattatttaaccaccactgcattacatatttaaatataagatccctttcatatgctacatatatatatctatatatctgtgaagtaattttgctttatataccttctaaagcattatttttacatacatgaaagtaaattgtgattagataacaaatgtaaagacagagctctattcagcaataaaagaaaaatga

SEQ ID NO: 908564 - DNA, 540 bp, Homo sapiens
cactcttcaatcagggtccactttaccatatgatatggtttggctctgtatccccacccaaatctcatcttgtagctcccacaattcctatgtgttgtgggtgagacctggtyggagataactgaatcatggggggaagtctttcttatgcttttctcatgatagtggataagtctcatgagatctgatggttttaaaaatgtgagtttccctgcacaagctctctctttgcctactgccatccatgtaagatgtgacttgctgtttcttgttttccaccacaattgtgaggccttcccaggcatgtggaactgtaagtcccttaaacctccttttcctcccagtctcagctatgtctttatcagcagcatgaaaatggtctagtacagtaaattggtaccattagagtggggcactgctgaaaagaacccaaaaatgtgaaagcaactttggaactgggtaatagacagaggttggaacagtttggaggtctcagaagaagacagaaaaatgtgggaaaggttggaacttcctagagac

SEQ ID NO: 908565 - DNA, 602 bp, Homo sapiens
aggaaaatgttgcatgaaagaaaacaaaaatgatagttcactttatgtgtcagaaggttttagtgggaastgctatgaccaaccaactttttgatatattaagatatataacttgttgtacatcactttacaaaatcaatttttatccagacttaagaattttttctgtgtatattaaagtgtacattatgaatacacactaaaattatgacaaatttagaaatttaatgtttaagtttcatctgaaaggtattaattcagttattcagaaaatatataaaacagatataccaggcactctgtgaggagatgacttgtgaagcacacaggccaatataattttttttaaaaaaataaagaaagtataatcttagactaacaattataccaaagctttttgaagggcataattaaagttaggaaaatgtgagagagtccaagaaagatagttaatccatttcatggtaatcacatgcagcttcttatagaaaggcgtacttctagatcttgacattattttagtaattaggccaagaaacaaaaaaatatggattatgtacatgaaaagaataacttgtgttataaataccaccacttatcta

SEQ ID NO: 908566 - DNA, 621 bp, Homo sapiens
ccagggactggagggagaaggaaatgagcagttgctgttcaacaggcgcaaagtttcagttatgcaaaattaatacattttagagatctgctatacagcattgtgcctatggttaacaatgctgtgttgcacacttaaacatttaagagagtagatcttatgctaagtgttcttagcacaaatacaaaataagaaaaagttattcctattgtgctatttcaaaagaaactactattcatacaatgaaaacagattcagatgaaaatttaagatattattatcttgaaattctagtacatttttcagttgctaagcttctaaatccatgatttaaagaaacattttcacaaatacttatgtgaagtcagtatatgcacatatattagaaataaaaatgtaatcaagggcaaggattttaagtagtcatgtacagtgatcagaaagcttcttcctcagaaaatgcacaaaacttcagagtatgtaatarctttaatgacattcaatagataccataaagtaaacatcaagtcttggaaacaaaaagtggttaagtcttatagttgctaataatttggtaaccacagcatcatcagtgataatattcactagaagtgtgagaca

SEQ ID NO: 908567 - DNA, 729 bp, Homo sapiens
acctaaactatgttcccaagggaacgctcgaacagatctccctgccagagaacacaagcataatttaaccaaagttttctacatatagtttcttattagactagcccaarggattgatgttgcatgggcttcgggtcaaaaagatttgagtttaaatactagctctgccactgatgagttgagtggtctttaagtaaatcacctagcttcttcaggaaagaagggctaactaaaatcgtgttctcagagttgtcatgagaatggaacaaaatgtgcttaagatactcagcaccatgcccagtatgagctgaattattcaattaagtttactttccttccgtccccatttctttctttttagcatgaactttggaggctgggttgggaggtgttggagaggggcagaggtgggctacggaagtctcttcaaatcacattgttatggtttctctacattgagtttctcttgagaataggaaaaatgaataggaaaaatgaaggaatagaaagctcagtgggaagaaaaaaattaaagggcatttataacaggatgtaaaggaaggcaaagaggaacacaaagtctctttcttggagacctggaagacaaattacagagagtcgtggtgtgggcaggaggagcagcagctatgtgtgtgcatgtgagtgtgtgctcccacacataatacaggtgagaacaatcaacagagggttggactgatggccatgtga

SEQ ID NO: 908568 - DNA, 659 bp, Homo sapiens
taatttttggtaatatctctttagcataaagtgttctatgaagtccagcttctcgaagtgctaactcgaagcgaagtctagggtcagaaattatctgtagaaataaaaatacaatttaaatarcaattcattgaactaaaataacttttaacatttagttccatgttttcccaaactaatttgtttttactggacagatgactaggtgacagtaaactgtgaatacagtgactatattttggaaacatctaaacctttttgacattatcacttttcagtacatcagtggtttcccatgtagggtatatagaacatagtgtactagattagtcaaaatataatgcgttaaaattattaaaagatgaagtaaaagaagcttactttcagtgctactattgatttatcacttattgctggctggaattataaaatacagataatcattgattaaaataaatctaagccacaaaaaaagcatcttaatttctccatcatctggcaatatgtaaattaagtttaaacacatggccaccacttgaaaaacaaaatcaatagaacttttcttccaaggctggatttctatttcaaacagaagtagaaaatgcctccatcgatctgattctaagtggaagtagacatatgagtagttcaacttctgt

SEQ ID NO: 908569 - DNA, 623 bp, Homo sapiens
aggccaattttttgtattttttagtagagacggggtttcactaatccttcactttaggtgaacaaytaggggaaaaatatacctataatcatccttgaagagtagcagataaaaaaatgaaaagtaaaatacaaagaaatgtaatgcattatcttagagagggaaatcatggccaggccatatgagatacttttatagtaaagactttcaagtgttctaattaccacatagactgaggaatgtatgcatttgaaaagaaatatcacctggatgtctctttcaattagaattctctatttttcagtgacttcttcctgacagctcaatccagaaagattgaattttatctttctcacacttccttcctaagggctgcatttgttagatgcttatttcaaacactttgtcttcgtttcctgtaagttttctaactttgaccatgtatcccttaccaaggattctatgagggggagagaataacatatttatccaatttggaatttgaaaacaaaaaagaaaaaccatgttaaacttcaagtagtaaggttctggatgacagtgactttataagaaattaaaacagtatttctccattgagaagatttgatagaccacatatgcac

SEQ ID NO: 908570 - DNA, 567 bp, Homo sapiens
ggctctccttcacttgcttcccacctgtccrtcctttagtgtgaacacacagtgtaaggcagccatgtacaagccagaaagagagccctcaccagaaaacaaccatgctggcaccctgatctcagacctccagcctccagaactgggagaaaataaatttctacctcttagtccatggtattttgttatggcagccctagcagactaatacaagagcaataaacacacactccttctacacatctatcagcctcttcttgctcctttactctggcactctagctttcactctgacttcattagcagaactgctctcagagtcagcaagaagtttttgtggcctcattttaatccctaccctccgaattttctctctacattcaaatctattggattccttcttcttcttctaaaaataatagctttattgatacataattgacattcaggaaacaacacatatttaaagcattcaattggattagctttggcatatgtactcaactgtgtaaccatcatcacaatcaaattatgaccatagccacccttcccaccttaccacttcct

SEQ ID NO: 908571 - DNA, 485 bp, Homo sapiens
gtgctgcaatgaacatacacaccatgtgtctttataatagtatgacttaaattcctttgggtatatacccagtaatgggattgccrggtcaaatggtatttctgtctttcggtctttgaagaatcaccacattatctttcacaatggttgaactaatttctacagcctcaccagcatctgttttttttttttttttttttgactttttattaatggccattctgactggtatgagatggtatctcattgcggttttgatttgcatttttctaatgatcagtgatgttgagctctttttcatataattgttggccaaatgtatgtcgtcttttgaaaagtatctgttcaagtcctttgcccactttttaatggttttttttttgttttttcttttaaattaagttccttcttgatatggtttttggctctgtgtcctcacgcaaatctcatgttgaattgtaatccccagtactgggggagggacc

SEQ ID NO: 908572 - DNA, 590 bp, Homo sapiens
aagaagccatcttgctctgaggagtgatgaagtacatttttgtgtgctgaggcactcttatgggttgaatttctttacagaatgagcccaagtaggcaggtacagtaatagaatggctcactgggagattattagcaacaccagaggcttatctgtccttgtgtctctggggagaagcacaaagagggggaactaatccactccaagaagaagaaagagatggcaccttatccctaatttgatgtatcactcgtagggtaggtaggaaagttcttcagttccatttggcctaggcagtgaattactcctcatatttctattttctagtggtcagtgagctatgagtcatgcagtgactcatagcatcatcatcaatgtatatttgggggtgctctcagggttcctgggttcgtgctgataaggaaagccaggctttgttatgactgagtctttttccgtgctatgtgtttcgtgtgtttttttagccgccacaaccatcctgatggtgtcataccactcagaatgatagaaatgtcttactttyttggaaactagataaacaagaatatcatgcatttgggaaatgttta

SEQ ID NO: 908573 - DNA, 610 bp, Homo sapiens
aaatgacgagttaatgggtgcaccacaccaacatggcacatgtatatatatgtaacaaacctgcacattgtgcacatgtaccctaaaacttcaagtataatttwaaaaaaaagatttttcttccttataagaaaacccttaaaaaagtagttttccccacatctgacacaatcatttaattctatgttgagccttttaggtttctaaccagctaaaggcatctgatgagcatgacagcaggaagaacagtcaacacaggagcaacagccacaagacaagaaatgcattatagtgcttcaattcttaatctaacagtggttctcaaacttgagggtgcatcataatctcctgcagagcttgttaaagggcaggttgctggacctcacccccagagcttctaattcagttatgtcaggaatggggtccaagaatgtgcatgtatgttactttccctggcaatgcactctgagaaccacatctatgcttagttttggaagtgaaactctatgtgcaacttgtgaccaataaatagcctcattgtttataaaggactatccttcctgtgtggagttaacagttcaaaacaggcctatttagttatttgctaaat

SEQ ID NO: 908574 - DNA, 580 bp, Homo sapiens
ttaacacttatttttttacatgcttaaatgtttgtgtttggacttctaagttatgatagtgagttttgattgattctttttcctattgttgcattttaagaatgtgtttttccaggtgagttgaaaatcttaccattgtttaattactcagctaatatttgttgagtgcatactatgtggaggaaactggtctagtgcttgggattcctcattgaacaaaagtgataaacatccctgacctgctgcttacatttaagcaaggagggtgagtcaataaatcatgaatacatataatacattagaaggtaatatatgctgtagaaaagtgatgacataaagcagaaaatattggaaatgctagcatcagggagcagggtgtagtattaaaaggtcagagtgggtctcattgcaaagggtagatttgagcaaaggcatcagaggtataaagaaattaggcatatgaacataggaggwaaaaacattttaggcagatgtaataaataatttcaaaactgaaagacagtcttgtatctttaaaaagtgtttatcttctggtcaaaaggctcattgtagctgtttt

SEQ ID NO: 908575 - DNA, 652 bp, Homo sapiens
gataggattgtgtttcttggccacgttgtggttgagtgggttctggctaatgagttgtgaaaagtgatgcatgtcacatttagctgttgaygtgagaccattggaattcctttcatcctctgcaaagtgacctgcaatgtaagagatggtggctcctttatcagcctgagttcctcagtgatgatgataagcagcttctctgtctatctgtggctggacatatagtctgagtaaaaaattgatcttttttgttttaagccatgaaaactttcttccacaaaaaggagggtatttgtgggaatagatgttatgcttctataaaaatattttaaaatgtggatattttaagaactaaaatcgtagagaaaatttatagttacaccttaaaatttttttaaaggatgtagtgtggtaaagcagaaagcacattgccttttgtgtgacattagggtcaagtcagctttgccaccccaaagtcaaggcaggtaactctctgagctcagttgcctcagctgaaagggatatgcctatgtctgcactgctgtaatttttaagtgagaccatatatgaaatgcctagcatgagaataatagtaagtaacatttgtttagtgcttgatgcatgctaggcactggtctaaaccctttataca

SEQ ID NO: 908576 - DNA, 326 bp, Homo sapiens
ttcagcaatgccccactctactggtaccaatttactgcattagtccattttcatgctgctgataaagacatacctgagactgggaagaaaaggagatataattgaacttacagttacacatggctggggaggtctcagaatcatggcaggaggtgaaaggcacttcttacatggcagtggcaagataaaatgaggaagatgcaaaagcagaaacccctkatagaaccatcagatcttgtgagacttgttcactaccatgagaacagtatgggggaaaccgcccccatgagtcaaattatctcctaccaagtcccccccataactca

SEQ ID NO: 908577 - DNA, 326 bp, Homo sapiens
ttcagcaatgccccactctactggtaccaatttactgcattagtccattttcatgctgctgataaagacatacctgagactgggaagaaaaggagatataattgaacttacagttacacatggctggggaggtctcagaatcatggcaggaggtgaaaggcacttcttacatggcagtggcaagataaaatgaggaagatgcaaaagcagaaacccctgwtagaaccatcagatcttgtgagacttgttcactaccatgagaacagtatgggggaaaccgcccccatgagtcaaattatctcctaccaagtcccccccataactca

SEQ ID NO: 908578 - DNA, 326 bp, Homo sapiens
ttcagcaatgccccactctactggtaccaatttactgcattagtccattttcatgctgctgataaagacatacctgagactgggaagaaaaggagatataattgaacttacagttacacatggctggggaggtctcagaatcatggcaggaggtgaaaggcacttcttacatggcagtggcaagataaaatgaggaagatgcaaaagcagaaacccctgatagaaccatcagatcttgtgagacttgttcactaccatgagaacagtatgggggaaaccgcccccatgagtcaaattatctccyaccaagtcccccccataactca

SEQ ID NO: 908579 - DNA, 682 bp, Homo sapiens
tatctgatctttgacaaacctgacaaaaacaagaaatggagaaaggattccctatttaataaatggtgctgggaaaactggctagccaaatgtagaaagctgaaactgcatcccttccttacaccttatacaaaaattaattcaagatggattaaagacttacatgttagacctaaaaccataaaaaccctagaagaaaacctagggattaccattcaggacaaaggcatgggaaaggacttcatgtctaaaacaccagaagcactggcaacaaaagccaacattgacaaatcggatctaattaaactaaagagctcctgcaaaagaaactaccatcagagtgaacaggcaacctacagaatgggagaaaatttttgcaatctactcatctgacaaagggctaatatccagaattgacaatgaactcaaacaaatttacaagaaaaaaacaaacaacccaccaaaaagtgggagaaagacctgaacagacacttcttaaaaaaagacatttatacagccaaaaaacacatgaaaaaatgctcatcatcactggcmatcagagaaatgcaaatcaaaaccacaatgagataccatctcacaccagttagaatggcaatcattaaaaagtcaggaaacaacaggtcctggggaggatgtggagaaataggaacacttttacact

SEQ ID NO: 908580 - DNA, 224 bp, Homo sapiens
aaaaatagtcagaggttttttattgtttaacttttattgtaagttcaggggtgcaagtgcaggtttgttacataggtaaacttgtgtcatgggggtttgttgtatagattatttcatcacccaggtattaagcctagtagccattcattatttttcctgatcctcatcctccaataggtcccagtrtctgttgttcccctccatgtgtccatgtgttctcgtca

SEQ ID NO: 908581 - DNA, 566 bp, Homo sapiens
tttctagatatagaattctatgttaataactattttcctcktacagcattttaaaggcatcattcaatttttttggactgcatttataatgatgaaagtttagccgttatttttattgttattatcctacatcaatgtgttctttttacttcactactttttaaattttctgtttttgcttttgaatcaatctaaaataatacagtttgctttgtgtttatcctacttcttagatctctaggttaatatttttttcagtaaatttaaaatttttcaggcattatcttttcaaatatctttttctaccccaatttttctctcctctttttctggcactccaatcacatgtatgttataccacatgacattgaacatatgttttttgtttttagtgatttttctttctctgttttaatttctattaccctatcccaaaacccactaatctttcttctgtcctatctaaactgctgttaagcctatcgggtaaaattttcaattcaactattgtgctttgtagatgtagaattttaattttttaaatgttaacttgtatgcagagtccc

SEQ ID NO: 908582 - DNA, 650 bp, Homo sapiens
gaaaacacgtggaatgtggactgtctgatgcaagttagcttcttcatttcaagattgaaaactggaaattcattttccagaactccttggcccttacaatttgccaataagaactacacatgctgcattaggaaagcagaagagaaggaagacagcacatagcactggcagtggcatcccttggcttccagtgcttctccagagaatcacccacagtggtgctgcagaagctggggtcatggtctgtgttttccccataactctctttaaaaaaagatattttatttcccattcatttaaatagttatataaaactctcgttctctctattaactgctgagtggatatattctcactgttcactttctaagtgaaattataatcacttgtgagttttgtttctcatttaagtcttttcaactatttacaaaaatcaacatgagtaattactttcatgttctatagcaattctaaaatattagtatagtcttcatgaagatccttcatgaacaaacagaargaaaatcaaagaggcttactttctagaaaaaatacaggtacactgtatataaagaaatagtatttatgtttgaaactcaaatgagtgtcatcaccaagagttgctaacaattttttattgcatgtattta

SEQ ID NO: 908583 - DNA, 602 bp, Homo sapiens
aacaaaggaacttactaagaaatcactgcacacctcaaatccattatctgcctatgggtcgatgggtccaggagccactgctgctaccaacagagaataatggcttccctttctctttaatcttccaaatatcattcaactgcttcttactagtgaaaacgtaggccagaaatgtcaaaagaatatgtaaaatacaggtttcaggtttctagccattaggatacaaattagagtttaaaggatttgagatggtattaagtatcaatagacaatatctagcatactcagaagaaaagacaaaccacggcagaagatgcaaaaaggatgccaaggagtattcacctatactatatcaatgaaaagtaagaatccagagagagctgacaattatgacatcaacaagatgatcataattagcatggcaactaggtaagcaaataaaggaaatataataatgtaagaaagaaaaaaggaaggaaagaaggagagagggagggagaaaggtaaaagaagttaggaactaagaagaactcattctggaagaacacattacccatggaatgtaataaaacytaccaatgctttaagatatagcagaattt

SEQ ID NO: 908584 - DNA, 672 bp, Homo sapiens
ttactttctgacatggttaggctctgtgtccccacccaaatctcatgtcaaactgtaatccmcacatgtcaggagagggacctggttgggggtgactggatcatgggggcagatttccctcatgctgttctcatgatagtgagtgagttctcacgagatctgatggtttaaaagtgttgcacctctctgtctctctcttgctgccatacaagacatgccttgcttcccctttgccttctgccatgactgtaagtttcctgaggcctccccagccaggcagaactgtgagtcaattaaatcccttttctttagaaattacccagtctcaggtagttctttatagcagtgtgaaaatggactaatacactttcttaaactaaatcttatgttaatataccaagagataagtccattactctcacaaggaagtcagtgcaagtttctcaataaataaatatttagggttggagtttgaaattaaaactttcattttctaacacaagtcctgtttcaaagatacagactgttttacagaagacataccctacatatagtcttgaatgagattaaagggtgatgagtcacattccagataataatctataatttataccttcttatatacttctattcacttcctaaaaggtaaatttgagaaatttaatgtactta

SEQ ID NO: 908585 - DNA, 512 bp, Homo sapiens
tagggaaactactgtacttcatttacacttaagctagagagtttaggatcttaatttatttaaagccatagattcagtttagctttaacctagacagaaagtgaaaagcattttacaagtagaagaggcaatgagaaataaggcaacagataatacgtcaaagctggaacaagggcagaaatcagaacgtgtctggctatcagctttgtttttgactactaaggccaacctttttattcctctggatggtctgcagaccaagttcctagagaggtatggagaagaaagaaacttgtggttagaatttttgaactgaatatcaatgtattaaatatcaagtcattattaaagatgtcagtaatagtatctcctagggctgatgtgaggattgatgaagatgataaatgtagagcatctaataaaatgmttagcgcaagtgctcaacaatgttagttattttatcccatgagagttccccttacccaatctattgatgtagcaggttgacctaa

SEQ ID NO: 908586 - DNA, 607 bp, Homo sapiens
atggtttaagattaagcactgaaggactgaagataatattaaggaaatgaatttgcttattactatgttattagaatgtaactttgaaaaagccatgtgaatgatattatcctcagttttacttatctgagtaaatattaatatatgagtaatgctctgaagactaagtaatataatatctaaaactttctagcataaagaatgaccaataatacctctgtgataaggtttagttttcttcccatattcactgtcacatgtattggaatagaagacagttcctttcagtgactcttctccaaagaaataagaatatccatatctacatatataattttatacatctaaaacaataaactgcttattgaaataactgtaaactctccttttcctcctttttaatagaattgcagagtagctcttgtggaaatcctggtgttccacccaaaggtgtattatatggcacaagattcgacgtcggggacaagatccgctacagctgtgtaactggatacatccttgatggccaccctcagctcacctgcatrgccaattcagttaatacagcttcgtgggattttcctgttcctatctgtagaggtaaaat

SEQ ID NO: 908587 - DNA, 562 bp, Homo sapiens
ggactctaaatcatggtcaaggggagctgggtctagaaccatctctgatgccaacttgctctgttgtgcctctctctgggcccatttcttcacctgcagatgaacttgtacaactcttgggcaatgctaaaattctcaacactaagggaagatgattggcagtatgaaagagagtggaagctgaggaggacagaatcaagcttcttgatacaagcaggggagctctctggggagatgggatttaagatgaaaggaaactcactccccccagggagggaggccaggcatgtgtggagtggacctacgaagagcatgaaatataaagccttatctgaagaggaggatctggaaggaagtaaagagaggaaatgtctgaagaattttaaaagagagcagcagattcaggagcagagtgtaggacaaagtcagagaatcccttgaccctctcttccaattcactctctacaaaggctacagatacatttttctgccacccaattaaaattatatccttttcctgtgcagaatcttttaatraccacctattaccctcaggactaaa

SEQ ID NO: 908588 - DNA, 621 bp, Homo sapiens
agattattgatctccacctttttgcaataagattttattctagcatccttctccttgctgcccatgtgcycattggcttttcagctttgtttttgagagaaaatatgaacacacacccctccacttgagttgtagtatactcactatacaggccaaaggtaacgtttagcttcataaaattccatctgaacatagacaatcattgtccaaaactcacagtcaagaattgtgattgtttgccttccattggttgggttgattccaacaagacctttgctacttaaaatagggtcccagcatcaggaacacattagcatcacttggaagttgttagaaatgcagaatcttagtccccatctcagaccaaagaattagaatatgtgctttaataagatacctcagtgacacacatgcaaagaaaagtttcagaaatgctggattatcaagctgttcaaagtttgtggttcttctgagtaaagcagagtactcatggctgggtctggaaaagcttttctcttacaactcttcatgaaatcttaactgaatgtgaaaaggctaaaaaaaggtttagttagtaattttccaagtaatcatgttcgacaagcctgtatactgcttaca

SEQ ID NO: 908589 - DNA, 600 bp, Homo sapiens
tcaggtagtatctttatagcagtgtgaaaatggactaatacagaacattgataccagtagagtggggtattgctataaagataccccaaaatgaggaagcaacattggaactagatagcaggcagaggttggaacagtttggagggctcagaagaagacaagaagatgtaggaaagtttgcaacttcctagagacttgttgaatggttttgaccaaaatgctgatagtgatatcgacaatgaagtccaggctgatgtggtctcatatggagatgagaaacattgggaaatggagtaaaggtctctctcattatgctttagcaaagagactggtgtcattttgcccttgccttagagatctgtatagctttgagagagatgttctgatattggaacttagctttaaaaaggaagcaaaccataaaagtttggaaaatatgcagcctgaccatgcgatagaaaaggaaaacacattttctggggagaagtttgagctggctatagaaatttgmataagtaaggaggagccaaatgttaattgtcaagataatggggaaatgtttccaggccatgtcagagactttcatggcagcccctccca

SEQ ID NO: 908590 - DNA, 580 bp, Homo sapiens
atgaacaaaaaaacttgtgccccggaaaagtgaacagaacactactgtgttgtaaacaaaaggaaaaacaggatggatcagtttgcacatggtgtcagaatttcaggaaaggtgctcacacctgtaaggaagagataacgctttcatgcagcatacaaaatgttttgctttctctccttttatctagacatatacatatttttacatcatctgtacatagagaatttgaacccacacaacattctgaaagtaattactgttccatcattatctgaaaagggagaggggttgggggagggggtcgctaccaagtctactggactgtcttcatggcatcactgtaagcaaacccctgacatggcagtggtatgtcctctgtaacacttgataagaggcacagaaccactaaaagttactaacatcattagtgcctttctgattccctggaggtcatttcatagctgagcttcttaatatttggcaatatattctttttccatcaaaaaatatccaggcacctaaaacactgtcagaactggctrtgcccctatgatcacctcctgctggctggtatttaatg

SEQ ID NO: 908591 - DNA, 665 bp, Homo sapiens
aggcaaaaataatgtgtgcaacttcctgagactgccarcttgatgggatgtgacatatacttgggtggatctttgtacttatagcttcttagtctcattgttgttttctctactatgtgacttattttggccgatggatattaacaggacatgcgcaagcagtggtttggcatgtacttgtgtgatgggacttgcaccttataagtttgctgtttccatgaaaaaaaaagtactcagacaagtctggtattctaaggggaatgagggacacgtgaagcaaatctggcttagtttgcagcttggaggcaagcccagcccagcccaacctaaatgaatcagtttaggttgaactgtaactaactgagaaagaataattgtagttgttttaagccattgaattttggaatggtgttaaacacaccccattttcaacatttccttcacctcattggtcctgtggtcaattgatcctgtcaatttccaccatcccttacatcccttgtagccttatttctatccaacaaagattctatagttcatcattataattacttccttgcattcatgctaaagtttataatctgggaaactcctaccttaattacaacaaactttcaccctataccacacttctaccaatgtagctgagcctggccagaacctgc

SEQ ID NO: 908592 - DNA, 615 bp, Homo sapiens
atgcatagtagagagtctgcgccaggtatgaggcagctagatgcatctttgggaccaagcttgagccaaggggaggtgagtggaagtgtcctttccaggtgattgtcacatgaaaggaaagccatttttctggaattcctctttccttaccccataagctcaaacacaggtgctagatgtgcctgtgacttggctttgaccatacagccgaggactgtggagcagtaaggtggagggaactgaggttctgggatgaccacgtgaagcaaagctgctcacccactcaggactgttacatcagagagaaaatataagctttttaaagccaaagcttcttgggagtctttttattaccgtggcttaacctttcctctaactaattcaaaagccaattccaaaacaaaccaaccaatcagcagaaaatcagaatgttgaaagtgacatattccaactgatgacaaaagcctgcaggatcagaaacttttggtgagtatgaaatggcaggaacccaagggaaaagggrcatccagtagctggaagcacccacagaaggccatgattttaggtgggaatggtggagacagatttatactggcaaaagtgagtaggaagaca

SEQ ID NO: 908593 - DNA, 655 bp, Homo sapiens
acattccctatggcaaagtatcattggaacaaactcagcaagaatgtgtaatcaaacttttggatcttttccaatttcctggtaaaaaatggcatcatgtccttaaaatgtttgtgggtgctctttatatattaaacgcaccttttatctctaccaagaattgcaggtatttttctttttcttttttcttttttttttgtttgacacagagtctcgctgtgtcaccgggctggagtgcagtggtgtgatctcggctcactgcaacctccacctcccgggtttaagtgattctcctgcctcagccttccaagtagctgggactacaggcgcccgccaccgtgcccggctaatttttgtcatttttagtagagacagggtttcaccatgttggccaggattgtctctatctcttgaccttgtgatccgcccacctcagcctcccaaagtgctgggattacaggtgtgagccaccatgcccagctgcagatatttttctaactttatttatccctggctttatatcaaattacttttccatgtagattttttttaaaaaaaagttgaattgatcaatgttttctttkacagctttaggaatttttgtcacagttagaaaggtcttattactcaagatgattgaaaaatctcatgaaat

SEQ ID NO: 908594 - DNA, 647 bp, Homo sapiens
actgcccaaagcattttatagattcaatgctattctcattaaactaccaytgacactcttcacagaattagaaaaaactactttaaaattcatatggaaccaacaaagagttcaaatagccaagatgatcttaaacaaaaagaagaaaaacaaacctggaagcatcacactacataacttcaaactatactacaaggctatagtaaccaaaacagcatggtactggtacaataatagatacatagaccaatggaacataatagggaacccagaaataagatcacacagctaaacccatctgatcttttgacaaacctgacaaaaacagcaatggggagaggatttcctatttcataaatggtgctgggagaactggctagccatatgtagaaaattgaaatgggaccccttccttacaccatatacaaaagtcaacttaagatggattatggattaaagggtttaatgtaaaaacaaaagtataaaaaactagaagaaaatctaggcaattttattgaggccatggtcacaggctaagatttcatgatgaaaacaccaaaagcaattgcaacataagcaaaagttgacaaatgggatcctaaactaaagagcttctgtacagtgaaagaaactatcacaacagtgaa

SEQ ID NO: 908595 - DNA, 647 bp, Homo sapiens
actgcccaaagcattttatagattcaatgctattctcattaaactaccattgacactcttcacagaattagaaaaaactactttaaaattcatatggaaccaacaaagagttcaaatagccaagatgatcttaaacaaaaagaagaaaaacaaacctggaagcatcacactacataacttcaaactatactacaaggctatagtaaccaaaacagcatggtactggtacaataatagatacatagaccaatggaacataatagggaacccagaaataagatcacacagctaaacccatctgatcttttgacaaacctgacaaaaacagcaatggggagaggatttcctatttcataaatggtgctgggagaactggctagccatatgtagaaaattgaaatgggaccccttccttacaccatatacaaaagtcaacttaagatggattatggattaaagggtttaatgtaaaaacaaaagtataaaaaactagaagaaaatctaggcaattttattgaggccatggtcacaggctaagatttcatgatgaaaacaccaaaagcaattgcaacataagcaaaakttgacaaatgggatcctaaactaaagagcttctgtacagtgaaagaaactatcacaacagtgaa

SEQ ID NO: 908596 - DNA, 620 bp, Homo sapiens
agagctgctttttgaaccatctgtctgcaataaacgggcctcctgagtgtggtgtcttgggctctaatccttgagtaatgactataggtggaaattgtctctgaggcaattcctagtgagaactaggagttctaggaaggatctatttgttaaaaatcagccaacagcaattttccctttaactgtcttctctgagtctttgctccttaaatattcatgaaacttgcagtgatttcagattaaagatctctccaagataagtagttcccagaatcttatatccatggtggtatctggattcgtttctaagtttcccctattatagttcgaaatccctttgcaaagcttgtattgctttcatttactgaaaatgaacaatgctgaggcaggacccaaaggacattaaaaccccattatagttcacttcctgaaaccacacattcggtcatcctgcaggtaaaatcacttccccgtgcgtacaggggagtgtagtgtttcctcctcagtgcagctgcaatgtctctaaactggtgtctttactaagagtttgttgaatgaataaataaattcagwttatttcatgtcccaagtcttcttgtgattgaatttgattcttagaa

SEQ ID NO: 908597 - DNA, 584 bp, Homo sapiens
aaagaaatgataaatgcttcaggtgatggatagcccaattaccctgatttgctcattacatattctatgcctgkatcaaaacatcacatgtaccccataaatatgtacagctatgatttacccataataataataaattttttttgagatggagtctcgctctgtcaccaggctaaagtgcagtggcacgatcttggcttactgcaaccctctgcctcctgggttcaagcgattctcgtgcctcagcctcccgagtagctgggattacaggcacgcaccaccacacccagctaatttttgtatttttagtagagatggggtttcaccatattggccaggatggtctcgatctcctgacctcatgatccgcccgctttggcctcccaaagtgctgggattacaggcgtgagccactgcgcctgaccaaaaaaatttcttttaatgtaaatcatatttgtgccaaccacacaagtcaacgagaccacttgccagccacttgcaatttttcctacaggatggggtaccagagctgaattttacttaagagaatgagatcatcaaagtcaaagtgtgtgtaaagaccc

SEQ ID NO: 908598 - DNA, 654 bp, Homo sapiens
ttgtaagaattgacaaacatccttaaattcacggatgttcaagrgacccagaattgccaaaatcatcttgaaaaagatgaggaagtttccgacacacacttcctagtttcaaaactttctttcaaatgacagcaatcaagcagtgtgatattggcctaagatatacataaagatcaatggagtagaattgagagtccagaaataaaccattatgtttatggacaattgattttcaacagggtgttgtgacgttcaaacagggaaaaaatagttttctcaacaaatgatgctggaaccaccagatatctacaaagagtaaagctggactccctacctcatagtgtaagacacaaatgtaaaggataaaactatacaacttgtagaagaaaatatagaagtgaggttcatgaaattgggttagtcagtggtttcttaaacatgacatcaaagcacaaacaactgaagaaaaaatagatgagttggacttcctcagaattaaccaaatttgtgcttcaaatgacaccatcaagaaagtgaacaaacaatccgtggaatttgcaaatcatgtatctgttaaggggcttatatctggaatatattaagattcttacaactcattaagaaaaagacagcccaattaagtaagaaacaaag

SEQ ID NO: 908599 - DNA, 622 bp, Homo sapiens
tctccagactcagcttacacctctctccttttcactctctttacccgcccccccaacaactggcttatgtatgctcctcaraaaagtcccatttactcatatattagagattttgtatagatgtttcctctaccagaaatcccttcccctagctctttgcatttggagcctttccataattcagttctcagctcaaacattaccttgttgaatagatcttccctcagcacccgacttaaaccagtatcccccatatagtctcttacctctttttaaaactcagtgtcttcttggtcactgtaagtactgagtttatcttgccttttttgtctatttatttaatgttcctgtttcctaataggatgtgaaattactttgagtagactctcctgtttatcataaacagtgcctggcacttagtacatcttcaacaaacgtttgttgaataaatgtgtgcatgaatgacagcacctcagtgatctcactctgatgttgccgagaagggatgctcatgcaatgacttcagagtcttgagatcatacatataatgtatattatatatatattggtttgtacttaaacttggatcaaatgcacttgatttactaactgactttattat

SEQ ID NO: 908600 - DNA, 622 bp, Homo sapiens
tctccagactcagcttacacctctctccttttcactctctttacccgcccccccaacaactggcttatgtatgctcctcagaaaagtcccatttactcatatattagagattttgtatagatgtttcctctaccagaaatcccttcccctagctctttgcatttggagcctttccataattcagttctcagctcaaacattaccttgttgaatagatcttccctcagcacccgacttaaaccagtatcccccatatagtctcttacctctttttaaaactcagtgtcttcttggtcactgtaagtactgagtttatcttgccttttttgtctatttatttaatgttcctgtttcctaataggatgtgaaattactttgagtagactctcctgtttatcataaacagtgcctggcacttagtacatcttcaacaaacgtttgttgaataaatgtgtgcatgaatgacagcacctcagtgatctcactctgatgttgccragaagggatgctcatgcaatgacttcagagtcttgagatcatacatataatgtatattatatatatattggtttgtacttaaacttggatcaaatgcacttgatttactaactgactttattat

SEQ ID NO: 908601 - DNA, 524 bp, Homo sapiens
ggaatagtcaagtggaaaaagtctttgcctcttgaggttttgtcttcttatataagaaggaaaatactccctatcagtcttagtctccaatctcattaaccagaacattgtcacttgcccaatcttaaaccatcagtggtcaaggggaagaagattattttatcctgatttgttttgaccaactaggattcatcctctggcctgggatagaaacctgtgcttactgagactatgcaatctttctttcaccatgaaaaaatcagggttttgattggtggaaaaaaacaatattcttggttgcctttaaagcaggccaaaaaaaacagggtctgcctcacagtcctagatgctactgggacagaattggtcactgcatgtgcaaatccttctggctcttccatggtctcttgtgggctaattatggaatcatagcagggccaagctgaagaaggggagtgacttggatgcctctcccatccccacttattccatcaaraaactatatcccaaagcaccagaaagag

SEQ ID NO: 908602 - DNA, 610 bp, Homo sapiens
gcatatatgtggccaacaaacataagaaaaaagctcaacatcactaatcattagagaaatgtaaatgaaagcgccaatgagataccatctcacatcagtcagaatggctactattaagaagttaagaaataacagatgctggtgaggttgtggagaaataggaacacttttataccattggtggaaatgtaagtaaattagtttgaccattgtggaagacagtgtggtgattcctcaaagatttattaccagaaatatcatttgacccagcaatcccattactgggtatatatccaaaggaatataaatcattctgttataaagatatacacacatgtgtgttcattgcagcacaattcacaatggcaaagacatggaatcaacccaaatgcccattaacaatagactggatttaaaaatatggcacatgtacactatggaatactatgcagccataaaaagaaatgagatcatgtcctttgcaggtacatggattaagctggaagccattatcctcagcmtcctaacacagggttagaaaaccaaacaccacatgttctcatgtataagtgggagctaaacaatgagaacaactggacacagaaagggg

SEQ ID NO: 908603 - DNA, 601 bp, Homo sapiens
tttgtttacccatctttaattcagcgttaaayatctacctgaccctacacaaagttttaatagccctttcctctatcatttgtatccagatcccaggagacttattggcattcagttttaagcgtccacactaggtgaaaatgcactacattttaaatttatgttaaaattctctgtagcccatacattgggaacttctctgatccaaagtaagtttttactgtcaagttctgggtctctaagaccagagatcttagaagatttaaacacacaaatgcatccaagaaagagcaggagaaaagccagcaatacagagaggacttcctcagcctggtggttgtgatgccccgtcttgagagtaaacttcccccaataatctgggcagtcttttatttttctggcctccatcactgacctgttgcctcatggcagtgcatttctgagacacgatcaagacattccattgagttatactacatccaaatatcagacgctgcctttgaacccttctgacaaaccacaaacttaggaaccaacgttgacacaacactcagcggattcaaaacactgagcaggggaaaggagagggtgtgggaaaagg

SEQ ID NO: 908604 - DNA, 562 bp, Homo sapiens
taaggcagttatgatcatctccctcttagagaagcctagraaaggttactgcagtgcttgacagcaaatagaaactcaccaagtgcatttgttgagggattgacagaatggctggataagtgactcaactaagaccacttatctagtgagtgcgtctactcagctgcttgttttgaagacaaggaaattcgggctcagaaaatttaggaaacttgtctaggctgccaatagctagtaacaaaggcaagaattgcatatctgattttctttacaccatgttacatctaactgttcaaaagataaccatgtattatactcgaaaatgcaaaacagggttgttttttgttttgtttgttgtggtggtggtgatggtatttttgttttgtttttgctacttttcctgagagtggaagttgttatcaaaaagttactgtcatgactactatgtgtatagatgctattagtttcatcaaggttgggaatagggtatatgttgcccaactttctgcccctctccgcctcatattaaagttccagtttcctagaatatatctcctgggag

SEQ ID NO: 908605 - DNA, 605 bp, Homo sapiens
gcacaatttacaagaaaaaaaatcaacctgattaaaacatgggcaaatgacatgaacagacacttttcaaaagaaggcatacatgcagccaacaatcatataaaagaaagctcagcatcactgatcattagagaagtgaaaatcaaaacacaatgagataccatctcacaccaatcaaaatggcaattattaaaaagtcaaaaaataacaaatgctggttaagttgcagagaaaaaggaacagttatacagtgttggtggagtgtaaattagttcaaccattgtggaagacagtgtggtaattcctaaaagacctaaaaatagaaataccttcaacccagcaatctaattacagggtatatgcccgaaggaatataaattattctgttataaagacacatgcacacatatgttcattgaagcactattcacaatagcaaagaaatggaaaatcaacctaattgtccatcagtggtgaattggataaagtaaatgtggtatatatggaccatggaatcatgtcctttgcagaaacatggatraggctggaggcaattatccttagcaaactaatgcaagaacagaaaaccaaatactgcatgtttt

SEQ ID NO: 908606 - DNA, 629 bp, Homo sapiens
gttttgataaatgttgccaaatttttcttcatagaggtcatactaattcacgcttccctcagcaatgaagagctctttmttccccataacctcaccaaagcagtatgttgttaaactactttctcctgtaaatctctctggcaccatcttacactccagagagtggggcagaaggtttacacaaaattgtagataacaaaaagaaaaaatactccaggtgaaaaaattaattttaatttaatatgatcaatttaaatactagatacagaagaggagctataaatcactcttttcaatgattatcactatattgtctcatttattttctgcttaatattacatttatttgccccaaatgcctcatttatttacgcttcaaagagtggcaatgaaagaggcgatgagggagaattgtgggggttttttaaagtatctttttcttttctgatgagtgctctatgctcaaagagacataaacaaatttattagtcctcaggggaaaacatgtagcagttcctctcctttcctatttccccaaggagttggtcacaaaaaattcatttctctagctcggagctgaaatatctggctggtggtgttggtggtcccatgagagctgttgcaagaca

SEQ ID NO: 908607 - DNA, 698 bp, Homo sapiens
ttgatgcagccaatattaatttgagctaatggattgttaattctgaaacgaaaactgtaactgtagagcaggcttttactatgagaggtactactttttataatagagaatgtggttgtgtgggctttttttgaacagaaaacacaacaatgacctataccgtgagaaaagccattttatcttcttcgtggtatttttacccccaaaggaactgaagatggaaaatatgactaataagttattgcagttttggtcttgaattctgtgccatctgaagttagcatccagcttcttaaaaagcagccacgcctacagcctgttttttgggaaggctgtaggtggagagatgggcttattttgcataccaccctcagggcccagagacccactgcattttccaaagttaagcaaatgacaccattttcttccatcagctaaactttacagataatagtgtttccacctcatatccttttctttgccccttctcaaatgagtcagaatagtcatgttccccttgagggatgtctgacttgaatggagaattgttctttcctctcttgaatcagctcactagctccctgatggtctgggttcaaggaaatggttaatgaggtagaggccacttatacaagtccttgggattgtaccattgctgtccacaaacttartatcaacaacacatgctgtgccctgtg

SEQ ID NO: 908608 - DNA, 478 bp, Homo sapiens
ggatgtccttccctgaagagccggtcctacaagacagaagtgatgacttttctttagctcatggcaggtgtgatgggaagaagaaatgtctgctgggcccactctgtgccaggccctggatctcaagttcagaaggccagggttcaaattctcaccttgacgtttcctggctgtgtgaccctagacaagtcacctagtttccgtgagtctcagttttcacatctttaaattggggataacattagtagcttcacctcctagggttggtgtaaggatcaaacagataattattcagaagccctttgtaagtggcaccatgagaaggaaaatttggttatctcattcggtgtgatccaacagtaatatcaggggatctatccyacccaggagtctcatccaggggaatcccaaagtcctgcccaactggagaagcaggttactcacctgacttgtgtctggcatcaggaagaggctgatg

SEQ ID NO: 908609 - DNA, 617 bp, Homo sapiens
gtgtgattctgaacccaggagaatttacttgcattggaattattgcatcatggaatgaaaccaaaaagttcattatttacacttcacasatttactttttttaagatctggctcaaaggcactgagaattatgttgtagattagaggcatccagttaattaaatcacaaggactttgtagcaagtagtaaaaataattctttccccacaaattgagctgagggggccattctcttctttctgaggccaaacattcagcataaccactgttttaccacgagctctctgctgtgaaaggtttaagcacactgttggcattcaaatttttaatagctaatgcaaggtcacctaatactttgtcagtgtttgtctgttaccaattgttcctaattgactaaaacagctagagttattcactgactcttaagtatggggcggtaagttttaaaagaatatttagagaatcatttacaactatactcattctcatccttttcgtgcccaacttcacaggagttgtctgtctgcaaggttagtcccctatctgttccctgaatgtatacatcaaaattaaatttaccatctgcttatctctcaaaatgctgcttctgaattttc

SEQ ID NO: 908610 - DNA, 626 bp, Homo sapiens
tcctgaggattccatgccctcaccctcccacaggtactagagtgacctgctaaattgactggmagccctggcgaaactcaccgggaggttaccaggtcaagtaaattgacagcaacgttttgcagcagaagtacaagaagctgacctaaataactaaatgaaggacaggaaaatatgtaacacagaataagatttacaaaggaatatggagtttcaggaggggaatgatgttatgtcccctccctgaagaccacaactgcctggctacaaaccctaagtccacaactgactagcttttaacttcaggcaagttgcttaccctctcactacctctgcttcttcactggcaaagtggaaataataaaataaagcacctaattcaggacactgtgaggattaaatgaagaaatgcatgtaaagcatttagaacagtgtctggcacatagcaagcactcagtctgggcttattattaaatttcctgacaaaatgtttttattcttgctataaatgagggctcctctggccgggcacggtggctcatgcctgtaatcccagcattttgggaggccgaggcaggtggatcatctgacgtcaggagtttgagactagcctagccaacatggtg

SEQ ID NO: 908611 - DNA, 620 bp, Homo sapiens
ttgggcccctttcagacttcactttatgcaacttttcctttgcctggttctaatttatacctttttgcaataataaaattgtaattatggttatagcgagtatagcactttcctgggttctgtaagtcattctagtgaattactaaatctgaggatggtcatgggaaccctcaaatttgcagccagctgatgcgatgttcttgaggctatttacacatattttttctgtatgctggattttttatatattatgacatagtatggtaatgagcatttcttctcaactccactttcagtgattcatgttggtaccttgaaatcaaccatgcggaaagtatatcacagaaatcagcaaatgctatgaatcagagcttaatttattattttcctataacaaaactattaatactacagattaaacataaaattttattgtattgatagtcattacattgcaaatagtacaaaaagttgaggaaatattctgtcagtttttaaaaattattatccarttcagcaaagaagttactgacatcattgacaaaagagtaaatttccaatatatgtcctcactgtttcagttttttatcagtcattattataaatgaaaagatcaacca

SEQ ID NO: 908612 - DNA, 460 bp, Homo sapiens
tcgttcccaccgttagatatgacatgcagagaagggcaattacagggctcttcaaagatgcaagtgctgccctcacgaatctgttttgcaaggcattggtcgagggtttatcttctgtatcctcccagctgggatgagtaggtctaaagtgactaatccactccaccatcccaatctgcctaagcctttggatcctttcctttacattaaaccaagggagatcaggcattcccaattcactcacagtaggtcatctttcaatccatatttcagctaaccaagcaaataaactattagaaccttttttaactgcctgagctggaacattaaatgcagagtccytacttagtgggcccaaattaatacattcagcctgatccaactctatgttccttccaccattatcccacacccttactatccattcccatgcccgttctccagatttctgtttatataa

SEQ ID NO: 908613 - DNA, 575 bp, Homo sapiens
tgaattctaaatcaacattttccaaaacatcatttccaaattgacttcaaagttgaattggccattggctgttgtttygttttgttttgttttcttgtgaatgtagaattttaaatgctaaacatcacgtgccagttttcttctttgaggccaaaaaaagcaaatcactaaaattttcacaacaataatgtcaatcttctatgtcaggagtagggacactacggtctgtgagccaaatcaagatcgtcaagatcacagcctacttctgttttgataatctgtgatgcagcaatattttttacatttttatagggttttttagaaaaaaaaaagaaaagagaatatgtaatggagaccttatggcccacagagccttaaatactcactatctgactcccttagaaaagtctggtagacacctgctgtcctatgaaagtatttatacacacaagcatactaagtgttcctcttgtaactctaatttccagctcttacatttttgccttgggcttgcaatctcttagctctctcttgttttctagccctcccttttgagttcttataaataatcacat

SEQ ID NO: 908614 - DNA, 565 bp, Homo sapiens; identical to SEQ ID NO: 906688

SEQ ID NO: 908615 - DNA, 655 bp, Homo sapiens; identical to SEQ ID NO: 906689

SEQ ID NO: 908616 - DNA, 621 bp, Homo sapiens; identical to SEQ ID NO: 906690

SEQ ID NO: 908617 - DNA, 648 bp, Homo sapiens
ggagttggttattaagtcaataaaaatgttttaggggggaaaatattaagaaacttaaactccttataaatgttctgataaaatttaaaacgtggccttttttttaatgacagtaccttgaaagctgtttcttttccaacattaaatgtgagctgactaatatgagcttcctagcatgctctgcccaagttatccagcacaagagtgtttaggttaataaaggtcattttactacaaattaccctctgtagttgtagttgaatctttttatttttgagaagaaattatagtgaaaatatcattattatatttgtggtaagtataaaatttggtcttttttttcctgctgtactaactgttcataggtctgtagtgaacaaaataatatttactaaaacacaaattaatatttagaacagaaacaacttagactcactctggactcccataaaaattgattacttagacatttaaatatatttacttaatactgtaatattatatacatttcctaaagcaaattttaagacataatatttggaaaatctagtagaggttgtcaaagctacwtctgttggccaatagcagttgcttttataaaatcgtattatttcctgctcaaacacttcattaactacattatggccc

SEQ ID NO: 908618 - DNA, 663 bp, Homo sapiens
gctattaggacaactgtgctgactcccctagattttgtttttaatcattgtcagattttggtaattggacaattgttagtaacatattctttttgaagtcctttataactgcttacaactttcgtttgaaagctctgctttatttagagatgcagaatctattgagagaacatatctgtaaatactcgactctgagcagtgtgacatatgcagtgatagaaatattttatgtaaaaattggtttcttgattaggagatggttattaatatcagattattccctgcatccttttaagaaatttcaatttatcgagaaaatgaaagaatagcataatgtgtaatcttcacctagattcaccaattgttaacaatcaccacaaacatatgcataatatgtgtatatacacacacatatctatattttattttgatgacccagttgggataaattgcagacatcattataattcatccctaaatatgtcagtttatatctcctaagaataagagcattttcctacatttccacattactgctaacatactcaggaaatttcacattgataccattattttttaawagttgatatccaaatgttctaaattatcctaataatctccctcttcccttttctgttttttgaatctaggagccaatgcttt

SEQ ID NO: 908619 - DNA, 588 bp, Homo sapiens
aacctttcctaagactcagtggacagcaatcagttaatgtgccaagaagcataagctaaatccagattgcaacatactactcattctgaatctgtaagggaatgcctctgtgagtcactgttgtgggaatgtcctgggatggcatagttaatactttctaatgggatttaaaaagtcagtacatttctctttttgaatttgtttcttaatgatctgatgcacttttggataagatacagcttgctttatagaacagaaaaaacattgtcatttatacatgatttagctttatgatcatgatttaaagccaccagctttgtgggaggaagatagtgagaatggccatgacagctttaactacacccttgaagacctccttgcttactagagggcactgtgctgtcctcagatgccctgaggcaggtcagattgggataataattacattaactcccaaactaccctrtgctggactttttttttaagttatagctctatggagatataattgaaatatagtaaatgggaaatatttaagatatataatttgatatgctttgacatattcacagtaggcccctctcacct

SEQ ID NO: 908620 - DNA, 588 bp, Homo sapiens
aacctttcctaagactcagtggacagcaatcagttaatgtgccaagaagcataagctaaatccagattgcaacatactactcattctgaatctgtaagggaatgcctctgtgagtcactgttgtgggaatgtcctgggatggcatagttaatactttctaatgggatttaaaaagtcagtacatttctctttttgaatttgtttcttaatgatctgatgcacttttggataagatacagcttgctttatagaacagaaaaaacattgtcatttatacatgatttagctttatgatcatgatttaaagccaccagctttgtgggaggaagatagtgagaatggccatgacagctttaactacacccttgaagacctccttgcttactagagggcactgtgctgtcctcagatgccctgaggcaggtcagattgggataataattacattaactcccaaactaccctgtgctggactttttttttaagttayagctctatggagatataattgaaatatagtaaatgggaaatatttaagatatataatttgatatgctttgacatattcacagtaggcccctctcacct

SEQ ID NO: 908621 - DNA, 627 bp, Homo sapiens
tcctcaggtgtattagtccgttcttgtgtctctataaaggaatccctgaggctgggtcattctgcggactgtacaggaagcacagcgccggcatctgcttctgctgaggyaccaggaagcttctgatcatggcagaaggcaaggagcaggcacgtcacatggcaagagcaggagcaagagagacacttgaggttccagaatctttccaacaacactcctcactcgggatggctctgggccattcgtgagggatccgccctcataatccaacacctcccaccaggccccacctccacctttgggaaacatttttcaacctgagatttggagggagcagacatccaaaccatatcgccaagtatttgttgaatgaataaatgaacgttgataccatcattgggtgtattttagctgcagattctaaacgccagggttctggggtggctggagtgtgaaaaggtcggtggtggcagttaggaatgccgtgtgcatgcccttgtgcctgtgtgcccatgtgtgtgtctgtgcgtgtgtccgtgtgcctgtgtgtctgtgcacatctgcgtgtgtctgtgtccatgtgcgcgtgtgtgtgcatgtgcgtatgtgtgtctgtgtacgtgtgcg

SEQ ID NO: 908622 - DNA, 611 bp, Homo sapiens
gagtacaaaaagaatgttgtgctcactctgcctcttgctcactctccactttgtgaattgtcatgatctgcttgaaccccttcacacctaacaagagcctgatcctgtgcctgrcatcccaaagcctccccccaaccaggtacatctggctcccgtgaacaataatggttccctcctccaacatggcaattgctttacaagggagttggcatcagagtatgtagttttcagactctttggtactgaagaaatcattctgccctttataaccaaaaaatgaccaagttacctatgtgtcaagacgggccttaaaaaaggaattttttgcaaaatatttattagtttggtagatggccatgttggttggcattctcatatgaggcgtatctggaaatatcccttcttctgtcaaactctgcacaatcaattcaatcactctgcctccctgttgggtcttggtttctcaaagataattttgataagtttgttgatgttgtatctgttttgccaatttgcaagggaaaaagataaactttaataaaaagtggaggacattaagagaataaaaaagatctttcaaaagaaagatagtcagacatagatatagattc

SEQ ID NO: 908623 - DNA, 639 bp, Homo sapiens
ctcccattctttccggcttaccttcccccatccgatgcttctgatccagttcatttggtccttggaaagctccttttctgaagtatttacctcgggtggggtactcaatgatttattctctgcattaatgcgtgttctcaaatatctctgtgtgtttcatgttgctataacagaatacccgaggctgggtaatttataaaaaggtttatttagctcacaattctacagacttggaaattcaagggcatgaccctggctcctggcgagggctttttgctgtgcacattatggtggagaaggtaaaaggggaagcagatacatgagaagaggcaaacctgaggggcattctgtctttatagcaatccactcttcaggaattaatccattcctataactaatccagtgtcactggagcaagaactcactcactacctagataatgcaccaagccattcatgagggatccacacccatgattcaaacgcctcccgctagcccgcacctcccaacatcaccactttgaaaaccaaatttcaacttgcattttggtgggcacaaaccatacscaaatcatagacctttctctcaccttaatagataaacaactgcctagtatagaattcctgggattttctctca

SEQ ID NO: 908624 - DNA, 503 bp, Homo sapiens
aggaggaagggcgtgagaaaacatttggagggggtggaggtgttcagtcttgactgtggtcacagttttatgagtgttatccagaagtcaaaacttattaaatcttgcagtttaaacatgtataacttttgcatatgaatcaaaggagttttatctatacctgcgaatatggaaagatttccaaaatatgttttatatagaaaaagagagaaggcttatagcagtatttatggtataccacattagttgtttggtttttttagagacatccatatgtagtctggtcatcgaatgaaatttctgaaaggattcacaagaaactgtcaatagcagttctctgtaggtaaagggaactgaggttttatgggggtatagaaggaaaataatcttgtttttcattttgcagagttctatactattcggaggttttacgtgatttacacattacttttatagaartgattctcgaaaaaagagatctggaaagtattgggcaaaaaaga

SEQ ID NO: 908625 - DNA, 672 bp, Homo sapiens
ttcactgaagaattgtgcaacagttgggccagtcccaacttgactattstttagcctgcaggctaaatcatgttagaagaattaaatatagtagaatttttgactcagaaaatgaagccttagcatgaactcctgtactggcgtaaggcgaaaaggtataatttgaccgttagaatggtcatcaagaatatgacaaggacattgcagctccatgctaagagttggccacactcacacttttcttatttcaccatttgaggaaagtctgtagattatctctttgctttttatctatgggcctttcaaaaacagctgcccttttttttcctggcaagaagcattcctgtaagtttttccctgtcacacttatggagctctaaagttacaactctctttcaaggggtagttctctatagtaaagaaggcttgaaaatggccagggagcccatgacacccacaatggtgaggcaagtctttcatttataaatgtgaatacaaaatttgccagacattttgaggaaaaccaagagcaaattttagtgagggacactaaaatgaatacaaaaatacagagaaaaaagaaacatattccttaaataatttgtaattaatacttccaaatagatttgaaaggttattgcatacaaaaaatggaactatcagaaaaagaga

SEQ ID NO: 908626 - DNA, 595 bp, Homo sapiens
gactgaagccaaggaagcatgctttaagattccatgttttttgagatgctgtctggtggctgagtagggaattccctggataagtactgcccagggtaggcaaaagaagctaggaggttactgaaataaggagtatgagaaatggtgtaggttttgctgatgttttgtaacacatctcatgacaatcttcatttccttcaccaatttcctgtttcattaattcccttccacgtgctcttctgaaatttgcctcatattctttgatttctcttttacatgttggtttcatcaccttttactttttgctttcctggaaacacaaatgattctgattgtgacatgtcagaattatttgcaacattcccctttctgctgaaacatgagttcactgaatacacaatttagtaaagtgtaggatgcacatgtcgttttcgtggtcacaaccagctctgtagcattttataactacactggcagtgtgctgggaggtgtagagagaaatatttatcwcatgtgtggctgacacaacctgccaagttattttaggagcctccttggaatcccagcaagaatgctaccggcacaatttgtaatc

SEQ ID NO: 908627 - DNA, 614 bp, Homo sapiens
gaacacagaaataaatatagtgcctgttccaaccatgtaactcaccaccaaaaccaatacgaaaggagtgtgagaaatgtcaacagagctgtgatttaccagtgaagatttctgtgatgcagttgtgggtaaattcaactatctaataattgtattctgttaccatgaacctgatgatactgatgtgaaaccaaactataatctcaaagtttagagctctgctgtccaatgtggtagccactattgacatgtggctatttaaaatcaaattttattcacttaaacttacatacaacttacaatttttcatcagtggcactagcacatgtgcagtgctcaatagctatatgtgtctagtgatttctagatgaaacactaaaacagtaggctatttcctttatcacagcaagttgtattgggatagatagagagatgatagctagataatcagtaagtagataaatagatgattgatggacagatgatagatagatagacagacagacagaagtagatgtagacatggacatatttaaatctstatgccaaagtcagcctactcctgctctctagaaccaatgattaaatattcaggaattttgtgacatgattgc

SEQ ID NO: 908628 - DNA, 609 bp, Homo sapiens
  misc_feature 355: n = A,T,C or G
ctcggagtagtttgatcatctgaagccttcttctctcaactcgttaaagtcattctccatccagctttgttccgttgctggtgagtagatgygttcctttggaggaagagcggtgctctactttttagagtttccagtttttctgctctgttttttccccatctttgtggttttatctacttttgtctttgatgatggtggcgtacagatggatttttggtgtggatgtcctttctgtttgttagttttccttctaacagacaggaccctcagctgcaggtctgttggagtttgctagaggtgcactccagatcctgtttgcctgggtatcagcagtggtggctgcagagcggcntggctgcagaacagccgtggctgtagaacagtggatattggtgatctgcaaatgctgctgcctgatcattcctctggaagttttgtctcagaggagtacccagccatgtgaggtgtcagtctgcccatactggggggtgcctcccagttaggctgcttgggggtcagggagccacttgaggaggctgtctgcccattctcagaactccagctgtgtgctgggagaaccactactctcttcaaagctgttagact

SEQ ID NO: 908629 - DNA, 632 bp, Homo sapiens
atgaacattgtaagtaatcttcaaaaaaattaataagttgtactttaccatactggaaaaaaaagaaaaactgctataagtttacaatgatcagggcattttgggattggcacagaaatatacaaatatatcagytgttgcgactaccacaagcaagatggcaatgcatattacacccaatacctgtcttagttcctgtattctacatctctgtttgtgattgtgatgctacacagagaggtgttttgtattagagagaggagttttgtggagaattcaacattaaatgactctgatttttttacaagttatgtgccaaatgataatttttcctcagatactgaaggggaactgaggctcaaggaacctcaacaactaggaagaagcagatgagggatttagagctgttgggtctgcctaactctgacaccaatattactctccatcaatcacattttcttcttttagtttttctttttcttttttattttaaactagatcaagaccaagtccccttctcctcacttttgaaaataacttcctatttaatatttaaatttattttcacataataggtacttttatattaatgtataaatacgattatcttttcctgtataacatacttccaa

SEQ ID NO: 908630 - DNA, 599 bp, Homo sapiens
cctttcaattctctggatctttattttgactttggttttgaggttaacaatrttcaatcaagttttatcccatttttaacgaatttttttctgaaatggtaaaaaatgatggaaaacaggtaatgtatgtcagtacactcagaaccttatgtgtagacttgggctaaatgatggccccttactctgaaaacaaaaaggcaattggttctctctactgatataacatatttgtaggaggcagtctaaccactggagagaatacgagtgtttatagagccacagcagttggaacttactgctttgtagataagagcctgtgggacttggagggatttaatcaacattccaactataaacattctctgtgccaattccaggttatatttaagtttcaggttcatttcccaagaagcaagaggttcagcacttgtaccaggatgtttcgatgtttcttttttaacctggaatcccagttgtttatcgtttctagaaatcaatggcattgttttggaaatgggaatggaaaattctccagagtcctgataaggtcgggtcaggctctccctgaaggttgtttgagagcccaagtttgaatcagt

SEQ ID NO: 908631 - DNA, 493 bp, Homo sapiens
tcaatttccctcctttgaatcttagacaggtagagaaattatctcattttaaagtcctaagtattcccatactcagttttagacatttcttgcttttcttactgagataaagtatgttwttttgaaaatccagtcttcagaaatctcattcactttgtcattggttcattcattcttgtagtcattcattcattcaggtacccaccaagccctgtgggagaccctgtgttgggctaaagggccatgtcaataggcatcactcagaaaaccgtgggaatcgtggtcaggatggaagttctagagtcaaacctaccctgaatcctggctctgcttcccatgtgctctgtgattctgggcaagttatttaacctctcaaagcctccaattcctcatctctacaatggggtaataagcatagccacttaactagatttctgtgaggattacctgagataatatatggatgagcctgcactgtgcctggcatacagta

SEQ ID NO: 908632 - DNA, 517 bp, Homo sapiens
tctatttttgtgcggcagataattatttagagaaagaaaacaaaactatgagaaaagcagcaatttttgataaagtctaaaatttctaagtttgtctatggttctatacctctatttacagtttgaatgaatgtaaataatgacttaaaacaatgcttttgaaaatctttcaagaaacaaaacaagttataaacatttagctagccttacattttttaagtatacacattctcagttaaaagtggtttctgggtcaggtgcggtggctcacgcctgtaatctcagcactttgggaggccaaggcaggcagatcacgaggtcaggagttcaagaccagtcttccaacatgcagaaaccccgtctttactaaaaatacaaaaattagccaggtgttgtggcacatgcttgtaatcccagctactcaggaggctgaggcaggagaatcgcttgaattcgggaggctgaggttgcagtgagcygagagcatgccattgcactccagcccagtgacagagtg

SEQ ID NO: 908633 - DNA, 644 bp, Homo sapiens
gtgaatggagtgattataacctaagatcaatcttcatccagaaagcatacccaagggttgctaatggaatttcaactagaacaggggttttatgttttgccrtgttgactccaactctctctagagtggcaaagaaacagaaaataccaggtctgcccagacctacaagaattgaatagttacaagttagcagagcacattccaaatcacacaaaaaggcttactctaaatgcaccatgactactatctgggttggttgcattttccaaatcagttgtgtggggttgggaaccttaaactatctagtttaaatttagatcaagctcctatatcaaattcccacactcctcccttgattctaacctcccagaataacattctctctaatcctttgctctccttcctgcttatctgctttcatttgttcttatagcctaatccactttataagatctgttcaggctcccatcagggctaatgctttagtctcctcctggctctctgcgatctcctgtttttagctccaacagctgggatctcgaagccctcacttgtaggctcagccctatgtttatatttgggaacaactctttggcagggctgggagaatttaaagagtcttaggccagtatctagacaactca

SEQ ID NO: 908634 - DNA, 601 bp, Homo sapiens
aattctttgtgatgtgtgcattcmaaccacagacttgaactgatcttttgatagagcagtttttaaagtgtctttctgtagaatctgcaagtggttacttggagacctttgtggaagatggtggaaaaggaaatatcttcccgtaaaaactacacagatgcattctgagaaacttctttgtgatgtgtgcattcatctcacagagttcaacctatctttttgtagagcagttttgaaactctcttttcctagaatctgtaagttgatatttggagccctttgcggcctattgtggaaaaggaaataacttcacatgaaaactacacagaagctgagaaacttctttgtgatgtgtgcattaatttcccagagtcgaacctttcttttgattgagcagttttgaaacactctttttgtagaatctgcaagtggacatttgaagcactttgaggcctattgttgaaaaggaaacatcttcatataaaaacaacaaggaagcattctgagaaaccattttgtgctgtgtgcattcacctcacagagttcaactttatttgatacagcagttttgaaacactcttcttgtagaatctgcaagtgg

SEQ ID NO: 908635 - DNA, 601 bp, Homo sapiens
aattctttgtgatgtgtgcattccaaccacagacttgaactgatcttttgatagagcagtttttaaagtgtctttctgtagaatctgcaagtggttacttggagacctttgtggaagatggtggaaaaggaaatrtcttcccgtaaaaactacacagatgcattctgagaaacttctttgtgatgtgtgcattcatctcacagagttcaacctatctttttgtagagcagttttgaaactctcttttcctagaatctgtaagttgatatttggagccctttgcggcctattgtggaaaaggaaataacttcacatgaaaactacacagaagctgagaaacttctttgtgatgtgtgcattaatttcccagagtcgaacctttcttttgattgagcagttttgaaacactctttttgtagaatctgcaagtggacatttgaagcactttgaggcctattgttgaaaaggaaacatcttcatataaaaacaacaaggaagcattctgagaaaccattttgtgctgtgtgcattcacctcacagagttcaactttatttgatacagcagttttgaaacactcttcttgtagaatctgcaagtgg

SEQ ID NO: 908636 - DNA, 591 bp, Homo sapiens
tcagaatgcttctgtgtagtttttatgtgaagatatttccttttccacaataagmcccaaaaggctccaaatattcacttgcagattctaaaaaaacagtgtttcaaaactgctcaatcaaaagaaaggttcaactctgtgagaagaatgctcacatcactgagaagtttctcagaatgcttctgtgtagtttttatatgaagatatttcctttcccaccgtaggccacaaaaggctccaaatatccacttgcagatactatgaaaagagagtttcaaaactgctcattcaaaagataggttcaactctgtggtttgaatgcacacagcacaaagaagtttcacagaatgtgtctgtgtagtttttatgtgcggatgtttccttttccaccatatgcctaaatatttcccaatttccacttgcagattctacaagaagagtgtttcaaaactgctgtatcaaataaagttgaactctgtgaggtgaatgcacacagcacaaaatggtttctcagaatgcttccttgttgtttttatatgaagatgtttccttttcaacaataggcctcaaagtgcttcaaatgtccacttg

SEQ ID NO: 908637 - DNA, 690 bp, Homo sapiens
ctaccgaaagagtgcttccaaactgctcaatcaaaagagacattcaaatctgtgaggtgaatgcagacatcgtaaagaagtttctcagaatgcttctgtgtattttttgtgtgaagttattcgtttttgcaccataggcctccaagcgttctaaatatccacttctagattctacaaaaagagagtttcaaaactactcaaacaaaaggttcaattctgtgagttgaaagcaaacatcacaaagaagtttctcagaatgcgtctgtgtagttttgatgtgaagatatttccttttcacagtagaatgcaaagggctccaaatatccacttggagattctacaaaaagagtttcaaaaccgctctgtcaaatgataggttgaactcccggaggtgaatacacacatcacaaagaggtttctcagcatgcttctgtgtagtttttatgtaaacatatttccgtttctatcataggcctcaaagtgctccaaatattcacttgtacattctaccaaacgagtatttcaaaactgctcaatcaaatggaaggttcaaaacygtgacatgaatgcccacatcacaaagtagtttctcagaatgcttctgtgtagtttttatgtgaagatatttccttttccacaacagcgtgcaaaacgcttcaaatatgcccttagagattccacaaaaagagt

SEQ ID NO: 908638 - DNA, 703 bp, Homo sapiens
tttaacaactctccaaagttttggagcatagactacctacccaatatctattctcatctactttgtttctaaractccccattttattccaggtggcaatgtgcaaaactaaaacatttcccaaccttcctcacagagagaaatggtcattgtaatgtaagcgagagttgttgaggttgaaaggaagtcctaggaaaattcttcaaggaggctgactcacctaagagtatgcccttttcccccatcccttcttccttctaattcctgtctagaattcagacatggtggttggtgctgtggcagccgtcttggattatgaggtgtacttgaagttgaaagccatgtgtcaaggacggtaaaacagaaaacaagaaagatcctggagtctccaaatgactgtggagctgtcgtagcagcttggaacaatctgtcaattttttttttacatgagaagataataaacctctgtcttgtttaagctaatgcagtatatcttatactgatatgtatgattattctgtttttcgagtggagaaattgtggctcaacacagttaagcaacttgcgcaaacccatttctttagtaaaagaagaggttgcagtcacattcctgagagagagcactgtctttccacattcccaattcttcttcggtttgcaaagatccgtaaacattaagaatcaggtgacgttcttcttctgc

SEQ ID NO: 908639 - DNA, 649 bp, Homo sapiens
aacctgtcctaaggctactggccacgcaagagggttgggaaaagaggcattaagtgaccccagggaccccggctttgtccrtagcatggacattgtttgaaggctgaataagaaatacatatgtctttcctgcttaaagaaatcagagatgacacaaacaaatggaaaaacattccatgctcatggacaggaagaattgatatcatttaaatagccatactacccaaagcaatttatagattcaatgctattcatattaaactaccattgccattcttcatggaactagaaaaaaaactattttaaaattcatggggaacaaaaacaaataaataaaataaaaataaaaagcaagcccaaatagccatggcaattctaagcaaaaagaataaaactagaggcatcacactacccaatttcatactatactacagggctacagtaaccaaaacaggatggtactggtacaaaagcagacacatagaccaatggaacagaatagagagcgcagaaatgaggccacacacctacctacaactatctgatgtttgacaaacctgacaaaaaaagcaatggggaaaggatattcaataaatggtgctggggtaactggctacccatatgcagaagattgaaactggaccccttt

SEQ ID NO: 908640 - DNA, 680 bp, Homo sapiens
cgcggcgcgtagggcgacggggagcggccgggacgcctggcacccgcacccgggcgtcggcctcccgcctctgtctgtcctttctgctccattacggcgggttctggctcagaatttccagccaggctcycgcggagacagcagaagaattcattggtatcacggtgtgcgttttcagttattttccaaaaattcgtctgctgctgagtgcatagtagaggacgagcaaggcaaggggaataagttgggaaattattattgcattgtcagggactgtattccacctgcatgcgttccagttcctccgacctggaaactgttactgaggtaatgaggaaaaaacatccttaaagaaaaatgtctggaccttactggtttacgttgctgattatctacaggattgtatattgcattttattaataataatccgtaatccatgcggaatcccaggagccacctaggtatgccactggcttgagatttaggattaagattcttttgcaaaagaaataacctagtaaagggaagatgactacagaaaaaagatgccagttatggcagttggtcattttaattttaaaattagtggtcagtgtagttcataaaggttttattcaattcaattgagcacagtctaatttaatcctaaggttgtagagaaaggagatgaggctgcttt

SEQ ID NO: 908641 - DNA, 619 bp, Homo sapiens
tacctatactgaagctcttagtataaagtacttattttttccttaccatargtttgttaattttttaaaacttttatgttaacatttgttatttctgatcataaatgtaatgcaaaaaacgttcctgaaaactgaagtataaagtatttgttcccttaaaggtcagggacaagataaaaatatgtgctatcattgcaattgttcaaagagtcctggctgatataaccagataagaaaagaacgttaataatctgaagatacatgattatctacaatggaacaattattagaaatcatagtttcagaaaggttgccagatataaagctaatattcaaaaaataaattactggtcccttttcaaagacaagtcaaaaacttaagagaaaataagatcatttcctttagcaacaaaactgtaatgtgtctgtaaattaatctatcaagacctttatagagaaatttataaaacatgatggacataatagaaaatataaatatatggaaaattacaccacaatcaacattatgacttagtattataaaggtttcaaaactatcctaattagtcaataatttgaaaatgacttcaacaaaattaacaatatatttataatatta

SEQ ID NO: 908642 - DNA, 613 bp, Homo sapiens
aggttattcactaccatgaggacagtatggaggaaaccactgacataattcaattatctccacctggctccacatttgacacatggggattattacaactcaaggtgagatttgggtggggacacagccaaaccatatcattttgctcctggcccctctcaaatccaatgtctttacatttcaaaaccaattatgccttcccaacagtacctcaaagtcttaactcatttcagcatttactcaaatgtcaacagtgcaaagtcttatcttagtcaaggcaagtttcttctgcctatgaacttgtaaaatcacaagtgagttacttcctgtatacaatggggctacaggcattgggtaaacacactcattcaaaatgggagaaattggccaaaatgaaggggctatgggcctcatgcaagtctgaaatccaatagggcagtcattaaaccttaaagttccaaaatgatctactttgacttcatgtctcacgttcaggtcacactgatgcaagtggtgggctcccatggccttggsgagctctaccattgtagttttgcaggctacagctccctcttagctactttcacaggctggcgttgagtgtctgcagctt

SEQ ID NO: 908643 - DNA, 613 bp, Homo sapiens
aggttattcactaccatgaggacagtatggaggaaaccactgacataattcaattatctccacctggctccacatttgacacatggggattattacaactcaaggtgagatttgggtggggacacagccaaaccatatcattttgctcctggcccctctcaaatccaatgtctttacatttcaaaaccaattatgccttcccaacagtacctcaaagtcttaactcatttcagcatttactcaaatgtcaacagtgcaaagtcttatcttagtcaaggcaagtttcttctgcctatgaacttgtaaaatcacaagtgagttacttcctgtatacaatggggctacaggcattgggtaaacacactcattcaaaatgggagaaattggccaaaatgaaggggctatgggcctcatgcaagtctgaaatccaatagggcagtcattaaaccttaaagttccaaaatgatctactttgacttcatgtctcacgttcaggtcacactgatgcaagtggtgggctcccatggccttggcsagctctaccattgtagttttgcaggctacagctccctcttagctactttcacaggctggcgttgagtgtctgcagctt

SEQ ID NO: 908644 - DNA, 659 bp, Homo sapiens; identical to SEQ ID NO: 908272

SEQ ID NO: 908645 - DNA, 623 bp, Homo sapiens
gtgtgtaacatttttaaaatgttacttggttaacacattctctgaacagttttatagtctgctaatttatttctgtgtaactatttaaaagttaataacaaatgttgcagtgtataaaattagccacttttcagaatcataattgttgctgaattttacccaagcaatgataagtataaatttatacttcaaataacatatagaatcacagaatttcagccacttaaatgtaagaactccattataagtgatatccagaagcttacttacatttgaaagttaatattaataataattctgaatggcattccttgattacatgactgatattcttacggtgactagatgtgatgtcaagttatgatattatacctttttatgcacaagtctaggcaggacagttacaatgttaaaggaggcatttagtgattaagcattaaaagatacaatcaaagtgaaatggcagattgggacagaatattatggctgcagtcaaacttcaataaacacccaagtcaaaatgagatacagtttttaatatatatttgtcatttatcttttgcattttatgtatttcttgctcatttcttctargtctctctctggtagggctgctcatttta

SEQ ID NO: 908646 - DNA, 631 bp, Homo sapiens
ttttttttttaattttaacttaatttaatttttagaggtggggttctgtgttgcccagactagactcaaactccctcctgggcccaactgagtcttttgcctcagtctcccaagaagttgggactataggcacatggaaattaaattttaaagtaatagttacaatagcatcaggaaaaacaaaatatgtaggtacaaagttaacaaaaatagatacaggatttgcatgttacctacgaatgctgaataagaaatcaagaatgtcttagtaaatgaataaatatattgagttcatgaattggaatattcactatttttataatgttcaatattctcctaatctatagaatgatgcaaacccaatctaatttgctgtatatatttttgttgtattgactagcttatgctaattgtatatagaaagggacagcatagataattaccaaaacaaatggaacaaagtcaaacaaatttggaggatttactaaaatctgttgtattgggaaaggcagtacctatcccaggtttagatttagtgagaaagtatctttctctgtttcagactcaatgagtacrtctttacgtctttgttctgcttaagcactgtgtttcaatggcgctcaggcatgcc

SEQ ID NO: 908647 - DNA, 627 bp, Homo sapiens
atgggatatgaaaataattccacaaagtcttcaggattgcacgtaaatctcaagcttatttgtggctgacatttacagcattttatagttctaaaagcctcaaattaaaagtggtccgtgacaagaggtgccctttggtgcctggaagtagcaaacacaaaggctgtaaacccaaaaatgcccacaaataattttatgtggacactaagtatttcataatcaaaaatgagcccagaaggaaacaagacacactaggggagaatcatccaaaagctgaataaaaaccagcagaaacaaattcacacaaatttcagaaatttgttataattttgcaattatcaaatatgaagtattttaaacatatatttaaaatgtttaagaaaataaaagaaaagaaagccttataataactgcaggaaaaaactgaatttaacttctggaattaaaatatagaatagtccaaagtaaaactttaatgtgcagttttaataatatattagacacaattgaaaatagaactgaaaatcatttttaaaaaattattcagaaggcctcacaaagattaaggaagtggcrgaaaatgtgaaagagtgggtaagagagacagaaaaaaggaagcgaaggtat

SEQ ID NO: 908648 - DNA, 605 bp, Homo sapiens
tattagagaattaaaatgagatatgcatgtaaggatatataatcatgtgttgcttaatgatggggatactttctaagaaatgcatcatcaggcgattttgtccttgtgtgaacatcatagagtgtacttatacaaacccagatggtatagcctaatacacaactaggctatatgttatatagcctattgctcctaggttacaaacttgtatagcatgttattgtactgaatgctgtaggaaactgtaacacaatggtaagtatttgtttatctaaacatatgcaaacatagaaaagatacgacaaaaatatggtattacaatcttatggtaccagcattggtgtatatgtggtgtattgttagctcacatgtcattatgcagcacatgactatactatacttctgacccattcacattctgattaatgaagaggtgctattgttttataataatgctatccatattttgtcctagtgctaagttaacattctccatcagtgcagggtttggattatattcatcttttattctataaacatgaaactcaatgttatacatagaaattgctcaataaatattwaataaatgaataaatgaatactat

SEQ ID NO: 908649 - DNA, 571 bp, Homo sapiens
tgagaaatcaaaaagctagtcatgtcctttatctattggagaagagcagtagttaatcaatatgagctaggagctacaggatcaaggcttaccgataaaataatggtacccctggtagttgagttaagaataaaccatggggtagtaaaagataaggaagacatattcagataattataattataaatgacttttagcctcagcaaaattaattgagaatctcttgatacatggttaagactgagccctaaatgacattgactgtgagatatgactttctggtacaaactctgagagaatttccctgaagtgaatcaaagctagatctattccaatcacaatgcatgagatggatcaaaaatgtgtccagtgattgatcagatgcttgaccacagggttgctgagtataaattttagaaattgaaaagaagtttttacaagaaattgggctttaaactacatsatctagggaggaaaaaggaagggcacagagaatagatggcctcagtgggaggcaatagattagtctctgacttagtctttaaattcctgcatgatggcctatcatcaa

SEQ ID NO: 908650 - DNA, 676 bp, Homo sapiens
gagtacttgggtcattgctatttatattttgtccagagtttcaaattgtgatcagtggaaacgacatgccgtagcatgcatacgccatcctggccagcatcacagatggtcagtatatctttctgttgttgttttgagacagggtctcactctgttgcccaggctggagcacagtgacatgatcagggatcactgcattctcaacctgctaggctcaagtgatcctcccacctcagcctcccgaatagctggtctataggtgtgctgccatgcccagctaatttttgtattttttataaagatgggattttgccttgttgcccaggctggtctcaaactcctgagctcaggctatcctctcacccggacctcccaaaatactaggattataggcatgaccaccacacctggccagtacatcttaaaaataatttctgatccacgttgaataatgatggcctgtaaatattttttcttgcactagccttgttgggttttgatatcaaggttatttttattttaaccttgtaaaatgaactggggagtcttctttttttattctctgtttgtgttagtggcagagtttttttttgtttggttggttggtttctcttgtatgtttcctggaactttttggtgaaggcacttgggcctggraatttctttatgggaagtt

SEQ ID NO: 908651 - DNA, 635 bp, Homo sapiens
ttgaaaacacaagcaaacctatctaatgcaaaaatggcaacttacaggctcgtgtaattgcaaagacctggggcagaactagcttaggtgcaacttgaagtaggagaaaaaacaggacctggatcctgtctatcacagttcttaggagtagttccttgatgttagttcccctgtcattcacatacatgttaaaacggccacatctttatgtagtcagtcactgcatatcttcctaattccaggaccaacaccaaaatttattgttcttccttgtgtcttaagcaaaagtcctaatcatgattaaattgttaggttacatgcttgctgttgaaccaattactatggctgtgggtgatgaaatatgctgattgcctaaggaccagtcacattcctactcctgacatcttagatagtgacagtttgattcaaagcaaattgactaacatgggagaggaatgagtcttccaaagccaaatcaaggcaattttattgtagtaccagaaagcagatgatgatccagaaaacactgtaagctttgtaggggcagggttcatatctcttgttcctcataatatccctagtgtctaacatarcacccagacgaaagaaaattcctgaaatcgctgaatgaataa

SEQ ID NO: 908652 - DNA, 597 bp, Homo sapiens
cagacggcacctagaaaatcgggtcactcccacccaaatactgcacttttccaatgggcttaaaatatggtgcaccaggagattatatcctgcacaagtcttggagggtcctgctcacacagagtgtcactgattgctagcacagcagcctgagatcaaactgcaaggcagcagcgaggctggatagggctcccaccattgcccaggcttgcttaggaaaacaaagccgatgggaagctcgaactgggtggagcccaccacagctcaaggaggcctgcctccctctgtaggctccacatctggggacagggcacagaacaacaaaaagacagcagtaatctctgcagacttaaatgtccctgtctgacagctttgaagagagcattggttctcccagcacacagctggagatctgagaactggcagacagcctcctcaagtgggtccctgacccctgacccccgagcagcctaactgggagrcacccgcaagcaggggaagactgacacctcacacggctgggtactccaacagacctgcagctgagggtcctttctgttagaagggaaactatcaaacagagaggacatccacacc

SEQ ID NO: 908653 - DNA, 524 bp, Homo sapiens
ttttgtagaagctgcaagtgttcattttgcgtgctttgaggccaatrgtggaaaaggaaatatcttcacataaaaactagagagaattattctcagaaacttctttgtgatgtgtgcctacaactcacagggttgaaccttcctttggacagagcagttttgaaacagtctttttgtagaatctgcaagttgatatttggagcgatttgaggtctactgtggaaaggggaatatcatcacataaaaattagagacagaagcattctcaagaacttctttgtgatgtgtgcattcaacccacagagttgaacatttcttttgatacagcagttttgaaagagtccttttgtggaatctgcttttaaatatttggagctttttgagtccttcgtcggaaacggaatatcttcacataaaaactagacagaagcattctcagaaactgctttgtgatgtgtgcattcaaatcacagagttgaacctctcctttgatagagcagttttgaaacactgtttctgaagaa

SEQ ID NO: 908654 - DNA, 671 bp, Homo sapiens
aaaccatatcatcaggtgagatttctgtgctctgtattgtattgtacggtgcttttggtggattgccacacattgatgtgttgggatgtgtcctgacaccaaaaggaaagacaatggacactttgcatttaggataccccaaactttgcccgtctctcgtgttggctggttctgatttggctggttcagttttgctacaataaaactgtaattgtaagaatagtactttcctaaattctataaattatgccagcaaattgttgaaactgaaagggtagtgagaacccctgaattaatagccatctggtcagaagtgagggtggcatatggacctttgaacttgtgctggtgtctgaagtggggatagtctcatgtaggactgttctcttaacctgtgaagtttggcctaactctgggtaatctgtgtcagaagtcatttcaatcacttattatagtgttcagaaaataataggtggtaacttagtaggtactataattggtaatcagaaattaatataagaatagatgcacagtcactgccacataagggacatttaagtttataaatgcatttaagttagtgaataattaatgaatttactgaaaataaatttcataaagttaaaacatataatcactgartattttaaaacctgtactcttgggtggtt

SEQ ID NO: 908655 - DNA, 500 bp, Homo sapiens
cgccattgcccaggcttgcttaggtaaacaaagtaggcaggaagctcgaactgagtggagaccaccacagctcaaggaggcctgcctgcctctgtaggctccacatttggaggcagggcacagacaaacaaaaagacagcagtaacctctgcagacttaaatgtccctgtctgacagctgtgaaaagagcagtggttctcccagcatgaagctggagatctgagaataggtagaatgcctcctcaagtgggtccctgacccctgacccccgagcagcctaactgggaggcaccactacagcagtggcagactgacacctcacagggccgagtactccaacagacctgcagctgagggtcctgtctgttagaaggaaaactaacaaacagaaaggrcatccacactaaaaacccatctatacatcaccatcatcaaagaccaaaagtagataaagccacaaagatggggaaaaaacagagcagaaaaactggaaactctaa

SEQ ID NO: 908656 - DNA, 593 bp, Homo sapiens
cagagttgaacctttctttagattcaggaatttggaaacactctttttgtagaatctgaaaatgggtatttcaaagagcattgaggcctatggtgaaaaagaawatatctgcagataaaaattagaaagaagttttctgagaaatggctttgtgttgtgtgcattcatctcacagacttaaacatttctttggattcagtagtatggcaacacattttttgtccattctgcgaattgacatttgggagctcattgagaccaatggggaaaaagtgaatatcctaggataaaaagtagttggaagctatctgagaaactgctatgggatgtgtgcattcatctaacagagttatttgtctctttaattcagcagtttggaaacactgtttttgtagaaactgcaaagggaaaatttggagagcattgtggcctatggtgaaaaaggaaacatctatcaatagaaactagaaagaagctttctgggaaactgctttgttatgtgtgcaatcatctcactagtttaaccttcctttggattcagcagtttggaaacactgcttttgtccattctgagaatagacatttgggagcac

SEQ ID NO: 908657 - DNA, 577 bp, Homo sapiens
tgaggccaatcttagaaatggaaatatcttcgaattaaaacaacacagaatcgttcgcagaaactagtttgtgatgtgtgcgttcaactcacagwgtttaacgtttcttttcatagagcagtttggaaacgctctctttgtaaagtctccaagtggatatttggagctctttgagcccttcgttggaaacgggacttcttcatataatgctagacagaagaatactcagtaacttctttgtgctgtgtgtattcaactcacagagttgaacttttctttagacagagcagatttgatactctcttttcgtggcttttgccagaggagatttcaagtcattggaggccaatggtagaaaagaaaatatcttcgtataataacgaaacagaatcattctcagaaacttctttgtgatgtgtgcgttcaactcacagagtttaacctttcttttcatagagcaggttggaagcactctctttgtaaagtctgcaagcagatatttggacctttttgaggccttcgttggaaacgggatttcttcatatactgctagaccaaagaattctcagtaacttct

SEQ ID NO: 908658 - DNA, 598 bp, Homo sapiens
tcagtgaggaaaccttttgtctgttmttgatcagttccttttgaattttcccaattgccattctaaatcttcatctcttgcctcatcccaacctaaaacacaactcctaacctcataaaaagatgctcagttcagtttagccaatgataattaagtgcttactaaatgcccgaaacttagcaaaaagcacgatacttgtccatgagaaattgacaatccaggcaaaactttgaaatctcctatataaaaatgtatttaaatatgtatccaaacttctctactcttatgtttggaaagagttgtctttcattttggggaaagttggttcttcaacctgcattgttcttgctcccttagtctctttgggaagcttttctccatcaattgtcccatttcttacctataacagcaggaacctgtggtccattttcttcccttcctcatacaaatttagcatagagcttaacgttgagctgccttatagacttttcttaattcttgtgtttggataaaaaaaatgtaagcaaatgtaagtatttatcacaatctctcaagaaaatgccaaagaggtaaggttgtcagataaaatacagaccac

SEQ ID NO: 908659 - DNA, 641 bp, Homo sapiens
aatatagtactaggtgaaaagtatgtgaaaacttgtatttttttgtttttctttgttttgttttgagacagggtcttactctgtctcccagcctggagtacagtggtgcagtcactgctcacagcagccttgacctcctgggctgaagcaatcctcccaccttagcctcctgagtagctgagactgcaagtgtgtgccactgtgactggctatgtttttaatttttttgtagagacggggttttcgccacgttgcccaggctggcttcaaactcctgggctcaagggatccacctgcctccgcctcccaaagctgatgttaagtattatctaacataacttcatttatgaaaatttaaaaatgcgtaagataaagaaatcaatgttttacaggagcacatatacataaaagaatatgctttaaacaaattataagtggtgtctatggtggtggagaagaaaggaaatgaactgggtcaaaggccataagtaaagaagagaatggccttctaatccagtcatggcttatgccaagaaccagagcatgtgatgacctcaaccttgtgtacttgtggttataaaagaagaaacaawcaaataaacagactaataaaagtgtctggcacacaataagtggcctat

SEQ ID NO: 908660 - DNA, 629 bp, Homo sapiens
tctttactcaaacttttttgttcctttatggacggtgccctgtgttgagtttgccagttttgtctatgtggtgttagacttttctgtctagagtggggactgagaaaggaccctgatgcttggcatataattatgtactgggaaaacatggcctaatattgcccaatccacatgctctgggactatggtctctagttttttccagtagaaggattcattttgacatcaaaattatatagaactcctacatgaaaatagttctgtttgattacgattggttgagaaaatacataaatgcatatagactcacagaataccagcttcacggaacccaacttactactaaaagttcaaagtccatagtttaggaaccatttgctttagggaatgctttagggaatataggaatattgcctataatgtccataaattcttagccatctttcaaatgcaacaaagctgcagcttagcagaattgctaccactgagaagcaaattagtgtgtgaagtcagttcagtgaagggctgaggtatttgattaaatgrccacatgaaaaatggagatgtagaaaaaagtgtgaaagaaaagagaaacgattctgtaagtacaaaggcagcaataacactgg

SEQ ID NO: 908661 - DNA, 609 bp, Homo sapiens
aggtttcttaatcaattttctagactcacagtcatgtcaatagtcttggaagtcttgacaaaggtctaatatctagactstacagggaacttaaacagatttccaaaacagtaacaaacaaccccattataaagtgggcaaaggatacgaacagacacttctcaaaacaagacatttttgtatgcagccaacaaacatgaaaaaaaagctcatcatcactggtcattagagaaatgcaaatcaaaatcacaatgagataccatctcacgccagttagaatggtgatcattaaaaagtcaggaaacaactgatgctggagaggatgtggagaaataggaatgcttttacattattggtgggagtataaattagttcaaccattgtggaagacagtgtagtgattcttcaaggatctagaactagaaataccatttgacccagaaatcccattactgagtatatacccaaaggattataaatcattctattataaagacacatgcacacgtatgtttattgaagcactatttacaatagcaaagacttgaaaccaacccaaatgcccaccaataatagactggataaagaaaatgtggcacatatacactg

SEQ ID NO: 908662 - DNA, 565 bp, Homo sapiens
tgtttcagcttttgtgtgtgatagtactcctctagcctttgtgctgggaggtcattgttgacttagtgcttgtctctttcttttctctctctgtsttttttttttcttttttttttttgagatggagtcttgctgtcacccaggctggagtgcagtggcatgatctcagatcactgcaatctttgcctcctgggttcaagggattctcgtacctcagcctcccgaatagctgggattataggcactgaccaccatgcccagctaatttgtgtatttttagtagagacggggtttctccatgttggccaggctggtcttgagcccatgacctcaagcgatctgcccaccttgcccttctaaagtgctgggattacaggtgtgagccaccgtgcccggccctgaactccttatttcacaaggctcaaggtttctgcatcccagcagacatccagttgcccgggagatgtcgatttctcctagtggcaagtacctccctctctatgtgtgttttctttctcttaaatccagctcccccgcctatggtataaggtatggggaatttatc

SEQ ID NO: 908663 - DNA, 565 bp, Homo sapiens
tgtttcagcttttgtgtgtgatagtactcctctagcctttgtgctgggaggtcattgttgacttagtgcttgtctctttcttttctctctctgtctttttkttttcttttttttttttgagatggagtcttgctgtcacccaggctggagtgcagtggcatgatctcagatcactgcaatctttgcctcctgggttcaagggattctcgtacctcagcctcccgaatagctgggattataggcactgaccaccatgcccagctaatttgtgtatttttagtagagacggggtttctccatgttggccaggctggtcttgagcccatgacctcaagcgatctgcccaccttgcccttctaaagtgctgggattacaggtgtgagccaccgtgcccggccctgaactccttatttcacaaggctcaaggtttctgcatcccagcagacatccagttgcccgggagatgtcgatttctcctagtggcaagtacctccctctctatgtgtgttttctttctcttaaatccagctcccccgcctatggtataaggtatggggaatttatc

SEQ ID NO: 908664 - DNA, 557 bp, Homo sapiens
gtgtctgttcatatccttttcccactttttgatggggttgtttgatttttttcttgtaaatttgtttaagttatttgtagattccggatattagccctttgtcagatgggaagattgtaaaaattttctccaattctgtaggttgcctgttcactctgatggtagtttcgtttgctgtgcagaagctctttagtttaattagatcccatttgtcaattttggcttttgttgccattgcttttggtgttttagtcatgaagtccttgcccatgcctatggccttatttttctagttcttttcttctatggttcttatttttctggttcccttaggtatgacgttaaatcgttcattgaactatttctaactttttgagataggcaattaactgtataaactttcctcttaatactgctttcgctgcatcctagagattttgatatgtgtctctrttttcatttatttcaaatgattttttttatttctgccttaattttgttgttcatccaaaagtcattcagggtcaagttatgtaatttccaggtcattttgtggt

SEQ ID NO: 908665 - DNA, 609 bp, Homo sapiens
cagagaataaaaaagcattattgagagaggaatataaacaggctgtggagcaaccacttgctagggggattagygtgactaaaagggtgccaagggctaatatccaagacaatgagcaaaaggcctcaaagtcactttagagatcttagagacagctcctcccatcacaggctcagaggcctaggtggaaaaaatggtttcagaggccaggcccaaggcctcactgtcctgctcagcctcagaacactgctccccacatcccagctgctccagctccagcctcagctcaaaggggcccaggtatagctcaggctgctgcttcagagggtgaaagctgtaagccttggcaacttccacacagtgttaagcctgtaggcatgcagaatgtaagagtgaaggaggcttagcagcttccacttcaatttcagagcctaggtgctagggcagaagtctgccccagggtcagagccctggcagagagcctctgctagggcagccctgagaggaaatgtggggttggagcccccacacagaatacccactaaggcactgcctaatggagctttgggaaggggactgtcattatccagaaccaagaatggtagagcc

SEQ ID NO: 908666 - DNA, 561 bp, Homo sapiens
ctatgaaagtgtgttgaaaagtaattaccatcatataaatatgagggctattatcatcaggaattcaatgttttcatttactyatttaataggtggtacctactgtgtgccctgtactacactatttactggagaaagcagtcatcacttttcaaattccagttacaccaatgctgtgagtgtacacatattttaaagcaattaaatgattttatttcttttcagatgaaatctgaatggctaatcacggttacttttcagcttctaaaacctagacagcagacacgaccagtcctgagtgagacctctaagaaatacacagcatgctacagaaagtacatcgctaattcaatgaagtggcatatattgctttatgtcagtgctgaacagatgccctagtacagcatcaggaaaccctgctgctgacagtactatatttcaaaggtattttaaaactcacttcacagtcccctcctggctcccagatactccgtggctcatatattaaagcaagggtaggtagataatgagcgaatctttttgtatatatacacatttctg

SEQ ID NO: 908667 - DNA, 561 bp, Homo sapiens
ctatgaaagtgtgttgaaaagtaattaccatcatataaatatgagggctattatcatcaggaattcaatgttttcatttacttatttaataggtggtacctactgtgtgccmtgtactacactatttactggagaaagcagtcatcacttttcaaattccagttacaccaatgctgtgagtgtacacatattttaaagcaattaaatgattttatttcttttcagatgaaatctgaatggctaatcacggttacttttcagcttctaaaacctagacagcagacacgaccagtcctgagtgagacctctaagaaatacacagcatgctacagaaagtacatcgctaattcaatgaagtggcatatattgctttatgtcagtgctgaacagatgccctagtacagcatcaggaaaccctgctgctgacagtactatatttcaaaggtattttaaaactcacttcacagtcccctcctggctcccagatactccgtggctcatatattaaagcaagggtaggtagataatgagcgaatctttttgtatatatacacatttctg

SEQ ID NO: 908668 - DNA, 605 bp, Homo sapiens
agtgctcccacttcccctccttactatttgtagcttattttttccttaactatttttgctgtttactctccctcgggcttctactctgtgcctctaaagactcaacaaggatgctgttagctgctttctcctcccaatgacccataaaatcttatcctggtgtctggtgatacttccctggcaattattcattcaccaacaccaccttccaccttgtgcaggaaggccccttcttggcaaacgaaactcccacttagcactttacggctcaaagtagagctgctgcccctcaccctgtgcctccagccccatccagtggaatgttttcatgctcacagcagttttaagtaaggcacagcttttcttgtcccagaagggtagaaacggggatgggttagagggatgtattaagcacaattgcaataagggctttggagccttcaggtcccaggcaggagatcatattttaatacccrtggctaaaactgagctataaaacttggagaagattgtaaatgctttgttttacaacacacataacaaataacagcctgacccttgttaaaaaaaaaaattctgacagttgttaaaacagtaaggaagat

SEQ ID NO: 908669 - DNA, 605 bp, Homo sapiens
agtgctcccacttcccctccttactatttgtagcttattttttccttaactatttttgctgtttactctccctcgggcttctactctgtgcctctaaagactcaacaaggatgctgttagctgctttctcctcccaatgacccataaaatcttatcctggtgtctggtgatacttccctggcaattattcattcaccaacaccaccttccaccttgtgcaggaaggccccttcttggcaaacgaaactcccacttagcactttacggctcaaagtagagctgctgcccctcaccctgtgcctccagccccatccagtggaatgttttcatgctcacagcagttttaagtaaggcacagcttttcttgtcccagaagggtagaaacggggatgggttagagggatgtattaagcacaattgcaataagggctttggagccttcaggtcccaggcaggagatcatattttaatacccatggctaaaactgagctataaaacttggagaagattgtaaatgctttgttytacaacacacataacaaataacagcctgacccttgttaaaaaaaaaaattctgacagttgttaaaacagtaaggaagat

SEQ ID NO: 908670 - DNA, 620 bp, Homo sapiens
ggatgtgggaattagttagagaccctcctcagaggggcagcctgatgatatggaaaggyttataggacgctgggttcaatcctggcactcccactgtcttgctgtatgcccttgagtgggtactcaatgcctctctctaggtgtgggtttgctcatctgtaaaatgaggaggccagttttgactgtgaacccagccctcttccccacttcccctctcccattgcagatgggatgggtagaaggggcaggggctcctgccttttcctactgagcaactaatttgtgtttctcctctggtcaaggatgtgggaactgggagggagcagggcagtgtgggatggtggaggagaagaagttgctgatgagagtgggaggctggctgccactaagcccttccctactggaaactccttccctgtcccctcccccagacaacctcaggaaagggtctaggtgtttccacagtggtctaggaagggctagaccaatgtggagtggacgacatgcctggtgtctccctctggagagtgcactctggatactaatctgagtctccaaaaaggagaaagggttagggatcatttggtctcaccttccctcctgcttttacagaaagggaa

SEQ ID NO: 908671 - DNA, 592 bp, Homo sapiens
ttttagttttttttaggaacctccaaactcttctccatagtggttgtactaatttattaatacattcccaccaacagcatacaatggctttcttttctccacatcctcgccagcatttgtcatcgcctgtctattggatctaagtcattttaacaggactgagatatctcattatagttttgatttgcattacttgacaattagtaatgttaagcaccttttcatatacctgtttgtcttttgtctgccttcttttcagaaacgtcatattcaaattttttgcctatttttgattggatcattagattttttgcctgtagagttgttttagctccttacatattctggttcttaatcttttgtcagattggtagcttgcaaatattttgtctcattctgtgggttgtctcttcactttgttgattgtatcctttgctgtgcagaagccttttgacttgatgtaatgtcatttgtccatttttgttttggttgcctgtgctcacgatgtattgctcaagaaatgtttrcccagaccaatgtcttagagattttccctaatgtgttcttgtagtagtttcatagtttgaggtct

SEQ ID NO: 908672 - DNA, 576 bp, Homo sapiens
aaagcctccaagaagtatgggttatgtaaacaggccaaatctacaagtaattgacatcactgaaagggaggggaaggaagaaaacaacttggaaaatatatttcagaatattgtccatgaaaatatccccaaccttgctagagaggacaacagtcaaattcagtaaatacagagaagtccttcaagattctacacaagaagataatcaccaagacacataatcattatgttttccaaggtcaaaataaaagaatgttaaaggcagctataaggaaagggtgagtcatctacaaagggatccccgtcaggctaacagcagacctctccactggtaccctacaagccagaagagtttggggttttgtcttccacatccttaaagaaaatagtcttcaaccaagaatttcatatctagccaaactaagctcctaagtgaaggaataatacaatccttctcagataagcaaatgttgagggacttcattaccaccagacctgccttacaagagatcttgaaaggagcagtaaatatagaaaggaaaaactgctrccagctaatacaaaaacacagttaaa

SEQ ID NO: 908673 - DNA, 636 bp, Homo sapiens
gtacttattgaaaagaaattcatgtataagtggagctgcatagttcaaaaccatgttgttcaagggtcaactgtacagagaaatgacagaattttcttaatttagcatatcttcaaatcccatgtatttgtaaaacagtaacacaagaaattaagacattttaggtggtatcatactaattatgcttatttactgtctttgtccccaaagacagcacgatagttatctaaaaaattttcagtaaagtttcatgattgtatatatgaaagacacaaattaactcaacattgatgattcaaggttttatatttagccagcttcatgactgaaaataatagtgtttctttttcttttctgggaataaacccatttccttctcattcctttttctcagcagatggcaccaagcagatccatggaagtgagtgggaaccacacctctgtggccatgtttgttctcctaggactctcagatgaaaaagagctgcagctcatcctctttccagtcttcctggtgatctaccttgtgaccctgatttggaacatgggtcttatcatcctcatcagaatagactctcayctgaacacacccatgtacttttttctcagtttcctctcatttacagacatctgcta

SEQ ID NO: 908674 - DNA, 630 bp, Homo sapiens
gggcatgcctgagcgccattgaaacacagtgcttaagcagaacaaagacgtaaagaygtactcattgagtctgaaacagagaaagatactttctcactaaatctaaacctgggataggtactgcctttcccaatacaacagattttagtaaatcctccaaatttgtttgactttgttccatttgttttggtaattatctatgctgtccctttctatatacaattagcataagctagtcaatacaacaaaaatatatacagcaaattagattgggtttgcatcattctatagattaggagaatattgaacattataaaaatagtgaatattccaattcatgaactcaatatatttattcatttactaagacattcttgatttcttattcagcattcgtaggtaacatgcaaatcctgtatctatttttgttaactttgtacctacatattttgtttttcctgatgctattgtaactattactttaaaatttaatttccatgtgcctatagtcccaacttcttgggagactgaggcaaaagactcagttgggcccaggagggagtttgagtctagtctgggcaacacagaaccccacctctaaaaattaaattaagttaaaattaaaaaaaa

SEQ ID NO: 908675 - DNA, 583 bp, Homo sapiens
ttcaccttccaatcagttattaattttaaaagaaataaatctacgcttcacaggggatacagcaacacatcctgagtttcattggtaactgagatgtttttatgtaataatcattttgaatatgttaactgggttagtgatgaggatgagtaccaggatttgaggaaagacatctcagcttaggcggaccttacatatgaggaggtgggtaaaccagatgaaccacagttatggttctactgcagcaccagtggccaggcccctggagtttccctaataccacaggacttatactagtagtgtgcagagaggggacagttcttctctggcaggctttgaaggaatggtcagatcagaatagcctgttccttttccctcaggcaagtgaacagcatagctttgggtgactcaaactagatgaaatcagagtcattctatcctcttgagggacatgaaagatggaggaaatattcagacaagatgggcagatccaagaaagtttctaggagccattatgattctggggagcctttctgtgtatgttctttgctaccrtgaaactttccatctcttaagaattgct

SEQ ID NO: 908676 - DNA, 625 bp, Homo sapiens
tgtctgtcttttttggcataggaagctcaaaatttaggaatatgtatctccagctgtttatcagttttaagtctttaaattgctctccctttcccccatggttccacattagtgccaagggtgaggaactgactagggataaagaagtgaaattgatcaggaaagggtaaacagcagcagattccgtgattttatactgcagctgttggtgactgagaactgcctaaggggaaagtgtaacaatttagccttttctctggtgttgtataacttgaacttgactagtcttacccagtttggggaaatgattggtaaagacaagcctgcttttcttctccatctttcagtaggaacaggaacgacattaaaaatgccaatttaaaaaatgcttcaccccatgtaagagtagtagtttatttcagtataatgtacaaaatgatctctaaagtgagtaataatttatttgcaattctgccattaaataacagctgctaaaattttggtctacatggaaacctttcttatgatgttggtgatgaaacatattcatttattagatttttactgtatgccaagcactgttataaatgctttatsaaagcattatgtagtttatatatataca

SEQ ID NO: 908677 - DNA, 599 bp, Homo sapiens
agtgaatttttgcattgtttacttgaaaatgaatcttgtttttggtggccatttctcagaaaactttactatcacatatttttatgtcctaattattcaattcaggtttctttagttataaaatcagcaaaaaggtctgtttctatttattttcacatagctaagacttataaaattgtgaatttagaaattgctagattggaattaatttcatcttataaacccagcatactcatttaataatagaatcaagataaacaattataggatagacgaaaaaaatagaaattgaactagaacattgaacagagtgctaactacaagttctaacatttttgtttttgttttacatgttcaaatattcatgcatgcataaagtattacgtggaatttaaataatttctttaaaatggaaatatgttgtatttaatggacactaatttgttttaaaactacggaatgaatccaggaaagaggtgcatgatttagtagttgcctaaattgtaccttctacagatgttctgagtttattaaaattagttattattaattasttgcataaaatattagcatatcaaactaaaaccaaaggatcaaaa

SEQ ID NO: 908678 - DNA, 611 bp, Homo sapiens
gcttttggctcagctgttaaagtagaaattagaaaagagcagttgaaatactgtcttggcttcccctttgccttcttttttgttgcaggatttggcaatggttgcccatacctttgaakgccaatacttccaatggcccatccttctgtagggataaaatcaagggaatgcaaaatccctgacagggtggagaattgaggaaaactaatggatgaggactcaacagccttggctttctctctttcattcattttcctccaaacttccagggctgatggatgacaatttaggcagtcttccttttccttggtgtttgaatgtagagtgttgacttgaaaagttacttggtgcggtgaaaccaaattggagtggttaattctggtttgtggtaacttgagttcttcacctgaaagcccatcccttcataaacctttgacctctaaggattgacctagattccttcttctgcccctcccctgttcatattaacagccaacgtatctatctcttcagggataagccaaattaataatattattaaatgccaaaatactaagatataacttatttaaattgaacatttcagaaatatatcttaaattaaaaaatgt

SEQ ID NO: 908679 - DNA, 680 bp, Homo sapiens
atgactgtcattactccttttacattcttcttattcttttttttgggggggggatgggaatgtgattgctggaacttcagcagccatttgcaactatgaggaaaatgtccataaaattgaaaaggcattcrcctagattatactgaggagctgctaaagtaaagccaaaaaatctctacatttattgatataagaaaaataattctctatgtatgctattatggttatccaattgcaattgtgattgatacccaatagcaaagtacaatactcaccacactgtgcagtcattacagagaataatgcaaatgtccatctcttctaagttcttggggggcattctccattcctctgcattgctcaaagtccccagcacagtgtctgctctgctttcttaagtcaatggtgagaaatatcctagttgattgagttatctacaagaatactgaaaattatccaaggaatctaattcaacaagaatttataaactcttgctgtgtgccaatcattgttcctgattctggacttaacaggagaataaagtactactcctaccctaaaaaaattcacagtgtcctggagagaaaaaacaatttctcaaatacaaggtgataagtgttgcaataaggatatgtaaaatatagcagcaacacaccattgacaaaggtgtttgtcattaa

SEQ ID NO: 908680 - DNA, 638 bp, Homo sapiens
ttctaggttggaactttcccgaatgagcrggtcctgtgtgatggggctgaagatagaaactgagggatgggtgggtgggattgtaggatggtagtcatctaggaatataggcatgatttcttatcactctccccacacactggatttcaaatgaagacttccctgactgagataataaaaggtgcattcagctgcctctatggctgtcttataatcagttcataaggagttgatgggtgctttgagcttaaccagacctgcatataacctcaagtctaattctatcatgtggcttctaatgccatcatatggagcctctggcaacaaggccattttccagttgttaatatcttctcccttccatgctcatcctgccagaatcatttacagctctgtttctgaatctacccagaaacgatatatttttttctttggcaacatggtatccagagaacaacactttcctagaacaaatggatataaaagttctgttcattgcaatcagcacagtagcaaagaccttcagaggtcttggtgtcacagaaattcttggatagtatttttaacttataatttttattacattggcaactacacccatttaatgaagaaaactagtttgtttttcatattaacaa

SEQ ID NO: 908681 - DNA, 575 bp, Homo sapiens
tcttcagatcaaaagtaaagagaagctttctgagaaactgctttgtgatgtatgcattcttctcacagaattaaacctttcttcagaattggcagtttggaaacactgtgtttgtagaatctacgaagatattttagatagctcattgagggcatatggcaaaaagtgaatatcccaggattaaaactggaaagaagctatccgagaaaccgctctgtgatgtgtatattcatctcgcagtgttaaacatttattttctttcagtagatggaaacactgtttttatagaatctgccaagagatatttagaagcgcattgagacctatggtgaaaaaggaaacatcttcagataaaaactagaaggaaggtgtctgagaagccactttgtaatgtgtgcattcacctcgcagacttaaacctatcttttaattcagcagtctggattcactgtttttgcagaatctgtgaaaggatatttgggagcccattctggcctaaggtgaaaaaggaaatattttcakataaaaactagaaggaagccttctaagaaactactttgtgatgcgggcattca

SEQ ID NO: 908682 - DNA, 631 bp, Homo sapiens
tggtttctcagagaggttttctctagttttcatcctgggataatcacttttttgccattggcctcaacgagttccaaaatgtccattcgcagaaaggacaaaaaacagtgtttccaaactgctgaatccaaagatggtttaactctttgagatgaatgcatacatcacacagcagtttctcagaaagctttttctagtttttatctgaagatatttcttttgtcaacataaaactcaatgcacttccaaaaataacttcacagtttctacaaaaactgtgtttctaaaatgctgaatgtaaagaaaggtttaattctgacagatgaatgtacacatcacaaagcagtttctcagataacttctttctaaatttttttcctgtgatatttgattttttgcctttggcatcaatgagatctgaaatatccctttgcagattctacaccaacagtgtttccaaactgttcactccaaaaaatggtttaactctgggagatgaatgcacacatcacaaagcagtttctcagaaagcttctttcttatttttatctgaagatatttcctttttcacaataggcctcaatgcactcccaaataamcctttatggattctgccaaaacagtgtttcca

SEQ ID NO: 908683 - DNA, 688 bp, Homo sapiens
cacttttcagtaactttaccagctaatcaaaataatatcagaaaastatcttccctttgggaagctttctgcattaggaaaactgtttacttccaataaaataagtggagatgcttaaaggaagagggtcttgatcaaacttattttttaggataaaccaaaatggaaggtttaaggaccataaataaaaacaaatgtatcactccagaatgcttacaaaaatcatttttcttgaattgtttagtcttattctgagaaagtataaaagaaaagcagacattttcatttttgcatgaaactctattttttttttttttttggagatggagtcttgctctgttgccaggctgcagtgcagtggcgcaatctcggctcactgcaagctccgcctcctgggttcaagcaattctcctctcagcctcctgagtagctgggactacaggtgcgtgccaccatgcccagttaattgtttgtatttttagtagagactaaaggggtttcaccaagttggccaggatcgtctcaatctcttgacctcctgatctgcctgctttggcctcccaaggaactatattttttcttaactttgtttcccattctgttttaatgtcgtaatgagtctaccaaggtcactttttgatacctttgtagaaagaacactggattaaaagttagaatactttagttg

SEQ ID NO: 908684 - DNA, 630 bp, Homo sapiens
ttgaaatcacattttgaaagcctttttttttttttaatttttgacatcaccattcycaacatgtagcctccaaaattatcacagaaaaggataaggaaagattttagaaaatattaaaaaaaaaaacaaaaaacacaggcagggcctaaaagtggatgtcacttccacccacatctgttgtcctgcacttgttacatggccctacctataggcaaatgatttcaaaaacacagtcttgcatgtgctaaggaaaaaaacgacattgactgatcacatagcaatctatttgctcagtaagacccctctcacttacaagcatttgaagccaggaatgttgttctttatctcccagtgcaacccttctttatccctccgcagcagaagcatccagtaccccatctacctagatgatcctgagtcaacaaaaacccttctctttgaaaataagggtttttttgtttgtttgtttgtttgtttgtttgtttgttttttcttgtctgtttcattacaggagagttacaatgcaggagttaaacattatgaggctgatgactttgagatggctatcaggcatttcgaacaagccttaagagaatatttcgttgaagatacagaatgccggaccctatg

SEQ ID NO: 908685 - DNA, 631 bp, Homo sapiens
tattaaagatgtgagttgacaaaaagtgaatcagtccagctcmcaatgagttatttacagttcactatttcaatcaaagctatgttaatgaaaattactgtgtagctctgaagtttaaaaatgagttaataaagtaaatgtaattctaaggtttgagatacttgagctgattcacattagatgcaatgttctatgtattattatgttagagctacaacttgattgacttagaatgatttgttaaaacaatttaccactgcaatattgagatggaaagcaaaacaaaatctccatccccttactttcttgttccttagtatagtgcatgtgagttcacatattcatattgagtgtctatttattcacaaactccttcagcaaaattagcacaaagtacttaccacagactttgcgaggccctggaaaaatgaagacaaaaaagcaatgggaacaaacaaacaaaagcaaatttaaaatgtattatcattgcatacttcacatcatagaacttcagtggatagagtgagcaggtaacacatgccttttcagtcaaggaaaactgtacgaaaatggtcaagttatttgtcatcattaattcctttgactaaataggaaattagaagcccagatt

SEQ ID NO: 908686 - DNA, 658 bp, Homo sapiens
gctttcatggagcttgtcttctagttgcaggaaaatgaaaataaataaataataatataccatgcactgaagggmaagtagacatagaaattcatagccaggccaggcatactggctcacactcataatcccagcacttgcagagactgaagcagggggatcacttgaggccaggtgtttgaggccagtctgggaaacatagcaagaccccccatttctatttttttaatttttaaaaaacatataaaaataaaatagacatttctttaaagaagaaattcatggctagttgagttctgtcttgctcagggagtaagaagtcaaggcatggaaaccttcttctggaattaaaggcagggataaatcatacttctacttatagactacaaatattcgggagaatgtgtcacctatttctgggtcaaagtgctttccttctctatttttcctcaatccttttttctttgctttgccttgtatggaatgcttaccaagtttgaacattattgtcaaggttccttctaacaagtgtattgtttagtacatgtataagtgtactaaaatgtgtattattgcactagaacatgtaactgacctctactcctaagggagttaaaaacgaaaaaagacattcatttgcatcaggaagttatccatc

SEQ ID NO: 908687 - DNA, 611 bp, Homo sapiens
ccagtctgcaggtcacaattgtggcagcagtgggctgagcatacctatctttgtgccccaggrtggtgcacactagcacctgtattgtcagttactggcaggctgattcttcagcctccaggtggcattcttgaatgccattatggtagttatggacctggcaggtgaacagattctcgggaccctgagaatcagatgtggtgtgaacaatgggaatagcaatgatgggacaattttctggatcataagtggtgttcactaatgttagcagtggctgcaatggggtgaatgggtgtccatgggaggccctgaccccaatggtgacagtaggcaccagctgttgtgagcagaggcagagtgatcctcaaatagcagatggagtgctcaggtgagaggtgggtagcagccgtgctgaggatccaccactagagagggtggagccaccctcaatggccacagcctgggctgatgggtagctgatacacattcctttcagacactagttccagcagggctcactccctggtctagctgcagaagcccacaaccagtttgagatcaacttgcaaaggtgaatcacaccctgcttaaatcctagtctcagactccag

SEQ ID NO: 908688 - DNA, 634 bp, Homo sapiens
aacaagttcctcatctccatctgaggccacctgagcccagactttattgtccatattgctatcaggttttgtcaaagccattcaacaagtctctaggaagttccaaactttcccacattttttggtctttttctgagccctccaaactgttccaacctctgcctgttacccagttccaaagtcacttccatgttttcaggtatcttttcagcagcaccccactctactgctactaatttactgtattagtccattttcacactgctgataaagacatatccaagactcagcaatttactagaggaacaggttaaattggacttcagttccacacagctggggaagcctcacaatcatggtggaaggcaaggaggagcatcacatcttacttacatagatgtcagcaagcaaagagcttgtgcaggaaaactcccccttatcataaccatcaaatctcaaaatacgtactcactgtcatgaacacagcatgggaaagacctgaccccatgatgcaattacctcccactgggtctctcccgcaacacgtgggaattcaaaatgcgatttgggtggggacacagccaaaccatatcattgcctaaaatgagrctgcttagtaggatcagagccactg

SEQ ID NO: 908689 - DNA, 674 bp, Homo sapiens
cctacatcatcccttcctcctcccatggcagtggccacgtggtatggaaaaagaatctgagtgtttgggagaaaagtgtagcaattgcgagacactgcattgaactcagygctgccctgtcatagcagaaagcacaaccagactgaactcagctgactcccacctatggatggagtatttaaaccagtcctaggcaaaggacaattgcttgccccggcagtgggaatctgagttctgacaagcctcatcaccataggctcaaatgctctgggaccctaaataaatttgaaaggcagtctaagccacaaggactgtaactcctgaacatgtcccagggctgaacagggctcagtgccaatggacttgtggggcatgcagcttactgagacaccagctgcggtggctaaggcagtgcttgtgccacccctcccccaacaccaggctccacagcttgcaactccaaaagagacttcttccttctacttgaggagataagagggaaaagttaaaaaaaagactttgttttccatcttggataccagctcggtcacacttggataaggcagtgttcagagtcttgaggccccctttccaggccccagctcctgggtgacatttctagaagcaccctgggccagaaggggacccactgccttgaagggaaggagccagtc

SEQ ID NO: 908690 - DNA, 565 bp, Homo sapiens
tgtcctgagattgagattactatrtatgtgatggttctctttttgggagggagataatgtcaaaatatattagccaaagaccttcagaagtaggtgggaaataggcagaaatgtatacccattagcaattgattcctcagcatgctagtcaagcccattttttgacatctgttttattttggttcttgcctcttccagcattcaagctgtcagctcttgctctgttaacaatgggggctatgagctgaagtatattcagatcactcatgaacactacaggcactggttccttccataccaccagctgacatgagatggcaaacactgagaaaggaaggcacagtaagctcatattacctgctgcaaaggaacaacatgttgagagcaataaaacttttgccaacactgtgtaccattttgtaagattgtgggtttgaaagaatattttttcccctgcagtctacttcatggattgcttttgattaacagctctttcctttttttctctgaatccattggtggctgtaagtttgtatccattctctttggagggaggacacccaac

SEQ ID NO: 908691 - DNA, 628 bp, Homo sapiens
acaaagaggagctggtaccattccttatgaaactattccaaacaattgaatattggggacttctccttaacttatcttatgatggcagcarcatcctgacatcaaaacctggtagagatacaacgacaacaaaaagaaaacttcagccaatatccctgatgaacattgatgtgaaaatcctcagtaaaatatgagcaaaccgaatccagcagtgcatcaaaaagcttatccaatacgatcaagtcagcttcgtccctgggatgcaaggctggttaaacatacacaaattaataaatgtaagtcatcacataaacagaactaaagacaaaaaccacataattatctcaaaggccttcaataaaattcaacctcccttcatgttaaaaactctcaataaactagatattggtggaacatatctcaaaatagtatgagccatttatgacaaacccacaaccaatatcattctgaatgggcaaaagctggaagcattccccttgaaaactggcacaagacaaggatgccctctcttaccactcctattcaacacagtattggaagttctggccagcacaatcaggtaagagaaagaaataaagggtattcaaattggaagagaggaagtcaa

SEQ ID NO: 908692 - DNA, 643 bp, Homo sapiens
caggctgcaacttggaagcatagacactaaggctcctcctgcctagagttgttttttttttcttttacttattttaaatagaattagtgccatttctaaacaatgactctattatgaagaaacattccatacatgtgcctatgaacttacaagccaacttctcctagctgtaatgaaaattaactaaatgtcttacaagctaatgtaacttttgtttagtaaagagaaaacccaagcctggatggacaggttccataataagctcactgaatactcgacaatgctttcaagaccataaatatagaaactaaaagacgtcaatatggaaaacattactaagactgctttctccattagaaataggaaagtaaattactctagaaaataatgcaccaaattcttccgtaaaactgcagcaaacgcagttttgagcagcaggttagagacgtggcctctggcaatggcttctgtgaaaccaaaaacaattttcctagcttcataggatctctgttactctacaaagtaaaaacattggacttgagactatcttctagcttgaaaatgttaattttctgaagattattttttcctaactgtgatggcmaaattctccttcagtgggttgaagagttatctcctgctg

SEQ ID NO: 908693 - DNA, 665 bp, Homo sapiens
ggagcccaggaggttgcctgttcttcctagacttcaagttacccctgaagccttccctgacccccagcttcctccaggctgtagctcccacgagcccctcgtgcttcccctcattgagagtccatgctagcagcggattcgatgattccaatagctacatttactgagcgggtcctgggtgccaggcattctcctaagcagggtagattaatggttctatttaaccctcagaataaccttatgaagcaagcattatgattatttctattttatagatgaggaaaccaagaaaagatatgttaacatttaatccaagatcacacagctgcgaagattcaaagtcaggcagcctggtgccaaaacgtgagctctttaacacgttgctattctgcctgctgttggtgattgatcacaggtgaaggcctgttccaataaatgaggtctctcagccctgacattctaacagtggtgttgcttgtagagacacacattttatactttgagttttttttgttgttgttgtttagatcagagtttatcttggacaatattggctgagttcataagccaaagtcagaagcacctgtcatcatcctgtggggctctgcttctgggtggactgtaggaraagtcctgagaggagaatggtctgggcagcattgcca

SEQ ID NO: 908694 - DNA, 589 bp, Homo sapiens
accactatgcccggctaaaggactgaataatgctaaaacatgcaaggacattgattgagggtggggggcaaccacagctttattttttaatgcaacaagcttaggaattacacagaaaataatgaaagcttgcctctttttgccattgcactcattcagtatgggtcataaaaacttggggaagaaggtatatatcaagtggctttacacacataaggctcagttttataggtggagtgtagctcatgggtggagtgatccatattgtggcagtaattaaacatcattggtctcctccctggaaggagttccatttgtttgaagtgggcaaccaaaacttctttggtagtggttagtgacagcacccagaaacctattcccaacttgactcttgattgataggaaaatatgggaggagaaccatgtaagatttgtttttctatgtctggaaagctccattgttgaaggaaataatccaaatatgtcttcatgctaagttgactaatagagcttttttccacagggatcactttgatcaaatyactttgtgttttgtcttctggtctggtacatgcttttgaatcaaaag

SEQ ID NO: 908695 - DNA, 494 bp, Homo sapiens
cataataaaaataataggtaatacttatgtcacactcatgatgtgtcaacattgaaaggattttccctttgttaatgcatttaaactttaaagcctctctgtaagggagatactgtttttctgctttccacactgggaagccgaggcacagagtagttaaataactggtcaaggaccatgcagtagtaagtgccagagctaggatttaaaccaggcaacccagcaccctaatccatgctcttaacctctgaggcataatttttgtcaccaactaaagcagacctatgccctataacttccagttcctactaaattgcttttttctttcttaaatcctatttgggggtataagttctatgaytgagtggtaagtaagtgatctttcagattcaccaactgccttctctctttgataagattagactctgttgtttatattgcttcagagtttctccccctaattctcaatattttttgtctcagtgaaaatgatt

SEQ ID NO: 908696 - DNA, 399 bp, Homo sapiens
aaagataggatcatatacctagaaaatcctaagaaytctgccaaaagatttctagatttaataaatgaattcagttaagtctcaggttacaaaatcagtgtatacaaatcagtagcactgctatacatcgacaatgaccaagctgagaatcaaataaaaaactcaattcctttaaaaacagctgcagaaaaaacaaaacaaaacaaaaaacaacctaggaatatacttgacaatggaagtgaaggatctgtaaaaggagaagtacaaaacactgctgaatgaaattataaatgacacaaacaaatggaaatacatcccacactcatggattggaagaatcattcttgtggaaggtatactccccaaagcaatctatagatacaatgtacttcctatcaa

SEQ ID NO: 908697 - DNA, 521 bp, Homo sapiens
atttagcctttacttctctaattatccaggaaagtcattgcccctggaggaaattagcaatctataaggaaagccctgctctcacttttgtaaggctagttcacaaaaatttcttttaccttaatttttataagttaccaatatattttctctgtgtgcattttacatcatggctagaaagtctgccccacatctatctttttctttaatatgctatgatttatattttacttataaattttgaaaatttttcctggcatatggtaaagaatgaatctaattttatctcgttccttatggacaaaatccaaatgtcctagcactactcattgtattattttattacagatattttataatgtgtccaatagaatagcataacacctaatataatatatctcaaaagccagaytccctgattgccactgccttcatgcccatattaaccttgcttatcctttgttccactgctattacacagaagcgtctattttggaagacaaaatagcacccttccccca

SEQ ID NO: 908698 - DNA, 646 bp, Homo sapiens
aaatcttgactctacttgttaattttctgtcttgttgatctgtctaatattgacagtggggtggtaaagtctcccactattattgtgtgggaatctaagtctctttgtaggtcwctaagaaattgttttatgaatctgggtgctcctgtattgggcgcatatatatttagaatagttagctcttctcattgaattgatcccattaccattatgtaatgcccttcattggcttttttgatctttgttgggttaaaatctgttttatcagagactaggattgcacatcctgctttttttgtttgtttgttgttttgttttgttttgtttttgctttccatttcctttgcttggtcagttttcctccatccctttgttttgagcctatgtgtgtctttgcatgtgagatgggtctcccaaatacagcacactgatggatcttgactctttatccattttgccagtctgtgtcttttaattgggacatttagcccatttacacctaagggtagtatcattatgtgtgaatttgatcctgtcattatgatgccagcattgatgcaatttcttcatagtgtcattggtctttatatttttgtgttttttcagtgactgttactggcttctcctttccacatttagtgcttcc

SEQ ID NO: 908699 - DNA, 562 bp, Homo sapiens
tttctaccccaccgtggccaagctggtatctaagctggaagrcaatgtcctattcacatttccctctgcttttctaaagtctctccctgtagccaccaacactggaaaagttgtaggtcacacctgaagccagcacttctcagagtctcactcaaggatcatggcgagtagccagcaaacgaggaatgctgccagaactgggttcttccctttaaggtaggaggtccccttctggcccagtgtgtgtccagaaatgtccaggatctacagcctggaatgggggtatcaggtttctgattggagtcctatccttttgtgattgagctactatccaagttgcaagaccaagtcttctttactcttccctctcctctgcaggcagagggaaggtgtctttctcagagctgtgggctatgctgccttgggttgggggtgagttagtacaagcactctcttggccaccccagctgacgtctcactaggtcatgtggcccccaagtctactggcttcaagcctaacacagcatcagcacttgcccaggaattacagcacttgcagctt

SEQ ID NO: 908700 - DNA, 623 bp, Homo sapiens
caatgtttataatagtgtttcaagttgttatagatgtaagcagtgttattttctgtatttattgagattttaatcactggaaaattttaattagtaggatttttaaacagatgtactgttttgggtttctcctgttaatactattttgatattttaaacaatattgacaaaaatgtgatcttgcttcaaattgttttatggtacacattcccaaacacactaatctttaaacatgtaaacatttgaatgtttgtatcttaattattttgtgtagtgaccttctcattttaagcccaatgcttgtttcattccatggcagtcatcttcattttgaacatcaggtatatattcattggcatcgtatagaaattggagtgtactgaccatctgttattaacctaagtggctaattttagagtacttaatcattacatggatttccagctctaaaaggtaaggattatatttttttgttctctgtagctttgraagtgccttgataatagttactcaaatgtttttaagtgctatctactaacttatttttacaggttattagccattaaatagtgttatttaaaattaaaatttatttgaaacactgttacattttgatattcaca

SEQ ID NO: 908701 - DNA, 602 bp, Homo sapiens
ttcatgataaacagcttttagtgtctatcaggtctcctgtagtaacttagtaaaattaagggcttttagatttggacagcaaaagttaaccaaagagaagtcgactcagacattactatagaaaaaaagtacatagatactttagcaaatggatatacttaggaagatatacttagccatcatatgttgctatcatttttgaaatgctaagagtgcaatatttaactttcatatctattatgtgttgaaaagtcttttgtggatataccattgtcatacgtctgtggcagccataagcatgttgtctctctgtggctacaatatgcagatgtatggtaacagctccatgtaacattttaatggtgccttttctagtctactgtgacaagtaattctactcagcttgtcagcgatgacagctgagactttttgcttagatgccttgacagtgcttgtattaaacagccagagccatacactccattaagtttccrtaaaatgaactgcctgcttcttgctgttttgctgatagtggcagcagttgtaagctaatcctctccagttgtggattgctcgactgagtgctttcactcatcaacagg

SEQ ID NO: 908702 - DNA, 532 bp, Homo sapiens
actttaatatgaggcggagaggggcagaaagttgggcaacatataccctattcccaaccttgatgaaactaatagcatctatacacatagtagtcatgacagtaactttttgataacaacttccactctcaggaaaagtagcaaaaacaaaacaaaaataccatcaccaccaccacaacaaacaaaacaaaaaacaaccctgttttgcattttcgagtataatacatggttatcttttgaacagttagatgtaacatggtgtaaagaaaatcagatatgcaattcttgcctttgttactagctattggcagcctagacaagtttcctaaattttctgagcccgaatttccttgtcttcaaaacaagcagctgagtagacgcactcactagataagtggtcttagttgagtcacttatccagccattctgtcaatccctcaacaaatgcacttggtgagtttctatttgctgtcaagcactgcagtaacctttyctaggcttctctaagagggagatgatcataactgcctta

SEQ ID NO: 908703 - DNA, 606 bp, Homo sapiens
gtagggtgggggtgttgcctgggaagaagcatgagagaatcttcaggggtcctggaaatattccatatcttgatttggttggtgktacactgttgtgtataatatacacgtatttgtacatgtgtgtataaaatgtcattgagctccacatttaagattttttggactttattatatgtatgctaacctcaataaaactaaaaaattcctcactcgagtgaaaacttttttaatttaaataaaaataaacggtatttcatttagaaatggaaaccaggcacattatcttacacagtatttcataaactaccatcacctagtgaatatagcaaaagactgtatatggcttcaaagccacataatgcacctaaattctctaaaattgccagcaattacaaagtgatagatatgagccacataggatcaagatggggattcactcattccatattttggagccacaaagtatatctgctgcctaggtttggaccaaatgcaattaatgtatcaaacaaaaaatcctaatatttattcagcttcatccacagcctccaaaaatggttttagtaaaagaccaaataaattacggtttttaaaaaaactttc

SEQ ID NO: 908704 - DNA, 575 bp, Homo sapiens
cccctatcctagtgcataccatcttgttaggacygtcaagctgtcccactctccctctggcagcgtgctgactaagcccaggtgggaccaaactctcctccttgaatttaaaggttgaatataaccactaaaccctatggagcagattaatgatgatcatggcacactgaagaagttgcctatttgttcttgttacatacatccatggaaatggtccatttccgtctttactgagacctagttgctcatccttcctttgagtcaatgagcaaactttcaataagtttcttgtctgcttaagttaaacagaatctatttctgttgcttgaacccaatgagtcttcattaatctactcaccaatccaagaatattgtcctaatgcatggctgggaaatagttaactaaagacgtccatatagctgtcatgagaagggtacttactgggcttctggtaccatccgaagggataggtgtggacttcaatgtcaggagagccacagtccaaaatgcgccaggctcctccattctcctcactgcacatctgaattcccaagctgttcagagtgagacatgt

SEQ ID NO: 908705 - DNA, 504 bp, Homo sapiens
caggtattgttaatactgtcccctaacccacaaaagtacatgcctccagctagtcccaagtctataataaccttggtgatagtggygggttgatttgccctaatatattcttttttttttttttttaggtggagtttccctctgtcacccaggctggagtgcagtggtgtgatgttggctcactgcaacctccaccccccgggtttcaagcaattctcctgcctcagcctcctgagtagctgggattataggcgcccgccaccatgcctggctaatttttgtatttttagtagagatggggtttcactatgttggccaggctggtctcgaactgctgatctcaggtgatcgcccgcctcagcctcccaaagtgctaggattataggcgtgagccaccacgcctagcctaccctaatatactttctatgagagttgtactttgaatttttccgctttactaaagtacttctgatctgaccaccatacttttagggcttgaagctt

SEQ ID NO: 908706 - DNA, 642 bp, Homo sapiens
ctaatggtaacccattctccttatttttgaacccattctcggtaccagtaatagagagctcactggctttgatttgaggcagacctaggtttgaatcctagctctaatatgtacaggttgaatctcarggaaagaattcatctttctcagctttagtttcttcatctgtgaaatggagataataccaacttcataggcctattgaaggcatttaatgtgttgattatatgcatgaagactgatttgttaacaaacagatgatttcatgtgtgtgtgcatgagttgggtgcagccttaataagtgttccccttctcttctgttttgctatttaatgtgatggtgaggagagtggtcagtgtttgtctgtctcttccttctagaagttagggtggcataagatgaggatatgggggacagcagcctcagggagatactgaataacctctgggagcctaggaggacagatgcttgacactagctggggacaaaaaaggaagagcccaaacagtttttaaagcagaatcttctgtgtctagaagaatcaataggaaggtgcatcatcaaaagaactagagaacacaaatgacagggtatgacatgagtgttcactttcattaagtaaacactgctggggtttactt

SEQ ID NO: 908707 - DNA, 540 bp, Homo sapiens
ggctcaagcagcctcctaaagagctgtgattacaggcatgarccactgtactcagccagaaaatattcagtaattatctttttatatgtttttatgccttaattttttctcctctctccttccggaacttcagtgacatgtatattagaccattctatatagtttcatgtgtctctcatgcctctttttttctcttttgtttttcattactttctctctgtagtttggatactttctaattgacctatcttcaaggttagtggttctttctttggctttgtccagtttgctgataagcccattcaatgaattcttaatttcacatattttgatctttttagttctagtgtgtccaattggttctttttagagagttctcttttctgctaaaattctatattttttcctctattttttctatcttataatctattctttttatactttgtaaatgtattgtcaagttcttatctgttaattatgacatctgggtcatctatgagtttgttttgtttactgttttttctcttggtcatcagc

SEQ ID NO: 908708 - DNA, 605 bp, Homo sapiens
tgttgaatatgtgataacaaaagttacattatatttttcaggttattaaaaatgaaaattgaaaaaatatattttttaaattgrtgttttcatgaatgcttattttattaatctgcttatgacttaaaatatgctatatgtgttcttttatgtgaatgtaatatttcattaaaagggggaagacttaagtttttaaaagctaatataatagtatacatgttgaaaagagcctttcagatacagcaagtacatggttttaatattttaaaacttatattttcttgtagttgaaaaacaaaggtcgctgggtccattggaatgaattaattaaaaatactaatttaggagataaacaaatcaagattcaagatatcatagtccctacgatggacacaattagatatacgtttctaatggatttgagtattacctatgcaaagtaaggaactctgctataaacaagcattttgaatgtaaaagtaccattttaataggattatggcaatttttgaagtattcgagatcatcccttttcaggtaactgaaatcctgggggacttgttggcatgttgaaagtgacatctgttgctattggcaaacctgga

SEQ ID NO: 908709 - DNA, 634 bp, Homo sapiens
cctgtagtcccagctacttgggaggctaagccaggagaawtgcttgaacccaggaggcagagattgcagtgagccaagatcataccactgcactccagcctggatgacaaaacgagactctgtctaaaaaaataaaataaaataactccatctcccatgtggcagacctagtgtcaattgaactctttctttaatgcaatgctgaggtcttggtgaattgatttggtttgtgcagccggcaggaagaaccccctgggtgaatacactgttctgccaatggactgctcaagttgttagaaagttcatcctctttgcccctctaacttccacccatgacttctaattctctgcctctgttgtaatccagactaggaacaaataagcaaataaactaagaaagctatcttgtgacctctaagtttcgtcttcctcctggtgtaagtatttgtgtttctcaagtatctgagcttccatagacttcactattctagttgtttctctagcagctaccattcttgactatattacggatcagatatagatataaagactttacatttctattttactaattctcacaacactgctatgcaaaaggtactactattatccttttgcatatgaggctcagaat

SEQ ID NO: 908710 - DNA, 672 bp, Homo sapiens
tgtaaaaggaaacatcctcacataaaaactagacatgcttcattctcagcaacttctttgaggtgtgtgcattcaactcacagagtcgaacrtttcttttgattgagcagtttggaaacactctttttgtaatatctgcagatggatatttggagcactttgaggcctatacctgaaatggtaatatcttcacataaaaagtagatagaagcattctgagaaacttctttgtgatgtatgcattcatctcacagagttgaacctttcttttgattgagcagttttgaaacactctttttgtagaatctgcaaaaggatatttggggcgctttgaggcctatgttggaaaaggaaataccttcacataaaaactagacagaagcatttcagaaacttttttgtgttttgtgccttcaactcacagagttgaacgtttcttttgattgagcagtttggaaacactctttttgtagaatttccagttggatatttggagcgctttgtttcctatagctgaaaaggaaatatcttcacataaaaattagacagaagcattctgagaaactactttgtgatgtgtgcattcatctcacagtgttgaaactttcttttgattgagcagtttcgaaacactctttttgtagaatttgcaaatgaatatttggtgtgctt

SEQ ID NO: 908711 - DNA, 606 bp, Homo sapiens
gtggaaaaggaaatatcttcacataaaaactagataaaagcattctcagaaacttctttgggatgtgtgcatcccactcacagttttgaatctttcttttgatagagcagtttagaaacactctttttttttagaatctgcaaatggatatttacagcgatttgaggcctactgtggaaaaggaaatatcttcacataaaatctagacagaatcattgtcagaaacttctttgtgatgtgtgcattcaactcacagagttgaaccatacttttgatagaggagttttgaaactctctttttgtaaagaatgcaagtggatatttggaacgttttgaggcctgtggtggaaaaggaaatatcttcacataaaaaccagacaaaagcattctcagtaacttctttgtgatgtgtgaattcaaatctcagtgttgaacctttcttttgatggagcagttttgaaacaatctttttgtataatctgcaagtgaatattttgagygctatgagcactatggtggaaaaggaaataccttcacataaaaagtatacagaaactttctcagaaaattctttgtgatatgtgcattcaactcacagaattgaaa

SEQ ID NO: 908712 - DNA, 606 bp, Homo sapiens
gtggaaaaggaaatatcttcacataaaaactagataaaagcattctcagaaacttctttgggatgtgtgcatcccactcacagttttgaatctttcttttgatagagcagtttagaaacactctttttttttagaatctgcaaatggatatttacagcgatttgaggcctactgtggaaaaggaaatatcttcacataaaatctagacagaatcattgtcagaaacttctttgtgatgtgtgcattcaactcacagagttgaaccatacttttgatagaggagttttgaaactctctttttgtaaagaatgcaagtggatatttggaacgttttgaggcctgtggtggaaaaggaaatatcttcacataaaaaccagacaaaagcattctcagtaacttctttgtgatgtgtgaattcaaatctcagtgttgaacctttcttttgatggagcagttttgaaacaatctttttgtataatctgcaagtgaatattttgagcgctatgagcactayggtggaaaaggaaataccttcacataaaaagtatacagaaactttctcagaaaattctttgtgatatgtgcattcaactcacagaattgaaa

SEQ ID NO: 908713 - DNA, 606 bp, Homo sapiens
gtggaaaaggaaatatcttcacataaaaactagataaaagcattctcagaaacttctttgggatgtgtgcatcccactcacagttttgaatctttcttttgatagagcagtttagaaacactctttttttttagaatctgcaaatggatatttacagcgatttgaggcctactgtggaaaaggaaatatcttcacataaaatctagacagaatcattgtcagaaacttctttgtgatgtgtgcattcaactcacagagttgaaccatacttttgatagaggagttttgaaactctctttttgtaaagaatgcaagtggatatttggaacgttttgaggcctgtggtggaaaaggaaatatcttcacataaaaaccagacaaaagcattctcagtaacttctttgtgatgtgtgaattcaaatctcagtgttgaacctttcttttgatggagcagttttgaaacaatctttttgtataatctgcaagtgaatattttgagcgctatgagcactatggtggaaaaggaaataycttcacataaaaagtatacagaaactttctcagaaaattctttgtgatatgtgcattcaactcacagaattgaaa

SEQ ID NO: 908714 - DNA, 631 bp, Homo sapiens
tttctaccataggcctcatagcgctctaaatattcacttggaaattctaccaaaagtgtgtttcaaaactgctctatcaaaagggaagttcaactccgtgagttaaatgcacacatcacaaagaagtttttgagaattcttctgtctagtttttacatgaagaaattcctgtttccaacgaaggtctcgaagaggtccaaatatccacttgcagattctacaaaaagagtgttacaaaactgctctatcaaaaggaatgttcaactctgtgagttgaatgcaaacatcacaaagtagtttctcagaattcttctgtgtagtttttatgtgaagatatttcctttgctaccatagacctcaaatcactctaaatatccactggaagttctacaaaaagagtgtttcaaaattgctctatcaaaataaaggttgaactttgtcagttgaatgcacacatcacaaattatcttctgagaatgcttctgtctagtttttctatgaagatatttccttttccaccattgrcctcaaagcgctctaaatatccacttggatattgtacaaaaagagtgtttcaaaactgctctattgaaagaaacgttcaactctgtgaggttaatgcacaaatcac

SEQ ID NO: 908715 - DNA, 657 bp, Homo sapiens
acagctctataaaaaggaaggttcaactctgtgagttgaatgcagacatcccaaagaagtttctgagaatacttctgtctaatttttatgtgaagatattcccgtttccaaagaaggcctcaaagckctccaaatatccacttgcagagaatacaaacacagtgtttcaaagctgttttatcaaaagaaaagttaaactctgtgagctgaaagcacacattacaaagtagtttctgagaatgattccgtctagtttttctgtgaagaaatttccttttctaccttaggcctcaaagtcctctaaaaacacaccagcaaattctacaaaaagagcgtttcaaaactggtctatcaaaacaaatgttaaactctgtgagttaaactcacacatcacaaagtagtttctgagaatgattctttctagtttttctatgatgatatttctttttatgccgcaggcctccaggcgctccaaatattcacttggaaattctataaaaagagggtttcaaaactgctctatcaaaaggaaggctcaaatctgtgagttgaatgaacacatcacaaagtaatttctgagaattcttctgtctagtttatttgtaaagaatttcccctttccaacgaaggcctcaaagaggtccaaatatactcttg

SEQ ID NO: 908716 - DNA, 531 bp, Homo sapiens
gtaactctcaaaattctgtagacaacagctgtataagaactcttccaaggtgtgattatggagacatgcctttgtatctttttttttttttttttttttgagatggagtcttgctctgtcacctgggctgcagtgcagtggcacaatcttggctcactgcaacctctgcctcctgggttcaagcgattctcctgcctcagcctcccaagtagctaggattataggcgcccgccaccatgccaggctaatttttgtatttttagcagagacagggtttcaccatgttgtccaggctggtcttgaattcctgacctcaagtgacccactcgcctcggcctcccaaagtgctgggattacaggtgtgagcctccgtacccagcactcatatcttgatataatcatgcttttaaatctcttttagtaaatctaacatgattgggcaaaaaatgccccacaaggaaactaggtatgccttggaactactacattaacwttaaaacaaacaaattttctacttatctagaaatacta

SEQ ID NO: 908717 - DNA, 651 bp, Homo sapiens
cacgctggggtgcagtggggcgatcaaagctcactgcagcttcggactcagccagcttccctggctcaagggatcatcctgttcaccctccccagtagctgggactacaggcggtgcccccacgcccagctcattttttattttttatttttccccccttggtagagacgggattctgctatattgcctaggctagtcttgaactcatagaacaaagtatcctctcgcctggaccgcggcgtgggctctcaaaacaccaggatcaccggattacaggacaccaggagcaaacgcttcccgctttaaaaattcaggttgtgattggctgtcattccgtattatgctaatttagcatgcttgcttttaaactttttaaattaaaacaatttttaaaattacgtttccacttaaaacgttaaaatgtgttcttaagtgatagtattcgaaaagatgttattgctaatatatcttcctatttatttcctaagggaatcagaagcagcgaaactatctcgccatcagttcaaagtgcacggcggatgtggacccagcacaggctaggattacaaaattaagactatacttcyggatatcacttctatagtttgttactagagaagtttttctgaacgtgtagagcacgggaaagca

SEQ ID NO: 908718 - DNA, 564 bp, Homo sapiens
gtaggcctcaatgggtgcacaaatatccctttgcagaatctacaaaacgactgtttccaaacttttccatcaaaagaaagtttgaactctgtgaggtgaatgtgcacatcacaaagaactttctcagaatccttctgtgtagtttttatgtgaagatatttcatttttcacaataggcctcaaagtgctacaaatatccatttacagattctacaaaaagaatgtttccaaactgctcaatcaaaagaaaatttcaactctgtgggatgaaaacacacatgacaaaaaagtttctccgacagtttcagtctagtttttatgtgaagatataaactatttccccagcatcgtcaatgggctaataaatgtccctatgcagattctaaggatcgactgtttccaaactgcccaatcaaaagaaagtttcaactctgtgagatgaaagcacayatcacaaagaagtttctcagaaagtttctgtctagtttttatgtgaagatatttcctatttccccatatgcctcattgagttcacaaatatccctttgcagctgcttcaaaacg

SEQ ID NO: 908719 - DNA, 477 bp, Homo sapiens
aaactcctcaatcaaaagaaaggttcaactctgtgagatgaatgcactcatcatgaaaagtttctccaatttcttctgtctagttttcatgtgaagatatttcctttttcaccatatgcctcaaagcactccaaatatccatttcaggattctacaaaaagactctttccaatctagtcaatcaaaagaaagtttcaactccttgaaacatcacaaagaaaattctcagaacgtttcagtgtagtttttatgtgacaatatttcctattgctccttaggccccaatgggttcagaaatatgcctttgcagattctacaaaacgacggtttctaaactgcttaatcaaaagaaaggttcatgtctgtgagatgaaggtgcacattacaaagaagtttctcagaatgcttctgcctastttttatgtgaagatatttcctttttcaccataggcctcaaagcgctccgaatatccattt

SEQ ID NO: 908720 - DNA, 542 bp, Homo sapiens
tccacagattcttcaaaacaactgtatccaaattgctccatcaaaagaaatgttcaactctgtgagatgaatgcacacatcrcaaagaattttctcagaatgctttggtctagtcattatgtgaagatatttcctttttcactgtaggcttcaaggcgatccaaatatccttttgaaggtactacaaaaagactttttccaaactgctcaatcaagagaaacgttcaacactgtgagatgaatgcacacgtcacaaagaagtttctcagaattgttctgtctagtttttatgtgaagatatttcctttttcaccataggcctaaaagcaatccaactatccatttgcagattctacaaaaacactgtttacaaactgctcaatcaaaagaaagtttcaactctgtggtatgaaaacacacatcacaaagaagtttctcagaatgcttctgtctactttttatgtcaagaaatttcctatttccccataggcctcaaagggctcacaagtatccctttgcggatcctacaaaatgactgtttc

SEQ ID NO: 908721 - DNA, 671 bp, Homo sapiens
atttaaaaatgaaaaaatatttagtttgagggtagttaaaaatggggtgagccaggtttggcccaagtttgccaattcctggacctgtctgctgaatctttaaagcttatgtaaaatcatgattgccaccatggaatagactttcaaaaaaaatcatgactgtagccgggcgcggtggctcatgcctgtaatcccagcactttgggaggccgaggagggtggatcatgaggtcaagagatcaaggccatcctggccaacatggtgaaaccctgtctctactaaaaatacaaaaatcccctgaaaatggtggtacgcacctgtaatcccagctgcttgggaggctgaagcaggaaaatcccttgaacccgggaggcagaggttgcagtgagccaagattgcgcctctgcactccagcctggagacagcgagactccatctcaaaaaaataaataaataaataaataaaatttaaaaatttttaaaaaagactaaatcctgtgaaatagtcgctaagaaatctttaagccatttttaagcttgaatcctatgtagaaaaattaccaaattgccattctaaattacagtgctgcagattactacccraggtggcacaagttgtactagtacaaaaagtcttaggaggaaaaaccctctttgtagtttctttacc

SEQ ID NO: 908722 - DNA, 656 bp, Homo sapiens
aaattaaaatcatccttttaatttatcattgatgcatgattattttaaawtttagttttaattttgattaactttatacacacacatgattttcagggttaaataattttagaaggcatagtgaaaaataatagactcttctcttgacccagcatttcctgcttcctagaatcaacacattcagctcttgcagctggttattttggtatcgcctccatgtcactggtatatgcttatagtgctccttcttttttgcctaatgctttaagcattaactgttagcctctcactattttagccctcttttaccatttctaccatgccccatcatgcacggttcctgaacccccggacccccatgctctcattatcccactactgttatttcataattttgcttaggttaatattcagtgtgtatattttcctgtccctataaatactcttcacagctgaaatgtgcttacttttattttcttgcacaatctttaggttttcctggagttaatagttatattgttttttcttcctttgttttgttttctatcactaattcactccaaactttctcctcggttgtttaaatttcctctcaatacactcactcacatccggtattctaacaaagccatctttcgatcatctttcctgtaccc

SEQ ID NO: 908723 - DNA, 642 bp, Homo sapiens
tataatttgaattcgggtaatgtgaagcctattgagagaggcttttgtctgtcttttaaatgattaaaaacaagaatgtgcaagagatactgtgtataacatacaaaacctaagatatttagtatctggcattttgtagaaaaggttttctgacccatgctgatattaacaattaggctgtcatgtctcttgatggatatgatactcatttcagacttgggtttagacctaatagctatagatatcagttaaattctaatacttataaaatcctcctgcttcttcataacgttctagaagtcctctttccagttgtatttttatatagagtaacatatgacctgattgtcacaggctgtactggattgctcctcttgtcatgacataattattcaataaaattcctttcactctcaaatgtgttccatggctgagggcactaatatgatgatggtcagattagagcttgtacttgcctatagcagcgcatttaagccttgactttttatctatttcatggctaaagaagtatttttccctccrtcttagtcagctcatgctgctgtaacaaataccatagatggagtggtttaggccacagacattgagttttcacaattctggggctgggaagtacaaatc

SEQ ID NO: 908724 - DNA, 562 bp, Homo sapiens
ttctattcacctattattttccttatactttttcaggagtacaaatgaatctcagttggacctcatgatgcatcttggcttaactccagccaggtgcagtggctcacgcttgtaatcccagcattttgggaggctgagacaggtggatcacttgaggtcaggagatcgagataaacctggccaacagtgaaaccccatctctactaaaaatacaaaaaattagccaagtgtggtggtggacacctgtaatcccagctacttgggaggctgaggcaggagaattgcttgaacctgagaggccaaggttgcagtgagccgagaccgtgccagtgcactccagcctgggcaacagagtgagactctgccttaaaaataaataaaataaataaagatattccaatgattaccctttttctaaatactggtttgaaatatcaaaaccaaatctacataatattaactgaaagcaagattgaaaaaaaattaatattagctgatggcttactcttgaagcaggtactgagccaggtgcttggcatwtatcatctcatttatttctaaa

SEQ ID NO: 908725 - DNA, 611 bp, Homo sapiens
attaaccatgagcgtattttacatagtagatctaaacgmgtaccaatagactctgaaaataaaaagaaagaaaaaacacacagtaaactgttattaaccacattatgctgttatttccaacaaatatttgattgacttaatccactaaaagaacgcagaagtagatgtttgtggagcaaaagaattgctacatcctcgcccaaccctgatttagtcagtaatgtcataaaaccaaatggccccttacatgacttacaaatcatccacacacagaaaaagtggctgcttctgtccctaaatctctatcacccatagagcctttcttatcactgcaaaaataactatacacaatggtatgtgggtgggggacttttatctctttagggaatctttgggttcataaggaaaagaggaagttgtttctcttttgagaaacatctttgaagattttactccaagggaaaaatctcggttataaatatcctgtctatgtggttctacctgcccccaacatatctctcttcttcctaaatacacttcttttggaaatcccttccatttgtcataatgcctaaaattctgccaaatagagttgcattttagttaacaat

SEQ ID NO: 908726 - DNA, 623 bp, Homo sapiens
aagtgaggaaatgcagtatttggttttctgttcctatgttagtttgctaaggatgatggtctccagctccacccatgttcctgcaaaaacacttgatctcatcatttactayagctgcatagtatttcatggtgtagatatacaccacatttgctttatccagtctgccactgatggacatttaggttgattccatgcctctgctattgtgaatagtgctgcaatgaaaatacacatgcacgtatctttataatagaacaatttatattcctttgggtatatacccagtgaagggatttctgggtcaaatagtagttctttttttaggtctttgaggaatcaccacactgctttccacaatggttgatctagtttacactcccaccaacagtgtataagtgttctcttttctccaaaatctcaccatcatctcttattttttgactttttagtaatagccattctgactggtatgagatggtatctcattgtggttttaatatgcatttctcttatgatcagtaatattgagccttttaaaatatgcttatcagctgcatgtatgtcttcttttgagaactgtctgttaaggccccttgcccactttttaatagggttgttca

SEQ ID NO: 908727 - DNA, 621 bp, Homo sapiens
gtcctgggttcaaattccagctctgcctcaaaaacttgcaaccttggggaagtcactcaacttcctgtgcctcagtttcctcctgggaaaaatggggatgaggataatcttggcagaggattgttgagaaggttgagtacatttggagcctaacagctttagcgggcacttggccactgtgagaactcagtgagggttagcgatttcacacaagggccttctcaccaggctccggcagacgggacattcctttgctatttgagatgtttttggactcttcctctccctctttgcccctttcccttttcctttccccttcttcccttctttcttcttatggggagctagctgggaggtgctcagttggggccctcagtgactggagtctcaagggctctgctgccatcggctgtgagctcagcagcccctgtcctttctgggccccagcctctccatccaaaaaccagaaggctgcctggaaggttccagaagttgctcttggtcctgacccctgcccacatctctctgttgagaagactggtgccactctggggacagctggcttcccgcctcttccygggtccctggggaagtaactcctctcccaggaggagacagaca

SEQ ID NO: 908728 - DNA, 630 bp, Homo sapiens
gaccctccaccctgattttaatccaattgaaagaaacatacttttaatccaactgaaaaaacacactgagtatcatacattctacctctacttcttttcctgaagcattttcgatgattaaaagtttgcagtaggcatttgaatttgcaaggttttctcaatcatttactgttttggagtcaagaacatgatcgtccccttgccaagccctgagtttttggatgtcctgtgcttcttttttcttaggcttgcacactggtcaattcttccctaagctcccctctgtctttaataccttaccaaacacagccgacagcaatcaacaccaccactactgctgcgtgtattgactgctagagctacaaatccactcaattcctcttcagttattgcaggggaggattttagcaaatgtttggccactgcttaataaagagagccctctccagtatccttagcacctgccgccttattatcatggaaatgccacacactcagtgtttttgttacagrtatactcttcttcatgtgacagttcctgcattttcagggcagattagataatgctgccttagcaaacaacgcccaaatctcagtgagtttaagcaacagtttatgtcttgattatgc

SEQ ID NO: 908729 - DNA, 571 bp, Homo sapiens
  misc_feature 20: n = A,T,C or G
aaggtataaggaaaagcctntactgcttggctgctgtaccttctacattttgttatgcagatagtatatatttaaaaaataaaacttgaataaaataaattaataaaggtccccaaatatctttcactgcccgtattagttggttttaatgctgctgataaagacatacccaaaactgggaataaaaagaggttcaatgggacttacagttccacatggctggggaggcctcagaatcatggcgggaggtaacaggcacttcttacgtggtggtggcaagagaaaaatgaggaggaggcaaaagtggaaacctctgataagcccatcagatctcatgagacttattcactgttgcgagaatagtaggggaaagactggtctccacgattcagttacctcaccgtgggtccctctcacaacacctgggaattctggaagttttgagtggggacccagccaaaccgcatcrgtgtcttaccacccagcattatgaacgttatcttttgaactgtatttcaggtttaactgtataatttaaatattatttctttcatcatgcttttatatttta

SEQ ID NO: 908730 - DNA, 516 bp, Homo sapiens
tttggtatttgtaggtagttattagcccagaacactagatctgaacgtttctttctaaataaaatcttagggctctgagatagttgatgaagtctgaaagtgcatttgaatacacttattcaccaggagaatttcagttatattcttaaaatttaataagtctgaaaacatagatttaacaaaactatagctagtatttatatctgactttattgtgaaggtcagtagatacctagccagccagataatcagaaccagaaggatccagctatttttttttttcaaccaagaggtcttaaaaaacatgaaaactgtttatcttcactaacaacaaataaatgtaatattatgcaaaaataagatagtgatttttgtttaccaaactagtacatgttcaaaataataattttgttgaagtgagttaggaattcccaaatattgakaattaaatttggcacaatatttctaaaaaccaatttgagaattgaattattctaagaactttgtaaaattagg

SEQ ID NO: 908731 - DNA, 640 bp, Homo sapiens
agccactttggaagacagtttgacagttttctacaaaactaaacatgtcttaccccgcagtccaacaactgttctacatatttacacaaatgagttgaaaatatatccayacaagaaccagtacacaagtgtttatggcagcttaactcataattacctcaatctgaaagtgaccaagatgtacttcaaaatatgaaaggataaaaaactagtatatccatacaatggaatattattcagtgataaaaagaaatgagctatcaagatatgaaaagacatggaagaaccttacacgaacatttctaaatcaaagaaatcagtctgaaaagcgacatactatatgattccaactatacggcactctggaaaagggtaaactataggaatagtagatcagtggttttccagggacttgggggaaggagatgaatgattaataattggagcacagtgaaattttaagagtaaaactttcttatataacaccataaagttgagtacatgacatgcatttgtcaaaatctatagaactgtaaacacaaagaatgaaacaatgtaaactatgtagtttaaataataattatgtgtttatattagttcatcagttgtaacaactataccacactaatacaaaatgtaa

SEQ ID NO: 908732 - DNA, 586 bp, Homo sapiens
caatctcagagcaaagttggggctgagcctaggcactgctgcagcctaggtgtgcacacacttggagcagtgctgacacaccagctccttcttgccacctcagcccrctccagactttgggcactgacaagcataggagggaagccgaggagagtttgagggcatctcagcgctggcctgcaggcaccccttggcacctacagcctggatgccatgaacagcggcagaaggcagacagttcctgggtggaagggggcaggtccccagtgaggctctcaccttcaggtcagggagggcctgaaggctgggggccaggctgccagtcccgtggactggagtgggaacttgtggtgccttttttgggcttgcccgtgaccacccatgggccaaatggcatgaacttcctcccctctgaggcccataaaagcccaagctcagagctgagcatacatcaggatgaccagctgcagagaggagcaacccactctagggtctcctctctgctgagagctgcagaaatgatgggatgacctgcctgcagagaggagctacccactctagagcctcctctctgctgagagctgca

SEQ ID NO: 908733 - DNA, 627 bp, Homo sapiens
gcaccatacatgagtatacagttaatatgttatattagatgcatataggctcctgtatatttatagatacataaaaaactgttctattgtgtagraaacttacataaaagtagttttacgaaatttttaacattttctactttatattaagatagacattaatatatgttttatttatttgaatttaacccaaacaaaatttaagcagaaaaggatataaatttgaagtatttctttgatataatttctagaagccatcaggaaggaaacaaatgaaactcctattagacttctgctttttagaggtgcacagggagtttacacagctgaatgtttaaatatgaagagaggcctcactaccacccactgtcagtaggaaaacataaaatgctaagagcctagaaaagaagactgacagtttgagtgaagaaaagcaaccagtaagtaacttgatgggatgcctcaagtcaagggtgtgggcaagaccagctaactagtggggtgtgaagaataaaaaaagaataggtagacaagatctccaatgtaaaacttttctatttttgtgaaaaaaaataaaggttgtaaaaattctgctgaggaaaactgagggtcattatatagcattga

SEQ ID NO: 908734 - DNA, 592 bp, Homo sapiens
acattaagtttttatccctgcttcctgacacagaatttctaaaatgctcataactttctaagtgataggggtaataggagagtcttgttttaatatttggtctttgtcccagattgctggcacrcagcttcaaaatccttagactcttctaagcaataaatcttttatatactaagatgactggtggttggtggttggggtgcctgatagcttcagtatcaggctggacaccagaaaaaccaagcaatgcttagaggattgaatcattcagtcctgtccccatcctccggagatgagagtaaggccagagtttgagttattcaccaatagccagtggtttaaatcagtcatgcctacataatgcaacttcctaagaactctaaacaacaggttcaaaggctttctggattggtgaactcacttgccatgaaggtggcttaccccagttccacagggacagatccccctttgctcagaactcttccagaattcatctactaacctcttcatctggctatccatctgtatcctttataataaatcagtaaacataaataaaatatgttcctaaattttgtaagtagttttaaca

SEQ ID NO: 908735 - DNA, 604 bp, Homo sapiens
aacaatatcacatttttcagaagcctcagggcaataaaatctccttagtgtaattgaaatctaagtacttatctactagagaattatatatttcaacagcttttaaaaaattatgttccactcttaaaagaaatctgaattttaaaatttacattaaatctttttattctaaggcaaagacaaaaggcaaaaactacatacagtttaatttgatctcataatttttttgcaaattagattttttaagaaaaattatgaattataattgaatcatctagcttttcctattatataagtgatattttaatctatatgtaataggggaaaactaagaagaagggaatacttaccataggtagatactttttatatctagtacgtattgtaataacctcacaaagtagatgatattttcctaatttacttagaaaaatttgagtcatattttatttgaatatattggaggtgtaatatgccttccaagttttattaattagttagttaacattttggagtcatcgttcttttaatgttttaattgtttcccttgactaagttctcattcaccacttggracgtgagagaaatggagggaataaagaac

SEQ ID NO: 908736 - DNA, 589 bp, Homo sapiens
attcaacatttttatacagagtaaatcattaagtaattaaaaccattaagataaagtaggaattacatttttgctatgctagttaatgtaaggtattggttctccaacttcagtgagtttggagtagaggccatgttggcatgttaacaagtacatgaagatactccaatttagatagtccttaaacacaactgagaatactgccttaatatcttactatttactcatcaaaactgaaaagattatttactttttttcccccaggtattgatgagcaattaactctcagtgaacaaaggtaaggaaatggaagctgggagctgggaataagtcaaagaaaacggaacatcacaattaaaatagaattaaatcctcattagcaaggaagattaaccatctccagaatagactgtgattaagaggtagcagaacctaagagttatgcctgatcacctcttggaagaactcagtagctggtgagacatctgctggatcaattgtcagcttcccatcctcacagataccagaaggggaagacaggaatcawcagaaaaggattccctaagccagtcaagtttcctaaggctcc

SEQ ID NO: 908737 - DNA, 683 bp, Homo sapiens
ttaccaagataagcaatattytggatcacaaaacaagttgcagtacatttaaatggatccaagtcatgcaaaatgtgttttctgatcttaatggaattgaaatggaaatcaataaaagaaagtctctggaaaattcccaaatatttgaaaaccaaataacacttggatcaaaaataaatcagaataaaaaaatggaaaatattttaaactgaatgaaaatacaatatatcataatttaggaacttcccctaagcagacataaggtaaaatttatatactaaacgcctatattagaaaagaaggaaggtcaaattaaaggcatcagcttcattttatgaaactattatagaagaataggagcaaattctgccaaagccaataacatgaaaatatgaaatacatagggatgaatatgacaaaagttgttaaaggcctgtattctgaaaatagaaaagtattgttgagataaatcaaagaagaccagaataaatggagatagaccttggtctttgaacaaaagaggcactattattaagatatcagttctctcccattaatctatggatttaatgttacaccaataaaaatataatcagccttttttcttaaaaggaaagaaattgacaatctgagtttcaaagtcatatggaagtgcaaagaacctagaatttttaaaacaacac

SEQ ID NO: 908738 - DNA, 636 bp, Homo sapiens
cacatatcacaaaatagtttctcagaaagctactttcttgtttttatctgaagatatttcccctttagcataggcctcaatgggctcccaaatatcccttcatggatcctgccaaaacagtgtttctggatggatgaatgaaaataaagttttacctctgtgagttgaatgcacacatcacaaagtggtttctcagagagcttctttcttgttttttttccttggatattcactttctcacctgggcctcattaagctcccaaatatctcttcacgattctacaaaaacagtgcttccaaactgctgaatgaaaagaaaggtttatctctgcaagatgaatgcacacatcacaaagcagtttttcagataacttccttctagtttttatcctgggatattcactcttttgcctttggcctcaatagctccaaaacgtccattcacagaatgggcaaaaacagtgttttccaactgctgaatccacagaaaattttaactctttaagatgaatgcacacatcagaaagcatttcctcagaatgcttctttctattgtttatctgaagttattttctttctcaccataggcctcaatgcrcttcaaatatcccctcacagattctgccaaaacagtgt

SEQ ID NO: 908739 - DNA, 743 bp, Homo sapiens
gctttgtgatgtatgcattcatctcatagagtaaaacctttgttttcattcaggagtttggaaactctgtttttgtagaatctgcaaagggatatatgggagygcattgaggcttacattgaaagggaaaatatcttcagataaaaacaagtaagaagctttctgagaaactgctttggaggtgtgcattcatttcattcattcatttcatttcattttccaagaaagatttaagcctttcttggaatcagctgtctggaaacactcttattgtctattctgtgaaaggatatttggcagctcattgaggcctatgacataaaagcaaatatcccaagaaaaaaactactaggaagctactggagaaaccactttgtgatgtgtgcatttatctcacagagttaaaaatttgatttctttcagtagtttgaaaacactatttttgtagaatctgcaaaggtatatttgggagtgctttgaggactatgttgaaaaaggaaatatcttcagataaaaactagatagaagctttttgagaaactacattgtgatatgtgcattcatctcacagagttaaacctttcttttgactcagcagtttggaaacactgcttttgtccattctacaaatattcattcaggagattattgaggccattggcaaaaaaccgaatatccaggaataaaaactagaaggaaggtatctgaaaaactgctttgtgatgtgcacattcatctcacag

SEQ ID NO: 908740 - DNA, 595 bp, Homo sapiens
aggtgctggagaggatgtggagaaataggaacacttttacactgttggtgagactgtaaactatttcaaccrttgtggaagtcagtgtggcagttcctcgggaacctaggactagaaataccatttgacccagccatcccattactgggtatatacccaaagtattataaatcatgctgctataaagacacatgcacacgcatgtttattgtggcactattcacaatagcagagacttggaaccaacccaaatgtccaacaatgatacattggatgagcaaaatgtggcacgtatacacaatggaatactacgtagccataaaaagtgttgagttcatgtcctttgtagggacatggatgaagctggaaaccatcattctcagcaaacttttgcaaggagaaaaaacaaaacaccacatgttctcactcattggtgggaagtggacagtgagaacacttggagaaaggaaggggaacatcacatactggggtctctcatagggtaggggaaatgggggagggatagcattacgagatatacctaaggtaaatgacgaattaatgggtgcagcacatcaacacggcacatgtatac

SEQ ID NO: 908741 - DNA, 595 bp, Homo sapiens
aggtgctggagaggatgtggagaaataggaacacttttacactgttggtgagactgtaaactatttcaaccgttgtggaagtcagtgtggcagttcctcgggaacctaggactagaaataccatttgacccagccatcccattactgggtatatacccaaagtattataaatcatgctgctataaagacacatgcacacgcatgtttattgtggcactattcacaatagcagagacttggaaccaacccaaatgtccaacaatgatacattggatgagcaaaatgtggcacgtatacacaatggaatactacgtagccataaaaagtgttgagttcatgtcctttgtagggacatggatgaagctggaaaccatcattctcagcaaacttttgcaaggagaaaaaacaaaacaccacatgttctcactcattggtgggaagtggacagtgagaacacttggagaaaggaaggggaacatcacatactggggtctctcrtagggtaggggaaatgggggagggatagcattacgagatatacctaaggtaaatgacgaattaatgggtgcagcacatcaacacggcacatgtatac

SEQ ID NO: 908742 - DNA, 600 bp, Homo sapiens
atcacaaaatggtttctcagatagcttccttccagtttttgtaaygggatatttgctttttcacatttgtcctcaatgagctcccaagtatcccttcacagattgtaaaacaacagtgtttcctaataggtgaatccaaagaatggtttaactctgggagatgaatgcacacatcacaaagcagtttatcaggatgcttatttctagtttttatctgaagatattttctttttcacggtagggcttaaagcactccccagatagcacttcgcagattcaatgaaaacagtgtttccaaactgctgaatgaaaagaaagctttaactctgtgtgatgaatgtactcatcacaaagcagtttctcggattgcttccttctagtgtttttcctctgagatttgcttgttcaccattcctcttaatgagttcccagatatgccttctcagattctataaatacagtgtttccaaactgctgagtccaaaaattgtttaactgtgtgggatgaatgcacacatcacaaagcagtttctgagaaacattttttgtaatttttatgtgaaggtattttctttttcaccataggtcataatgcgctca

SEQ ID NO: 908743 - DNA, 577 bp, Homo sapiens
cttggagtttctacaaaaacagtgtttccaaactgctgatataaaagaaagttttaaccctgtgaaatgaatgcccacataacattggtttttctgattgcttccttctagttttttttcccctggaatattcrctttctcaccagtcaccttaatgagctctggaatatcccttcacagattctaaaacaactgtgtttccatctgctgaatccaaagaaaggtttaactcggtgagatgaatgcacacatcccaaatagtttctgagaaagcctctttctagtttatattttaaaatatatcctttttcaccataggcctccaggtgctctcaaatatccctttatggattcttccaaaacagtgtctccaagcagctaaatgaaaagccatgtttatctctgtgaggtgaatgcacacatcacaaaactgtttctcagatagcttacttctagtatttatcctgggatatttgctttttctctgttagcctcaatgagctcctaaatgtccacttgccgaatggacaaaaacagtgtttgcaaatggctgaatacacagaaaggtttaattctg

SEQ ID NO: 908744 - DNA, 612 bp, Homo sapiens
aaagcgatttctcaaatagcattcttctagtttttatctggggatattcactttttcatcattggcctcaatgagctccccaatgtacatttgcagaatggacaaaaacagtatttgcaatctgctgaatccacagacagttttaacacagtgagatgaatgcacaaatcacaaagcagtttctcagaaagcttctttccacttttaatctgaagatatttcctttttcaccataggcctcaatgcactcccagataccacttcgcagattctacgaaaacagtgtttccaaactgctgaatgaaaagaaaggtttaactctgtgagaggaatgcacacatcacaaagtggtttctcaaatagcttccttctagtttttatcctgggatagttggtttttccccttttgcttaatttagctcccaaatttcccttcacagattctacaatgacaatgtttccaaaccgctgaatccaaagaaagktttaactctgtgaggtgaatgcacacatctcaaagctgtttctcagaaacttcctttaatttttatctgaagactttttaccacagaccccaaatatcccttcgtgaattcttccaaaacagtgttt

SEQ ID NO: 908745 - DNA, 694 bp, Homo sapiens
tttacctctgtgagatgaatgtgcacatcacwaagcagtttcccagaatgcttctttccagtttttattggaagatatttcttttttcaccatagtcctcaatgcactcccaaatatcccttcacagtttctaccaaaacagtgccttcaaattgctgaatgtaaagaaacttttaactcggtgaaatgaatgcacacagcagaaagtggtttctcagatagctttcttctagttttcatcttgggatatttgctttttctccattggaatcaaggacctcccaaatctccattcgcagaatggacaataacagtgtttccaaactgttgaatccaaagaaaggtttaactttgtgaggtgaatgcacctgtcccaaagcagtttctcagaaagcttcttgctagttttcatctgaagatacttcctttttatccctaggcctcaatgggctcccaaatatccattcacagattctacaaaaacagtgtttccagcctgctgaatgaaaaggaagtttaaccactgcgagcttaatgcacacatcacaaggtggtttcttagatagcttttttctagtttttatcctgggatattcactttttccccctatggcctcagtgagctcccaaatatcccttcacagattctacaacaagtgtgtttccaaactgctgaatcaacaaaaaagtttaa

SEQ ID NO: 908746 - DNA, 591 bp, Homo sapiens
cacactttctttatccagtctgccattgatgggcattttggttgattccatgtctttgctattgtgaatagtgctgcaatgaacatacatgtgcatgtattttatgatagaacaatttatattcctttgggtatatacccagtaatgagattgttagattaaatgatatttctatttttaggtctttgaagaattgccacactgtcttccacaatggttgaactaatttacacttcaaccaatagtgtataagaatttcttttttatccacaacctcataagcatctgttattttttgactttttagtagaagccattctgactgctgtgagatggtatctcattgcggtattgatttgtactgttttaaagattgtgatattgaactttttttcatatgcttgttggccacatgtatgtcttcctttggaaagtgtctgttcatgtcctttgcccactttttaatgggaytgtttgctttttttttgtaaatttgtttaagttctttaaagatgctggatattagaccctggtcacatgtataatttgaaaaaatttcctcccattctgtaggttgtctgtttactctgt

SEQ ID NO: 908747 - DNA, 605 bp, Homo sapiens
tcattttaatttaattgcccccttttaagaccctttctcyaaatgcaatcacattcagagatgcagggaattgaaatttggtatgttaatttggaaggaggggggcaaattcagtccataacaaaaagaatcataaattatttttccttccaacatgatctcttcacctcttctccttccagttgattcaacaccctgctgccagatgaatctgctcagattatatcattcctctactctaaattatccacaatccccattgcatgaaaaacaatgttctaaatccttagcctgatcaaacaggctcttaactctgcagcccaagttcaccattcagcctcacattcatcttcgccctaggtgacctacccctcctgctgaactggtcctcctcaggaaactcctgtttcttcttattctgggttgcaaagcaatccagttttggctgggcctactcctcaactcatcatcaggtggtggggggagggttgactactcattttctttctctcttttttgactttattcaggaatgattggcaaataaaaattgtatatatttaaggtaaacaactggttgttttgatatatgcatacatggtaaa

SEQ ID NO: 908748 - DNA, 588 bp, Homo sapiens
gtaggaaagggatattttctgcttgagattaataactggattaatttaactaggagaatctcatacaaatcaaatgctaatctgtttgcaaataggctgcttatatttttttctgtctccaagtctgaattttcttctggtgctgatatggtttggctgtgtccccacccaaatctcatcttgaattgcactcccataaatcccatgtgttatgggagggacctggtgagagataatttgaatcatgggggcggtttccctcatactgtactcgcggtagtaaataagtctcatgagattggatggtttcatcaggggtttctgcttttgcattttactcattttctcttgccaccaccatgtaagaagtacctttcacctccctccacaattctgaggccttcccagccatgtggaactgtaagtccaattaaacctctttttcttcccagtctcaggtatgtctttatcagcagcatgaaaatagactaatacagatgccatataaaaattaggagawaaaagaggaagtcaaattgtccctgcttgcagatgacatgattgtatatctagaaaaccccatcatct

SEQ ID NO: 908749 - DNA, 679 bp, Homo sapiens
taactgatcagcaagtttcccatttgctaagtaacattctcttccggattctcaggaattaaaagcwaatatgtcaaagcaaaactcagtgaaacttactgatttttttttcctttagcaccaagaaaagggctgtggacttagagatgtaaaataaatattttttttggtattaaatggttgctattaaaacaaaaataaatgtttttggtacatatgcatacacacagatatacctatatgtatatatatttcattagttttctaaatgagcttgtgttacctttatgttctcaaaaaaaaaagccaataaacatgacagtggggaaaaattaatccattcttatgtgtaggcaacgaatattttgcacttgagattaattatccggttacgttaactagaagaatctcattcaaattatgccattcaaatatatatataaaaatatgtgtaactgtatatgttttaaaatatatgtatatttaaatatgtgtatatgtatatgtatataggtatatgtatttaaatatatgtatatatttaaatatatgtatatttaaatgtatatgtatgtatttaaatatgtctataaatttacatatgcttatatacatatatacatttattcacatgtatttatatatgtgtatatacatgtgaacaaatatacatatgttt

SEQ ID NO: 908750 - DNA, 619 bp, Homo sapiens
tgagtctaggagttccagatcagcctgggcaacatagtgggattctgcttctaccaaaaaataaaaataaaaaataaaaaatgccagtcatagtggctggcacctgaatctttgctgcttgggagactcatatgaacctaagctgatttgagcaggaatataatttcagtccaggaggttgagtctgtagtgagctatgatcattccatcgctgcagcctgggcgacagagcaagaccctgtcacatacacaaaagaaaataattcagaatgtgcacaaaaatgtataaagatgtttctgaaagttgcatttgtaatactgcaaaatcaatgccacattgagacagaggtaccaagattaagctggagtcaccactgacaattgaaatctggagtcagaatgctgtatctaagtgggacaacagtttctttcctgcagcccaccattaccatgcagcaaagttgctctattacttctgaattttccacatttttaaagaaaagcagaaaatccagtttctaagacaaaaatcaagttacaagtaytgacagaaaaatcacttttaaataattgtaaacagtaacaacacactttaacagtaaatctaattcagcctgat

SEQ ID NO: 908751 - DNA, 608 bp, Homo sapiens
agtagtcctcaagaagaaacaagtttagaaccagagtagggagaaaggctacatggtayggcccctcaatactggatccatcttcaacatgtgcttggccagaacctacatctacctaccccttggtagcaaaatttcccaatgcacagacttttttaaggagctgaattaaacttaggtgaatatcctaaactgtcagtttactgctgagaacatgctgcttatcaagccaggctcccagcaagagtccatatccttggattttcaatgacaacaagatattccctataacccaggagctacaggtgagtgcttgagagcttttacagacaataaaaacgatgtgaagctggcttctttggaagggcgaaagaaactgcaagaaggagagtgcagggaggcaggatggctgatagagaagagtggaatgttgagaacattgcttttgtatgacagctcttccagaggtaaggaagtagtgtgtagcaaaaaataaaaaaaattaaaaaaattaaaaaattaaaaaaagcaaaaagttaagtaagaaatgagctatctctgtaggcacatatgtaagtttagcaaagaaaagagccacaggagacata

SEQ ID NO: 908752 - DNA, 641 bp, Homo sapiens
cttcataatggtttgagaatgtcttctcaaatactgtgtaaagaataatccagtattggctttattagtgaaacaaaattgagaatatcttaaaataccgatatcaagattattaccccattcaaagatccagcagccagtcacttagtggactaaattcatcttgacattgttttgattttttatttaatttcatctaaggagagacaatgaggaaatagaagcactgaagtgttttgatgttatcactggagctcaagatctgtccatcctttttctcactttacgaccactaaatcctacatacctgacaaggcaggggctcttcccaataatggcaagcgcttccatcagagattatactttcttgggaagaaacatacatggttcacaaaaggcttcacagattactgatacttcaacctaatgcaaagtcctctttctcctcctaaattggagaatctctgatttaaaaacacaataaaatcttagagtttttctatttttttaaattttgaaggaaatctaagagagactcaaattcaaacttaggcaccttcaatgtgtttcaaaaaactcaactagtaatatctaaattttttcygtgagaactgctttgccttacatttaggatttcccta

SEQ ID NO: 908753 - DNA, 498 bp, Homo sapiens
aaaacttccaagggccagaactagatcaaattgagcaacaaaacwaatagatatgtcatttgattataaccaaaagagtaaaataaacatctatgaacccatagagatataaacaagtaactgaacagatagaaagaaagatatacagatagataaatagggaagcagagacagctcacccatacagaaaaattacaattaataatgtagaaggatgatggaaataggaattcatcgttagaatcccaatgtaaaaattgttgaagtcgggattccctaatagataccaaaataagtgcgaaaaagttttcagtagaaattagtaatttatgtagtctaaaaatatttcctccaagtaaaagtagtaactttcttcagaaaaactcagcagatcaccttaagtgatcaagttaaatgtcaccagtaataaaaaatattgacttcatgaaccttcatgctaagaaaggctcttcacttctttggtattcatattctcaa

SEQ ID NO: 908754 - DNA, 498 bp, Homo sapiens
aaaacttccaagggccagaactagatcaaattgagcaacaaaactaayagatatgtcatttgattataaccaaaagagtaaaataaacatctatgaacccatagagatataaacaagtaactgaacagatagaaagaaagatatacagatagataaatagggaagcagagacagctcacccatacagaaaaattacaattaataatgtagaaggatgatggaaataggaattcatcgttagaatcccaatgtaaaaattgttgaagtcgggattccctaatagataccaaaataagtgcgaaaaagttttcagtagaaattagtaatttatgtagtctaaaaatatttcctccaagtaaaagtagtaactttcttcagaaaaactcagcagatcaccttaagtgatcaagttaaatgtcaccagtaataaaaaatattgacttcatgaaccttcatgctaagaaaggctcttcacttctttggtattcatattctcaa

SEQ ID NO: 908755 - DNA, 498 bp, Homo sapiens
aaaacttccaagggccagaactagatcaaattgagcaacaaaactaatagatatgtcattkgattataaccaaaagagtaaaataaacatctatgaacccatagagatataaacaagtaactgaacagatagaaagaaagatatacagatagataaatagggaagcagagacagctcacccatacagaaaaattacaattaataatgtagaaggatgatggaaataggaattcatcgttagaatcccaatgtaaaaattgttgaagtcgggattccctaatagataccaaaataagtgcgaaaaagttttcagtagaaattagtaatttatgtagtctaaaaatatttcctccaagtaaaagtagtaactttcttcagaaaaactcagcagatcaccttaagtgatcaagttaaatgtcaccagtaataaaaaatattgacttcatgaaccttcatgctaagaaaggctcttcacttctttggtattcatattctcaa

SEQ ID NO: 908756 - DNA, 648 bp, Homo sapiens
catattatcttacacagatctttctacctgggatgtktttccctccattctttcccaagttagcatatatgacaacttcatatgtcaggttacattgccattttctcaaagaaacttttttatcccctctttctagacaaattcgtcatagtatgtagtcttatagcactatctctccttcttagtagctaaagcagatataatgtttcatttttcttagatttaataatgtttttcttcaggaaaaataagctttccgtatgggaatggtcaaaacctttgcttgccatttctgaaatatttattagtgctctattctaattcttctgtgttgtctgcataacaaggatcctgaagcctgaaaattacattttctaaactcccttgcagctgggtattgcaaggattggataggttctgccaatagtagtctctggaaagaagtaagattcctgctgggagggaaaaggcattctgcctctgtttctagcataagccttggtggtagctacaggtgattatgtgcccgaggcagcagcatcagtagtttcagtaatgaaagcaggaaagctcctgcctggtctcatcgccctaattccatcacatgtgtaacagattcctgcattgaatccctcactgccttgctta

SEQ ID NO: 908757 - DNA, 563 bp, Homo sapiens
agggtgcctcatatggatgtcttataggatgggatacctaaggagagaagaattatgagattaaatactagacctgtgtgtgttttgttttgttttaaggaattagcaggtattccatgcaaacattgtttcttacagggctgagaaccgggttttatagttaccctaaagagcaaaacccaaagactccacataagtattatgcaatgcccctttatctgcaggtggtcttcctcaatgtgaccttactttattcaaacatattaaactgttttagaattgtttttgtccataacttatataatatatcctctcagaaaaaaaaaatcctacgttgagtagacaaaaaatagcatctcactttcattccaagaaaataggagtagacaaatccgggttagtaattaacaaaaataaaagcttccctcaacagctgttcacacccctgccccattctaragagcacaggcagaacaggcccaagaggaaagataaaacagcttaagctggatttaaaatagtgtgcagcaatgtttaaggctttttctctctccagccagaaa

SEQ ID NO: 908758 - DNA, 650 bp, Homo sapiens
ccaaatctggcttgcaactcaaagctaaacatgatttttgcatttttacatggttttaaaaaacaatcaaaggaagaatgggatattaagacatgttaaaattctatgaaatgtaatacataatgcatgtaatacatactgttttattcgaacatagacacgctcattcatttacttattgtctctggctgcttgcacgctacaaaggctcacagtctaaaatatttactatctggctctttatagaaaaagtttgtggacccctttctaaagtgataaatgataaatatattgccctgacaaatttctcactgacgaattgtggaattgtagtttttaattattagaaaatagtgaagcattttgtgacttatctcagtaattaatttctaaaaaaccaattctaaatagacattgcagcttattactcattctaacgataagttgcaagtccttaattgttccaaggggtgtgttttctcttacactaaaatgatgtatgactgatacaaaccaggaaatttcttcaaacgcctgagtgaaacaaagcagaaaacatcccatgcacatgcatattcacttggcaggaacattttsctgcttagcttgaaaccaaaacaatgaaagctagtaaagacagagcacgtgga

SEQ ID NO: 908759 - DNA, 610 bp, Homo sapiens
aacatgcagatttgttatatatgtatacatgtgccttgttggtgtgctgcacccattaactcatcatttacattagctacatctcctaatgctatccctccccccttcccccaccccacaacaggccccrgtgtgtgacattccccttcctgtgtccaagtgttctcattgttcaattcccaattatgagtgagaagatgcggtgtttggttttttgtccttgcgatagtttgctgcgaatgatggtttccagcttcatccatgtccctgcaaaggacatgaactcatcattttttatggctgcatagtattccgtggtgtatatgtgccacattttcttaatccagtctatcattgatagacatttgggttggttccaagtctttgctattgtgaatagtgccgcaataaacatacgtgtgcatgtgtctttatagcagcatgatttataatcctttgggtatatacccagtaatgggatggctggatcaaatggtatttctattcctagatcctttatttatcagacaagcaaatgctgaggaaattgattatcactaaactgtttctatgagaaatgctcaagggaatcctaaacctggaagtgaaa

SEQ ID NO: 908760 - DNA, 392 bp, Homo sapiens
aacactgctgaaagaaataatagacaatgtaaacaaatggaaacacatcccatrctcatggataggtagaatcaatattgtgaaaatgaccatacttccaaaagcaatctagaaattcaatgcaattcccataaaagtaccaccatcattcttcacagaactagaaaaaaaaatcctaaaattcatatgaaacaaaaagggagccctcatagccaaagcaagactaagtagaaaggacaaatatagaggcattaccctacccaacttcaaactatactataaggctatagtcaccaaaacagcatggtactagtataaaaataggcacatagaccaatgggacagaatagagaatccagaaataaacccaactgcttacagccaactgatct

SEQ ID NO: 908761 - DNA, 602 bp, Homo sapiens
cactaaatggaaacgctagagcagtttttgagggaagaatctacgtagatgattctaagwtaacatttctagttgcccagggcctgggcaaagcatgcatagaatctagaaatcttcctgaacaaaaaggaggagtctcaaacatttcagagaactggtgaactagaataggaccaataatactctaacactcattagatgaacatcagaaagtcagataataccaactgttggtgaggaagttgggaaactctcttgcactgttagtggaagtctgagctagaacagaaattgtggggaggaatctggcagtccttagagaaaccaggtcatatacatggacacccagtattcccactgctgggtgtacaccctagagccactctgacacaagactataaggaacatgtattagtatatttattggtgctctatttgggaaggcagaaagttggaagaaattaagtgtccatcactggtggaaaggagtagttaattgtgcaacacacacagatgcatactctgtctgtctgtctgtctatctatctatctatctatctatctatctatctatctatctatctatcatctctgtctataga

SEQ ID NO: 908762 - DNA, 572 bp, Homo sapiens
tgttttgaaatgtgaggacatgagatttgcgaggggccatggacagaataatatagtttggctttgtgtccctacccaaaatctcatcttgaattgtaatgcaaattgtaatccccacatgttgggggaaggacatcatgggaggtgattagacatggggatcatactgttctcatgataatgagtgagttcttatgagagctgaaggttttataggggctttcccccactttactttgcacttctctctcctgcagccatatcaacaaggacatgtttgctgccccttccaccataagtgtatgtttcctggagcctccccagccatgcagaactgtgagtcaattaaaactattttgattctaaattacccagtctcagtcagttctttatagcagcatgagaacagactaatacagtgacccactcctttatatttgtttaactgagttgattcaatgaatccatctcacagctctaagtttttttcctcartttagtcccttctgctgttaatacttccagttaaacaatgaaatgctcatagtgagtttctcagctcttagacgagt

SEQ ID NO: 908763 - DNA, 509 bp, Homo sapiens
ttgaagatctgctcagagtgtgctggttttcttgagagtcagctctttcagtggaggatcttcctggctctgtcttgctggccattttggctcttctgtcttttagggtttccttggtgagtatcaggtgttcataaattaaggatttatatgttgggtttaaaaatcaagattgtaaatcaagatatctttagtgtgatgaaaggaagtaaattataaaatgtatttaggttactatgttgctcttaataagtagtccagctgccacattttaaagtgtcttttttttttcccctatggttgttttaaggatttctttttctctgtctctctctgtctttccggctcttgttttctctctttctctcacatcagatttattgttaagtgttaattcagtggttattttttccttgaaatttactgtgtttcttgaatggacacatgtatctttcatcattttggaaagtttaarccattaagtattcacatatttatctgctccattt

SEQ ID NO: 908764 - DNA, 630 bp, Homo sapiens
tattttaaaaaactataacattaaaaaaaaaatcctgtccctgcatrtagctcatttactttaactcttataaatcctattaaaggacacacaaggttttaagatgacattttgttgttgttgttattgatgctaagggtagtgaagcaggatatttccctgacccctttgagggacatgcaacaggggtgcctcatttattcagccactgctctcaactcttcatgggagggagggattgtgtggctgaatgaggcagaaactggagtgcatgagtgctggaactggccagccacttcagtgctgccagaagcaaactctgtgtgggtcccacagcagcatccaggttgctgagggcaggggtgcctgtgacccctgaagccccagagggagtgttacagtgctcttttagctctactgtttgcagatggctaaagcgtaaacagctgagtgggccctttgcctcattgggtgaggtggctaccctccaccagcgaaggcaaaaggccagtgtgacagccttttgtgtccacacttgtggttgccaagctcttatctggcatccaggaaaaatgaggtcgcatgaatgaattcaaggatggtaaatgtgggggattttactgctgatga

SEQ ID NO: 908765 - DNA, 617 bp, Homo sapiens
tgcagtgaacacaataaactattgatcataaaagaaattgctttctataatatttgcataagatataattactagagcattaaaaaaaatactggctatctgaacaatggagtaaattactgaggtgaacttccaaaccaagagagtcaacctgaaaatttaacaaaataatccaaaatttaaaaaatgcccagagtaatagtattgttaacagaagaccatggcatctatagaggacaaagggaaacatttatttttcataaaaaacaatctgcagactggggaagcataacctccaggacaagtgaaggtttgctcttcaaaacacaaagaaaaggtctggctaaataggatgagtcctctcctcagtgtcaaacaggtctatttatgcaaatgaaagattcagacatgttccgttctgattggccaaaatacttgagcactgattgggtgattaccaagcccaaaacccaaagtctctctcagaygttttttcaaagaactgcttaggaaggtgaagattcctgccacagtttatcctggcacccacaacaaggactggattgacctgattctagaaagggggatcctgtgacacttttccatctttctgagaa

SEQ ID NO: 908766 - DNA, 618 bp, Homo sapiens
ggagatattgagcatgtggagagcaaataacttttyttttgggttcagagatctctagatcaagaagagatatacttcaagagctatacctttgtgtgtcatctaattctagacatgatttagatcatgaggtcctggagttcaagcctgaacggctaatgggataaaactttgagagaaggggcaaaagcacatttcacatatgcaaaggacaagaattattttgtccctaagatagataataatacattgtttgcaaaaattattcacaatactttcttccatttctgcacacagataattctgcaatgtaacttcactgctcattgattggcctaacttggtctgacaacaagtatacgatgcgttaaaagcagtatactatttccaaatttaggcctcaagggaccttgcagctattaacaaagattctttgcttagccaaattttagtcaggcttctgaaacgtctcctcaactcatctgtgcacttccttgtaaaactcagttttagcaaaatctttgctgaatcagtgcagcaagaacgccccatccctgaaatcttttcaccctagagttccaattgggatcttcatcctccaccatccccacgggtgct

SEQ ID NO: 908767 - DNA, 579 bp, Homo sapiens
aagcaaacaaaatggatattgttttagctgctaagtgttggagtggtttatcacacagcartagataacttttatagcaagtaagaaagtgatttgggacaaagaataggctcacgtttgtaaattgaaatttggagaaccacaatctcatgggtttctggggcctcaaaagtcacctagtctaacttattatctttttaccacacccttagcaaatatcataccaccttttcactatcagctgcagggatgagaaactcagtatcttccaagatagatcaggctgttttggattatccttgactttgaaagttatctgttggttccatatctgggaatataacctagggaaaaatattccaaatgtggaaaaaaacttttataaacaaagatatttatagcagtcatatgatattagaatattagaaataactgtaaatatccttttctagagaaataagttagcattaacttctaaatacaaggcagccattaattatcacattaatcgagggtttatagcaatatggaaatattcttaggaggcaatattaagtgaaaaagcagaaaaaatagtat

SEQ ID NO: 908768 - DNA, 600 bp, Homo sapiens
gctataagactcatcctaagattgaaagtcctttgtggttaaaaaaaaaaaaaaaatcactgcttttctgtggctagcacacactgagtaatcaaatggagaacttcatggaataaatacagtggttgacttctgctaaaaacattttgaaaagaggaaatggagcctttctactctttgacatacaaagcacattgctgtctaatggattccacagcaaaagcaaaatccaaacaaagcagcatcttttttctctaacctacatgcaatgtaagtgagattccaagtatgcaaatggtgggaggaaagaaatgcattttcactaccccagttattacatatggttgagaatatgaatagtaattgcccctgaattggaggattaacgtgcactactttttttcttctttttaaatattcgagtcagtctgatttttatttactatttctttgattctttttctgtaaaaagtagtattgccattagagtaaaaaatataagctccctctatccaggccagttgtctcttyctagatgtcagtaagactgtctcgtgtctgtcataagctcagtttttaaagtaagccatgacttcattt

SEQ ID NO: 908769 - DNA, 568 bp, Homo sapiens
  misc_feature 340: n = A,T,C or G
ttgcaaacgagagctctgctacccttgtgtggaacaatttgctttattaaatgagaggtgatgtgtgtatgttgtatacttagcacgttaagattcacagttacacagatggcggaagaatccaaggttgcccagggcttaacatgtagctgaatgtcaaaaggtttcaacagggtttcagagagcaaaacagggatatttttgtgagatatacttttctacccagcatagcacatcagagcttcctgtgggatggattaaacagagctaacctttatggactacttggtggtgtcagatactaggcagaaccactcacttctctaagccattatagggnaggtactattattattcctgtttttcaattaaggatactgaggcactgtgaggttcactgaaagctggactgtgaggaagattcgggccgtcggactccagaccccaagctctaacatactatgtaggtctgatacgatgatcatctctagagatgatccatggttacctaccagtttttttaatttaatktttattaaatatttattgtatgccttctttaagatag

SEQ ID NO: 908770 - DNA, 531 bp, Homo sapiens
aaagaaatacctgagactgggtaattaataaggaaaggaggtttcattgcctctgtgtcccaaaggctgtacagaaagcgtagtggcttctgcttctggggaggcttcaggaagcttccaatcatggcagaaggcaaatgggggagccagcacttcacatggtcagagcaagaggaagagagagaaagggcagaggtgccacacacttttaaacaatcagatcttctgaaaacacaattacaaaaacagcaccaaaggggaaatatgcccccattatctaatcacctcccaccagaccccacctccagcactggggattatcatttgacatgagatttgggcagcaacacagatccaaaccatattactcacctttcctctcctcctccatggctatttatattttctggcttagagcaaggcccaagagaacaaccataaatgctatcctctctcttgcccccaaggatatcacwgtccaacagaaaagaggacaaagtaatttatattttgatataataaattctacag

SEQ ID NO: 908771 - DNA, 659 bp, Homo sapiens
tcccaattgcattttagaactatttcaaaacttcaaggaaaaaataaaaaataaaaatgagttgatctgtagaaatgatttagaatgactgaaaagaactgaatgcatattttgacagcaagtttttttcctctatatatatatatatatatatatatatatatatatatataaaagtaaatgctttatgtcaatgctcagtgtgttcttaatctggaattctaaaattaccagaaaaaaagtttaaactgaaatagaagaaactgaaaaacaatctatttagtttttttaattagaaattgcttttattgaatagtcaattctgacattcaaacatttaagatgcaaaccacttcttcatattcctccacatttttctctctttgcataattacaaattttgtataaatagatttagggaaaggttaaccattagaattagaggataattcaataataatagttatatttggataaaatgatgtcacatacctgattcagtgaggatattgtactgcatatcaaaagagcatagagaaaatacagtttgagtttaatgaaattgaacaacaagaagccaaaaaattataagacattttctacytaaatatgctgttcaagctacaaatgataactaaaatagcaaattgcaagaaacg

SEQ ID NO: 908772 - DNA, 598 bp, Homo sapiens
ctgtggagaaataggaatgcttttatactgttggttggaatgtaaattagttcaacaattgtggaagactgtgtgtggtgattcttcaaagacctagaaccagaaataccatttgacccaacagttacattactgggtatatacccaaaggagtataaatcattctattttaaagatacatgcacacatatgttcattgcagcactattcgccatagcaaagacatggaatcaacccaaattcccatcaattatagactgggtaaagaaaatatggttcatatacaccacagaatactatgcagccataaaaaggaatgagatcatgtcctttgcagggacatggatggagctggaagccattatcctctgttactgcaaactaatgcagtaacagaaaaccaaactctgcatgttctcgcttataagcgggagctgaacaatgagaacacatggacacagggaggggaasaatacacactggggtctgctgctgggggaagcagggggagggaaagcatcaggaaaaagagctaatgtatgctgggcttaatacctagggatgggttgataggtgcagcaaaccaccatggtatatg

SEQ ID NO: 908773 - DNA, 602 bp, Homo sapiens
acaaattaggttgctcatgccaggacctagaagctcacagcaygcacaatggaaatgttcgcatttgctaatgtaaacaattgccagccccaccttatggtaagtattatgtcatcattctccctccatccaaattctccttccagctgttctgatagtcactcagactacagcctttctcagcaaattaatactgccttactacatctaattagttattgataactgattttcttcaattttgatggggtactcccctgcgactctgttaatgtatttcaaattatactgagatttcttgtgagataagaacctcccattagcttgccgttcccaaagtcttccatttctagtactcagtgcccatgaactctcaaatgtctttttagttctagtatccaaattcctgaagagatattttccatttttttctgttttgttttaacctaatactcgaatttgtcataattaacttttctaatataaaacacctttataaagggatttctctgggtcctcaacagaaaactactagcgtgaggaaagaactttggagtaagattgagattagtccaaattcttgtttcaaaacctaccagatg

SEQ ID NO: 908774 - DNA, 623 bp, Homo sapiens
gtgggaatgcaaaatgtggtggccactgtggaaaacattatggccattactcaaaaaattaaacatagaattaccatgtgatccagcaattccacttttaggtatatccctagaagaatcgaaagtaaggactgaaacctacatttgtacgccagtgtttatagcagcattattcacaatagccaataggtagaagcaacccaaatggctatcaatgaatgaataaacaatatgtgacatatacatataatgaaatatgattcagccttaaagggaatgaaattctgatacatgctacaacatggatgaaccttggaaaccttatgctaagtgaaacgagccagacataaaaggacaaatactatgattccacttatacgaggtacacaggacagtcaaattcagagagaaagacaacagcatggtagtccccatggactgggggtggggaaaaggggagttgtagtttggtgggtatacattttcaatacgggaaaataaaagttttagagttacttttggagacagatcacgttgcacaacaatgtgaatgtgtttaatgctactgaattgtacactcagaaaygatgaaaatggtaaattttatgttatgcatattttac

SEQ ID NO: 908775 - DNA, 599 bp, Homo sapiens
tagaacagacaactaatttttgaacattcacatgcacacacatgaattttgtttggcactattaatatgagacaaagaagtagtcaagggaaaacacaggactaagagtcatttctaactaacatagaatccagaccaaagacacgaatttatggacaaaataatatgtggaccaatcatttatggaccaaatatgtgatcaatgtaactcaggaatttttaacaacatgggagactattttatattttattgaaggacaaatgacaaaaaaaatctgtatattctgtctgattctacccatgaaaaactatatatgtatatatgtggaaaaaaacaaaaaagacacagattaaaggcatataacttagtacttggattatgggactataagtggtttttatttatttttaaatgcttctttatattgtctaaattttcggtattgaccatagactaatcttgtaataaaatggtatcattttaaaataatgtataattgcaatatttctaactttttaaagagaatgaattttctttgtttatatttactctgattttggtyctcaaggtgacttaaaattaccagatttcatcattt

SEQ ID NO: 908776 - DNA, 555 bp, Homo sapiens
tgattaaacatgattttttgcattactcgctgaatttagaccctaatcctagaataaaatgtgactccactgtgtgaaagaattttccttggctgtctggcattatatacaatttgatgagagggattacataaaagattcctctccttttctaatgacctccattacaaaataggtccattgacatgaaaagaataacgatgacttcaaagaaaattacggaaaatgttcttgtcaatctaaaaaatataaactgctcattaaagtataaaaacttccataaccatatttcttttactctgttttataattctttggaacaataaaagcttttaatgttcaagaaaagagtcaagtcaaatagcaacaaggagaatgtggattagtcaaggagaataatgccttggagaagaggtttggtaatgcaggaraaaaaggactatgtggtcagcagctgtatcctcctctacatggctttcagctcattggtggttatagaaataacactacatacagaaaatttttatgaagcactgaacgcaaataaaattagga

SEQ ID NO: 908777 - DNA, 591 bp, Homo sapiens
ttttttattagtaattttgaaatagtaacaatctatttgtttaggttttgttttgattacctttctccgctaattccrggtgctacaagtagtaatgcttatctagaattcagtaaaactttgatattctggatattctattatggcaccatctgggttaatgatgaagagaaaatagacttctaactaatggattttgagttcaacttaaaactctattctttgatattctgtgttattttgtagaactgtgagatgtgtgtacagtttggtagcagtaaaatggtattgagtgaagactagactgctgttttttattaaagtaggtgtggaaaagtagggtagaattgtaaagctacaggaccatttttctggatttaatagtaagtaatagagtcattgtcctatttacagtatattaatgtttttaacatttgagtacaaatttatgcttatattttgtctgccgtaataggtaactgtccaatgatacatatacctggttttacctttccggttgtggaatatcttttggaagatgtaattgaaaaaataaggtaagtaaacattaggaaataaaaaacattaaaa

SEQ ID NO: 908778 - DNA, 486 bp, Homo sapiens
agcaccagaaccgtgtttgtcttattcaccattgtacccttactgcaaggacytagaacatagtaggatctcaataaattcttaggattcaaaataaatgaatgaggatgtggtaggaagaattctaacatggcccccatgacattcatctcctgatgttactctgttaataatgttaccttacatggaaaaggggtcttgaagatgtaactaaggctaataattagtcaaccttaagacagggagattatgtggattaattttgtgtattaatcaattttacacaagaattttaaagtcagagagataagcatgtaaacatctctagataagagcccagctcagctgatgtcttgatttcaatcttgtgagaccttaagtgcagaacccagtcgagcccacctggacttctgacttacagagcagtgatatagcaagtgtgtgttcttttgctaataaatttgtgacaatttgttacccagcaag

SEQ ID NO: 908779 - DNA, 584 bp, Homo sapiens
aaattagttcaatctaaagggatttatttttaccaataaaattgtgtttcttcaaaatgcataacattgatacagatttgagatgctgccaggtccacttctcattagttttttttttgttacttgcaatgatagaatccccttatgtattggcagagtgttgtgccaaggcatctttctagtttacttcaggaacctcaaggagtaacaaacggtgaagaaaaaatattgatattaggagaataaagaccagaaactttctccttgttgttgttgatgatgttatttgtttgttttctactacagacattaactaaaacactgctcagagtgaaattccaaagctgaaagaacatttaatgagagaattttaatatgtacactgtggcttgggtggaaaaataacgaaaatgagtagcaaaatgttttctctggatatgaaaagaatagagaactattctgacattcaggattgagatatctgggagcagcacttttgctgtagaccagaggttcccaaacttytgcagctaacagagtccttactctggcctgatcactaccagctagtgatgtcattgcca

SEQ ID NO: 908780 - DNA, 598 bp, Homo sapiens
gcaacctaaactcaacgttacttataagggagtcatacataagaattctgtagttcagatctattattggttattagttagaaaacaggtktcttcctcaacaacttaatgtaagaaaataattcatcattatattcctatgtctttataactcctgtttcatagtggttacttaataaataatcataatgataaagaaggtaatgattaatgataaaattgatcacaacagctacttttcattggtcacatattgagtgccaggaactccgaaaacattatcttatttaattctaaaaacatatctcctaaaatgatatcacttattcctttcttatagatgagaatagtaagatataaagaagttgagtaccataccaaaagtcaaataattatcatgctaaaattgcaagatttaaaaagaaacatatctctaaacccaagtttcttcccctcccaaagaaatgtaagctgattcttttgagtgacagagtagatggagggatggatgtatgagttctaatgtttatctaggctaatgcatgagttctgttgtttaaagataccacacacacacacacacacacacacacacaca

SEQ ID NO: 908781 - DNA, 595 bp, Homo sapiens
aattgcagaataactcatttatcaagctgaacatccagtgcaaataatgcagaaacttagcagaaggtattctatattccacagcacaaattccttccttaattactaatttttctctcatgttcattgaagtattcctcattccagaaaattattttttatgactcagtcacataagcctcaattctcatcagatgtttaaaatacaattaatacataattgattgaaatataactgctgacttccaatttattttgcattgtggacacattttcttttaaaaaaaatctccattgccttatttttaagtggacaattttgtatttatttacattaggttacaggaaaccttctatatttgcattaaacccttatacacacacagacatacacactcacacacacacttttgaaatctaagttcatatttatgcagaatcactagtaaatgttgtgcctggttagatgaaaattcttattgacattcattttstaatttgagacacgctaaattgccaacattacatagtacctaaagtgactaagactatgcatgtaaagcacataatgttctacgaattctaaatgaggaat

SEQ ID NO: 908782 - DNA, 632 bp, Homo sapiens
cgggaatgtgatatcttctctcagttttttcagrttcctgctgctgacttttttctgttttgttttttagcctggctcccatggatgtcctctgtgtctacacagacaatttcagctgtttatcctcaaaggtttagcctcaccctttctgtggttgtcttacttctggggctttctttgtaaatttccactttctctgccatttgtgtgttttatatccttcaatacaccaaagcactagtgtttcagcgttctgctcccaaagctgctcatagattcacaaaggcacaatcaacaaagccccacacttgcagaggttacacagtgagttttcttcattcatgtgtagatcactttctggtttctttctgctttggggggaagaaaaaccctgggatgtcccctagacatttatatgttagagatcaatgaaggatttgggagatgtatatataaatttactcccattcttttagttgttctgtggcactcttaaatctagggcttcgtgttttagttcccagctatttttatacattcctgaactttgttctctgccacagtgagcatgtaaggctatggctttgtgctgctgtaactgttgtattgggatgtgccctcagtgaagacag

SEQ ID NO: 908783 - DNA, 564 bp, Homo sapiens
cccatggttattataggaacactaaatttgttggtggcagaattggaatctgagcacaattttgccacaaactcatactacctacataattatattctcaacactctgggtgtacttaaatatccttgggttgagtcatgaaaatggaacactttagagcaatgttaagatctctgaaaagtaggtaaatcctcaagtgtgagtacagtttgatacaatgatcctaaagggggaagattagggcagggagatgagtatagatctttatgaccaactaattttttcctgttagaatgcctaacattgattcaccactctaaatgaaaacagtcatccctggtttctgaaatgagtatgagttgcaggtggttactcactggtatatggttaatgtaaattccatgcaaatagttttttttttttttgcttgatgctgcattggttaatgtctaaatgcctatctcccaataaattccatccccaaaagagtctaaatgagtcactgcaaacrtgaacctccttccactaaggacaaacggaatgaagaaaagccagaaaagacag

SEQ ID NO: 908784 - DNA, 566 bp, Homo sapiens
tagcaattatattttgacataactaaacaataatctgtattgtgtgactacttaggaagtattggtaatgttgtactattaaacgtttactagttgcctagagtatttctcattgagtaactttgcatgccccatgctatacaagtgacttgatagactctaataaaacagtcccagaatttgttgtaaattccccctagtgcttaagctgatatctgagtcaccatagtttccaaattaagtacttccagaagcagccaaagagatacaagacgacaattaatgctgatcaagccaagaaatcaaaaatataaaaataaaaaaaataggagtggggagcaaggggaaagtatataatacgttgaaatattgcaactttttgattttttcattttaatgctgataaaattttttctttctttctttttttttwaaaaaaatttacacttatgtccctggtcaagtctgtaggaaaataaggaaaaaagaaaaatgttattgggggaaatgagactcatataattatagaaactacttcctgcaaaaataaaattctgggagcctaa

SEQ ID NO: 908785 - DNA, 659 bp, Homo sapiens
tgtgaaacccacaggtggcccagagcatggcagtgaccagagtcagtgtcaaggctgttttcctctgggctataccccccaccaggtttgtggggactgcagccaagtcaaacagagctgcacacactcagagctgcacttgcttcaggctttcccagggatggcttcaccaggctctatgggtcaaatgttcaccccgcgtcactgggaggcagtgcacctgtgtggttattatccaccagctgagaagccaaccctctgttcccaaaaaagctcctgggttttcattttctttaaaacgtagaacattcattgaatgcaacttgtcaagccctcagccaagcttaaacatttgccttgcaccaggccatcctaacacaaggactcaacgctgtccctggctgacatggctttaaaagagtttcagaagttgaaattcagtgagatcgtaaatacaccaggtagacagttgaatctgaagataaaaatcgtaaggtgatttgctagatccaaggagaggtcaggaaaaascaagcttctttcccgatgtcctaaaagttcaataattcttcaatgatagcttccctttattgagtgcttcttatatcccaggtcactactgtgcattactgctaatccctaaagacaactggttgttg

SEQ ID NO: 908786 - DNA, 468 bp, Homo sapiens
actgacaagtctttagaaatcttaactctttcaaccaattagcaatctgaaaatgtttgaatccccctgtgagttttaattcagtcttcccccccaccactcctgtcaacttcaagatatcctgcctctataggctgaaccaatgtatatcatatatgtattaatttaagtatttgcctataatttctgtcttcctaaagtatatggaaacaaatggtaacctcactgcctcaggcacactgtctcaggaccttttgagactgtcctctgccatgatttctcatatttgctcagaatataactctttaaatcttttacagggtttggatgtttatatgttttggctttgtccccacccaaatcttaaattgtagctcccataattccsacttgtcttgggagggacctggtaagaggtaattcaatcatgagggcaggtctttcccatgctgttttcatgatagtgaa

SEQ ID NO: 908787 - DNA, 556 bp, Homo sapiens
gttatataaagggaagttcccctacacrtgatctctttcttgcctacagccatggaagatgtgaccttactccttatttgccttccaccatggttttgagtcctctccagcaatgtggaactgtcagtcaattaaacctcgttcctttataaattacccagtcttggctatgtctttattagcagtatgagaacagactaatacagtaacttggtaccagatagtagggagctgctgtaaagatacctgaaaatgtggaaatgaatttggaactgggtaacagtcagaagttagagcagtttggagggctcagaagaagatagaaaaatgtgggaaagtttggaacttcctaaagacttgtaggactcagaagacaagaagatgtgggaaagtttggaacttcctagagacttgttgaatgtctttaaccaaaatgctgatagtgatatggacaataaggtcttggctgagctggtgtcagatggagatgagaaacttgttggaaactgaagtaaaggtcactcttgctatacaaagagacacgacattttgcccc

SEQ ID NO: 908788 - DNA, 609 bp, Homo sapiens
tggctcacacctctaatagaagaactttgggaggccgaggagggcagatcacctgaggtcaggagttcgagaccagcctaaccaacatggagaaaccccatctctattaaaatacaaaaaattagccaggtgtggtggcgcatgcctgtaatcccagctactgtggagactgaggtaggagaatcacttgaacctgggaggcagttgttgcagcgagccaagattgtgccattgcactccaccctgggcaacaagagcaaaactccatctcaaaaaaaaaaaaaaaaaaaaaaagaaaagaaagatcacagaggcgtctcctttagttgagacaatcagaaaaggaaagaaaagatctttctgaagaatgaataggagttgaaaacagagtttgtgcagtttggatgtgggaggcagggtgtgtatagacagcgatctagacgataggatgataaagatcttgcagttggaaaacagtgtgacatgttccaaaaamtaaaagaaggccagatggctaaataggtagtggggccagcatagcatgagatgaaattgaagagattgacatggacgggccatatcatgacaacccctatgggccacagtgag

SEQ ID NO: 908789 - DNA, 609 bp, Homo sapiens
tggctcacacctctaatagaagaactttgggaggccgaggagggcagatcacctgaggtcaggagttcgagaccagcctaaccaacatggagaaaccccatctctattaaaatacaaaaaattagccaggtgtggtggcgcatgcctgtaatcccagctactgtggagactgaggtaggagaatcacttgaacctgggaggcagttgttgcagcgagccaagattgtgccattgcactccaccctgggcaacaagagcaaaactccatctcaaaaaaaaaaaaaaaaaaaaaaagaaaagaaagatcacagaggcgtctcctttagttgagacaatcagaaaaggaaagaaaagatctttctgaagaatgaataggagttgaaaacagagtttgtgcagtttggatgtgggaggcagggtgtgtatagacagcgatctagacgataggatgataaagatcttgcagttggaaaacagtgtgacatgttccaaaaactaaaagaaggccagatggmtaaataggtagtggggccagcatagcatgagatgaaattgaagagattgacatggacgggccatatcatgacaacccctatgggccacagtgag

SEQ ID NO: 908790 - DNA, 664 bp, Homo sapiens
tactactacaggaataaactctccaacactgcattataatctaacaaggtaaagtttaaacaggagccttgccataattcaaggagaaatttcatccttttcatagatgtcatattgatcagcagtcagaaataatcataactgaactctgtctttcctcgttagtttgatgactaaaaatgctagaacaattaacaagaaaaaaattcaagggcccttcaccaaacaacatttgtgagagtagcattatttggagcaaacaaactatgcactgaatgagacaaaaattttatccttgagagccacatcaccaaacaggaggcaaagaaacaagtgtcatgtgtggatagtgacacatctgggtgttaggctgtagtctcatcattcaattgcacagcatcctgaacaacaaaatgccttaaagcttgcacaagcaactttctgacctctctgcacttgatgtggagccatcggcatgtcccaaatcaaatgacaaagctgtcaagtctgccaaatagtgttctcattttggaagacaattgccagccacttactgtgccatagttaaaacagcagttcataaacagaacatcaaattcktttgctacccccattaattgccttatacctgaaacctcattactctcaaggaggaatgagcaaa

SEQ ID NO: 908791 - DNA, 607 bp, Homo sapiens
tgatgtaactctagttttcccataatttgttcttaagttggtgcttactcaagggagactcaagttttttggaggtgaattcagcaattacttttacaaayttcttccgtccctaaggttgtaagtaaaaaaattataggattctctagggatacagttcctgacttctgcatattccaaagactcagttattctgatctaaagaaaaccttccccagccatacatttcttggagtattcattgaatatatctgtatttgatggcattataataagttggggctccagttagaatgtccgaaagttctcagaaaagttaaacttttctcacaaattcacagatttgattttttttgtactgcgtaaataatactaagttaactctatagaatcctacatttcaactgtttaaattctttctgtttttcatatttttgttaattccagacaacatgcaaacatttttctttataccagtagaattgcagcagaaataaattttagttagcgtttgccactttacatcaataattttctgtgattttgcattttttatagtgtatgtaatattcttttttaatatttaaagaatattttattaagtgga

SEQ ID NO: 908792 - DNA, 601 bp, Homo sapiens
tttccccatggcttgtttttgtcacctctgttgaagatcagatggttgtaggtgtgtarccctatttctgggtttgctattctgttccattggtctatgtgtctgtttttgtaccagtaccatgctgttttggttactgtagccctgcagtatagtctgaagttaggtaatgtgattcctcagcaataagttagattttgataaaacagtatatccctctcaccaaaatattatacattagaagcaagaacactctactatggagtgtttgcatacattagtctttaaacaaatttaatttaatgttaagttccaggatacatgtgtaggacatgcaggtttcttacataggtaaatgtatgccatggtggtttgctgcacctatcaacccatcacctaggtattaagccaagaatgcattagctatttatctggatgtcttccctccccctatccagctctgacagaccccagtgtgtgttgttcccctctgtgtgtccatgtgttctcattgttcagctcccacttacaagtgagaacatgcagtgtttggttttttgttcctgtgttagtttgctgaggataatgacttccagctcca

SEQ ID NO: 908793 - DNA, 572 bp, Homo sapiens
ttggcgaatagcaaagatcatcccctagagcatacagggtcattatttggagaagggattcagctttcctgagatcctggrggcagtttcctctgtggatttgctccctatttctgttgacactcattcatgacctgcggcttctaaattcgtacctctgctcctattatatggctcttgcagaacttgaaaaaatatttaatcagagtttagtcgggtcaaattttaaagtgccaaggcttttgtttaatattgaaaaatatggatgaacttagaaactgaccaaaagatattattaggagtgtaagataactggaagtaaaacaggtgtttgccttcatttggttatatagatgagaaaggatgtagaggtctcttcttgtattaattttagattaatttataaccatttagtaaccattttagctaaaatcagcgtaaaaagaaagggcaataagaatttaagagttttaaactttcctctagcttgttttagtattacatttttgttactacatagttaaaatcacaaagagatacatgaattggaacataattacatgtaatttaaa

SEQ ID NO: 908794 - DNA, 622 bp, Homo sapiens
ttcagtggacagctaagttttgtgcagtactttcatatgcttcccagagatatccagtatgagatagagtctmtgagacttccttggagctatttagagttcctgaataggatttttatctctcctgatttggtttggtcatggggactggaaatgggatgagttgaataatccattatctgtcattgcacagggttctcaacctgatttctcaactactcataactgggaccagataattctttgttgtgttgtgcattgtaggatgttcagcagcacccctggcctctactcactagatgccagtgacactccacgcacagttgtgacaaccaaatatgtctccagacattgccaaatgtcccccggggtaggggtattatccacacttgaaaaccactgggctaatagaaggctgaaggaaaaatgtttctggttgcaagaggcttgcattaaggatgtgagtaaggatattgctctataacaaacacaaatgggactaactcagatttaggggccctgtcatgtgttccagtcctcctttgcacatgtccttacttagctattctcattaatgtaccataatccctggttttcttattttacttgcccattattttac

SEQ ID NO: 908795 - DNA, 651 bp, Homo sapiens
ggaagcaaaacagaagccagaataggaaaaggggatttgagagtgctgtaggtagcattggttgcattttaaatagggtggtcagggtagaccttactgaaaaggtcaatgttaagcaaagtcaaaaaaaaaaatagccttgcaaatcatgtgaagggttgtctctggagttgtgccacacagcaactctggagccagggtccagaaagtagccaagtaagaaatgagattttagtgatgaggaatcattgtgcagatcataaggcccttgtaaaatttgggggtttacttgaatcaaatggagatccactggaaagttttgagcagaagggtgatataatgagactttaagttttaaaaggatcagtcaggctgcttgcaaggtgctagggagaggggtagagggtaggtgtggaagcaagggatatggttaggagaccactgcagaaatataggcatgagatgacagtaactcagagcagaattatttataactagtccaaaacatttttatccctgtggctatgtctcaaaaatatgtcagctatttcyttttggttgtgtttactacagagaaggataattcttcagtgtttttaagaacatgtaaatatttttgacccaagtgaaatttgggtgaacataggtgct

SEQ ID NO: 908796 - DNA, 556 bp, Homo sapiens
ttaaaaataggcaaaacaggcatggtgttgcacaccagtggttccagctgttcacaaggctgagataggaggattgcttgagccagagaggtggaagatgcagtgagaagagatcataccactgcactccagattggatgacagagcaagatcttgtctcaccaaaaaacagcaatgacaacaacaaaacctgaaagagcaacaacaacaacaaacttcctactctttctatccataataaaacattatatttgtatacaatgccattatatttgtttacaatgctccatcactttaaaggtaaaaaatactttgacatcttatcacatctcatcacttgtaatgcagcatattacacacgttttgttttcttcatttactgaagggagaatccttttatagaagttaattttgtttctcttcaagcttgagatcttattggaaattgagagcaagraagtagtcagtcatgacctggaaaaatactagaagaaatgtggcatatttggcctgtcttcatacttagctttgtgaaaacagagaagcagaagggcac

SEQ ID NO: 908797 - DNA, 620 bp, Homo sapiens
caaaactagctgtgacttcctattgttttcaggacaaatacaaacattttaggcttgcatttaaaactgccataaccagatgtcttctacttctagatttagctagaagaataacccagcttaattttattagaggctaaggcatgaactaatatagtcctaatttatagaccttgacatgagaaaaagcattgtctatttaccaatcatgccaactaaacttaactacccttactcttccatcctttaattatcatggttacttttctgtctgcaagttttgccttaaaattctgcttattaaatatgtcataagtggttagggaaaaaacttatccactacttttttatccactactttcattgtgaagccatccattaccatactataaaaatcgaattactgcctttttgaaaacttattgctacagcaataattctgcacttagttacattttgtattgttatctattttgatgaaggcagacatcttgtctgcttcactcactgcaatatccacactcccaaacatagagtttttaacatccagtagcaaaatcaagtggttaagagcacaggctcaggagcaaaatggycagagttgtattcatggacttggc

SEQ ID NO: 908798 - DNA, 592 bp, Homo sapiens
aaaataaagtccagaagaacttaactataacttgaaataaacttttattcaaaacctcacattttaatrttgttttcaattttagttcatatcaaaacatactataagatatattttctcctaaaggtgattaagataaccatcctcttgtacacggcttcatgtaagatacacgttatcaaaatgaaatcagtttgggtaaggtaacagttaatacaagattagacttatgctttattaattctggccaccaaatctcgacaacaatccacaaaacccagatatctgcaaacaagtatgtctggatttttgtttaaatcaagaaatgataggttaagttgagaattgattaactgtctctatacaatacatataaagtacactatactactcagattatataaccatattactcccataaatgttaaacatgaatattctaaattaatgttaagtaccaacatgacaaaaaataacaaaactataaaactgttgaaataaagtagtaggggtgctaatttacatagggttatttaaaatgcctttttggagaaagaaatatctattctgaaacctacaatattaaaaatac

SEQ ID NO: 908799 - DNA, 604 bp, Homo sapiens
tgtgtattggcacaatcatagcccactgtaacctccaaatcctgggctcacttgatcttctgactccagcctccctccagagtagatagggctacacgcacacgccatcaccctcagcttattcttttatttttattttttggagagacggagtctcactttgttgcccagttgctcttgaactcctgacttgaagggatcctcctgcctagggctctcaaagtgctgggataataaatatgagccacccagctcagctgtacttaattttaaaatacaatggttttcaagtaaaaaaaaaaaaaagaaaaaagaaaaaaacaccaaataaacaatagaacattaatcaaaggaaagtgagatttcatgttcttgttgaaacagatcatatgtgtcctcttatctagtcactgactttttcaatgtaagaaatgaagaaaagctattaatgatttataaaaagttaaaggcgaawgtcagaatctttaaaaagtgtttcaaataatttggcgggcaaatttatgctattttcagaacatacagtgatgagatatagatatactcatcatagtactgacatcataaaagaaacaaaacctgacaa

SEQ ID NO: 908800 - DNA, 586 bp, Homo sapiens
tggcatttataaatacattgctttctctcgtggaaattttaatataaattaataaaattatttttagttaaatagagttcacaggagaaaatcatgctttttacagcaggtaaagaattggcacatgcattattttaagaatgtcaataagccagctgatttttaccaaaatacaaagccatataaccaaaatggagttcacaattctgcacatgaggaaaagaaaattacttagactatgtggggaatagtggtacctacttcagtttggagtgaaatattttatagtaagaagaaaacttcatggtttaattcacttttcagcaaaaaaataaaataaagtttgctattaaaatattccaggaaattaccactaattctgtttatttgaagcctctgtcctatatatcgggaggatgttttttctcagaaagatgaaaatgcaatagtgcacaatgaatctgaaaacaacaaaagcrattacacttcttttgaaaaatggaaaacatacacacacacacaagcacacatgacacagataaaacgaactggtaggttttgagctttgtttgatgtggaactttcc

SEQ ID NO: 908801 - DNA, 623 bp, Homo sapiens
tgggattatgatttggattgcattgaatatatagttcaatttgagtgaggataaatttttcagcattttagattatttcaatattttattggcttatatattttattaaaaggagctttttaaatgagttggtcaatttttaaatattaattatgatatattattttttattatccttttcaatattgcttctgtaccattctcctcttttctttttgggattccaattacccaaattagattttttcactatacctattatggtcttttcagtgtttcagtttgaatgttttatattgatttgagtttctatttatctactatcaaagattctattgttaaagttatttactgcattcttaggcttgttttgttataaaatcaccatttgactcataaatatatttttattttattgtagttatctcttattttatttactttcttttttcttctctattttattaaacatggaactcatagtcgttataaggtgactttttctgttgtaggttttcacttttgtgttttggtcccatagyactaagaatgcctatttttacttgaatactctgcattttatatttattattttaatcctcctcatttgaaagtttaccatt

SEQ ID NO: 908802 - DNA, 379 bp, Homo sapiens; identical to SEQ ID NO: 901875

SEQ ID NO: 908803 - DNA, 618 bp, Homo sapiens
agcttctataaaacagtatttttgtcaggctttcatgcatctccatttctrtaggcttagtcactggcattttattttgtctctggtgctgtcacctttccctgtttgatcttgatccttgtggccatgcgtagatgtctgtgcacttgaaaaattaggtacttatacttgtttttgtagactggctttgtctggcagcaccctttaatagtaagcttgtccagagatccttggcaggccatctcgtatggtccctatgccaaggacagcttagccattgcagcactggggggaaccctaagcctgggaccactatgtctgctgggggtaggattggaaaccttgtggctgctgaggctggcatagtgcttgagcaagcccaagagactctgtgcttcgtgaagctctatcgtccattgagatttgtccagagctgaacactgctgtagtcagtaagtagtgatgtcagctgcagattgtgtctgctttcgaggagcttgtggttacccctggcatcgtggggcaggtctggaggtcattccacgaggtacttgcctggaatcagggggtcatgggagtctgcctgatgatgggcttttctgtggcaggcctggtttt

SEQ ID NO: 908804 - DNA, 618 bp, Homo sapiens
agcttctataaaacagtatttttgtcaggctttcatgcatctccatttctataggcttagtcactggcattttattttgtctctggtgctgtcacctttccctgtttgatcttgatccttgtggccatgcrtagatgtctgtgcacttgaaaaattaggtacttatacttgtttttgtagactggctttgtctggcagcaccctttaatagtaagcttgtccagagatccttggcaggccatctcgtatggtccctatgccaaggacagcttagccattgcagcactggggggaaccctaagcctgggaccactatgtctgctgggggtaggattggaaaccttgtggctgctgaggctggcatagtgcttgagcaagcccaagagactctgtgcttcgtgaagctctatcgtccattgagatttgtccagagctgaacactgctgtagtcagtaagtagtgatgtcagctgcagattgtgtctgctttcgaggagcttgtggttacccctggcatcgtggggcaggtctggaggtcattccacgaggtacttgcctggaatcagggggtcatgggagtctgcctgatgatgggcttttctgtggcaggcctggtttt

SEQ ID NO: 908805 - DNA, 661 bp, Homo sapiens
agacaataaacttgagtcagtaagagatgcttcctatgttctaaggaaacttcctttaacacaactactctttggaattgttatcatgtagatctgsggaaatacagagatcttttaagtgaatcttgttggcatttgatttttataattttatttttcaaggcagtaatatttagacactaaataggacaataaaaatttcagagacttatctgaataataaagagtatctagcctattccatattatttatcagactttgtccttctaattatgacaatgttaataaacacatatattctctcatttccctcaaagtttcttcatgtgtgtgtgtacataaatgactcatatgtatgttatgataaaacaaggatgaataaaaggaaatttagattttttttgttttgagaaggtcatgctccgttgcccaggctgaagtgcagtagcatgaccatagctcacggaaacctcaaatttcttggctcaagtgatccttccatctcagcttctcgggtagctaggctttaaaaaaaaattgtagagatgcagtgtcactgtgttgctcgggctaatctcaaactcctgggcctcaagcagtcctcctgccttggccacctgaagtgctgggattacagatataagtcaccatgaccagcct

SEQ ID NO: 908806 - DNA, 517 bp, Homo sapiens
ctatttatagtctttgccactatctcttattttcttaactatttgcagtctgtcttatttttgtattgtgagagatctttatcatctcagacctgtgtccctttgatggccaccttgttcaaacactttttttatgtagtctgtggtttgccttttaaatcattttgtgacacacagagatttatttttcaatgtatttgaatagagtaccaccattttgattttgatttttaaaacacattattacaaaattattgattatcttgcagtcatgaagttattcttttctgttttgttccaacgtattttaattgttcacatttagtattttaatgccaataacatttatcattagtataaaatggaaatccagtttattttttatctttgaatgaaagtttatcttaggaccatttattagataggtcattttccccaattacattatccctaaaatataattatattatgaaaaataattacaaaamttgctgcatcattaattgcagtcttctga

SEQ ID NO: 908807 - DNA, 605 bp, Homo sapiens
aaattctgatatcctttcttctgcttgattgatttggctgktgatacttgtgtatgcttcactaatttcttgtgctgtgtttttcagctccatcaggtcagttaggttcttctctaagctggttattctagttagcagttcctgtaaccttttatcaaggttcttagcttccttgcattgggttagaacatgcccctttagcacagagttgtttgttgagataccatctcatgccagttagaatggcgatcattaaaagtcaggaaacaacagatgctggcgaaggtgtggagaaataggaacgcttctacactcttggtgggagtgtaaattagttcaaccattgtggaagacagtgtggcgatttctcaaggatctagaaccagaaataccatttgacccagcaatcccgttactgggtatatacccaaaggatgataaatcattctaccataaagacatatgcacatgtatatttattgcagcactatttacaatagcaaagacttggaaccatcccaaatgcccatcaatgatagactggatgaagaaaatgtggcacatatacacatggaatactatgcagccataacaaagaatgagtt

SEQ ID NO: 908808 - DNA, 593 bp, Homo sapiens
gtgcagaagtatgaatggaaaaccctgaatactattagtgtctttamttcctaagagaatacagcaagaggaatgaatattaactttgaatcaggaaaacttgtgtttttatcttgacttggcagttgactgactatgtaattctggccaagtgactctgagatgtaaaaatttctattttggtaattagttctaatttataaggtgcaagaaaccaattaggttataatgttcactttatggaagtcatttttgttcactatgtgttacattactgctaaagtaccacataattaaccatttgttcccttcttggttcagtgctttttataagatccacaataaattaacagtgctaaatcctgtatttcaatgcagaaaagtaaagtgaactttctccagaaaagccatttataggaactgtggaatcctaaagagatgagttatattaaagacacattacatttgaaatgaatgcatactcaatcttatgaacctagggtaatgcccactgtaaacactgttggaaaccttcaatcaacaactctttgatgccactaataagtttgcagtaatatggattcattcaaatt

SEQ ID NO: 908809 - DNA, 690 bp, Homo sapiens
gtgttggcttcaggtctgacccagaagagtcatagtggtggtggccacatgggtgcttgtgtcactccacccccagttttaggtgacttagaacagagagagaaaccctgtttgtttgtgagaaagtaaggaagagaacaagagtcttttcctgataatccagagaattctcccggttcttgtccaggaccatcaggtagtacctctacaagtctgcaagaaccacagtgttgctatgtttaaggtgtcccttaaagcagatacagcttacatcacaacacccaagtcctttcaaatatctgaaaagccttcccatgaaggatggctacaaataagcccagacaatgaagacaacaataaatacctaactattcaatgcccagacaccaaagagcatctactagcatcaacaccgtccaagaaaacatgacttaatcaaatgaacaaaataaggcaccagggaccaatcctagagaaacagagatatatgacctttcagacagataattcaaaatagttctgttgagtaaactcaaagaaattcaagatagcacagataaagtattcagaattctctcagaaaaatctaacaaagagattgaaataatttagaataaccacgcagaaattctgaarctgaaaattgcaaatggcatagtgataaatgcatcagagtctgttaatagcaaa

SEQ ID NO: 908810 - DNA, 620 bp, Homo sapiens
gaccaatagaagaaaaatgtaacatagagtcttgaagttgtgtcaatagaagaatttaaaaacatatttgcttttaaaaattgttttatggccatataatttgcattcaataaagtgcacacatcytaaatgttcattttgatgagttatgataattttatacactcctgtaacaaacaccctaagtaagatatagaacatttgtatcaccctagaattacattatatgcctttctattcaatttccacctagaagtgggagctactttctgatttccaccaacacatatcagtttgttttgcatagtcctggattcttataaattgaatcatgtagtgtgtaatcttttgtgtgtctgacttttttcactcaacataatatcgttaagatccatgcatatggttgcatgtatcattaatttgttagtttattgctaaatagtacaccattataggaaaatatcaaaatgtattaatccattctcttgttgatagatattcgagttgtttctattttatctactgtaattaaggctgttataagcatttttatataacatgtttatggacgtatgttttatttttatttggataaagactctagaacacaattgagtgat

SEQ ID NO: 908811 - DNA, 572 bp, Homo sapiens
atctaagacattagtggcagcaccatctcctcctggggtctcaagctccaggaccctcagacttgaatcgcagcaccagctcttccccggatctccagcttgacgaccttcagacttaaacaacaaaagaatcagctcctccctgggtctccagcaccacaacccacaaactagaagaacaccactcccccatggatctccagatccatgaccctcacactagaacaccaacacctgctcctccgtgggtctccagatccacgaacctcacactggaacaccaacactggctcctctgcgggtcttcagctccacaacctaagacatcagtggcagcattggctcctcccatggattccagctccaagaccctcacatttaaactgcaagaccaccttctccctgtatctccagctgcacaaccctcaaactagaacatcagctcctccaatggtcttcagctgcacraaactcaaactagaaaaacaacagctcctccctgggtctccagctctgcaaccatcaaactagaacaccatcagctcctctccaggtctccagctccacagctc

SEQ ID NO: 908812 - DNA, 609 bp, Homo sapiens
ttccaagatctccagattatgagataaggtcaatctccttcttttgtgtactgaatttgaacccgktctttcttagttgggaaattcactcttacatgtgttatctttttattctgctatattggatcttctctctcagctgacacattttcaatagctaataaacagtttctgccatcagacattcttaataaaaagccataccttgaccccacacgtaatggcaacctaaattttctactctgcttcccagcaaaactttgtaaaataatttttttattgttctcatcacttctacttacattccacagggacttgactcttagccaccaataatctctagattgccaaattaaatagtgtcatttttacttctatctcaatcttttattagctttagacagggatcgctacacccttcttctgggagcttttttatcctcggtttcattgacactaaacaatgttggtttttttctttctaacctctccttcttgatctcagaattccaactcttgaaatgtttcaagacgttatccttgggtctcctttcctttttttgtctacacactcaggactggtgatttcattcaatacaaggtgttaaa

SEQ ID NO: 908813 - DNA, 576 bp, Homo sapiens
caagtcacatcttatatggatggcaggaggcagagagcttttgcagggtaactcccatttttaaaaccatcagatctcatgagacccattaagtatcatgagaatagcacaagaaagacccacccacataattcaatcatctcccactgggtctctcccacaacaagtggaaattatgggagctacaagatgagatttgggtggggacacagagtcagatcatataattctgcccctggctcctcccaaatctcacatcttcacatttcaaaaccaatcatgccttcccaacagtcccccaaagtctcagctcatttcagcattaattcaaaaagtccacagtccaaagtctcatctgagacaagtcccttctgcctatgagtctgtaaaataaaaagaaaattagttacttcctagatacaatgcaggtacagagacattgcctaaatgcagccattccaaatkggagacattggccaaaacaaagggattacagggcccatgcaagtatgaaatccagcaggacagtcaactcttaaagctccaaaatgatcacctttgactccatgtcttaca

SEQ ID NO: 908814 - DNA, 645 bp, Homo sapiens
ctgcccctcctatcattaagcccagaggtctagggggagcagaatgatttcaagaaacagacctggagtgctctcaatgacctcactgtccaagatcatcttgagacccttctcactgaaacccagcacagtgctctgtggccatcccagccatggttcaaggggtcttaggtacagctccagaaagaacaaattatgaaccttgataatgtacatgtggtgccaattctgcaggcttacagaaagcaagagctatagaggtatggcagcctccacccagatttcaaaatatcatggaaagcctggggtcccaggcagacttgttgcagaagcagagccactgaagagagcccctgctagagtaatgccaagcagaaatgtggggttgaagctgccatatagtcctcacctgggcaattcctggcagaactgtgggaatgaggccattgccgagtccccactggggcaatgcctagtatagctgtaggtgtgggacagccactgggagcccaaatctgtgaactcataggcagcatgcaatgcctgcctargaaaacttcaggtacttaactctagcccatgggatcagccatgcgggcttcactcagcaaagccataagagctgtgctgccggaggccctgggg

SEQ ID NO: 908815 - DNA, 546 bp, Homo sapiens
gccacatgtgcattatggcatttaattaattcaataatgttgtaagttctagtatcatccccattttacagaaaaggaaactgatagtcacagaagttaagctaatatatggtgagcttgaaatctgaattgaggtctaagtccaaactctgccgtgtcaaaatttcttccatagtatttaccatattgcaatcttacagagtaatatgaattacttgactgtatcaactaatttcatgtgaatgatggaaaccagcagttctctaatatcaacaaagatgaagcataagaattcggtctggatattagaaaaagaaattcacagacaggaactaagatgtggaatcccttctcttggagaattcatgagaaaggatataagtcattttcaaaaagatgtcaggtgcatttcttgtcttaaattaggggatacrttggataaatcctcactggtactgtgagtttcagaagcctctcatttataaaccaaaaaccttttaaagttttctaagtcagtaattggagtgtagataatggatgtgtatt

SEQ ID NO: 908816 - DNA, 629 bp, Homo sapiens
caactcctccacctgtatttgacagaagcaactcatgaattctgcattgattttttttagtggcaatggaagcactaaagataacgagttgtaattacatgaataggagttgctccaagttcataacctggaagaaatgacgacgatgcccctaatgaaaatcagtctattaggccagcaagattttaataagagaaggatgaaaaaaacctacctatcaggtactatgcttattacccgggtaaggaaataatctatatatcaaacccccaaaacatgcaattcacctgtactacaaacctgcacatgtacccctgaaactaaaataaaagttaaaaaaagaaaatgaagcaatattctgagactggaattatatttctttaaactaccttggctaactgccattatcctgattctggtaaaaagagaaaataatgatactaattttcagagcctaaaatggttcctatccagatgttgatttctgtctgttcatgaaagtttatcaaaccattacaccatgctactgcttagtcaagmaaaataatttatagaaaaggaagcaagtggcaggttttaaaatgcatatgtatctaactacagctctaatataattttgtatataatta

SEQ ID NO: 908817 - DNA, 572 bp, Homo sapiens
gttttaaatgctaaccatagttgaagtttgaccttgtagattcatctcaaaaccatcctaacaatcccagtccttgcrcaaatccccaatccttgactttccatgcacacacccagggtggtccttgagccaactgtattcaaataatatcagatgcttaacaaaaatgcagattccctgcccttttggatctaaatgtgactttgaaaccttcatgttttcttggcaccctgcgtaatttttaatacacagtaaagtttgaaaatcatagataatatctgtaagacacactgtggcctgtgagtagaccaatgttatttactattttaataatgcatgtaaatcttacatcttctgtaagattgttaattctttgagtacaaggaagtacagactacttcctttgcatcacttatgtccctagtaaagtgttgggtacaagtaaatactcaaagaatactttctctaaacttacctatgagtatagataaatggaaaccaattagcttccttgtttatatagtatggtttactcaagcagtttgtcaatagaatatataggtttgcaatga

SEQ ID NO: 908818 - DNA, 662 bp, Homo sapiens
aaaacaattcatttgaatccagttctttctggcacctaaggcaatgctccttgtactacgtttgaggtctaccatcaagaatattcatttggcactaagcactaacttcaagtctagaatttgtatggagatacctggtttggttagtttagggactgtagttctggcgtttgccattgagacttctggatggtcataaattatgtgaagctcaggttcaagcacagaggaaatgaagggtttcttattggtagtaaagaagttagattgcccaagatgcttgagttgtctaaccaactgaggggagtggaaactagtttttatccagttgtctcacatgcttctctcaggcctaccttctggttgtctctttcttatgcttatgtttataatgttaactcccaaatttgtgttcttcaagcctttccttcttccaagaatatggtttccatctctgttttaaatgctaaccatagttgaagtttgaccttgtagattcatctcaaaaccatcctaacaatcccagtccttgcacaaatccccaatccttgactttccatgcamacacccagggtggtccttgagccaactgtattcaaataatatcagatgcttaacaaaaatgcagattccctgcccttttggatctaaatgtgactttg

SEQ ID NO: 908819 - DNA, 608 bp, Homo sapiens
tctgactctggctgagttcctgagttgaatgttctatttcagattctgtttggcagcaaaaagcaggagtagactgacacctccttggttctggacatgattcttctarcaatgcaggcaaaattgcatgagcttttttacatcgcagaaacatattgagcttattattcaataaacattcaaaaatatgttttatgtattaaagctaagtaatttctatgttgtcataatgataaatatggcatatttttcttgttttcatcttgttaggtttgtacatatgctttgaattgccaggacttatttatcacatgtatgctatgcacatatttagtaatagtgtcctctacattttaatctaaaatcattgatattatactcaacaggttcccttcttcaagtatgttctttcaagttgaaattcttttactagaaagcttttgggtactactattaacttgtgtgaacccaaaaaagtctgagacaggtctcagttaatttagaaagtttagtttgccaaggttgaggacatgcccatgacacagcctcaggaagtcctgatgacatgtacccaaggtggtcaacacacagcttgggacatgggacat

SEQ ID NO: 908820 - DNA, 565 bp, Homo sapiens
aaagcttctattttggagtgactttcagcttaaaaaatttttcaaaagcaaataattaataaaatcaccacaacatactaatattcatttaatctgaagccaactattgaagtttagtactgtaaacaaaattaaaacccaagggcagtgtagaaggctgtcaaagtggcaaaataaatattttaaaataatatcagaggttgctccaatattgaacaaacattgcacacctcttaaatagagaaatttaaatattttctttttaaaattctgacattccaaaagagtcagttcagaaggtagatactttaaaaaatgtgggcttatacttggagccacatggttattgactagaatttagttaagcatgtgcctggaacgctagacctgctgcctttcacaacattgcttttggaactcagcatctctccactgttgcttccagagacagctttttaaaatggaaaattgattgatgaaatcttaggcatgaatacatgccaaygcatctaataaattaaaatactgtcattttataagaaaggtttattggctaactgtgtat

SEQ ID NO: 908821 - DNA, 538 bp, Homo sapiens
  misc_feature 160: n = A,T,C or G
atagggctactggcagaatagaaattataaaaaaaaaagaacttctttgcaaacaccttgcaatagtatctcaaacataaataattttttatttataaagtaaatgtaatgcagacagaagggaataggaagctgaaaactcaacactaaactatagtcntccttaggcacccattagtaacaaatattaatggccaggtaggacacaggagaaaaggccttgggctctgtgtatggtggagagtcagatttctagacacaagtattaagctacgtcctgcaaaatggtacattcttgattaaagcataccttagtactggtttcattctttgtcaactatagcaaaaaggaaactaatctcccttagaaattgactctggatgaaaaaaaagcctcttctaataaattgtaattattagactatactttaactagttcacaatatgaatatggatctaagtttgggcarcttctaagtattttaaagggaagcctccaagttaacctaacactggaactaagtttgggcaggttctc

SEQ ID NO: 908822 - DNA, 538 bp, Homo sapiens
  misc_feature 160: n = A,T,C or G
atagggctactggcagaatagaaattataaaaaaaaaagaacttctttgcaaacaccttgcaatagtatctcaaacataaataattttttatttataaagtaaatgtaatgcagacagaagggaataggaagctgaaaactcaacactaaactatagtcntccttaggcacccattagtaacaaatattaatggccaggtaggacacaggagaaaaggccttgggctctgtgtatggtggagagtcagatttctagacacaagtattaagctacgtcctgcaaaatggtacattcttgattaaagcataccttagtactggtttcattctttgtcaactatagcaaaaaggaaactaatctcccttagaaattgactctggatgaaaaaaaagcctcttctaataaattgtaattattagactatactttaactagttcacaatatgaatatggatctaagtttgggcagcttctaagtattttaaakggaagcctccaagttaacctaacactggaactaagtttgggcaggttctc

SEQ ID NO: 908823 - DNA, 567 bp, Homo sapiens
ggtaacaaattcccttagctttttaaytgacctgccccttctctctagctgcctttaattttttttccctcagattgaccttgttgaatatgatgactctgtgtcttgccgatggtcattgtgcacagtatctcacaagggttctctaaatttcttgaatttacatgtcaacctctgtagtgagattggataatttttcatgaactgtatcttcaaatatatattttatgttgcttggtctctctcctctttctgaaatgccaatgagtggtagctttgggctctttatataattctgtatttctcagcagttttgttaatttattaaaattattttttctttatttttttctgcctgtattgctttcaaggagtggtcttcagactctgaggttctttccgcatctccgtctattctgttgttatgcttcaaattttactttgaaactcctgtagtaaatgtatttccaaagttcagcttggttctttcttaaaatgattatgtcatttttcaactcctggatcattttcatattttccttgtattgggtttcaaccttcttttgt

SEQ ID NO: 908824 - DNA, 596 bp, Homo sapiens
ctttctaagatgatgttcactgccaaacagatcttcaaagggagagatccaaaaacataaatctgagtagaagtcaggcatcctgagcctggctcatggtagaggacatcttctttgtctacragtggtgttgcatgattaggaaagagatatttgtggtagttcataaaatgtctcaaattacactttccaggcttgcattttagcttatatgaacataaattcagccctttatgttgaattatgtaaactctcataaaaaacattcagtcacttgtgcactagtgaacattgcaaattccagtttcctcaaatctctatactttcaccacatatcgtcatgtactgatgggattgatttgtttgaatgaggataaaaacatggcttcagtactttcatttatacatgctataggtgttttttgttgttgttgttgcatagcatgtcagtttgaagaaatacaaattttgtttcttaaataagtaaagcctgcttattgagattgatgagaaatacattatcttttgaggattttttttttttaccaacagtgaactgtacagatatagagtcattttgtgtaaattgaaataaa

SEQ ID NO: 908825 - DNA, 650 bp, Homo sapiens
aaaagaaacagtgacaaaaacgatgaaaggtgaggcttctacaaggccacaggatagcttactcatttgacaaaagkttagatggtgagcttcctgaagccttaggccaggaagtggttgaccctcaaaaactaaccagagtgggatgggtaaatggacaaacatatctctcagcatcccatcctaaagagcaggagactgtctcaggatcctcatagcctctcacctcttctgtctgcagactggcttctttgcatatccagccagctatggctacccgtgcaactccctgtgcctcattcaaggggatgatagagactaactgtattcctccttcctgggggaaagaatctgaatggtttgatgtaggtcaggcgcccacccttgccagagtcacctgtggcccagggcacaaggtctacctggttagctgccgtcttaattctacttaatcttgcttggcaggactgggagagactctctgggtaagtggagtacagggcaggcagctggattaatgcccctgttattaataaatgctgcttttcaagttcttcaactttaataacactggaagagtcccagtgatgtaaataacttagttaccacctggtttatttttgagtacttatacccgctacagggcattg

SEQ ID NO: 908826 - DNA, 622 bp, Homo sapiens
gatatttttgtgtcaaggagacggcagatgctcagtcttggggctgtttatttgcaatcttcttgtacatctgtttgctctgctgttctagaagttaccatcaaagtattagagcattttagactttttttttggattaaaaaggcttccaaataaaaagtttgtttctccaaggagtaagcttcaattgtgatgtggacaccttcttccctagcagtgccagacatatatcacactgttgtacttttctttcttgctacatctcttcacagtttattggataaaaataatgttttccactcactcactcatttattcattcaaccaagagatgtttattgaacacttactctgtgccaggtcctgaggcggtcattggggataaacaagacaaccttgcggctttcatgtgcctcatggtttagaagtggggacacacaacacatagcaccaaataaatgtatgaaatgtgaggacaataaagttgggaaaagggacagaggatggggatggagaacttcatatctgtgtagagcctgacacagtttcctgcctttctctcagaaacaaagcctcygtcttccccttggcttagaaaggaccctggatagggcaaggaaga

SEQ ID NO: 908827 - DNA, 636 bp, Homo sapiens
gtcttgttagaaatatactaactataaacagcacmtacaattataactctcatgcatatatatttagatatttcatatgtatttttgatgggaatattgtgaaatagaattttctgaattcatctgctcttaaaacacaaacctacagcaggcttacaaactaggagtaatctgtgtgtgagtcagagtttatatatcccaattattaacactgaaaaaattaatttccatcaaccatgctagaaattttcacaagcaagtgaaattttcttttctttctacagaaagtgatattacaaaatcctaatcaaaagaaaaaataatcaaagatttttcaccaaaaatatgagggggtcttcaaaacatttgcagaaaatgcatattatgaaaacacccatgcacggatttaaattttttgcatcaaaataaacataacaacttgttataacctctctgcacaggatctagcttgtgacaccaaggataagctatcagtttgaaaggtgtccctatcagagcaacatgaatgctgctaaaattgaagcaagaacaaaaatctaatttatagtcaagcttgggtggaagaatggtgaaaagtttttgatttatgaaaagtttaggagaaccatgcctgaa

SEQ ID NO: 908828 - DNA, 579 bp, Homo sapiens
tattagataaatgcaaaccaaaaccacaacgagatactatgttacaccgttcagaatggccattattacaaagtcaaaaaataacagatgctggcagggttgcagagaaaagggaaygcatatacattgctgatgggagtgtaaattagttcaactactgtggaaagcagcgtggtgattcctcaaagaactaaaaacagaactacaatttgacccagcaatcccattactggatacatacccaaaggaatataaatcattctgttataaagacacacacacatgtatgttcactgcagcactgttcacaatagcaaagacatggaatcaacctgaatgtccatcaatggtagattgaataaagaaaatatagtacatatacaccatggaatactatgcagccataaaaagaatgagatcatgtcctttgcaggaacatggatggaactggaggccattatccttagcagactaacacagaaacagaaaagcaaatattgtatgttctcacttataagtaggagctaaataatgataacacatggacagaatgagggagacatcagacactggagccta

SEQ ID NO: 908829 - DNA, 708 bp, Homo sapiens
aaataagccaggcacaaaggataaatatttataattccacttacctaaggcacctagattaggcaaattgatagagacagatagtagattakaaagtaacagagaccagaaggaggaagaatgaggaggttttacttaatggttacagagtttctatttggggcaataaaaatgttttggaaatagggttacacatcatcatgcacataattaatgccactgaattgtacacttagaaatagctaaaatggtaaatcttatgttatgcatcccttattacaataaatttatatatagcaaaaatgggcagagatatagagaaataatacatattcagaattatggtgggaaatttttacctgcatctatcaaaaaacattagtggacaaaaaaattttaaaggatatagtacatttaaacaataaaaccaaactgcttgataggatggatggatgtggtgtatataaacagtgcccccaacaaatacatgaaatataagccttttttttttcttctttttttttttttaaagacagaatctcactctgctggccaggcttgagtgcaatggcatgatcatagctcaccacagccttgaactcctggacttgagcattcctcatactgcagcctcctaagcagctgggactacaggaatgtgccactacgctcagctaattttttaagcttttgtagagatagtgtctg

SEQ ID NO: 908830 - DNA, 556 bp, Homo sapiens
ttgtggctcccataattcccacgttttgagagggacttrgtgggagataattgaatcttgggggtgggtatttttcatgttattctcgtgatagtgaggaagtctgacaggatctgatggttttatgaaggggagtttccctgcacaagctcttttctcttgtctgctgccatgtgaaacttgcctttcaccttacaccatgattgtgaggccttcccagccacatggaactgtaagtccattaaacctctttttgtatgtgtgtgtgtgaattgcccagtcttgggtatgtctttataagcaaagtgaaaatggacgaatacaatggagtattttttttgtccttagggaatatatcattagagatgtacagttacacactattttttaaagttacttggattagttattttctgtgtgattatgccaacaactagttacacatttatatttatttattttatttaaatatttttaggaatttttaaagtgcactttttatcatgtaaaatgcttacatggtttcaaagtcaattctgtaaaacaagatatattc

SEQ ID NO: 908831 - DNA, 651 bp, Homo sapiens
ataatagtgagcttcctgactgacccacaaagatagggtagggtggtgattctcaaacttcagcatgcatcaaaatcatgtcaaagcatggcttgcatggaaagaattagagaaaatgaatataaacagttctttcaaaaagcctggatctgaaaacaaggaagaagggaggagaagagttgcctcccttctattacatatgaagaagagtggagcttattaaaacacaaagagaaaaaaaataatggagataggctgaaattacataaaacaagtgaaataactgatatacaagatccatgtggccagaagcagtggctcacacctgtaatctcagcacttttgaggaggccaaggcaaaaggaccacttgaggccaggagttcaagaccagcttagaaaacatagggagaacccattcctacaaaagagtttaaagaattagctgggcatggtggtgcacacctttagtctcagctactcaagaggctgaggtgggaagattgcttgaacctgggaggtcaaggctgcagtaagccatgatcacaccactgcactccagcctgggcaatacaacragaccctgtctcaaaaaaaaaaaaaaaaagaataagtaaaaagggaggaagtaagaccttagctggagagatct

SEQ ID NO: 908832 - DNA, 615 bp, Homo sapiens
ctgaagctgttttttagtgtcctgtggccactgttaaaaaaattgacatcytttttgtagtacttttcaatttcttaacatcttttgaatcagagctagcaatgttgtgttatctttgtgttatttttttattttgttataaatttcattccatacctgttagaatttgtcacttgtgttttgacaagctccatatacaaaagatgtttaacactgaatcttctagagcttaaagtaaaattctctgtcaaattataaatataaaattatttcttcctcatcttagaggaaaaggttttaacttttcatcattgtgtatgatgtttgctgtgggcttgtttatatatagtctttattgtgttgcagtgtgtcctttttatacataatttttgagtttttatcataaatgatgttgaattttgtcaaatgtttattctgcatctattgatattattgtatggtttttgttcctcatcactaatgtgatatcttatttagtgcttagtatatcttgagccatccttgcatcctagggataaatctcactggcttaaagtgatagactgctgaggatttttgaatctatgatcatcaggtatactgagctgtaatttt

SEQ ID NO: 908833 - DNA, 670 bp, Homo sapiens
tgtcaggccttctcttatggttttggagccmccctccctctgtctctgtacaggggagcttcttccttctgccttcttccttctttcttgccaattaaactctccactccttaaaaccactctacgtgtgtccatgtcgtttcttccagttcaacttgaaacggagaacctggtgttactccactcattggaggcatatcaatactacaaacaggataaataaaaatgtcatcatgaaattgtacaaaaccaaagataaaaacaaaaccttaaaagtagcaagaataggctgggcgcagtggctcatgcctgtaatcccagcactttgggaggccaaggtggatggatcacgaggtcaggagattgaaaccatcctggccaacatggtgaaatcctgtctctactaatacaaaaatgagccaggtgtggtggcatgtgcctgtagtcccagctactcaggaggctgaggcgggagaatcacttgaacctgggaggtggtggttgtagtgagcagagatcacgccgctgcactctagcctgggcgacagagtgagactccatctcaaaataaaataaataaattcaaaaaatttaaaaataaataaataaaaataaaaagtaaaagtagcaataataaataaaacacattactatcaacacagtaacatta

SEQ ID NO: 908834 - DNA, 387 bp, Homo sapiens
gggtgctgctataagaacaccaaaaatgtggaagcaactttggtactgggtaacaggcaaaggttgaaacagtttggagggctcagaagaaaacaggaagacgtgggaaagtttggaacttcctaaagacttattaaatggttttgaccaaaatgctgatagtgatatggacaattaaattcaggttgagatggtatcagatggagatgaggaacttgttggaaactgcagtagaggtcacccttgctatgttttagcaaagrgagtggtggcatttcactcctgccctagagatctgtggaacattgaacttgagagagataatttaggttatctggtgaaagaaatttctaagtagcaaaatgttcaaatggaagcagagtataa

SEQ ID NO: 908835 - DNA, 387 bp, Homo sapiens
gggtgctgctataagaacaccaaaaatgtggaagcaactttggtactgggtaacaggcaaaggttgaaacagtttggagggctcagaagaaaacaggaagacgtgggaaagtttggaacttcctaaagacttattaaatggttttgaccaaaatgctgatagtgatatggacaattaaattcaggttgagatggtatcagatggagatgaggaacttgttggaaactgcagtagaggtcacccttgctatgttttagcaaagggagtggtggcatttyactcctgccctagagatctgtggaacattgaacttgagagagataatttaggttatctggtgaaagaaatttctaagtagcaaaatgttcaaatggaagcagagtataa

SEQ ID NO: 908836 - DNA, 605 bp, Homo sapiens
cactacaaaacgtaatgtaatgtaatattcttttttgaaattttattgtatctaaattgtaaaatcattgtaattctcagtcaattcattaaaaagcactttacctcctctctggccggagcactgggtcttccctatttgtatgcagtatcatatatactgtgttttgaatgaaatgtactgacatagtttaaatgctgactattttctcattgtatcattttctttttggtggatcctttgagaagtaaatttagcattttgatctattatttgacaacaagcttgattcttttattcagtcgtattgaaaacgattacctacataaattataaaccttctattactcttttgttaacatcttacatttttttgttttgatttaaactcatgagttacttttttttaggcaactaatcttcaaaccaaaaaaggaagcattcaccagaagatatgccttgaagtaactatttgttctcttatatccaagaaaccatttgcctccttttgtgcaagcagatgtaccagtttcaatccaccagtctttagttctacagcagatctccctagatggcatcaycaatacacaaaaattagttattat

SEQ ID NO: 908837 - DNA, 629 bp, Homo sapiens
ttactttgaatttattctgcttgggtttcataagacttcttgaatatgtgcctcaatgccttttaattatttttgaaaatgattggtcagtactacataaaatcttgcttctgctgattctgctctctcttttggaatatatatatatatatatatatatatgtatgaatttctattcttatctgtattttccatacttttattctttaagctacagcccaaatgttttctgctggcccgtcttctagttcattaattctaactctcttgtcttgccatggtaaatacttacattaagttgttgatatcttactatccattgttggatttttctgttccagaattggaattggaattttaaaatagattctatctctgtggtaaaattattcatatatcatatattttcttgaatatcttatcatattaactttaaaacccaagacagattatcaccaaaaactgggttatttatatgtttgttactattgtctgcttttctttcagatatatttcttagacttagtaatttttttcaatttcttaaaactattaaaaagtrtagatactttgcatgatttatctttccagagtaatttttagtaaagtaaaatttatttttatcctgt

SEQ ID NO: 908838 - DNA, 679 bp, Homo sapiens
tactacatccattcatttctctgctttttattgggctattctatctgatgcttattctccatatttacctgtatcctacaagtcattcaagacccatttcaaaaccccacatcacccatggatttatggggaactccaactacaaatgatttcttacatttcctagccacttctagggcttactatctgtgctgcatatcttagcatttgatttacctgccactcatcttagcatttgattacattccacatattttagcatttgatttacctgtcacatattttagctgttgatttacctaccatctcattgtatgtctttctagttttccaaaagaaacatcttgtttcaataagatcattacttccttaaggactgtcactttttctggtatcactgagatcacatagcacagcgctagacccaaaatacacactcagaatttccagaattaaactgctgttttgattaattgtgaagtgtaactcttcatcttatttcccatcattttacatacctttctactataaatgcagttaataaacccaaagtccaaaaggtaaatacagtaccttatcatactgacagacaatwacattatccgtgtcaaacaggtctggcacatcctgttcactaacatcatctccagaatttaaagggtcctaaagacgaaagatg

SEQ ID NO: 908839 - DNA, 660 bp, Homo sapiens
aggactggctccttcccttcaaggcagtgggtccccttctggcccagggtgcttctagaaatgtcacccaggagctggggcctggaaagggggcctcaagactctgaacactgccttatccaagtgtgaccgagctggtatccaagatggaaaacaaagtcttttttttaacttttccctcttatctcctcaagtagaaggaagaagtctcttttggagttgcaagctgtggagcctggtgttgggggaggggtggcacaagcactgccttagccaccgcagctggtgtctcagtaagctgcatgccccacaagtccattggcactgagccctgttcagccctgggacatgttcaggagttacagtccttgtggcttagactgcctttcaaatttatttagggtcccagagcatttgagcctatggtgatgaggcttgtcagaactcagattcccactgccggggcaagcaattgtcctttgcctaggactggtttaaatactccatccataggtgggagtcagctgagttcagtctggttgtgctttctgctatgacagggcagcrctgagttcaatgcagtgtctcgcaattgctacacttttctcccaaacactcagattctttttccataccacgtggccactgccatgggaggag

SEQ ID NO: 908840 - DNA, 654 bp, Homo sapiens
tcacctttgctgcggtccccaacaagttcctcatctccatctgaggccacctgagcccagactttattgtccatattgctatcaggttttgtcaaagccattcaacaagtctctaggaagttccaaactttcccacattttttggtctttttctgagccctccaaactgttccaacctctgcctgttacccagttccaaagtcacttccatgttttcaggtatcttttcagcagcaccccactctactgctactaatttactgtattagtccattttcacactgctgataaagacatatccaagactcagcaatttactagaggaacaggttaaattggacttcagttccacacagctggggaagcctcacaatcatggtggaaggcaaggaggagcatcacatcttacttacatagatgtcagcaagcaaagagcttgtgcaggaaaactcccccttatcataaccatcaaatctcaaaatacgtactcactgtcatgaacacagcatgggaaagacctgaccccatgatgcaattacctcccactgggtctctcccgcaacacgtgggaattcaaaatgcgatttgggtggggacacagccaaaccatatcattgcctaaaatgagrctgcttagtaggatcagagccactg

SEQ ID NO: 908841 - DNA, 600 bp, Homo sapiens
gtccatacactgtctcttacctcttcttcatttttgcatataagtagtccactagactgcaattacaatgagcattagatattccgaactctctattaatcaagaacatattggaaatattttcaattacaaaatctaatattggataagagctaatgaagagagataattaaatctcctgttacattgatggggattaaaatatttccaatttcaagatctaatattaaaaaaactaatgaaaaaagatatttaaaactctgaatatgaaactaggatgttacatgaaatcaccacttacacaaaaacaggttcaaacagatgttcgttttcaattcacagagtcctcgagtactccttctttaaagaagacccagccttcaaaaaacaaaaaaggaatgtaaaagcaatttaaatctctaattaagattctcaaagcatttccaaagagaattttactcataatatacaacaaaaatgcctctaaaaatcttcatccatttttctcccmgtgtcttacattgaacaaattcagctgcccaattttctctctgccttctataaaataccccaaacacttttacaaaacacaacagccat

SEQ ID NO: 908842 - DNA, 610 bp, Homo sapiens
gtaagcactgctggagtctgagactaggatttaagcagggtgtgattcacctttgcaagttgatctcaaactggttgtgggcttctgcagctagaccagggagtgagccctgctggaactagtgtctgaaaggaatgtgtatcagctacccatcagcccaggctgtggccattgagggtggctccaccctctctagtggtggatcctcagcacggctgctacccacctctcacctgagcactccatctgctatttgaggatcactctgcctctgctcacaacagctggtgcctactgtcaccattggggtcagggcctcccatggacacccattcaccccattgcagccactgctaacattagtgaacaccacttatgatccagaaaattgtcccatcattgctattcccattgttcacaccacatctgattctcagggtcccgagaatctgttcacctgccaggtccataactaccataatggcattcaagaatgccacctggaggctgaagaatcagcctgccagtaactgacaatacaggtgctagtgtgcaccaycctggggcacaaagataggtatgctcagcccactgctgccacaattgtgac

SEQ ID NO: 908843 - DNA, 565 bp, Homo sapiens
cacatactgtaggcttttcctctgccaagaggctatacaaaaatatcaagtattttccatttgtttcaacatgcctaagaaggtgttcaaaatttttaaaaaatggtctaactccacctaacttcatacttttaatgggcaaatataattttcttatttaatcgtaataagggttggggaagggtatgtataactatcacattgaggatttatttccctttttctttaatatttttagtgtgtattgcattagacttatttttatcattttaccagagcatcaactaactatagggattatggtttctattctagtaaattacaatacagggttttaatccaatcacatcccctaaagaatattaatgacttataattggattgctgtttactgtaataaaagcaagactttttctttgggcctccttggctctgggaaaacatgtgtaggcctaggcacgtctccttggcactctcatgggtgagcacccccaagtgttagcacattcatattactgcrtataaaaccaccttgaaggctctttattctggtttccaactggac

SEQ ID NO: 908844 - DNA, 604 bp, Homo sapiens
atacaactacatttgctatcatttaccatccttcaataaggaagggaatagaaagttagacatatctaaaaccaaaatgaccattttgagattaccaggggactgtgccgtaaaatttattagaacaattacataaaataaataatcatatattactttaactgctttatggaattattttaaatataattttctgtctttctcaagagtgcatgcctttcttgagagtccagagttaccattctttgatattcccatattgtggtctattaatattgaaactctcaaggactctcagcttctacctaaaaaataccaaaagagttttaagtttcatattttgattctcctttccagctgtgaggctatcccttgttaatttctgcttcagtccatatatgtatctctctgtaacagcctctatataatttggtgcttctcctgtctgggtttggaaatcaggtgtctcaggctagatagaagtagacttaaggtaagagtaggaagcctctgagagcrtaaagcatagtcagtgctctgatgggagaaacagagggtgtgcaacagaggatagcagtggctcctgctttgggcgagtcaccaa

SEQ ID NO: 908845 - DNA, 598 bp, Homo sapiens
tgtttcatttcagtttaaaaatagttctttctatggctgttcatttattccccattccccatgattttatctgatatgtctgtgccagaaaaatttgagatacaattctgaagaagtatacttgttcaggaaatctaaactttcctcctagaaaattttcaggtctgaatcagagtagccgaaattgctggcaaatccactgtctccacaccatgtcatggtctccaatatcagctttatcaacaacaaaagtgaagaatgacaaagaaaaatggggtaggaggaatctaaggataaatgtttcgatgacatataaccaaatgcaacataagaaacttgtttggattctgattcaagcaacccaactgtaaaaaatcatgtacaagacgatcacagaatttgagcattgactgaatatttaatgatactgtattatgcatatatggtcatataacaaattactccaaaacatagcttaaaataacaaacacactatctcacagtgtctgtgggccaggcatctaggcatggcttatctaggtgcctccatctcaaggtctctcrtaagactgcaatcaaggtatcctctaggactgca

SEQ ID NO: 908846 - DNA, 675 bp, Homo sapiens
gtacgtataaaaagttgatcctaagtagtactatatagaaataaatttaaacytaaaatgtttttgttttatattgacaccaaaatattttgcttttatatctgtacagtctgaaaattcaaaagagaagcaatttaaaggacttccatttacttctttcccctctaatctgcacaaaaggttaaatgtagcagtgcagcagttctggccatcaaaatatgattattgtactttaaaagcagccatgagaactctgctctttgatagacttcaacttgcaacaactaaggtaacatattatctggttctacccaaaaatacatatcctcatcctacttatcttagatcatgtgtaagattcagttatgtttaagctgtccttcggaaaaactcacaggttaatctttagcacccactctctactcactttaggtccttatccctgatgactactttatttcttgcaggaataatccagttccagaggagattaggagttgggtgagaggatagactctaatcttagagaaataaggtattgtacaagttatcaaggcctagcaatccaactactttgaccagaattattacagaaagttggaaaaagattaacttgatgcagagttatctgagctgtggacactgcgcttcttcagtttttcctaacaagtttga

SEQ ID NO: 908847 - DNA, 641 bp, Homo sapiens
ccagatggctttgcaaataaaatctgtgattaaattgactatgaatctactatatccgtcttttacatacttattagcacacaattggatgcctttaaaaaaactattttgaaacataatagttgtcactacactatgcttcaataagcccctgagggcatcctcatgaccagcagctgaaccctctgcccagggtgactgtatgagggtagcaggtattgtatttcacaaaagtacgtgtttctgaatacttttcaaatctgaaatgcttataatgcaaaatgaattttcaataagtaagttagcagagaggtacataaatctgtgagtaggtaagcattctttttcttttaatcatattatttaaatacagtgaacacttatgtgactggtttattgaataatattaattccatgggataacagtcatgaaacagttttatctttctgcaatgactaatctcacatgtgccctgccgagtctctttgcccaggtagcagaccccttaataatatctcgggcaggtaycgtaatctcctggtccccctttcttattaaaaacttaaaaaagaaaccaaaagcaactcagcatattctagttggaaatttccatctcatctccatgtcaaggccaagcttt

SEQ ID NO: 908848 - DNA, 592 bp, Homo sapiens
tacctttaccagtactgacatgttttttkgtttttttttttatatggagtcttgctctgtcacccaggctggagtgcagtggcgtgacctcagctcactgcaaactccacctcccgggttcatgccattctcctgtctcagcctcccaagtagctgggactacagggcccgccaccatgcccagctaaattttttgtatttttagtagagacagggtttcatcgtgttagccagaatggtctcgatctcctgacctcgtgatctgcccgcctcggcctccgaaagtgctgggattacaggaggacatgatttttaaattttgcttgttttgaaatggaaaaaatggtgcctggtgattattttaatttgcatgccatttattattgatgaaggaaactatgtttgtgtttactaacaattttcacattgcttttcttctctgaattttctatttacaactttagaatattttttaattggtgttttacagtttttcctttcaaccatctgtgggctttatatattacccattgtctcaacaattttatgtcagaaagaattgttttgataatgtgagaggatggaacaaact

SEQ ID NO: 908849 - DNA, 592 bp, Homo sapiens
tacctttaccagtactgacatgtttttttktttttttttttatatggagtcttgctctgtcacccaggctggagtgcagtggcgtgacctcagctcactgcaaactccacctcccgggttcatgccattctcctgtctcagcctcccaagtagctgggactacagggcccgccaccatgcccagctaaattttttgtatttttagtagagacagggtttcatcgtgttagccagaatggtctcgatctcctgacctcgtgatctgcccgcctcggcctccgaaagtgctgggattacaggaggacatgatttttaaattttgcttgttttgaaatggaaaaaatggtgcctggtgattattttaatttgcatgccatttattattgatgaaggaaactatgtttgtgtttactaacaattttcacattgcttttcttctctgaattttctatttacaactttagaatattttttaattggtgttttacagtttttcctttcaaccatctgtgggctttatatattacccattgtctcaacaattttatgtcagaaagaattgttttgataatgtgagaggatggaacaaact

SEQ ID NO: 908850 - DNA, 592 bp, Homo sapiens
tacctttaccagtactgacatgtttttttgtttttttttttatatggagtctygctctgtcacccaggctggagtgcagtggcgtgacctcagctcactgcaaactccacctcccgggttcatgccattctcctgtctcagcctcccaagtagctgggactacagggcccgccaccatgcccagctaaattttttgtatttttagtagagacagggtttcatcgtgttagccagaatggtctcgatctcctgacctcgtgatctgcccgcctcggcctccgaaagtgctgggattacaggaggacatgatttttaaattttgcttgttttgaaatggaaaaaatggtgcctggtgattattttaatttgcatgccatttattattgatgaaggaaactatgtttgtgtttactaacaattttcacattgcttttcttctctgaattttctatttacaactttagaatattttttaattggtgttttacagtttttcctttcaaccatctgtgggctttatatattacccattgtctcaacaattttatgtcagaaagaattgttttgataatgtgagaggatggaacaaact

SEQ ID NO: 908851 - DNA, 604 bp, Homo sapiens
aaaaaatgttacattgttttcaaaaagtttgtaaacacagtgcagagatgtggatctgttgttacctcagtctacattttgaagtgcttttctgagttagtgactctttgctgygaatttgattctgctgtttaaacttccaattttgggttataacaaggtccctggaagtaaaccaatatcaatcactccaatattggtagatatcctggaaatatttgacatatttagacccacaagatgttagtccctaaaaattgtactttcttttatttttatttttattttattttataattattatattttaagttttagggtacatgtgcacaacgtgcaggtttgttacataggtatacatgtgccatgttagtgtgctgcacccattaactcgtcattttgcattaggtatatctcctaatgctatccctcccccctaccccaccccacaacagtccccggtgtgtgatgttccccttcttgtgtccatgtgttcttattgttcaattcccacctacgagtgagaacatgcagtgtttggttttttgtccttgcgatagtttgctgagaatgatggtttccagcttcttccatgtccctactt

SEQ ID NO: 908852 - DNA, 555 bp, Homo sapiens
gacagatgcttcttttacagttgttakgaggcatataaagtacttagcctgggcatgttctacctactcgataaatgtttgttcttatgatcaggaggccacagatcatcttgaccttagagcacaaatcgctttaagcctggggaaagaatgagagttgatttaatgacactaccgtgtttccggcttctatgtagcagtctattctgtccctatgtacattttgcttatgtgtgtgccctctcccttttaattctttgctcaagcatccccttcatagtgaagcctacgttgactctctcatttaaaattctcagtcctaccagtttcatctaaccccatcccaattctgccccctccccatatcctgcttcatttttctcagtggcatttattgctttttaaggacaccatataactaatttatgtgttaggctgtcgtctgtctcagcatttgcatgtgagctccacaaaagccagacgtgttgcctgttttgtttttgttttcactgctgaatcctcagtgtcctaaaagagtagctgacgcaaacaaga

SEQ ID NO: 908853 - DNA, 570 bp, Homo sapiens
taatacttaatgactatacctgtggaactaagtcttcaggaaccctctcgttctctatcttaggaatattttgttatgcacactttactatacagagactactatatggctttagaawtcatataatgccctaaaagacagtattagtggatttcaggttacataacacagtagccctatccagtgccaactaaacttagcattataaaagaataccaaacagggagcataagagcttgcaagaaaaagctttttgaaagtagccagaagtgatcatcaatgcccaaaacacaatgtatgtcttgatcttgagagatgagcactgacacacatgtaaatcacaccagcacaggtaactcccccatctgggagttgtcagcttaaatacattgctagttttgtagcacttggatagatcagtatcctgtttttgttatttaatgcagctaacagtaaattacatgtgaccaaataaacaatctggacaaccaggaatggcatgcttaggaacgttctcagatgaaatcaataactagcaacccagcaagactctcatttatttccagggga

SEQ ID NO: 908854 - DNA, 647 bp, Homo sapiens
aaggggttgcagtcctactttctgaaaaaacaaacttaagccaataaagatgaaaaaagacaaagaarggcattacataatggtaaagaaatcaactcaacaagaagagctaactattctaaatatatatacacccaatataggagcacccagattcataaaacaagttcttagagacccacagagagacttaaactcccacacaataatagtgggagactttaacaacccattgtcaatattagagagatcattgagacagaaaattaacaaggtttttcaggacttgaactcagctctggatcaagtgaacctgatagatatctacagaactctgcaaccaaaaagacagcatatacattcttcttggcaccacatggcacttactctaaaaattatcacataattggaagtaaaacactatttagcaaatgtgggagagctgaaattataacagtatctcagaccacagcacaattatattagaactcaagattaagaaattcactcaaagcacacaactacatggaaatttaacaacctgttcctgaatgactcctgggtaaataaaaaattaaggcagaaataaagaagttctttgaaaccaataagaaaaaagagacaacatgctagaatctctgggacac

SEQ ID NO: 908855 - DNA, 589 bp, Homo sapiens
cacatacaaaaacgacaatggctatattagttatcagacaaagtgggcttcagaacagtgctatctcttcatcaggcataaagaacacttcataataataaatagcataataataatgctaaaaaattagttcatcaacaagacaataatactggctgtgcatccaactaattaataactaacagcttcaaaaaataacagaacttcaaaattcaagaagtgaaaattgacagaaatggagaaacagacaaatccgcaattatagttggagatttcaacatgcctttcttaataatgtatactgtttccaaacatctacaaggacctttttttcttaagattgagcacagatgaccaaagagaactgtgtttcataattcagattcctgcacaccaatctttgacatgaggtttcacttcccaatttcccatactcttattaataagtaggtgggttgggatctgaagagatgcatgaagggacaggagaatgaaccatcttagattagggttccagatcttgcacaatgggtgrctttatttatgcatctaagctccctgggcctcagttttctcctctgttagaaaa

SEQ ID NO: 908856 - DNA, 673 bp, Homo sapiens
cccctcaagtaagagaatcctaaatgagctgttctgatcatrtataagaatatgtaaattcacacggcataagggatatattatggtatatatgaggagcctctgccctgcccttcatttaggaaagaaggatttatttttccagctgttgggtgtgctgttagtagacagcattcagatgatgtccccttaggtatctttagaagttgcagaaagccacctcaataaaggtctcatgccctttctcagagcagtccctctttgcgtccaggttaacatttaggttcaggtatcattagagtgcaagtcagaaatatggtacttttctagaaaaaaaatatttcattttgttatgttaaataacataaactatactataaaactacagtaaccaaaacagcatggtactggtatcaaaacagatacatagaccaatggaacagaacaggggcctcagaaatgacaccacacatctgcaagcatctaatcttccacagttctgtagacaactgggctttaaggttattgggttccaatggcattgtgtgagtaacttccaattataaatctcctggagtcattgtcatttcttttgtgttaccatatacagatggtatatttggtaaggtttgtaaaatgtctctgatggtcatgaatgatgttgttccaagga

SEQ ID NO: 908857 - DNA, 586 bp, Homo sapiens
gtttgtttagggagattagccaaggtgttgaatccatcatttcctctcttctggtgaaacctaatcaaaaaccctaatggctatcccaaactccaagaaatggacaacctgtttgaaatgggtgtgatttttcagagattcaatataaagaggtacaagtagccaagctcattcttttctgggacacacagagtggcttttgaactggctgtgaagatgtctgaaagctactaccactatatgatgaggccctgatccctgaccagactttatagtactacttctacagcaagattcagtgagaccataagtatatttctgggtgagaacacaactaacagaggaggagttcctgctacttttccaatccaaaacagactgcactatgtttaatttttcaataaactgaacttgtttctataagtgatgtcatttgcttacttagtaaaaacgtttttactctkattttgtcatcctgtcttcctacatacttgtgaaacacagtgaagattaattttacttgtatcatttatgtattccttacttgttcctatgtattctaagaacacagaaaatagttttcaga

SEQ ID NO: 908858 - DNA, 648 bp, Homo sapiens
cctgcctcagcctcccaagtagctgggattacaggtgcctgcccccacgctgagctaatttttgtatttttagtagagatggggtttcaccatgttggccaggctggtctcgaactcctgacytcgtggtctgcctgcctcggcctcccaaagtgctgggattacaggcgtgagccactgtgcctggcccccattctgctgactccttttcatccttctggtcatatttttgatatcttttcatctaggaatcctttttttttttttttttttttttttttttttttttgagacggagtctcgctctgtcgcccaggccagactgcggactgcagtggcgcaatctcggctcactgcacgtccgcttcccgggttcacgccattctcctgcctcagcctcctgagtagctgggactacaggcgcccaccaccgcgcccggctaattttttgtatttttagtagagacggggtttcaccttgttagccaggatggtctcgatctcctgacctcatgatccacccgcctcggcctcccaaagtgctgggattacaggcgtgagccaccgcgcccggcctaggaatccttttataacccctcaggtctatgtctattcagataattcaatgttaaatcacagttgttaaaa

SEQ ID NO: 908859 - DNA, 594 bp, Homo sapiens
gcactccagctatttttttattttagctgttttggcaggtgtgtagtgataactctttgtggttttaatttttatttcccccatgtttaatgatgtcaaacatcttttgacatgctygaatgtcacctgtatatcctctttagtgaacctctttagtgaaacattggttcctttcattctctcattttctagtttgattgaatgatttttactacttcattttgagagctctttatatattctagacaaaagatctttggtggatatgtggtgtgcaaatatattctcctggtttgtagcttttctcttaactcttttaatagggcattttgcaaggcaaaagttttcattttgatgaagtccaacttataaaattttcattttatggaccatgcttttggtgctgagtctgagaccttgccaagtcttagatcctaaaaattttcttcattttcttttctaaaagcgttttgcattttgtttacttttaagtctgtgattcattttgagttaattttcatataagatttgaggtttaggatgagattcttctttttgttgttattttttcttctggatgtccaattgctccaa

SEQ ID NO: 908860 - DNA, 636 bp, Homo sapiens
  misc_feature 361: n = A,T,C or G
acactttcatgctttggtaagattcttgaagaagagatcaggtttgaggtttctccagctaacaattgcatcattttgttctcaaggaccaaaagctctgtttattccacattcccctagcagttgacctctgtcagggttcaggcttgagttcccagcctctttagatagcaaaagtagctaaaaggaagatcttcttctctttaaaaaaaaataccctaaaacatgaagaaagatcaaaacaatgtgacgcccaacaggaatgcaggaacatgtctaaagaggactctgatgaccacaggttcaaagacgaacatccaggctataattcttcaagtatggtgccccctggagtgacaanacattatgtgacttggtgttctggtcttctctagcactcttaggggtggcctgcagagccagagtagaagagataatgacgtgagtggaagagataatggtagctgaaatgctatcattgtgaagagtggtcaaataagaaaggacaggggagagcggtaccactttgatttaaaactaaccttgaagttaccyatcttggttagcatggtggatactatgaattataactcacagaaacataacttggaaattcactttgaaccagtaagaata

SEQ ID NO: 908861 - DNA, 570 bp, Homo sapiens
taaatagaacagaacggcaagcccagaaactgaaatatgcagacataaatacttgctatataattatgttagcatcccaaatcaatgcattaaaaatggcaagtttagtaaaaggtaatactttcaactgcaggtatgtttgtaggaaaaatggaatttgcatgcattactaacaatgttgtaataaattgatcagttcgctatggaggataaaaattgattggaattaaaggaataataaattcaaaactgcaggaaataagacttgtctatgaatcctaaaagggctcacttcattccagaaaaagttaagaaaggctcatctataaaattctcacaaggtgtctgacaattaaggtaactttacccgagaaattttagactacttgccgtattcaatccttctgaaaggttgctttcacaagtttattacactttgtatcacatgttccatttacctgtgttaagaattatcggaagaaaaacaaaagaaccccaacccagtcaayagggtaatggaatgctgatgttttgttcagtagagttgctttgtagtagatgatgacaagc

SEQ ID NO: 908862 - DNA, 596 bp, Homo sapiens
gcatagttttgcctttcctattatagttggagtcgcacagtatgcagccttttcagattggcttgttttcacttagtaatatgtacttaagttttctccatgtcttttcatggctcaaaacttcatttcctttaggcactgaataatattccactgcctagatacaagacaggtttcttaaatccattcacctactgaagaacatcttggttacttaaagttttggcaattatgaataaagctgccataaacattcacgtgcaagattctgcatagacagaagttttcaactcctttgggtaaatatcaaggtgcaccattgctggattgtatggtaagagtatatttacttttgtaagaagctaccaaacggtctttcaaagttattgtaccattttgcacttcaaccagcagtgaatgagaattcttgttgcctcacattcttgataacatttggtattgttgtcaawgtcttgaattttggccattctaataggtgtgtagtggtattatattgttgttttaatttgtatttccctacaaatgttcttaaaatatatgtattctatagttatttgatgtagaattgtataaat

SEQ ID NO: 908863 - DNA, 565 bp, Homo sapiens
tcacatcttttgcctttgttttgattgttatttgtttgttgttctcttttttcctgcctcattccagtggaatatagtatttttaagtattctattttattctaaaacattttagaaataacttacttgtgattttcgtttccttttcagtgtttgccccagtgattacaatatgcatctttaaattatggaagtttcctgtcacataatttcatatttatgaattatgtatgtaccttataaccacatcattctatctatcccctattactccttttggtattcttatatatgttgcaaaacctacaattttttattaaatttattttaacttaaagaatcatagtttatgaaattttataatgtatatttacttccataatattctttctagtgattttcattttcacctgttgaatccaacttccaggtgctattattttttttcagcttgaagatttttaccacttttttgaaatgcacatttgctaaaaattttctttcaatttgctytctgcaaatgttcatttaaattcattttgaatatattttctgttgatataga

SEQ ID NO: 908864 - DNA, 683 bp, Homo sapiens
ctgtggacccaatctatcttataggagttctgtttcaaagtagctgtaacattttgctttccaayggcaatgagagttcctgttgtttcacattctcaccagcatttggtgtcataagtattctgaaatttggccaatcttgataggtgtacagtaatatcacatttttgttttaatttgtatatccctaatgatgtatgaaataaaatatcttaccttcattttaaagtgtagttttgttggatataaaatttgctattgacaattcttctctttcactgtttgaaaaatactgtgccacttcttctggcctccatagtttttgaaagaaattcattgtcattcaaaatgctgttccatagttttaataatttgtttttctctggatgatttaaagattttcttgtctttagttggaacagttaaattatgagttgtcttgacatagatttctttgagtttacctcattgggtttgtttcatgttcttgaatctttcaccacagtttggaaaatttcagccatgattacttctgatattcttttattcttgctcgctttctcctttccttctggaactaaatagatttgaatgtcaagtcttttgttattatcccatgggtctttaagggcatatttattttaaattcagtgcacttttattctctgtgttgtttatattgc

SEQ ID NO: 908865 - DNA, 665 bp, Homo sapiens
cgccactgtccctggctaatatttgttattttggtagagacggggtctcayggtgttgcctaggatggtccgaactcctgggctcaagcaatcagcccgccttggcctcccaaagtgctgggattacaggtgtgagccactgtgcccagctaaaagaacttttaatatttcacaatataatcttttaagacatataatacagatttttagtttttcatttgtattttaactctatttatggtatatcctacaaatgaaaatgttaaatttttatcaatattgtcctttttggattctgtggtttatataatgcttagaagtgcttctgggttccaggattatgaaaatatagattattatcttcaaagtacaaggatattacttctgtatttttcaaagagctgcaccaattacagataatcccacttaattgtagacagtatttctaaattgtccttattcagcaaataataaacaatacaaatccgagtaagtttctaaagggatcatcatatttagtacataagtgccagtgaggcaaacagacggctctgtcatggcaactgtttgatcaagagaagaaagaagttttcatgtcacttgaaaatataaagatatagaacatcaaaggaggtaacttgaaagaaaaacagatccagttcctc

SEQ ID NO: 908866 - DNA, 661 bp, Homo sapiens
actattctgtagaaaattttggaatatgtatcaattttaactgagtatattatttgatccagcaacttcagttctagggaaagttaagtgaacctaaactcaatttcctagaatagttgcttctaaaataasttttggaaatggtggtaacatctgagcattacagtagccattggccatgtgtgaccattaaacacttcaaataagggaagtttgactgaggaaatggatatttagattccttcatttctttcggttattagcagctttattgaggtataattaatatataataagctatacatatttaaggtgtaaaatttgttaagcttgacatatgtatatacctgtaaaaccatcactataatcaagataacgtagatatccattacctcaaagatttcctcatacccctttgtaatctctccttcctgcccttccccacccactcctgcaaaaagcattaatttgcttttagtcacaatatattagtttgcatttccaagaatttcatataaatgagatcacacaataagtactctttttttaatctagcatcttttatttagcatagagattcacccatgctgtagcatatattattcctttttcttgctgagtagttttttttgttgtatgtgtataccataatctttttatc

SEQ ID NO: 908867 - DNA, 544 bp, Homo sapiens
ccttagtaatgatgggcttatgccttatcctaggcgttgaggaaacacaccccttcccttcaagcattcttattccaatggaagatggggggagagtgaagccagataagttagaaaattccaacataatgcattagttatgtacaaattattcacttagataagaagtgactaattctgtcctatggattggagatgattttaataggaaggtgatagttccgttagaattaaggcagtggccaggtgtggtggctcacacctgtaatcccagcactttgggaggccaaggcgggcagatcacctgaggtcaggagttcgagaccagcctggtcaacatggcaaaaccctgtctctactaaaaatacaaaaatgagccgggtgtggtggcaggcacctgtagtcccaactactcaggaggctgargtagggagcattgcttgaacccgggaggcagaggttgcagtgagccaagatgcaccattgcactccagcctggatgacagaacgagactccgtctcaaaaaaaaaaaaaaaatagaat

SEQ ID NO: 908868 - DNA, 655 bp, Homo sapiens
tctcccaggccactttgacttgaagacccmtcattggttttgctgaaactttctttattagtagtagcagtagtatactttaagttctgggatgcatgtacacaatatgcaggtttgttacataggtatacatgtgccatggtggtttgctgcatccatcaactcatctgcattaggtatttctcctaatgctatcccttccctagaccccacccctcaacaggccccagtgtatgatgttcccctccctgtgtccatgttttctcattattcaactcccacttatgagtgagaacatgcggtgtttggtttcctgttcctgtgttagtttgctgagaatgatggtttccagcttcatccatgtccctgcaaaggacatgaactcatctttctttttttggctgcatagtattccatggtgtatctgtgccacattttcattttctttatctggtctattattgatgggcatttgggttggttccaagtctttgctatcgtgaacagtgctgcaataaacatatgtgtgcacctgtctttatagcagaatgatttataatctcttgggtatatattcagtaatgagattgctgggtcaaatggtatttctggttgtagatccttgaggaatcgctacactgtcttccacgatggc

SEQ ID NO: 908869 - DNA, 655 bp, Homo sapiens
tctcccaggccactttgacttgaagacccctcattggttttgctgaaactttctttattagtagtagyagtagtatactttaagttctgggatgcatgtacacaatatgcaggtttgttacataggtatacatgtgccatggtggtttgctgcatccatcaactcatctgcattaggtatttctcctaatgctatcccttccctagaccccacccctcaacaggccccagtgtatgatgttcccctccctgtgtccatgttttctcattattcaactcccacttatgagtgagaacatgcggtgtttggtttcctgttcctgtgttagtttgctgagaatgatggtttccagcttcatccatgtccctgcaaaggacatgaactcatctttctttttttggctgcatagtattccatggtgtatctgtgccacattttcattttctttatctggtctattattgatgggcatttgggttggttccaagtctttgctatcgtgaacagtgctgcaataaacatatgtgtgcacctgtctttatagcagaatgatttataatctcttgggtatatattcagtaatgagattgctgggtcaaatggtatttctggttgtagatccttgaggaatcgctacactgtcttccacgatggc

SEQ ID NO: 908870 - DNA, 590 bp, Homo sapiens
gtatctgacacacaaacaatttcctgagtttaggcccatattccaaatgcttcctgaacattttatttctactggatagctccttcatgctccagattcaaccagtcccaaagaaaactgatcatcttttttcaccttctcaacttgctcttcatttaatgtttcccattccaagggataatcccaccatttgcctccctctttgctcttccacagctcagcagtcacagattaagtatttctcagatctgcttttttttccttttcatttctgcagttatacctcaagtcttgctgccatcatctccttcttatgtatggtagaatctccaccagcacagtttcacctgtgcgagcacactgctggcattgagtctcctggaacatacacccccgtgtctttttctgggtgtcaggccctggctgtctgtccctttatactcaccctcacaccaacccgtgaactttccctaacatagcaaaaagtacgcttgaaagtcagtgactgttgaatgacygatctttactaagagattctaagaagcaagagggggcaaagcacacagctgtttctcatccctgaagctcca

SEQ ID NO: 908871 - DNA, 648 bp, Homo sapiens
atctttacttactgaatgtttgaaaatgtttttatgtwttatttaaaatttatgatattttcaagtttttatggcattagagaaattttggctgggaaaattcttctacaaatcaaattttaaaaattttatttaattttatttttacttaaaaataaattgatgctgaagaaatgattcatgctgctctgtggcagccagtgctttgctttttccaggcagtttgtgacttcaggtgggggcctgtgaccagcctccactaagaaaatgggagatggaaccagaaagagccacagtccacgttgccatgtcccagctgtcctgtcttagaaaccatgaggtaagcgtctgctgctgatgcacactgcaagccttactcacacgaggagagtaaactgtctttgtactaagccacacagattctagtcttcttgccatgacataacttagcctgactaatatgcatgtttagtgcagaactcctgaaaaaaaccacaaatttctcaaggaaaaatctataatcccatctcccaacaataagcttcataaatattttggtgtatttctttaatgatctttatttgcatatacatacatactagctatgaattaaaatctggttactgcctttttatttgttcataagta

SEQ ID NO: 908872 - DNA, 679 bp, Homo sapiens
agaagcaactctccttgtgcctgaacaatgctaccaatggcctccaatccctggctcacccatgacaggaaaaccgtgcatgctgccctctatagccacactgtcttcaacaggatcctggctgcagaagcaggtgctcgagtggtggttggaaacaactggtgcatcttcctcctgacaaactgtcttaaatctttcctataaccaagaaggttgtagaggcaaacaagaaatctgtttcatcactgccattttactaacaccaaggaaagattgtaggtcctgggatgtttttggtgatccctgaagacctgcaaagttgggcttatagattgactcagcctgttatctttgctgtttctcttcatagctattcttctctaaatgtcataaggctcgcatgcatagtacagcaattgaaagctttcaccaagtctcaacaggtggttcagctgctcccaatgaacaaaagatgctcgaatgagaaaaggacttatattattcaaaggaaaaagaattcatctggtaaagaggaggaactgacaagacactctccatgaccaaacttttgtccggctcctcacaaccttcttttctcmtaggcctcaactggccccaattcttgcagaactgcatagcctagttttagcaagaatcctgctaaggcagtttagagagg

SEQ ID NO: 908873 - DNA, 621 bp, Homo sapiens
tgggcagtggctaggaagtcatgtaaacaaggagcaataacaagtatagggcatgtatttcagtataaaggtaatagaatataagacatgattagagacccttatatatttttatttgcttgcttacttctgagtccatagctttattctaattagttgaagtgtcttaaattttaatatccattataaggattattattgttactgcatgtccatctaagtcagaatattacgaaaagaaagggctgaggctgggcgcggtggctcacgcctgtaatcccagcactctgggaggccgaggcaggcggatcacgaggtcaggagaaaaagaccatcctggctaacacggtgaaaccctgtctctaccaaaaatacaaaaaatttgccgggcgtggtggcgggcacctgtagtcccagctacttgggaggctgaggcaggagaatggcgtgaatccaggaggcggagcttgcagtgagccgagatcgcgccactggactccagcctgggcgacagagcaagactctgtctcaaaaaaaaaaaaaaaaraaaagaaaagaaaagaaagggctgagagcactggctcacacctgtaatctcagcactttgggaggccgggatag

SEQ ID NO: 908874 - DNA, 657 bp, Homo sapiens
gtgccgtgtgcccacactcctcagccattgggtggtcgatgggactgcgcaccgtggagcggggggcggcgcttgtaggggaggctagggcggcacaggagcccatggacrgtgtgggggaggctcaggcatggcggactgcaggtcctgagccctgccccacgggaaggcagctaaagcccagcgagaaattgagcacagcagctgctggcccaggtgctaagcccctcactgcccggggccagtggggccggctggccgctctgagtgcggggtccgctgagcccacgcccacccggaactcccgctggcccgcaagcacagtgggcagccccagttcccacccacgcctttccctccacacctcctcgcaagctgagggagccggttccggccttggccagcccagaaaggggatcccacagtgcagtggcaggctgaaaggctcctaaagtgccgccaaagtgggagcccaggcagaggaggcgccgagagcgaacgagggctgcgagggctgccagcacactgtcacctctcagcatgtcccccactactgtacagcacacagagtacaaggccatcaaatttaatgtgactttaaattttgcaaacttaaactaatgtgatacaaaatatattacaaaagtcttacattat

SEQ ID NO: 908875 - DNA, 578 bp, Homo sapiens
tatgtttggggtgtttgtcctcttcaaatctcatgttgaaatgtaaccgtcactgttagaggtgagacctggtgggaggtgatttgatcatgggggtggatccttcacaaatggcttascaccatttcttggtgatgttctctcccagttagttcacatgagaactggttgtttaaaagaatctgagacctcccccttctctcttttgcgccctctcttcaccatgtgatgtgctggctccccttcactttgtgccatgattgaaagcttcctgaggccttcacaagaagctgatgctggcaccatgcttcctgtacagcctgcagaaacgtgagccaaatcaaagcctgttttctttataaattacctagtctcaggtatttctttatagcagcacaagaatggactaacacagagtctgtgggaaataggactcaaaaaattggtggcagggtgaagtgtcacccaaatactggccatcaggcaggaatatggtcagggggagtaggctgctcttattttctcactcaaagttcccacagcctactttcagctctcgggaatgggtgagaacaaaa

SEQ ID NO: 908876 - DNA, 694 bp, Homo sapiens
tctagttcccaatactattgtatgttctatctgttttatatttgaaaaatccatttcactgaraatctgcaaagatggtattatatagatatgcttacttcaactctctaggaagtctgataaaagccttcttaaatgaatattggctatagtaacagatttactaaaggtttcttgatgtagcaaggttgtgtatttaatagtctttctagtttatgaaagtcttctaacctacctggtaatgaagcagcagacaaacaacatctgggcagatatttatcttgttaagttaaatatgcacctggccccttaattatcaactgtaattgacaacttcatcatcgcagagtacttttctgtccctgccacagtggtgcaagcaattaggtaataattaatgattctttaagtgtactatttcctgtgagttcaatttttactgtacctacatttaaagagcaacaactctgtttggtttacccatattgacaaatgttagaatgaatgaaaattgccatgcttattatgagtatctcaagggatcatctataatcatttctgaccttttatcaactcctcatagtgcttgctttatttacatcaaatcttatcaaataaccattaagcattagagtaattcataggaaccaaatgcatacattttaacaaagatgctcattaccatattatatat

SEQ ID NO: 908877 - DNA, 591 bp, Homo sapiens
tccaaagaatattgctttagcattccataagactcccataaggaggagtaatggtctctagggggtttctctctggtgccatttggcctttcctaatcatttataggacaggaatgaggaagagatttaatctataaatggagaagcagaagttgcagcaacctatcatgtgactcaggccacatatccacattcctcttgatactggtgggctggaggaggtccccaagtgctgatgggacctcaactcagcaggtgtccaagctcttgacaccatccagaaaaagcattcaaggatgagtcagaaaatagtacgaagagttattgcaaagggaaaagtatacactcaggaaaggggcgcataggcagacttactcaagagtcttgtgatggagtctggggtttccacctttgtgggtttctttaatcaaggagtggaatatttatgaagattcctagaaaaagatggagatttctggaaactgtggtgccactcgtttttataacaaatacgagagttcccagaactgtcacggtgctcgtgggtgtgtgattgagtatgttaatgagmatataatgagatcctaggag

SEQ ID NO: 908878 - DNA, 643 bp, Homo sapiens
tagcacactctgccctgcccagtctacctctgttggtacctgaagattcctgagattgggcctagcacccgggtgctatcaccatagctgcacctacctgtacttgccatctgtgggcctggtgacttatgtacccagcccattacagccatggccaacagcagcatgcattactcaggactcagagggctgccccaccactaccactgacatcacccatgccacacctgctgtccaggggcccaagaatagacccactgctggaactatcggcatctgagtaagccacctgtaggtcaaagaagtaatcttcctagatccagtaacatatgggcatatgctttcctgggtcccaaggacagacatgctcagcccactgctgccaccaatggggccagaagactgacctacctggcatctcagtccccagaaaaacttcaccacagctttcactaataacagcattttaagccatcaaagaaatcacagacaccaccagtgctgttcatagctgaagaaatcatacagagactacactgctgcacaaaaccagaataagagcaaaagtgtcctacccaactgtattagtttgttttcatgctrctgataaagccatacctgaaactgggaacaaaaagaggtt

SEQ ID NO: 908879 - DNA, 681 bp, Homo sapiens
taaaactgattttgtggaggtggctggcaagggtctyttgtaattgttctcatcttcgttgttatggagatggaacttatacagttttctccctgcttagtttatcatgcttcgtatccaacagcacagtaaacaaccgattaggtgacctacttaggtctgccagcatgaattcgcagacttctgttatttaaggtgtgtgattacttgaatcttcccctgtggtccagctttttatttctactatctttacattttcagtgtgttgtttataagtggattcatttgctctaaatactttgtttattgccttctgttcagaaagaagtaagagactgggtcctaggctgaaaatgtgaattttagatctattattattgacataatcctaaaatctatacttcttcaaggacacaaaattgtgcagcatgccaaagcagtgccctgatgttgtcaggaacactcaacaccacttctcacaattacgagcagctgaagaaacaaagaggcaagaggaaataaatgtggttcaatttgtcttgcctggcttactattacaataaatgagaggggagaaagcaaaagaggttgagttaaggtataatgagaagggggagagggtaaagtatcctttggagaacatagcatactatgaagaaggtttgtagaagtctggcaaca

SEQ ID NO: 908880 - DNA, 609 bp, Homo sapiens
tcattcacatggaaagtgaatagagggaggaggaggtgcttagtgctgtacctgtggcacccccaattcactgttcaagtcactgcatgtgagcttccatcctcacacagagatagggaacagaaatgcaaatttgggagtcattagcatatagctggtatttaaaaccatgagcactgatgagatcctctatgggaagaatgtggagagagagaagaaggtgcctagtctgagccctgaggtctcctcactgacagttcacaaagttcctccaatccctgcaggctgatttctgttcttgccaagtccctgaactaattctcctgaggcttgccagtgacccagttatttctcagtctgctggggatatcttctgctccttctcttccctcatccctgaggcatttgattttgttaaccacttttttcttgaaactctatcctacattagctttgtgatggtgttctgtcttgactttccttgtgtaatacttttttgagattcttttagtctctcttaccccttggatattgatgctcctcaagtcctttacttaacattctgtccttctaaatctrattcttcatcctgagtgactttatctaaaa

SEQ ID NO: 908881 - DNA, 586 bp, Homo sapiens
gggtgtcgatgtccagagagttcctagaagccgtaattgaagacacaatccagtcatcctgggaccctaaatgacctccctgccccacccctgcacataaacctgacttgaatcacctggactatttttctgagagagtaataaactttaattgggtttgacctattccaagttttttgggctatctgttacagtgcttagcttatctcacctaatacagggactatgcaaccaagaaactggaaataaaaacaaagataattaaaccattttataataagcctattgatatagtttggatgtttgtttcctccaagtctcatgttgaaatgtgatccccaatgttggaagtgggacctattggaagttgtttgggtcatggggatggatccttcatgaatagcttggtgccttccccacagtaattactcacagtaattaatgagttcttgcttgttagttcacatgaaagctggtcatttaaaagagcctggcatstctcctgctccctctcttgccctgtgacgtgcctcctccctcttcaccttcctccatgagtaaaggcttcctgagacctcaccaggac

SEQ ID NO: 908882 - DNA, 681 bp, Homo sapiens
aagggttttactggtgccctgacactcttctcttcctcacccctcccagagcaagaactacaaaaacatagtttttttctcattttcttttagatgtatctgctgccatttattttctctctggtgattgtgtgatataggaaggggaagcatcaatggcttctttatatcctaaccacattccttgactgggccctgtttcacatctctgactcctctagagattactcagccaacatgctgcccctcctcagcgcatcaccttcttgggtctcagggcttggcattttcattcagccttgcagttccatgctcatcaccaacactgcagacatctgctgccactttcctgcctaaagcaagggaattcctgtgattcacaccgtgagcagaagcaggggtcctcttctactcagcattatcccagtttgtctcactcctttagccaatatcatgaaactctgaaactttatagcaggatgaaaacttaagcctgtagtctaaagacccagaattatgagtgaggaaactgaggccaggagagccatgaatgatagtgtttacttgattgctgtttcagatttcaccagcttttattgatacttcagcattttacttagtcgatayatctcttcgtgtgactcaaagtatcccagtggagcacagttaactgccctggat

SEQ ID NO: 908883 - DNA, 575 bp, Homo sapiens
tttaagctactggatttgagatcatttgttacatagcaatagataactaatacaaaagccaaaacaggcgttgggggtgggtggttagtgagatagagccaggagggagaaacagaatcctaatgacagtaagamtctgagtttcatcatatctgaagctcctggaaccttaaagtacaccattagaaattttaatagtgtccttttctttgatcaggtttgcttgagctgggttttttactttttaaaaaaattttattttaaatttttatgggtacataataggaatatatatttatggaatatatgaaatatttggatatgggtatacaatgcttaataatcacatcagggtaaatggggtatcattcatccaagcattttaaaataactaaaagagcataattggaatgtatgtaacacaaagaactgggtttctttaaattgtaaccaaaggactcctagccaaggtgacaaaagatgacagaggcattatagaatccagcaggcctcaatctctcaaagagcatttggctaaacactctatttcagctccagggtaggcagaccacagg

SEQ ID NO: 908884 - DNA, 564 bp, Homo sapiens
acaaagtgtacaagatgtgttattcacaaattttatttcaagaaggaacattacaaaatatttaggctataaggtggtattgggtgtgattgggttgaaagtcaccggattaagtagcagggtgatgtcagacaaatcaatggacagggaaactttagcatgctagaggagcacagaggccactgcagtatccagaggagcagcctctgccaagtcctgagggagtgtggtcacactggcccgggatgatcaggagctgggggacatggagggcaaaaggaatggcacatacaaagtcctgaagggtggatgcttagcgttggtgagtggctagagcccagggtgtggtagggctgagccctggcagaagggagagagaaggctggagaggcagacagaagtccatgaagagcctaacaaatcttgcttgcattttattgtagagacactggggagctaccaaagggcttctgggctaggatcaggtttgctggttagacagacaygcttgtcacagtggtgaaaatgggctagatgagggcacggttacatgagccagggtga

SEQ ID NO: 908885 - DNA, 614 bp, Homo sapiens
aacccatccccaatacactggcccctcaggaaggcttggccataggcatggggtctctcatgctcggaaaacatatcatcatgcctgakgcccaaagtggcttggagttaatgttattgagtgcctacagaagtctttctttttatgatgatgatgatggtgacaaataaaatgttatatatttatgatgtacaacatgacattttgatatatgtatacattgtggattggttaaatcaagctaattaattgatccattatcaatttttttgtgatgagaacatttaaaatctttcttagcattcttcaaatattcaatacattcttgtcagctatcgtaaccatactgtacaatagatcccctgaactggtaattctttctaactgaaattttgattccttggaccaccatctccccaaccccccactgtcactctggcccacggcatctcacccttcttctctctgcttctataagttcaacttttttggattccacatgcagtcacacattgcttaatgacagggatatgttctgagaaatgtgttgttagatgattgtgtcattgtgagaacatcatagagggtacttacacagacctagatggaacagc

SEQ ID NO: 908886 - DNA, 608 bp, Homo sapiens
acaccgtctccacagggcttttcaaagggctaaagaatgatactgcagaacaacgatgacctcatatatctgcaaccataaatgttaaatctcataggttcctttacggctgagaaagaagaatagatctattgtgattaacatatagaagtgcatttccagtaaatagggtttgtttccttctggtattcctcatgggacatacataagcttgtttgtgtgggcttttgcaaggttctttcacgtttgccataatagattttaaaaataaggcactaatgtgcaaaataacataaagggtaccaaatctaatcaagcagctccctcttatcctcggggaatgcatttcaagatccccagtggatgcctgaaactgcagatagtaccaaaccctatatatactatagttttttctatctgataacctagtagtaggtgactaatgggtgggtggtgcatacagtgtggagaccctggataaagggatgattcatatcctgggtgggacaaagcagtacagcgagagctttcatcacactatgcagaasagcatgcgattgaaaaacgtataaattatttatttatggaattttccacttaatactttt

SEQ ID NO: 908887 - DNA, 651 bp, Homo sapiens
aatcagaaaataagtagttctgtgatgtaggtcagtgaacttgctgtgatagcaatgatgtatgtgaaaataccagagagtactacattttgttattgttgttaaaatgttgtctgtcaaggttctatgtatggaacagataaatttacatttcctcttctacctctctggccacctctcattagtgtgttttgctgggtccttgcttcctcagctgctaaatgttacagggtcccaatactcagagcaagccttgtctctccctagtttactccccctccacctgtttctctctttgctccccatcccagctctttttgctgatctcatccagcccatagctttacataccaactatatatgaatgaattccaactttgtatcattagcttctccccatcgtctccattggatgtttaataagcatcttaaaataaacacatagaaagcagaacttcagaatcaatacccaggcccataattctctttctcctttagttttctctatgtcagtaaatcactccctcatcaaacaaattgcttggaccaaaactctgggtagtgttctcctttagaaagttttgtcamatgttcctccaaaatcctgagtccttcttttcactatcttcactacttgcaacttttcagtcc

SEQ ID NO: 908888 - DNA, 488 bp, Homo sapiens
aacacccccaaaattttgtaccagctcaccagcaatatatccaagccaagacaaaaacctctgaatttccagaaaaagaattcagaaggtcaattattgagctaatccaggaggcaccagagaaaggtgaagtcaaatataaagaaattaaaaacatgatacaagatataaaaagaaaattctgtgaaatagaaagcataaattaaaaaaaaatcataatgtctggaaatcaaggacacacttagaaaaacgcaaaatgcaccagaaagtctcagcaatagactcgaagaagcggaagaaagaacttcagaacttgaagacaaggcttttgaattaacccagtccatcaaagacaaagaaaatagaattttaaaaaratgaacaaagcctccaagaagtttgggactgtgttaaaattccaaacctaagaataatcagtgttcctgagtaagaagagaaatctaaaagtttggaaaacatatttgaag

SEQ ID NO: 908889 - DNA, 509 bp, Homo sapiens
tcaatttcattgttttttttttttttttttggaaccatgctatccagatgaaaacattaagcattttacaaaaccattgactatctgggggtctgtataatctgkaatttaatttatccagttggctttttggggtgcagtcttgctcatactaaccaggagcccatgtcgacttttacgttgataatttccgtgatcacaatccttcagctcaaggccattatttctctgctttccagtatacatctctgggactgacttgatttgctttaagaattaaacagatgcaaagctatttcctgagaagaatactggtatagcctgtagatactcatttatactaccaccaattaaaggaaaccaaggctctttcattttctcaacagtttcatctttgccatttgcatgtaagagtgttgctggcacagcttgtatgtttttattcaattcaggtaaaaagaaactccctctgagcagataaattataaaaaccctcttcttctgggttg

SEQ ID NO: 908890 - DNA, 603 bp, Homo sapiens
gacaatgagcgtaatattagtacgcccctggcrgagttcctcatgagtgttaaacaaggcaacacaagctaagccctgtacctgaggcacggtaggcactcagtgaattttcattcttattttgatggctgttacattagcatctaaaggctctaaaaaactctgtagtagataaacctgtttggctttgtccagccagctttcctcaaataatctgacacctgaggaattgtttttctcactcagcatcttgcactttgggaaatgcgatctgtttccttttatctaatgcctgaatcagcaaacggagagaagtaggaatggagagacagaatggtcatgcttcagattggtaaggaagttgacttgttctcttatttcaagttctcccacgagtgtcaacctgaagaattgccccgattctgtgctacagatcaccacaaacagttgacacaacttgtccaaaagcaatgccaaactttgtaattatctgtgtctgctataaagcagtagaagaaaaaaatactctattccttattttccatattcctcctattatgctaagagatcatttttctgtgaatacttttgaataacaaataa

SEQ ID NO: 908891 - DNA, 592 bp, Homo sapiens
ttaagtggatttatgactccttcatttcagaatcttgctactagatcagtgatataaattgaactatcagttagactatttctttttcattatcatatccyagaacctagtacacaataagcacgaagtctttattgaatgaaggatttgaatgaatgctttagggtctcaaccttaggtctgtcttttaaaaaatatgtgtggaggccaggtgtggtggctcatgcatgtaatcccagcacttcaggaggccaaggcgggtggatcacctgaggtcaggagtttgagaccagcctggacaatatggtgaaaccctatctctactaaaaatacaaaaattagctcggtgtggtggcacatgcctgtaatctcagctactcgggaggctgaggcaggagaatcgcttgaacctgggaggcagagattgcagtgagccgagatcgtgccactgcactccagcctaggcaatagagcgagactcagtctcccccccaaaaaataaaaatacaaataaataaataaaatgtgtggagttgccatcccaaagctcttttcacattagtgggtgaatttgcagtcttttgaagtctgt

SEQ ID NO: 908892 - DNA, 603 bp, Homo sapiens
ccttgaggaaagatagtaaccctaggggttttattccccatcctccaatggcattgcattattactttcaaaaacaaagcaggacaaacgtgctcttctggctttcaggccaagctaatcccggatgccctccaacactcacccacattacagggtgggaaccttccccacataaggctgagttctccagcttggctcataaacaggcagcacaaaagtcctcggaagcccattcaacaagtgttatccaggacttacaagctggctgcaaaaagagagagggagctcagtaaaacatccagtggcttcagacctcctgcaaaccaaatgcagaggcaggcacccgggatctctcagcaaaagtaatttccagagcttacttatggccagtgcatggcactttgataggcatttagaaggggtcctattactacagagaattactaggcagctgctgtggctggctttcgccccaagggggaagggtgagctgcaggtcaggccagcacactgctgagtccagggggccctgcgtggggcaacagcagccctcaygctctcacttgcagaagcagacactgtgctaataagtttcatcaggaa

SEQ ID NO: 908893 - DNA, 561 bp, Homo sapiens
ctatgatggagccactgctcacagtggaagctgtgagtcctgctcacacatggaccttagtgagagtatccagccctctagctgaaagctcttactcttttgtgtcccattccctgaggggcagttaagttgtgcttgtccagaagattaagttttgcaccaagttgcacagaattattatgccttagggatgcacagacagggaagaggatcctaggtgataatcctgaaggcatgtgtgttgctgagaaaaaaatgcctaaaactactgtctctgtgatcctgctgaatacatctaaaacagattctgtttggatgctcagagtcggttaagaaaagttcacttaagcagatggctaggaatgagacagaatctctttcacgcttcccaatttacaggcacctgcccaacagagcttacacacatgagcaacaacattgtccatgacgccaagtcrtgagtttccccaggtaattccatgggatgttgccacatggtatattttcctctctaggcattcacagaatgtttacattacgtgactgaactcaacataagat

SEQ ID NO: 908894 - DNA, 643 bp, Homo sapiens
tgttatgttatttccatacaataaagtactcaaatctttactattttatttgttttatttttctgagacaggcctcactctgttgcccaggaaggaatgcagtggcacaatctcaactcactgcaacctccgcccctcaggttcaagtgattctcctgcctcagcttcctgaatagctgggattacaggcatgagccaatatgaccagttgatttttgtatttttagtagagacggggttccaccatgttggccaggctggtcttgaacttctggcctcaagtgatctgcccatcttggcctcccaaagtgctgggattacaggcatgacccaccaggtctggccagtactcaaagctttagataaatattcatattcaaattcattggaattattctaacaatacctgaaagtgtaaaagtgagagtgaaatcaacttatttctcactatagtgttgaatactaataagttagtgaccattctcctaaatattatccatccataaatgtgytttgtgcacagatacatacaagcacatctcattttattgttcttagctttattgtgctttgcagatactgtgattgattgattgattgatcaattttacaaattgaaggtttgtggcaaccttacacagaa

SEQ ID NO: 908895 - DNA, 643 bp, Homo sapiens
tgttatgttatttccatacaataaagtactcaaatctttactattttatttgttttatttttctgagacaggcctcactctgttgcccaggaaggaatgcagtggcacaatctcaactcactgcaacctccgcccctcaggttcaagtgattctcctgcctcagcttcctgaatagctgggattacaggcatgagccaatatgaccagttgatttttgtatttttagtagagacggggttccaccatgttggccaggctggtcttgaacttctggcctcaagtgatctgcccatcttggcctcccaaagtgctgggattacaggcatgacccaccaggtctggccagtactcaaagctttagataaatattcatattcaaattcattggaattattctaacaatacctgaaagtgtaaaagtgagagtgaaatcaacttatttctcactatagtgttgaatactaataagttagtgaccattctcctaaatattatccatccataaatgtgctttgtgcacagatacatacaagcacmtctcattttattgttcttagctttattgtgctttgcagatactgtgattgattgattgattgatcaattttacaaattgaaggtttgtggcaaccttacacagaa

SEQ ID NO: 908896 - DNA, 602 bp, Homo sapiens
acctggatgtgagacatggagtcaaacgagatcactttggagctttaagatgtgactgccccgctggattttggactggcagggggcctgtatcccctttgctttggccaatttctcccatttggaatgtgtgtctttacccaatacctgtacccccactgtatctaggaaataactaacttacttttgattgtacaggctcataggcggaaggacttgccttgtctcagataagattttggactgtggacttttgagttaatgctgaaatgagttgagactttgggcaactgctaggaaggcgtgattggttttgaaatgtgaagatatgagatttgggaggggccagggtggaatgatatggtttggctctgtgtccccacccaaatctcatcttgtagctcccataattcccatgtgttttgggagggagccaatggcagacaattgaatcatgggggtgggtctttcccatgctagtctcatgayagtgaatgagtctcatgagatcttatggttttaaaaacaggagtctccttgcacaagctctctttttgcctagtgccatccacataaaatgtgacttgttcccccttgtcctc

SEQ ID NO: 908897 - DNA, 612 bp, Homo sapiens
  misc_feature 433: n = A,T,C or G
aacagtgtctgacacatggtaaatgttcaatgtctcttcatcccctgcagaaacctgtggtgcctttatcatagctcatttcacccttgcctgcagttgtctcactccctttccagacagggaagtccttgagatcagggactgggtatccactatgtgctaagtgccaccttaactgctattaagagcattttagaccaagacgcggctgcacgcctgtaatctcagcactttgggggaccgaggtgggtggatcacttgaggtcaggagttcaagaccagcctggccaacatggtgaaactctgactctattaaaaacacaaaaattagccaggcatggtggcgggcggcctgtaatcccagctactcgggaggctgaggcaggagaattgcttgaacccgggaggcagaggttgcagtgagcgctagtantggccactgcactccagcctgggcaacagagcaagactctcaaaagaaaaatwaaaaaaaaatgagcattttaatagctacctttattgactgtgttctcagtgcctggtgttaggtgaactttgcatgtatattatctcatttaattatccttttgttgttgttgttttttgtttttt

SEQ ID NO: 908898 - DNA, 577 bp, Homo sapiens
caaaggtaaatgtggctatctgggattctgggaatatcctgaaaagttacatgttctaaaaatagttccattgaaaaaaaacmccataaagcctagacaatgtagcaagtgcttaactgcagagtttagttctaagtgctaaagtaaaaaaaaggggctgggcatggtggctcacacctgtaatccaagcactttgggaggctgaggtgggcagattacttgagttcaggaggtcgaaaccagcctgggcaacatgatgaaaccctgtctgcccctgaaaatacaaaaaaaaaaaaaaaaaaaaatagccaggcgtggtggtgggtgcctgtaatcccagctactcaggaggctgaggcaggagaatcgcttgaacccgggaagtggaggttgcggtgagccgagatagtgcaaatgcactccagcctgggcaatagagtgagactccatctcaaaaaaataaaacaaagaaagaagcacaggcagcagaaagaagggaggatgagacagtccatctggcagggtgaggcttcctacaataggttgataataataggggcatcatttcttgggtttt

SEQ ID NO: 908899 - DNA, 627 bp, Homo sapiens
ggccattttttatttgttgcctttctatcttgatgacctgtctagtgctgtcagtagagtacagaagtcccccagtattattttgttgctgtctatctcatttcttaggtctaataatattgtttcataaatygggagctccagtgttaggtgcatatatatttaggatgataatattttcctgctggactgatcctcttatataacatccctctttgtctttttttaactgttgtttctttaatgtgttttgtctgatataggaatagctactcctttttgcttttggtgtccatttgcatgaattctcttttcccatccctttaccttaagtttatgtgagtccctatgcattaggtgagtctcttgaagacagcagatacttgattggtagatttttatccattctgccattctgtatctttcaaatggagcatttaggccatttacattaaacattagtgttgaaatgtgaggtactcttttattcatcatgctagttgttgcctgaatacactgcatttttttcccattgtgttattgttttataggccctgtgagatttatgctttaaggaggatctattttgttgtatttcaaggttttgtttcaagattaggaactcat

SEQ ID NO: 908900 - DNA, 627 bp, Homo sapiens
ggccattttttatttgttgcctttctatcttgatgacctgtctagtgctgtcagtagagtacagaagtcccccagtattattttgttgctgtctatctcatttcttaggtctaataatattgtttcataaattgggagctccagtgttaggtgcatatatatttaggatgataatattttcctgctggactgatcctcttatataacatccctctttgtctttttttaactgttgtttctttaatgtgttttgtctgatataggaatagctactcctttttgcttttggtgtccatttgcatgaattctcttttcccatccctttaccttaagtttatgtgagtccctatgcattaggtgagtctcttgaagacagcagatacttgattggtagatttttatccattctgccattctgtatctttcaaatggagcatttaggccatttacattaaacattagtgttgaaatgtgaggtactcttttattcatcatgctagttgttgcctgaatacactgcatttttttcccattgtgttattgttttataggccctgtgagatttatgctttawggaggatctattttgttgtatttcaaggttttgtttcaagattaggaactcat

SEQ ID NO: 908901 - DNA, 255 bp, Homo sapiens
aattaataagtgaatttagcaagtttgctgcatattagaccaataaaaacattatatttgtatatacttgcaacaaataaatagaaaattgaattttaaaaatacatttacaggagcataaagaacagcagacatttctgaattaatataatgaaagatgtacaagatctctacattcaaaattaaaacaattaaaaaatcaaaaacattattgagagwaattaaagtagttctaaataaatggagtatatatac

SEQ ID NO: 908902 - DNA, 668 bp, Homo sapiens
ggaaccctgggaactttaatgtgggaagtcctccactggcaactcaatcggccctgagcccttccaaatccaattgtgggccagtcatatcccagatgcttttcatagtctgtggctaagcagaagagcagaatgattctaggcagaggtaggattgggcaggccatggtcattattcagggacagttgagcacttcccatcatttctcctctttcgctgacctagataaagtttctctcaaacagtggtgtatgtgtattttatgcatactctctatggtacaaccatcattgcattgtcccacggaggaatacggtcactgcatgacctcactaggacatataattcagcaatgtaacctcactgctcataactcttttatcaatataaattagtttcttatttgatattcctcttatcttatcagagaaggggccaccaatggcattcaaggcaagaaggagaaaaatgtaactgcgtatctcactcaagtgccactgattctgctctgggacttaccctgtattgcccttttggatttgtcacaataataagcccatttttttcttgcccctataggtgccagtcmctcaaaatatggtcactgcaacctctaggggacagggaaatcagggtctgttctcaggtagggatatgaataatccag

SEQ ID NO: 908903 - DNA, 560 bp, Homo sapiens
agcaaggattgaagtgctgacacttaagttagaaggtacaaggtaggaaaggtgaagatgaaccaaaaaaaagcagcggggcaaggaaagacttgaaacgcatgctacatggccctgctggccagcattttaaacaaactgcaaagaaacacatcacatctctcagcagtgcgctagttcagcaaggaggactttctgaatggttgcaagaaaaagccataccttataggaaagaaaaaaggagagggaatttataggcttggtttccttcttcctcccacttctcattgaccaaattccatcctgctgggctgcaagtctccacagaccaggttgtatcatcgagctacctgatttatcatttgatccatgtctggaggtttggggtgactcagcatggacagagataaacatggtggggcaagggaaaacataagagccacagaggcccaaggctgaatttagatttcagccacttgtcaagattttaatttgggcaagctagggagttcktttaggcttctagtacgtgatacatatagattgctaagattgttttc

SEQ ID NO: 908904 - DNA, 414 bp, Homo sapiens
taaacaagaaggaacaaatcctttgctgttctagcctatatgtagtgtctatcagggattcaactagcaaaagagaaatgcagcttacacattstcagccccagtatcccaaagtggaatatagtaggacatcgttggggctggaaacaatagcttaaaaactggcacagtccacctcttgtctatcaggcattgatacacatttaccctcccatacataattaaatttcacacaataacaataacaaacttatgctagttttttcaaaccaagattatttcattctatgcacatgaagaggtaactaatgtcccaaaagccatttctgattaattattcctttttgattaatagccatattatccatctctgggagatgttatataaacctcaaattttgtcatggtttatat

SEQ ID NO: 908905 - DNA, 690 bp, Homo sapiens
acattagcaattattatcactgtcattttaktactatttttacaaacctatgctttgacatataaattagctccagtcatcacagcagtgctgtaagattgcagacagttgtatagattgttcaaggtcagctagctaatggatagaagaataattttctgaccaaatggtgatttgttatatttggatggaatgcatgtttcctagcaatttacctgctgggttgcacttcatctgccttatatcccttagctttcttccaccttctgcttatatattgaagaattgcaggcttatcattatatatttgcctactgattaaatgtattttaatcctttatggaattaccataagagatgctatggataggctagaacaaactttgaaagagaggtggtgtcttcgtttcctagagctgctgtgttagggttcttcagggagagagaactgataggatatatatatatataatctattatatgtgtatgtgtgtatatatatatgatctattatatgtgtatgtatatatatatatatacacatatatatatatatagagagagagatgagatgagatgggatttttttaggggaattagctcccatgacaggctttctgcaacctggaaacactgaaatgctgatagcatcgcttagtccaactctgaaaacctcagaaccaggtaaac

SEQ ID NO: 908906 - DNA, 573 bp, Homo sapiens
aaacatattatgagatcacctatcttatagagaagccctcccagacctcacattctcctccaacaaccattatttgctaacttttatggaaaatctcaagttaaaagaaacaacagttatttatacttgcagtgtcaaattcctctctgccaattctctcttgatctagacttttgtccccaccattccactgctactgtccttaatctccatcatagcagtggtcatctcttggttccatataacttcttacagttgcagtatatttcagcccttattatttctttctccttgaaacactttcttcacttgacctctaggacaaagatccaaatataaactggcaactttagagttgatccatccagctgtaacctcttctcaagttctagccttgtatttccaaccatcaagcggacactaccacttggatatctaacaggcatctcaaacttgacacatacaaaaactgtacttaattttttccctctaacctgtttcttctacagtcaatcctctctyaaaaaaaatcaatcccatctgtccagttgctcatgccaaaaattttgaaat

SEQ ID NO: 908907 - DNA, 610 bp, Homo sapiens
cagaattatttcttaaaaataggttaagttttggggaaaataagttatcttttttcaaggaatgagatcatgtcctttgcaggaacatggatggtactggaagccattatcctcagcaaactaacacaggaacagaaaaccaaacacagcatgctttcactcataaatgggagctgaacaatgagaacacatggacacagagaagagaacaacacacatggggcctgtcatggggtgtcgggagagggagagcatcagaataaatgtctaatgcacacagggcttaatacctaggtgaagggttgataggtgcagcaaagcaccatggcacacgtttacctgtgtaacaaacctgcacatcctgcacatgtattccggaacttaaaataaaataaaataaaataaaataatcttttttttcagggccttcagtgacatttagtgctttacttattatacctttgaagtgactgcattgagtcatgcactcagaaatcgaatcatcttagatagtatatggctttataaagaaaatgaaaaatatcattttttytaggccagttagagcaatcacctcttatctttttgccccagtctgccttccaagaag

SEQ ID NO: 908908 - DNA, 551 bp, Homo sapiens
aaatttttaagactaagtcttttaccatttagtacttaatagctaacttagcaatatttttagcaactcacttcattgagtctttccgaagaatacaagctgtttcaatagaaacaataagtkcttctctttacatactcatattttatcagttaccttaatatttaattaaattatggagttaaaattacatgtacccaggcagtgacaggtttagaaagcacagtcttggtaagcacagtagctgagggacacaaaagtataggggtataccagggaattacctacgatccacaagcaggctttagtcagtaggtttgcaaaagtaatagagagttttagtttatctggctggatggttatgtggtggccatttaaaacatcattttaaaaataagcacttttcctactgatgtgctttggggcttgtgggctaatgttggagacctggttccagcttccctgtctcctggaaactttgccacctccctattcctggtcctagggcccgtgtccaggagcatagctctgtaggaagactgtgggattag

SEQ ID NO: 908909 - DNA, 652 bp, Homo sapiens
tactctcttaaagacctcttgtaaggcagatctggtggtaacaaattccctcagttctgggatragctcaggctttatgttccctcctcaacttgggggaagcagggacagggaccttggcagtagcaatggcagagggcctttcacttctctcttggggctccaccccagagaaatgcagggccgctaccaatcagagcattctgccaagggttgggcagctgcacttcgggcctaagttgggggtccctgcctggtgatgagcagaagggtgaggggaagttgacgagtcccttttccttagggagactgtggcatgctggaagtgtgagtaaagcactcagtgcctttgctccttcccagtctgagggcagcaagggcagtaccattgtggtggcagtggcagagggactgtcagttgcttctgggagctcaaccccagagaaatgcagatctgcagccaatgggaaggttcatccagggagtgaggcagttgcactgtggggctgagttggcggctctgcttggtgaagagcagggggtcagattcacacagggaagagagactgggctctttcccttatggtgactgtggtgtgctggaggcacaagtaaagccctcaggctctttgttccttccctaagggcagca

SEQ ID NO: 908910 - DNA, 652 bp, Homo sapiens
tactctcttaaagacctcttgtaaggcagatctggtggtaacaaattccctcagttctgggataagctcaggctttatgttccctcytcaacttgggggaagcagggacagggaccttggcagtagcaatggcagagggcctttcacttctctcttggggctccaccccagagaaatgcagggccgctaccaatcagagcattctgccaagggttgggcagctgcacttcgggcctaagttgggggtccctgcctggtgatgagcagaagggtgaggggaagttgacgagtcccttttccttagggagactgtggcatgctggaagtgtgagtaaagcactcagtgcctttgctccttcccagtctgagggcagcaagggcagtaccattgtggtggcagtggcagagggactgtcagttgcttctgggagctcaaccccagagaaatgcagatctgcagccaatgggaaggttcatccagggagtgaggcagttgcactgtggggctgagttggcggctctgcttggtgaagagcagggggtcagattcacacagggaagagagactgggctctttcccttatggtgactgtggtgtgctggaggcacaagtaaagccctcaggctctttgttccttccctaagggcagca

SEQ ID NO: 908911 - DNA, 562 bp, Homo sapiens
gaaccaaagacaaaaataacatgattatctcaatagatgcagaaaaggcctttgacaaaaytcaacagccttcatgctaaaaactctcaataaattaggtattgatgggacatatctcaagatgataagggctatttttgacaaacccacagccaatagcatactgaatggtcaaaaactgcaagcattccctttgaaaactggcacaagacagggatgccctctctcaccactcctattcaacatagtgttggaagttctggccagcgcaatcaggcaggagaaggaaataaagggtattcaattaggaaaagaggaagtcaaattgtccctgtttgcagatgacatgattgtatatctagaaaaccccatcatctccgcccaaaatctccttaagctgataggcaacttcagcaaagtctcaggatacaaaatcaatgtgcaaaaatcacaagcattcttatacatcaataacagacaaacagagagccaagtcatgagtgaactcccattcacaactgcttcaaagagaataaaatacctaggaatccaacttacaagg

SEQ ID NO: 908912 - DNA, 633 bp, Homo sapiens
tgggaatgtctattcaggccatagtgctccctactctttaagaattactagaaccactcataccatgggcctttggagacattaatgaggtcataagaatgagctcctgatcrgataggattcatgtccttttaggagaagacaccagaaagcctgaccaagctctctttctgtctcccactctctgttttctctcccccttgctcagagaaaaggacatgtaaggacatagcaagaaggcagtcatctgcaatccagaaagggagactccccagaaaccaaaccctgctggaaccttgatcttggacttgccagcctccagaactctgagaataaatttctgttgattaaggcccacagtctgtagtgttttgttatggcagccagagcatattaatacatagtacatattcatattcctccaaattatgaaaaaaaattcttttattgctatttgcttttttcaatgtgcgatctcattgaaaatcatgtattgcatttgattgtcatgtctctttagtctttttcaatatagtaccccccacacactttttttttaatcattcaagctacaccttcattttaactatcactaaggaaaaaaacagtaccaccatttataacaataaatgt

SEQ ID NO: 908913 - DNA, 644 bp, Homo sapiens
gaatgctaggtcaaatggtagttatgttttcagttctttgagaaatttccaaactgctttccacagtagctgaacaaatttatattcccaccaacaatatatgtgttcccttttccccgccactttgccagcgtctgttgtttttgactttctagtaatagctattctgactggtgtgagacagtatctcattttcattccaagctttttaaagactaaatagtatacatcacattgtctttctctattcatccattaatagatacttaggttgattccacatcttggctattgtgaataatgctgcaatgaatatgggagtgcagatatatctttgacatactgatttcaatttttttggatatatacccactaacggacaccttcttggtcagaacaatcaaacaagcaagtcactctgctaaagtgctttgctttggattaaatgttactgctgccccttgcaatcacagagggaagcaacagaataaacataaaaatattttcttttttttccataggttattggggtacaggtggtgtttggttacatgagtaagttctttagtggtgatttgtgagattttggtgcacccatcacccaagcagtatacgctgcaycatatttgtagtcttttatcctt

SEQ ID NO: 908914 - DNA, 623 bp, Homo sapiens
cagaaatggttttaaaccgcagggggctgtgcaagagtgaacatgtggagatggatcagaggacatcctagggtgggggagggtgtgtgcaargcacagatgaatggaagtgtccagagcatatttgggaaatattcccattttactaatgagttaactatgatccaagaaggtaggatcacttgcccaaatagaaaaatgtatgtgattaaataagataatttctgagaaagtgcccaaggcagcagctagctctctgggagtataataaatgttacacttttattcataagtgttgtttatcttcctcctgaaaccactcagtacacagccagaaccagggcttaaatccaagttaaacccaaaaggaaattctttttggactgcatggtgtggatgggtttggtttattctgagattgtgctgaggagcctgttaccaggcctggcagtggccacaccccctagggtcaagatgtgaggaaaggagacttagaagggttggaggggtaggaattaagggaaggaagcgagcatggttgaaagcataaggtctatactagatggaccaagacagtgaaaatgagggcattccaagcagagggaacagcacagaccaagagt

SEQ ID NO: 908915 - DNA, 663 bp, Homo sapiens
actattctgtagaaaattttggaatatgtatcaattttaactgagtatattatttgatccagcaacttcagttctagggaaagttaagtgaacctaaactcaatttcctagaatagttgcttctaaaataasttttggaaatggtggtaacatctgagcattacagtagccattggccatgtgtgaccattaaacacttcaaataagggaagtttgactgaggaaatggatatttagattccttcatttctttcggttattagcagctttattgaggtataattaatatataataagctatacatatttaaggtgtaaaatttgttaagcttgacatatgtatatacctgtaaaaccatcactataatcaagataacgtagatatccattacctcaaagatttcctcatacccctttgtaatctctccttcctgcccttccccacccactcctgcaaaaagcattaatttgcttttagtcacaatatattagtttgcatttccaagaatttcatataaatgagatcacacaataagtactctttttttaatctagcatcttttatttagcatagagattcacccatgctgtagcatatattattcctttttcttgctgagtagttttttttgttgtatgtgtataccataatctttttatcca

SEQ ID NO: 908916 - DNA, 670 bp, Homo sapiens; identical to SEQ ID NO: 897768

SEQ ID NO: 908917 - DNA, 602 bp, Homo sapiens
ttattattatgagtacatttcctctctattttgttgagagtttttatcatgaagggatttgaattttatcagatgcttttttcatctattgaggtaatcatatgatttttgtttttcattctgctgatgtgatgtattatatttattgatttgggtacgttgaaccatccttgcatccgtgggataaatcccacttaatggtttgtattacatttttgatgttggatttggtttgctgatattttgttgaggatttttgtgtctatttcaacaggaatattggcctatttttttttaatgtgtccttgtctggttttagtaacagagttatgctggcctcataaaatgagctagggagaattctctcctctttgatttttcagtttcagaaggattgctattagttcttttttgtatgtttggttaaattcaactgtgaatccatcaagtcctaggcctttctttgttgagggyctttttattgttgatttaatcttgttacttgtgattagtctgttcagattttctattccttcctgattcagtcttgctatgttgtatgcttccaggctgtaaactttcgtcttagaactgcttttgct

SEQ ID NO: 908918 - DNA, 620 bp, Homo sapiens
gacagtgacaattgtgccaagacagcttttctactctgcactacacttaccctactttgtcattcttttactttgtagtgactgcaaagtaagggatcaaataaattatgcaatcaattaaagcccaatacagatgcatttgtatgtgtcctctgcagctcttccaaatatattgttaataagagttgtattcataattaagaaaaatagtagattcccaagacatgaaattgcagcatacttacttgttattgtattgttaagttatatctttcttacaagtcatttggaaacaaagtgagaggaaaacaaattgtaataatcatttcgggtgtatatttttctttccagagatagttttcataatttaggcacagcaaactgtgcaggacatttttgaagtcatataacaataatttgaaaagaatttaattttgccacactcaaaaggtggcatatttggttaagatggaatgcgaaactacatacgatttttgtgcatttatcattagcattactaagatttaatttaagaaaatctgaaaaggtattttcctgtttacctaacatgattatgcgatcaattawagcccagtacagatgcatagtatctgtggact

SEQ ID NO: 908919 - DNA, 609 bp, Homo sapiens
aaatcagtttctacatccactatgaatatctttcaaaaatgaaattgagataaagatgtttttagataaaagaaacaagtaatcttttatcagaaaacctttactgtaaatgtccttaaaataaaggacaataatatcaaatggaaacattttaatctgaaaaaataaataaaattaaaggtaaatttgtgaataaaacaatatatttttatcttaataattttaacaacatttgattgtttaaaggcagaataaaaatgccttatggagcgtaaaatttatgtacttatgacatatatgtatatctctcctaagtatatgtaagatatatatatatatctcctaaatatacacgagagatatatatatctcctaagtgtatatgagatatatatgtctcataagtatgtaagatatatattgtatatgatatatattatgagtatgtatatattgtttaaaggcagaataaaaatgtcttgtggagcttaaaacttatgtacttatgatatatatatgtatctcataagtatatatgagatatgtaaatatctcataagtatatatgagatatgtaaatrtctcataagtatatatgagatatgtaaa

SEQ ID NO: 908920 - DNA, 711 bp, Homo sapiens
atgagtttatgggtacagcaaaccaacatggttcatgtwtacctatgtaacacacctgcatgttgtgcatatgtaccctaaaatgaaagtataataataacaaaaaaatgcacaactacatggaaactgaacaacttgtttctgaatgaccattgggtaaataacaaaattaaggtagaaataaataagttatttgaaaccgatgagaacaaagacacaacacaccagaatctctgggacacagctaaagcagtgtttagagggaaatttatagcactaaatgaccacaggagaaagtgggaaagatttaaaatctacacccttacatcacaattaaaagaagtagagaagcaagaggaaacaaattccaaaggtagcagaagacaagatgtaactaagatcagagaagaactgaagtaaatagagacacgaaaaacccttcaaaaaatcagtgaatccaggagctggttttttgaaaagattagcaaaataggtagactgctagccagactaataaagaagaaaatagagaagaatcaaatagtcacaataaaagacgttaaaggggagctcaccactgatcccacaaaaatacaaactaccatcagagaatactataaacacctctatgaaaatacactagaaaatctagaagaaatggataaattcctggacacatacccctcccaagactaaaccaggaagaagtca

SEQ ID NO: 908921 - DNA, 665 bp, Homo sapiens
gcatttctacaaccatctgatcttcaacaaacctcacaaaaaccagcaatggggaaaggattccctatgtaataaatggttctgggagaactgactagccatatgcagaaaaccaaaactggaccccttccttacaccttatacaaaaattaattcaagatgaattagagatatattgtaaaatccaaagctataaaaaccctagaagaaaatctaggcaataccattcaggacacaggcatgggcaaagatttcatgatgaaatcagcaaaagcaactgcaacaaaggcaaaaattgacaaatagaatctaattaaactgaagagcttctgcacagcagaaactatcatcagagcaaacaggcaacccacagagtgggagaaaaattttgcaatctacccatctgacaaaggtctaatatgcagaatctacaaggaacttaaactaatttacaagaaaaaacaatcaaccacatgaaaaagtgggcaaaggacatgaacaagcatttcctaaaggaagacattcacgtggccaacaaacatatgaaaaaaaagctcaacatcactaatcattacagaaaygcaaataaaaaccacaaaaagataccagctcataccagtcagaatggctattattaaaaaggcaagaaacaacagatgctggca

SEQ ID NO: 908922 - DNA, 566 bp, Homo sapiens
gaacaaatggataacttcctggacacatacaccatcccaagactataccaggaagaagtcgaatycctgaatagaccaataacaaattttgaaattgagacagtaattaatagcctactaaccaaaaaaagcccaggaccagggggagtcacagccaaattctaccagaggtacaaagacgagctggtaccatgacttctgaaactatcccaaacagtagaaaagaggtactcctccctaactcattttatgaggccagcatcattctgataccaaaacctggcagagacaacaaaaagagaaaaatttaggccaatatccctgatgaacatcaatgtgaaaatcctcaataaaatactggcaaaacgaatctggcagcacatcaaaaagcttatccaccatgatcaagtaggcttcattcctgggatgcaaggctgattcaacatatgcaaatcaaaaaacataaacagaaccaatgacacacataaacagaaccaatgacaaatactactttgttttaaaggtcatttgtgtgctcacaaaatgcaagtttaaaacgttagatt

SEQ ID NO: 908923 - DNA, 644 bp, Homo sapiens
aaaagttgaaaatgaggtgttatggactraattgtgtttcttcaaaaatttatatgctaaagtcctaaaccgcaatgtacctgtattggagatgtggcctttggagggcaattagagttcgatgaggtcatgagagtggggccctggtggtgagattaatgctttataagaagaaaaagagagaaatcactctctctgtaccacatgagaacacagcaaggaggtggtcatctacaagctaggaagaggcacctggccagcactttttcttggacttctcagccttagaactgtgaaaaataaatgttttttgtttaaaccacacaaactagtattttgtcacagtagcctgaaaggacttacatgaaaaaaaatacttcaaattattttatgagttcagtattaccttgataccaaagccagtcaaagatagtacaaaaaaaaccctacaaaccaatatgcctttagaatattaatataaatgcttattaaaatactaggaaacaaaattcaacataaattcatcagattgaaagtattataaatgataactaagttacatttattaatggaatgcaaagatggttcaacatagtaaaataaacttaaatagcacgttaatagaatgaagaaaaaccccacat

SEQ ID NO: 908924 - DNA, 598 bp, Homo sapiens
cactgcaaattagaaggtgaattcgcagctctctgggcaggcccttacgtgtgcakatcctgttccttgtaattggaattgtgtttgcaaatccctctacacccaggtgaggttgtattacacccctgcatgttggatggagaagaaaacacagtctgcttaaaagagggcaattcaacttcctctaaaaactggagactatgggtgagctttttgcaaccacagcctttcaaggaatgtgattgcaatcacaatactgctatggtgctctcctcatttcttaaaaacattcataaaatttatattcaatgatagcttagatagaggtcttccctagctatgcagtaagtctttagaaagagatcttgatgttgcctcttgtgacatgtttctaagaaactacattgttataatgcagacctaatctctgcttggcatatgagcagatgatataagcagacaataacatatgttgcaagagaggggtaatgcagttaattgagttggcaagtaaccaactaggatagtttttactaataacctttgctaggtacagttacttcctcctatttgaaagcctttaaatgacaaatttaat

SEQ ID NO: 908925 - DNA, 598 bp, Homo sapiens
catcttgggaaatcctataatactaaaataaygtattatgtgataaatattaatattttaatataccctgagatttactaaaattattttatataacaaaatatttgctaactgaaaaatgtaatttccaaaatgattcaagggaaaacatttcacttaagatattcactagtactatttagaacatataatctattaaccaatatatttctcatagacatgaaagtaaataaacgctattgcgtttatattatgatgtactttctgaatattttatgacatattcttattctggtctactcttctaaaatgctagttttattttcttttaattgtcttaaattcttagaatgtggaatgcacataactagttactgcttattaatttaaagacatttgtcaggaggaaaacttccaaacagatctgtgtgctttttgctgctgctttctgaatagttagcatagtccttagcacataataaacattcgataactattcactgattaaatggaggaatgaatgaatggctacatgaatgaaaatgtataaacacataacggtctgaatgtttctaggagtgctttagtgatttcactt

SEQ ID NO: 908926 - DNA, 584 bp, Homo sapiens
gaggatttcacagtgattacttttcccctccactggacaaaaccagagaaggacatttcttggatctttgctatgagaatctagaggtatccctatatatatacagctcataaacatatgggggcttttactggtggcagagaaattcacttggaagagatccaagagggtgcctgaaggtcaaaaagagaaaagagcttttaaccttgattctaggactttgtagagttgcctctttcccatgattcttctcttagggtgagcttcccccatgtgcagtgccctccttacccttgggaattgagcacaggcagtgtgtttaggaagttgtatgcatgcccaggaagtttattgtcccaagcacctgcattcaattaacactttaatgttaataactgtggatcatcaggaaatggcctctccctggagccttgggtgggctgccaaattatcatttctagagaggcagtgtgataattgtcaaaccaycacctgacattcctggtgggtaagggagacccctctcctgccctgctcatgcctatctaactacctgtaacagggccaactaagaatgtggcacc

SEQ ID NO: 908927 - DNA, 621 bp, Homo sapiens
gtttttagctctttgaggaattgtcacactgctttccacaaggttcaactaatttacmttcctattaacagtgtataagcatttcttttttactctgcactgacacttttcaaaagaagaaatatatgcgaccaaaaagtatatgtaaaaaaggctccatatcactgattattggagaaatgcaaatcaaaaccataatgagatattatctcacacaagtcaggatggcttttattaaaaagtcaataaatatatgttaacattcagtctattcccctaaaagagacccgggacatggctgacttaaattttttttatttttttctatatggtacttttattttactcataatacatataatacataatcaacagtatcctagcttcaaaattgtacttgtctacataaaaagtctaaggtattttccaaatatatatcaatttattacagacaaaaaggaaaaaaaacctgccagttgactaaatagaatctttttttaatcaaggatgactgagttaaaaatacagtgtactagctataaccccactgagtatgatttaaataactttttggaaaattttcaagagctatcactcaatatgatttgattcatgctcagt

SEQ ID NO: 908928 - DNA, 617 bp, Homo sapiens
gagaatatgccttgtgacttttcagataaagtccaaaaataatttaaaatttgggataaagaagaggaygcttatcattggcttttactagttgcttgttaacacatgcacaaaatcatatttactcatttttcaaacattataaatatttttcccccttctctcttgtgtgaagttaaaaccgtctcaccatgaccttttcagtattctgtaatttgatttgcttgccatacccaccttgccctgtttaccatcccaggaagtgtgattggaacagacaaccagtcaaaatggagaatattaaaaaggtcaaagtagtaaaatttactgtccaacttttccaggaaataaaagaatatttacagtttaatatgtgcctcagatgacaggctgtccaaagaaacaaaagtgagcaagattgtatttagcttatgatagcaaatataacaggcaaagggattcaagaaggtgttataattagtagttatccccatatttattattttggatgtttaaaagaaagccttcttgtcgatatgtcagaagtaactttgaaacttgagaggggaaaaagataaaacaactgccttaattttataattttctaactgacaatg

SEQ ID NO: 908929 - DNA, 606 bp, Homo sapiens
caacttgtgctctcctgagagacagcctgagccaaacctggacccacttgagccaaagctgggagagctaaaacgcactgtaacagaatgtagggagaggaaccttgaaatcatttcttcaccaaagccctggtgttctggggccatgattggcttggcagtgtgaaaatcttcaaaatgcctttggggtaactctattgttttccacccatactaatctccttatcaaattgttcacctgacaacaccattggtgttctctcctaatcttgtttttttattctttacaatatgttaaggctaagaattttccaaatatttaagttttgattccatcttgattacaagttccatctttaattcattgatcttatcttgcatttccctataagcagtcaagagaagccatgtggcatcctcaacaccttgcttagccatttcttccaccaaatatccaatttcatcactcttaattttctccttccacaaaacactaggacaggaacacaattaagacaaattatttgccacaatataacaaagacgatgacctttttgtctgtttctaataattcatctttttrctcccatttaagatctcatcag

SEQ ID NO: 908930 - DNA, 639 bp, Homo sapiens
tatatttgcatatatttgatgtgccaaatgatcaaacccaccattttttctatttctctttctataccaggataactgttgtatcctgtgttctcatggacatttaaaataagattttcataaatgtttgatttatctaaaattgagtgtatggagaggagtaagagttcctcgtttatgcagccattttattttttaacaatagttattaaataatgatgtctacgctcacagttttgttggttttgacatattcttagttcttccaatacttagcaatatttaatgacgtttatttaatctattatgttttctttaagtttcataatatattaagtgttatagtttaccctttagaattgcgtcaaaataagttgtatttaataattataacaattttctagggtggtaatttatatttctgttttacagttgagacaactgagacatggaaagtttacattataggtggcaaagctatatttttagagtttcaaatcctatgtttttagccattattttatcctaacttcttttgttacatttctattatatgttattgcatacaataaaattttgctaatttttrttttgtaatatgacacaatatttagtgaaacaaacacaacagtctatctc

SEQ ID NO: 908931 - DNA, 503 bp, Homo sapiens
agcttccttataagtgagagaagaaggcagaagaaaggcaaccatggaggtcgyagcatgagaaattactcaacatcactgacttttaagatacaagaatgaggacccagcgcggtggctcatgcctaatcccagcactttgggaggctggggtggatggatcacgaggtcaggagattgagaccatcctggataacatggtgaaaccccatccctactaaaaatacaaaaaattaactgaacatggtggcacgtgcctgtagtccaagctactcaggaagctgaggcaggagaatcacttgagcctgggaggcagaggttgcagtgagctgagattgtgccactgcactccagcctgggtgacggaaggagactccatctcaaaaaaaaaaaaagatataagaatgaagtcatgttccaaggaataaaggtggcctctggatgctgaaaaatatcaagtacatagattctgccacatagccctcagaaagactgcagccctg

SEQ ID NO: 908932 - DNA, 503 bp, Homo sapiens
agcttccttataagtgagagaagaaggcagaagaaaggcaaccatggaggtcgcagcatgagaaattactcaacatcactgacttttaagatacaagaatgaggacccagcgyggtggctcatgcctaatcccagcactttgggaggctggggtggatggatcacgaggtcaggagattgagaccatcctggataacatggtgaaaccccatccctactaaaaatacaaaaaattaactgaacatggtggcacgtgcctgtagtccaagctactcaggaagctgaggcaggagaatcacttgagcctgggaggcagaggttgcagtgagctgagattgtgccactgcactccagcctgggtgacggaaggagactccatctcaaaaaaaaaaaaagatataagaatgaagtcatgttccaaggaataaaggtggcctctggatgctgaaaaatatcaagtacatagattctgccacatagccctcagaaagactgcagccctg

SEQ ID NO: 908933 - DNA, 646 bp, Homo sapiens
atagaacctgtgtgtcccctctggtttctgtatgcacattgctggaagagattgaaaagtatgtcaccatgattgtggatttatstaattctcactttaattctgtcatttttatttgtttgttttatatattttgaggctgtgatcaggagcacacaaatttagaattgctgtatcttcctggccaatttattttcttataaatatgaaatgtccctccttacctctagttacgattatagccttaacgtctactttatctggtattagctatgccaactttcttgggttactgttagcatgtcatatctttttccatcctttaaccatcaactgtttggtgcccttatttatttattttttgagatggagtttcgctcttgttgcccaagctggagtgcaatggcacgatctcagctcactgcaacctccgcctcccgggttcaagtgattctcctgcctcggcctcccaagtagctgggattataggcttgtgccaccatgcccagctaattttttttatttttagtagaaacggggtttcaccgtgtcagccaggctggtctcaaactcctgaccttaggtgatccacccacctcggcctcccaaagtgctgggattacaggcatgagccaccgcgcctggc

SEQ ID NO: 908934 - DNA, 646 bp, Homo sapiens
atagaacctgtgtgtcccctctggtttctgtatgcacattgctggaagagattgaaaagtatgtcaccatgattgtggatttatgtaattctcactttaattctgtcatttttatttgtttgttttatatattttgaggctgtgatcaggagcacacaaatttagaattgctgtatcttcctggccaatttattttcttataaatatgaaatgtccctccttacctctagttacgattatagccttaacgtctactttatctggtattagctatgccaactttcttgggttactgttagcatgtcatatctttttccatcctttaaccatcaactgtttggtgcccttatttatttattttttgagatggagtttcgctcttgttgcccaagctggagtgcaatggcacgatctcagctcactgcaacctccgcctcccgggttcaagtgattctcctgcctcggcctcccaagtagctgggattataggcttgtgccaccatgcccagctaatttttttkatttttagtagaaacggggtttcaccgtgtcagccaggctggtctcaaactcctgaccttaggtgatccacccacctcggcctcccaaagtgctgggattacaggcatgagccaccgcgcctggc

SEQ ID NO: 908935 - DNA, 640 bp, Homo sapiens
actctagacattctgggctagagcaccgcggggtctcacccagtttatcatcctagcaaccacatactagctgcctccctgtgttcctgcttccactccccacctcctgcggcccccccagaatcagctcccaacagagcatgcagagatagtatcttaaaaccagtccaagcctgtcaaccctgtaaccgtaagagaggacctgagcccctgccccacgtccctccttcttccctccttcctcccctgcctctttcccggcctctcagtgccatcctctgctagatcttccagcctgaaggaaaactcttgtgcctctgctcgcacacctctcacaccagatgtgcgggttctccacaccaagcggttctccagttctctggacacgccagaagttgaggtgctcctcacctccaatgccgctcactccccaggtgacccacagctgccatctgacttggctgcacactgggcattcccacagcccctggtcagtgtgatgttcgctgtaaagcttgatcaggggagtggagttgcagtaggaaagtstgcccgggagtgactgcacaaaacaaattggccaagtggaagtgttttctggccttccagtccacagacataatcttcagtggggatgagc

SEQ ID NO: 908936 - DNA, 577 bp, Homo sapiens
ccaaataaatcattgcgaccttagcaccccaagtgtaaaaacctcttttatttctattcttgatctctagtccctgcttatgtgtatgcataaatgcatgacaccgtgcttctcttttagttatttatttctagagatcatgtctttgaaaatcattatattcccagcaactatttagagtggtactaagctaacttggtttatggtgtcactgcatagcagttatttgattggcccattcctttataaaatattttatgcttagatgatgaactctacataaattcagccaggagaatgttttccttggcaatctctgggagattacaaatgttccttttttttttttttttttttttttttgagatggagtctcgctctgtctcccaggctggagcccagtggcgcgatctcggctcactgcaagctccacctcctgggttcacgccattctsttgcctcagcctcccgagtagctgggactacaggtgcccgccaccacgcccggctaatttttttgtattttagtagagatagagtttcaccgtgttagccaggatggtctcgatctcctgac

SEQ ID NO: 908937 - DNA, 646 bp, Homo sapiens
gttgaagactcatagggtttcagcactgtggctcacggctccttaacttattggtcctagaagaaaaagctgagaatgaaagagtaatttttaccactgtaattcaacaacatccatccaagtaattttttttttttttttttgagacagaatctcactctgtcacccaggctagagtacagtgctgtgatctcagctcactgcaacctctgcctcctgggttcaagcaattctcccacctcagccttgccaatagttgggactacaggcctgtgccaccacatccagctagtttttgtatttttagaagacacacggtttcaccatgttggcatgtaattttcaaatttcctatcttttaagaagaataaaaaaattcctgacgtttgtggagcttctagcaggctgtgtgctagacccttttactttctcattttgatgaggacttgaactactcaaataatatccattaactactggtcttgaggggccttaatacatttcattttcgaatgaagccttcaaccattgctcttcatttacatytataagcaatccagctttttgaaggttcaagggagctttaatatttctgagcaagcatctatctatattccatctccaagatccttttttcttaaatcac

SEQ ID NO: 908938 - DNA, 623 bp, Homo sapiens
ataacaagcagtgagattgaaattgtaactaaataattgccaaccaaaagaaagtccaggaccaggcagattcacagcagaattctaccagacattcaaagaagaattggtaccaatgctgttgacactattccacaagatagagaaagagggaaccctctctaattcattctatgaagccagcatcaccctaatacccaaatcaggaaaggacataaccaatcaaggaaactacagactgatatccctgatgaacatagacgctaaaatccttaacaaaatactagctaaccgaatccaacaacatatcaaaaagataatccaccacgatcaagtgagtttaataccagggatgcagggatggtttaacatacgcaagtcaataaatgtgatacaccacataaacagaattaaaaaccaaaatcacatgatcatctcagtagatgcagaaaaagcatttgacaaaatctagcatactttatgattaaaackctcagcaaaattggcatacaaggaacataatacctcaatgtaataaaagccatctatgacaaacccacagccaacataataccaaatggggaaaagttgaaagcattccctctgagaattggaacaagaca

SEQ ID NO: 908939 - DNA, 614 bp, Homo sapiens
agaacatacaaagtttgtctttctgtgcctggcttatttcacttaatataatgacctccagttccatccatgttgctgcaaatgacatgatttcattctttttaattgatgaatagtatatatatatatatatatatatatatatatatatatatacacacatacacacatacacacatatatatacacacatatatatatacaccatataccatatatatgccagatttcctttatccattcttccattggtgaagccttaggttgatttcatatatttgctattgtaaatagcattgcaataaatggaagtgcaggtaccctttgacatactgagatcttttcctttgggtaaatatctggtagtaggattgctagatcatatggcagttctctttctagttttttgagatacctctatactgttttccatagtgactatactaatttgcatcccaccagtagtatatgagttcccttttctgctgacccttgccagcatctgttattttttgtctttttgatgacagctattgtaactggggtgagatgatagctcattatggttttgatttrcatttccctaatgattgctaatgttgagcatgttttca

SEQ ID NO: 908940 - DNA, 584 bp, Homo sapiens
gtagttctgggaccatttgcaagacagcgcattgattggaagcctrtacattctggagtgttggcttaatatgttgatcatcctttgaggtggggcacaaggaaaaataaactatttctccttcaggaacatacagtggcataagagagaccaacttggtgataactgatcataggattagaccaaggtgcagaagcaaacagaacctccataaaatgtaatgatgtctcgtgcctgcaatcctagtgctttcagaggccaaggtgggaagattccttgagctcaggagttcgagaccagcctgaacaacacaacaagacctcgtatctatgaaaaaataaaaataataaaattagctgcacacctatttggtggcacacacctgtggtcccaggtactcgggaggctgagatgagatcatttgagcccaggagatcaaggctgcaatcagctgtgatcatgccactgccctccagcctggacaactgagcgagaccctgtctccaaaaaaagtaaaattaaaaaaaaaattaaaatgtgatggagtgcagaggaaaggtcagttgattctcactaagggttgg

SEQ ID NO: 908941 - DNA, 670 bp, Homo sapiens
aagattcaccagtgataaacacagacacagagagacatatgtcgggctgagctggaagctggatgggagagtcaggggctcaaygccagagaagaggcaggaagggtttcctgtgcagcaggggttgagggatggatagaagcctcagcatgtggacaacagacatgaattagaagctcctggagcctacagggaaagaagctgaggtttccagctgcttgttccagtggttacctctgtgtgcagtggaccttgctggccagaggtgaggcagctgggctgggaaacctgggaggagactcccccagctgcggtgacatctttcttcatgctcttcagagtcatgattcacacacttctcccaattcttcttctgggaggcttctacagtctgggactgcttcttcttaaggacctcctggatgcaccctttgtttgtatcccagtgtccagcactgtgccagacacagtaacttccctgtagatgcaggttgaaccaagggatcaattaggaaatcagtttgcatctgccacttgcctttcagttttacgacttttatctgcaaggcacaatcggtttggtggaatgactggccaagatggcaaagccaggaggaatttgcagcagggatttttaccctcattttggatttagtgcggtcaggtaacc

SEQ ID NO: 908942 - DNA, 645 bp, Homo sapiens
tttcacctatatattagttccatcattcttctataatagatctgtaaygcatgaggaaactatgaaaagctaccatgttaggggtgaaaaaaaaggcaatctttccagatgtggttgctaacagataataataaaaagtgaagccttgagccaagaaaagccccagcatgactcaatatagaccaaggttccagaaagaactaatttctttccaaacaaagaacatgaagtaaagcacagctgatccctagctactacattcatttcagttttgtttccaactatcttttcagagacgtttgacactagcctgtatcattatttatactattctagaatatgaaattctagaatatgtatactttctatttatacataaacatttacattgatttcatatatgtaatcatattatttttaaaagagggtataaggtataatttagtgctttgtaattccttattcattgatcaatatatatttttaaaagatcagaggcttttttttccaaacttcagattctttttttaaaaaactgttgtgggtacatagtaggtgtatatactaatgggagtacgtgagatgccctgatacagccatgtagtgcattataatcatcacatcatggaaaataggatatctata

SEQ ID NO: 908943 - DNA, 589 bp, Homo sapiens
aagtcttctgctgttttccaaataattccaaaggtattaatttacaacagtgttttctaaatgtttctatgaaaactaatttatcaaggtattcataagttttaacatcaaataatattttgaccaagtgagtcaaggaactgctgggttaaataaagttcattggccgggcgcggtggctcacgcctgtaatcccagcactttgggaggccaaggcgggtggatcacaaggtcaggagattgagaccatcctggctaacacggtgaaaccccgtctctactaaaaatacaaaaaattagccgggcgtggtggcaggcgcctgtggtcccagctactggggaggctgaggcaggaggatggcgtgaacccgataggcggaggttgcagtgagccgagatagaaccactgcactccagcctgggtgacagagcgagactctgtctcgaaaaaaaataaataaataaataaataaatgaagttcrttacatttctatattgcaagacttcacagcaactttatattaatatgtatatgactctcttaaagataggtagtatgtgggcttttccaaatgtatttgattacag

SEQ ID NO: 908944 - DNA, 677 bp, Homo sapiens
aaaaaaaaacataggggaggtgtgttctattacaacgactcctgacaaagtattgttcatctttgtttaactactgactttgacaagactctatatggttttatttaaagtgaaacttattcttaaatgaagaatgcttttgcccttaagataacaggacatcaggacattccctgagtcttttaggtgtgggtctgtttaataaacatattaatctgttcccttattcataaacatcttgtgactaagaatgccgaactcctggcaatgcaccaaagcaggtctcagcctcatttgacccagtacctgttcaagatggaggcattctggttcaaatgcccctgatacttacatgactcctcttttcttgcatgttgtctattattttcatgagagttcttaacatatgattaatagttattttaaattatttctctgttaattccaaagtcagtgtgatatttgagtttggctctacaaattttttttccacactaattttcttgtcttttggcatgtcttgtaactttttgttgaaaacaggttgtattttatagaaaaagaagaactgattaaagttggcctttattttgcaaatttatgttwatagggctagaagtagtgctgtataatatttgcaatatccataggtaccttaaaacatcaaaattctcttt

SEQ ID NO: 908945 - DNA, 563 bp, Homo sapiens
agcaaatctcaaaaccactgtcttccccgtgagacccacccaaagatttccagcagggatggacagtgaatgcacgcttccctgggatcagacagagtccccaagagaagaggaattgtcacggtcaggaatgtccaggtccttctcataaactcactaacaggaaaactcacttctcccctagcaagaggtaaatatagattccacacttcaatgctcctgaaggggcactgtagaaatgcaaagtggttttctgctgagttgtcacaaatatgggggatgctgctggcatttatgaggagggttccagggatgctccaagttcctcaatgaataaaactccagaataacaaagaaccttcccgcttccctcaccaccttccagtgctccatcggagagtcccatggataaaaatgtgtttacacttatctgagcccatactctaagctccaaatcacatctaaacaaaaagtattgttatctaatcccatgattttttaatttggcacaaaactcyttgcctggactattaccttacttcgcgaaacataaatcatagctc

SEQ ID NO: 908946 - DNA, 692 bp, Homo sapiens
catagaaataaacacgatacctggaacattaaattattcttcctttcttttgctggttcaaaaaatggtatgtctaggaaaataaaggactgggtgatagagaggagaaaggaaaattctaagtaataaattctaagtaataaaaccagaatcattcttcccttgtattttaaaagaaattaaacaaccaggaacacagtgtgccacagtacagtgatacttcactacaacggagctgcgaatttatccaaccatagacagacaggctgcctttctttaaagacactctgctttcagcattcctatgttctgtgtcttgttttttcagatttggtgtaatctaatggtttgggggtttggattttttatctgtggaaatcatttctttgaacaaaattatacataaaatcctgacttatgaatctgatgaagttggccaaaaggagaaccctgggaaggaagacagagcccactggggtattcccttcactgggggtctccacaaaggtcagtccgaagcccgctggccaggtctactccattaataacagcaaatgttaacatttatggaggctcacagcacaccattaccttagaaaatgccttctgtgcctgatctcattgactcctcatagcagttccatgaagctagtattactarcacgtcctttccactaatgtgaaaagtgggc

SEQ ID NO: 908947 - DNA, 604 bp, Homo sapiens
accctggggtcttaatttcctgagaggattcaaaataatcaagaacgtcaaaaatgctacatttcagcagaaacatgaaactagcagatcccatttttccatgtaaataaatatgcttaggatgccttagagcagcatgggaagggagtgggaaggcgggcaagtctccacccacaaaacgttcagggtttattacccagacaaaacctttccatgctcaggctagcaggaggtttcccagctatcctctgagcagcccgccctgggtctgggccaacctgaccaggctctattcaccgatgttgtggagaaaaggaccgagggaggggaccccgccttctcttttcttgtagcagaatggcaggctgctggctggacacacgcctggcagatggcatttcaaagggttttcaggagccatctgggttgggtacaattattataaaccatgcttctaacaaagccagaagggttacttcctgacagaagaygagtcaaacaaattctaccatgtttctcagggacagcgtactaatataaaaaaaaagaaaaaaaaaagcgaccaggctgacaaactgggattttccttagcctacaatactgc

SEQ ID NO: 908948 - DNA, 573 bp, Homo sapiens
agtcacatggaaaaatcattctagtattatgtgaagtgtaacaaataattgcttttggctttcttcttgggtgtgttagtccattttcacactgctataaacttccctgagactgggtaatttataaaggaaagtgggccgggcgtggtggctcacgctgtaatcccagcactttgggaggccgaggcgggcggatcacgaggtcaggaaatcgagaccatcctggctaacacagtgtaaccctgtctctactaaaaacacagaaaattagccgcgcgcggtggtgcgtggctgtaatcccagccactcggggagctgaggcgtgagaatcgcttgaaccaaggaggcagaggctacagtgagccaagatcatgcgactgactccagcctgggtgaccgtgtgagactccgtctcaaaaaataaaaataaaaaaggaaagtggtttaattgactcacmgttcctcatggctggggagtcctcaggaaacttagaatcacggcagaaggggaagcaggcaccttaacaagtcagcaggaaagagaagcaagcgaagggagaagagccccttata

SEQ ID NO: 908949 - DNA, 597 bp, Homo sapiens
atcaccctcaagtggaataaaatagcattaagaacatacacgccttggggccagactgctgggtttgagtcatggctcttccagtttccagctaagtgacctcaggccagttcccygactttccaatatttcagtttccccatccataaaatgagaataaatagaacctatagcacacagttattatacagattaaaagagtgagttaatacactaaagtgcttcaaatggtccacttctcattgtaagttttcaataaagaattagccatcactattattattttcccttagccctgcacttacatcccacatgtattctaaacctgaccacttctcactctctcagctgccaacaactctagtataaccccaccaccatcatcaattcctataaatccgtacagttccaatcatatctctgttcccagccttctccttctaggattcattttctgtaatagttagagaaaactttctaaatcctaaaccaaatcatcttatcttttactccaatggtttctattcaacgttccaatcatttcctattgggagcaatttttttgaaaaactcttaataatggcctaaaaaattctc

SEQ ID NO: 908950 - DNA, 652 bp, Homo sapiens
ggagtgcagtggcacaatcactggtctcaagtgatcctcccacctcagcctcccaggtaactgggactataggcacatgcccccacgaccaactaattttttgcagagaygaggtttcaccatattgtccaggctggtctctaactcctgggctcaagcgatctgcctgccttgccctcccaaagtattgggattaaaggcatgagacacaacccagccaacgcgtctttatagaagctttgcacacatttttaagcacccctcagaagaatgcataaatgacatgactaaatgtgacacagccaatttatgcagctacaaccaagcattcaataacacttcaaaccaatagacagcacacataatggatagcgaaatgctaacagaaacagacatatcaatcaaaatagatcattgcataagaagcaataaatcagaccaaagagcaatcataataccacagatagaaccatatattgcaggatctaacatgacatccttgaatataatacacttctacaagtaagtcatttgttaatacttgatatgaattctgaaggaaatgaagaaacccaggcttgaaggaaatgaagattatgattatgaagtaggtccaaaggatgatactacaccaaatattgctaccacatga

SEQ ID NO: 908951 - DNA, 612 bp, Homo sapiens
atgtggaactttgaacttgactgagatgctttggggtatctggaagaagaaatatctaagtggcaaagcattcaagaggaagcagagcataaaagtttagaaaatcygcagccgacgatgtgatagaaaaaaacctattttctgggaagaaattcaagccagttgcagtaatctgcataagtaacaagaagcccaatgttaatcaccaagacaatggggaaaatgtccccagggcatgtcagaggcatgcttcaaggcagctcctcccatcacacgcctggaggcctaggaggaaagaatggcttcttgggccaggtccaggatccccctgctatgtgcagcctagggacttggtgccctgcattccagctgctccggtcatggataaaagggcccaaggtacagctcaggctgtggcttcagagggcgtgagccccaagccttagcagcttccacatcgtgttgagcatgtgggtgcacagaagtcaagaattgaggtttgggaaccccttcctaaatttcagaggatgtatggcaacacctggatgtccaggcataagtttgcagctgtggtaggcccacatggagaatctctgctagggcagtgcagaa

SEQ ID NO: 908952 - DNA, 600 bp, Homo sapiens
atttacttttgacccctaatttgtatcrttggtttcgttaagggatatatttaaatgaaaaccagaaatgttaggcctagatctatcatctaaataatatttattttatggtaaatgaattggagtttacagccaagcctagtgacctttgggtctgcaacatgggaaaacagcccgttgctccccaggctagtctttttattttcctcactctgggaagcagtccccttaaagaggtttttactggtgactcctcccaagtactgcaaaagtagaaatgaaaatttctccccaataaaatcctgttaggtgttggaactaaaatatgaatctaaaatataaaaatagcctgtataacagaggaactgcagctcctttccaacaatgcctcctgctagggcaacacatatattggaaatgagattatgagatataattaacttgtctgcctatactgttactctttgaatgtttccaagtttattttaggaagattgacagtcataattatattgtcaagcatttgtcatttttgctgtagcaataacactgaaactcagacaaaaagctcccacctgactttgattggaatggtgcagc

SEQ ID NO: 908953 - DNA, 626 bp, Homo sapiens
aacctatgcaatgtgtctctgtagaatcacagactattttttaacagctgaggaagcaggtgctgggagagcacctatcccaggttatccctattgactcacctgtgacaaagcacaaaaatcatagttagagtaagaatgtgagttctaaggacagttgaagaaaatctccttcggcttccctaggcaaagggtcaatcccaggcaatgtgttcagcgggtgttcagcctcttgcccactccctaactttctgtggctttctctcgctctagctctgcccctttctccagcatcactggcacttggggccttcatttggctccaagttctccccaagccacccgaatctaaagtgatgtttttgactctccagtggaaacttccatctccttgggcagccagaatgagcttcatgccaggaagaaggcaattggaagaaatctgttaaggaagggtagctcacaatccttcctgagaggagtgcattttaaatacttgttaacacacatgmtttcacttcgacttgtggcatttaaaacagcttcaagaaagtgcagtgaaatgtttcagccactgtaggaaatgtggtgcgagtgaccaggttcctctaaaaggaggggaagcc

SEQ ID NO: 908954 - DNA, 639 bp, Homo sapiens
acagaatattttaccagagtaagtactatacatkgataagttgatcacagatgttattccactattgtttgattgccatggtttctgataaatccagagtcattttaactattgttcctctgtgtgtacattgttatttttctcttcggctacttccaagatttcatttttatccttagttaacaagagtttgactatgatgttcctatgtgaagttatcttgtaatttaccctgtttggggttttctgagcttcttgaaagtgttgtaaatgcacatcatttaagaactttaggaaatttcactatttaaatatttttttgggattcattctttttctctttttattctacattgtggttgcctatattttaaatttgttgaaatttttccaagtctgtgaaattctgttctattttttaaaatatattctctctcatctttagtttttttaaatccactgactctatcatatttattgtgtttctaaacctatgcactattttatatttcaggtatttttcagatcccctgatactttcttttcatctataaagatttttttctttaattactatttgtgcccacttataacagctactttaaaacaaaaaaatcaaaactatggaacagctaggag

SEQ ID NO: 908955 - DNA, 614 bp, Homo sapiens
tgatattggatgtgggtttgtcataaatagctcttattattttgagatacagcccatcaatacctaatttattgagagttttcagcatgaagggctgttgaattttgtcaaaggccttttctgcatctattgagataatcatgtggtttttgtcgttagttctgtttatatgctggattatgtttattgatttgcataggttgaaccagccttgcatcccagggatgaagtcaacttgatcgtggcagataaggtttttgatgtgctgctggattcggtttgccagtattttactgaggatttttgcatcgatgttcatcagggatattggtctaaaattcttttttttgttgttgtgtctctgccaggctttggtatcaggattatgctggcctcataaaatgagttatggaggactccctctttgtctattgattggaatagtttcagaagaaatggtaccagctcctctttgtacckctggtagaattcggctgtgaatcagtctggtcctggactttttttggttggagggctattaattattacctcaatttcagagcctcttattggtctattctgggattcagcttcttcgtggtttagtcttggga

SEQ ID NO: 908956 - DNA, 672 bp, Homo sapiens
tgtctacagttatccccaaaatgccttctgttgcttttatttatttactttttgggcatggtaaaagtgaaagtggaccaggatctatctgaagctcttgaattgcatttggttgttattctgaaccatttagacagccataatcttttcacttggctttccagtgcctgctctctgcaaatgtatgcatggtaagcatacactcttctaaggtaaaaggcatctctgactcaggctctggaggctgattgaagtctcttattttggttgcttgagagtctctgagagtttcctgggtccatggcacagaatgggataaggatccataggattacattcctgacctgaatttgaagaacaaacttgtatatattatgataaagatggaaggactatatccatgtcttgcaattttattcagaccttaagcttcaacccgaagctaagaaagaatgataataaggttggcaaatatctttgaactgacccagagagaaactagcacaaatattcgttgtccctggtgttatgtagactgatttggactcagaagtcaagaatgttactgaaatcagkaagttttcagtaaaggctctaccaaacctactgtcaattcatcttcaaaacaacaataattacttccattagattctcctgtggaatggatagttg

SEQ ID NO: 908957 - DNA, 659 bp, Homo sapiens
tcctttgtagggacatggatgaaattggaaatcatcattctcagtaaactactgcaagaacaaaaaaccaaacaccgcatattctcactcataggtgggaattgaacaatgagatcacatggacacaggaaggagaatatcacactctggggactgttgtggggtgggggtaggggggagggatagcatcgggagatatacctaatgctagatgacgagttagtgggttcagcgcaccagcatggcacatgtatgcatatgtaactaacctgcacaatgtgcacatgtactctaaaacttaaagtataatttaaaaaaaaaaagataattcaccatgatcaagtaggagttatcccagggttgcaaagatggttcatatatgcaaatcaataaatgtgatataatacatcaatagaataaaggaaaaagtcttacgatcatcataatagaaaccaaaacaaagcaattcataaatcttcatcctaaaatttcttcatcataaagtctctcaaaaattggacatagaattagatatacccctacacaataaaggccatttatgacaaacccacaactaacagtayactgaacagagaaaagcttaaagcattttctacaagaactggaataggacaagtatgcctacttttaccactctt

SEQ ID NO: 908958 - DNA, 670 bp, Homo sapiens
ggattccctctttttctattgtttggaatagcttcagaagtaatggtaccagctcctctttgtacctcaggtaaaattcagctgtgaatctgtctggtgctgaactttttttgttttgtargctgttaattactgcctcaatttcagcacttgttagtggtctattaagggattcgacttctttctggtatattgtcttgggagggtgtatgtgtccaggaatttatctatttcttctagattttagtttgtgtggaggtgtattctgatgatagtattttctgatgatagtttgtatttctgtgggatcagtggttatatcccctttatcattttttattgcatctatttgattcttctctcttttcttctttattagtctggctagtggtatatctattttgttgatctttttataaaaccacctcctggattcactgattttgttgaaggattttttcatgactctgtctccttcagttctgctctgatcttagttatttcttgtcttctgctagattttgaatttgtttgctgttgtttctctatttcttgtaattttgatgttagggtgtcaattttagatctttcctgctttctcttgtgggcatttagtgctataattttccctctacacccggctttaaatgtgtcccagagattctggtac

SEQ ID NO: 908959 - DNA, 561 bp, Homo sapiens
ttggtttatattttgatacttcggatcagatttggggctacagggttttaatttgatttcaacaatcttacctctgtatctcctatctctcatgatgaaaaattccggttctataagacaccaatgtaacgactcatttgctctatcccaagatatacaaacaacagttgcaaaatatgaataatagcactactaccagcaatatgatgattattgtaacaaagattacttgcagttctttttgtcccaatgatatattttattatatacatatataaagtcaaaatactatctttaaagtcacttccaatacttccgctctttgtggttataccgctaaacagatgtacatgtcaattcattggttattttattttttagttttggaattgcttgtgtaatttaattttgtttaaaattatgtaaaatagtaatctgggtccaaagtawgatcttaagaaacctatattctgtccctgtttccttcaaacaattcccttcttccttctgtgcattttttgtggtttaattctccacaaacacacacatattagtagtctt

SEQ ID NO: 908960 - DNA, 590 bp, Homo sapiens
ataccattaacactgtgagtcttcacataaatgctatggattgggtatacatacagacaaactatggtgggactatctcactaccgtgatctacaaaaaggccagaataaattacctcttggtagggaaaatgtataaacataaatacaaatcttgctactctgttaaaatgaagaaaaactggcataagcaaaaaacactcatatctttggcatgttataaatataagctgcactgagaaggtataggaaacacaaggatggccgggcgcagtggctcatggctgtaatcccaacactctgggaggccaaggcgggcggatcacctgaggtcaggagtttgagaccagcctggccaacatggtgaaaccctgtctctactaaaaattcaaaattagctgggcatggtggtacatgcctgtaatcccagctactcaggaggctgaggcaggagaattgcttgaacctgggaggcagaggttgtagtgagcygagattgtgccattgcactccagcctgggcaacaagagcgaaactctgtccccccgccccacccaaaaaaaaaaaaaagataagtgagcagaagagaaa

SEQ ID NO: 908961 - DNA, 669 bp, Homo sapiens
tgataactaaatgtaatgtggtttctcagatgggatcctggaattgaaaaggcacagtaggtaaaaaccgaggaaatttgagtgaactctaatttgaagttgaacacaaaggaggtatataaatgtaaacaggtttttgggtgagttgaaaggatattgaggcaactcccaattgaaattgtattgttttccttgtgagataaaaataaaatcaactactaaaaatgaaaatggagtccaaaaatttaggatagtactgaatttgaaagaaaaaaaagcgcaaaatgtgatggcacatttatcgaagaaagagaatagtgaggctattgtgggataatgttaagtaagttgcgtatcttgaaactggtgtgatctgttgtgtgaaattatctaaccatgccaggctctggagcagcttttgatatgtgctggggctcatacaagttttgattttgccagacgagtgagataaaaatttgtcatttggcaagtatgttagtcagggctttctagagagacagaaccaatacgaaatatgtatccatctatmtttctagctagctagctatacatatactagaggagatttattagggtaattgtctcagaagattatagaggctgagaagttccacaataggccatttgtaaattggccactcaagagcg

SEQ ID NO: 908962 - DNA, 524 bp, Homo sapiens
accaaagattatgaaatatagcaaagcagttctaaaaggtaaatataaagcaatacacacctacattaagaagaaaaaaagatctcaaagaaacaactaaactttacacttcaagaaaacagaaatgaagaacagcctaagcccaaaatcagaaaaagaaaaagcaaataaagattagagcagaaataaataaaagagaaactagtaaaataatagaaaagaccaattaaactaagaggtgtttctttgaaaagataaataaaatagacaaatctttagctagacttacaaaaaaaaaatcccagagaagatccaaataagtaaaatgaaagaggagacattacaactgatatcacagaaggacagaggattataagaaactattatgaacaattatacacccaaaaatttgataacctagaagaaatggataaattcatagatgcatacaactcacaaaaactaaattctgaagaaagagagaatgtgaacagatcrataataagtagggacattgaatcagt

SEQ ID NO: 908963 - DNA, 652 bp, Homo sapiens
ctttcacaatttaacccatgttaatgcctctggtctcaaatgcagatacggcattacctggaaagaagctaaagctattatccagtgatgcccaacttgccaagtggtacgttcctcatcttttacagaaggagttaatcctcgaagactagaacctaactctggcaaatggaggtcacacatgttccctcatttgggagactagcttatgtacatgtagtgtggacaccttttctcactttgggctacatgccaaacaggagagtcttctgcctgtgttaaacatcatcttttacagtgctttgcggtgatgggcattccagcttctattaaaacagataatgccccaggctgtactagccaagctctagctacatttttctctatgtggaatattaaacacattactggtatcccatacaattctcaaggacaaaccatagtagaaagaatgaatctctccctaaaacagcagttgcaaaagcagaaagggggagacagagaatatggaacaccacagatacaactgaacctaayattattaactttaaattttttgaggctgcccagaggccagatgttatcagcagctgaacagcattgacagaaaccagctgcaaagacagaaacagaacaacagatttggtgaaga

SEQ ID NO: 908964 - DNA, 584 bp, Homo sapiens
agacctgaaactaaacattctagaagataacattggaaaaactcttctagacattgrcttaagcaaggacttcatgacgaagaaccccaaagcaaatgcaataaaaagaaacataaatagctgggacttaattaaactaaagacctttgcacagcaaaagaaacagtcaacagagcaaacggacaacccacagaatgggaaaaattttcacaatctagacatctgacaatggactaatatccagaatctacaatgaactcaaacaaatcaacaagaaaaaatgtaacaatgccatcaaaaagtgggctaaggacatgactagataattctcagaagaaaatatacaaatggctaaccaacatatgaaaaaatgctcagcatcactagtgatcagggaaatgcaaatcaaaaccacaatgtgataccaccttactcctgcaagaatggccataataaaaaaaatcaaaaaatagtagatattgatgtggatgtggtgaacaggaaacactcctgcactgctggtgggaatataaactagtacaattactatggacaatagtgtggagatttcttagaagaactta

SEQ ID NO: 908965 - DNA, 641 bp, Homo sapiens
taactgggcaatggacaacctcacggtggctcakctttctcatcggtatggggagtatgacacatcagcacctgtgtcagagggtggccaagaggatcaatgcacgaacagctcagagagcgtgagatgctggctggcacatactaactggtaagcaatttttgttgtttttgctgttgttgcctcccatatccttgagatctagtctgtacttcttctggagttggtatccttgtctgtctgtggctactctttcccagtcactaacactaaatcacagttaggctgactttgagaaccaagaattccacaactaactttgagacaaaatgaatcacagaagaaactcaagggcagacaaggctaagagtctatgggaaaggtggactaagaggggaaaagatgcagaaggaacagctcacataacaccacaggtcaacagaatgtccttattaatctgaacattcctcgtaaaatcttagattttaaaatatgaatgaactcatgttttttaaaaatatatttcctacctctgtccattgaacaaacctataatgactcctgctagcaacaagcctacctggcatctacatctgggtttcttaatgcattctccacaaaatatacccagggattcttgg

SEQ ID NO: 908966 - DNA, 486 bp, Homo sapiens
ttattctgtccctgaaacaactgaaaataacaccccttggcccgaaaaaaataaaagtaaagaagtaaaactcattgtttaatttggtcaagatttggcaccatcgttttcactctactgatttttcctccagatatattacaaacctgacatacacgaaatgtaccatataaatttgcacttgttaggtttctaatgtctgcatcttgccattcccattaagatataagttcctgaaatgcaaaggctgtgcttaatagggaaggaaggaagagagagagagagggagaaagggaaggagggacttggtgaaccttgcagctccttctttaccgagccttgcttacaggggacactcaggaaaatctgccattagacaactatttcaggacttcagccacaaatgatacttaaccaaaaaaaaaaaaaaaaaaaaaagaacatgtatcactgaaagctttcatytgaattcatctcccctactga

SEQ ID NO: 908967 - DNA, 623 bp, Homo sapiens
caggagggctgtatcaatcctacactgtcagcaaaggtctgggttgcccggcaaggtaaagaaagcctgcacaggtggggcctcagaccatctgmcttcacgtttccaaaaaaggtccaactgctggatggtatcaaaatgaacagtgcctccctgaagccaagctagtccttcttgtaaatcataatttggccaaacctttgtgtagagggctataaggtgtttttccttcagagtccaagaatcaaagcagtcccagggtttaggatacactctagaggagtataagctggggttggtgaagatagctggttgcccattctgaaagacagggaaatagaggtgtccctcatttcccttctttctttcagtgataacctagggtgtgatggagagaaagtgggcatcccccctttctcttccatctttttgtccccaagtcccagtaaccttggcaggtgccacccatgggtgcaaaagtggctttcatccacattaacgggaggtcctgggggtggaagtgtccacccttatgcttgtatgccctatctccctggctgtcgacaacatttgagttccctgggccttgtctatgtcaaggagcatggcctgctttcatgaag

SEQ ID NO: 908968 - DNA, 621 bp, Homo sapiens
aatgaaatgcaggcattctggtgaacaatatattatgctggctaaaagagattagtgtctagagtcagacacacctagattccaatctccacttggactcttaagagctgaggattcttagcaaatcacatcactggaggctcttcaatggacatcataaggtagagccagcagctagggctatcatgaggattagtgagataagttcagcaaaatgctcagaagagttcctagaactagtaagaagccaatgaatatttctgttgtgggcatgtatgctttttaagtagaaaaacctaacaagccccttcatatcagctttggggttttatgatgcttagaaatttcctcagcttgcctgaccaacaaaagaaaaattagcaatactttctattggattctaagatgtactcatttgtttgtttattcatttacttttgtcatacattcttgtatttatgcatgtacccattcagcatgtattaagtaccyattatattagaagttgaaaagcactggtaaataagacagacatacttcctaccctcaaagaacttatagtctagtggtctcattgtgaaatgtgaaatgggctaagtataaaagccaagggtaagtgag

SEQ ID NO: 908969 - DNA, 621 bp, Homo sapiens
aatgaaatgcaggcattctggtgaacaatatattatgctggctaaaagagattagtgtctagagtcagacacacctagattccaatctccacttggactcttaagagctgaggattcttagcaaatcacatcactggaggctcttcaatggacatcataaggtagagccagcagctagggctatcatgaggattagtgagataagttcagcaaaatgctcagaagagttcctagaactagtaagaagccaatgaatatttctgttgtgggcatgtatgctttttaagtagaaaaacctaacaagccccttcatatcagctttggggttttatgatgcttagaaatttcctcagcttgcctgaccaacaaaagaaaaattagcaatactttctattggattctaagatgtactcatttgtttgtttattcatttacttttgtcatacattcttgtatttatgcatgtacccattcagcatgtattaagtacccattatattagaagttgaaaagcactggtaaataagacagacatacttcctaccctcaaagaacttatagtmtagtggtctcattgtgaaatgtgaaatgggctaagtataaaagccaagggtaagtgag

SEQ ID NO: 908970 - DNA, 668 bp, Homo sapiens
tcaatatcatttattattagagaaatacaaatcaaaatcacaatcagataccatctcacaccagccagaatcgtaccttattaaaaagtcaaggctgggcacagtggcwgatacttgtaatcccaacactttgggaggcaaaggcaggtggatcacctgaggtcaagtgtttgagaccagcccggctaacatgccgaaaccctatctctactaaaaatacaaaaattaggccaggcacggtggctcatgcctgttatcccagcactttgggaggcagaggcaagtggatcacctgaggtcaggagttcgagaccagcctggccaacatggtaaaaccccatctctactaaaaatacaaaaatcaggcagacgtggtggcatttgggaggctgaggcaggagaattgcttgaacctcggaggcagaggttgcagtgagccgagattgtgccattacactccaaactgggaaacagaaggagactctggctcaaaaaaaaaaaaaatagctgggcatggtggcatgcacgtgtaataccagctactcgggaatctgaggcaggagaatctcttgaacccgggagatggaggttgcaatgagccaagatcgcagcactgtcactccagtctgacagagtgagactgtgtctcaggaaaaaaaaaaaattag

SEQ ID NO: 908971 - DNA, 581 bp, Homo sapiens
tgacccttatgggagaccactagtgtcgatcctggttcaactctaaaggcctgaaaatcatgagtgctgatatctgagggcaggtactcagaaagaagaaatttattctttctccaccttgttttaaattcaatccctccatggattggatgattcgcacattggtgaggtggtcttctttactcactgtactgattcaaatgccaatctcttctagaaacacttcacagacacacccagaaatgatgttttactagctatctaggcatcctttagcaccatcaagttgacacataaaattaaccatcacacaggggttagcgtttgggcatgtattttagagggattcaggtgaatgtattacaagatgtgaaaaatagactttggagttaggcaaaactgagtgaaaaacatggatctgccactcacattgaggaattatgatcatgcccataattctttagagcacaagtttcccccttttaaaaataaygatattttaataattgtgatgatactagcttcacacatgttgtattagataatagcgtgcattgtaagataatatgtataaagcaatt

SEQ ID NO: 908972 - DNA, 238 bp, Homo sapiens
tctacattcattcatgttgttgcaaatgacataatttcytggcttttttatggctgaatattatttcattgtgcatatacaccacattttctttatcctttcatctactgatgggcatttaggttgattccatatcttagctctcatgaatagtgctgcaataaacataggagtgcagacatctcttctacatactaatttcaattcctttaggtatatatccagtagtgggattgat

SEQ ID NO: 908973 - DNA, 238 bp, Homo sapiens
tctacattcattcatgttgttgcaaatgacataatttcctggcttttttatggctgaatattatttcattgtgcatatmcaccacattttctttatcctttcatctactgatgggcatttaggttgattccatatcttagctctcatgaatagtgctgcaataaacataggagtgcagacatctcttctacatactaatttcaattcctttaggtatatatccagtagtgggattgat

SEQ ID NO: 908974 - DNA, 678 bp, Homo sapiens
ttgcttatttttactatataaagaagtagctcctgctagaataaaaattatttccaatgttaaygcttttcatgtcaaagtttgtaaaagttaaaaatgtattttcatgaagaagccaactgtttactttttaataattatgagttacattcagaagttgttaaaaatgcaatgcaatttgccaaaacaaataggaaaccagattacatgtaaccatgtgtatgtttactccttatccactttgctataaaatatatgttcacatttatattttatgtgatcgcatctgtttaaatatcattctacttgaatttttaatttttctatataagtggtaaatttaaagtgattcaagtctgtgtttgcataatgtaatttttaaatgatagtaaaataaaacaggtgcagaacttgaaatttttgcagagtggattcactggcttgtattcaaaaagcttctaaaaacctgagttacctggttaaggcatctgaagccatctaagtgatatacctcctcccaattgtatctatgctcataaaacttaaggatgctgcctggttgacaaaaatcagaaagcttgtcagtcaatttacaaaagtatatgacaagtcataaaatatagaggtggtattttaagtagaaagaaactgaacacaaatggaaaaccgaaactatag

SEQ ID NO: 908975 - DNA, 688 bp, Homo sapiens
gagttggccctggttgtggagaaggaactggtgtggagaagccttctaggactgcttagatactmccaaagaaggatttctcacctgtctttctgaagggtataaacttggctgccagtattgggcactgaaagcaaaacgaatgtaaaatgttttactcttccatatgtaagccttcccttaaatttcttcaccttctaaccagttttatactgtaggccaggggagagtggtgttcaggtacttaagatgtgtggcataaagaaaggtttaacatgaatctaaagagttttgaccaatatttccttttctcatcccaatattatcctcgcttctagagatatctaatttggtaatgtcctgagcctttgggaaattctgcaatgtaaattgggttgtttcttggcttagaacttagtttccttggtattatttagtcattaagtagatttgtccgtctgctttctagtttccaaaattttgttgttattttacctctaccatcctgccaccacctgtggattaagcatttttaaatatcccattactgttattttacatttcaggagagagaacaggtaaacatataagttcaatctgtcatctttaaccagaggctaactctctgaaattaagaatcacaatatgattaaaagcatacttcagaatcagacacagcttacacgga

SEQ ID NO: 908976 - DNA, 608 bp, Homo sapiens
ctttttagaactgtgattaagaaggtaatgattagggatgatcagttgtctcaccagcagtctgttargtggagctgacctgggctcatgccatctgcaaaggaacccatgggaaccagggaccattttcagcatttgaaaaggcttaacagaaactatgcttttacccaggatgaacatacaaaagctacccaaaccatcaagtttccttgcttttgtttggaattgcaaccctgtatggaaggtttcatgctgactccacgttctgattggctgtggatgacataataggagtttctgacacaggattggtctaactgtagatattgttactggagctggtaccaggtctcacttcccactacctttagaatgaggttgaccttgaatgtgagtgcccttgactatggaaatgaagccactgattgtttcttgcttgctcagctatgcttattatcacacctgtggcagtgacttgatttttataatgtcattatgaaccccttataaatatggattgttgattaaaatttggatcagtattgaaatggaagaataatacacagaattaatcagtttactggtaaacaatgtaagaatattgaaaa

SEQ ID NO: 908977 - DNA, 593 bp, Homo sapiens
taagaaacttcttggtgatgtgtgcattcaattcacacaggtgaacctatcatgattgagcagttttgaagaactctttttgtagattctgcaagtcgatatttggagccttttgtgrtctgtactggaaagggaaatatcttcaaataaaaaagcacagaagcattgtgagaaactactttgtcatgtgtgcattcacctcacatatttgaatatatcttatgattgaacagcactgaaacacactttttgtagaatgtgcaagtggatatttggagcactttgagccctattgtggaagaagaaatatcttcacataaatactacacagaagtattctgagaaacttctttgtgatgggtgcattcatctcaagagtttaacttttcttttgattgagcagttttgaaacactctttttgtagaatctgcaagtagatatttggggggaatttaggcctattttggaatagaaagtatcgtcacataaaaactacacaaaagcattctgagaaacttctttgtgatgtgtccattcaactcacagagtcgaacctatcttttgatggaacagttttgaatctcactttttt

SEQ ID NO: 908978 - DNA, 592 bp, Homo sapiens
tagaatctgcaagtggacatttggagcgctttgcggcctattgtagaaaaggtaatatgttcacataaattccagacagaagcaatctgagaaactactttgtgatgtgtgcattcatgtcacatagttaaaattttttttgattgagcagttttgaaactctctttttgtagaatctgcaagtagacatttggagcactaggtggcctatggtggaaaaggaaatatcttcccataaaaactagatagaagaattctgagaaacttctttgtgatgtgtgcgttcatctcatagagttgaaccatactttagattgagcagttcggaaaccctctttttgtaggatctgcaagtagacatacggagcacaatgtggcctatggtagaaagggaaatatcttcacataaaatctagacagaagcaatctgagaaacttctttgtgatgggtgtattcatctcacagagataaaattttcttttgtttgagcagttttgartatctcttttggttgaatccgcaaatggacatcaggagcgctttgtggccaatggtggaaaaggaaatatcttcacataaaaactagacagt

SEQ ID NO: 908979 - DNA, 574 bp, Homo sapiens
tatagtttttatgttatcatatttacttgtccacaataggcctcaaagtgctccaaatatcctcttgcagatttttcaaaaacagtgttwcaaaaatgttctaccaaaagaaaggttcaacactgtgagttgaatgcacacaaccgaaagaagattctcagaatgcttccgtgtagtttttatttcatgatacttccttttcctctataggctgaaaaggacttcaaatatctacttgcagattcgacataaagagagattcaaaactactgaatcaaaagataggttcaactctgtgttatgaatgcactcatcacaaagaagtttctcagaatgcttctgtgtagtttttatgtgaagatatttacttttacaccataagcttcaaaactctccaaatatccacttgcagattctacaaaaagagtgatcccaaatggctcaaacaaaagaaatgttcaactctgtcaaatgaatgcacacatcacaaagaacttcctcagaatgcttctgtgtaatttttatgtgaagatatttcattttccacaataggcctcaaagagctccaaatatc

SEQ ID NO: 908980 - DNA, 574 bp, Homo sapiens
tatagtttttatgttatcatatttacttgtccacaataggcctcaaagtgctccaaatatcctcttgcagatttttcaaaaacagtgtttcaaaaatgytctaccaaaagaaaggttcaacactgtgagttgaatgcacacaaccgaaagaagattctcagaatgcttccgtgtagtttttatttcatgatacttccttttcctctataggctgaaaaggacttcaaatatctacttgcagattcgacataaagagagattcaaaactactgaatcaaaagataggttcaactctgtgttatgaatgcactcatcacaaagaagtttctcagaatgcttctgtgtagtttttatgtgaagatatttacttttacaccataagcttcaaaactctccaaatatccacttgcagattctacaaaaagagtgatcccaaatggctcaaacaaaagaaatgttcaactctgtcaaatgaatgcacacatcacaaagaacttcctcagaatgcttctgtgtaatttttatgtgaagatatttcattttccacaataggcctcaaagagctccaaatatc

SEQ ID NO: 908981 - DNA, 614 bp, Homo sapiens
gtaacttcagcacttctgaagcaaacacattttcccctccatcatgctcttsccaaatttgttcctccactttctcctcacctcactaaatggcagcagcatcctcacagttactaaagccagaaactcaaacatcatccttgcctccttctccctccatattccatctgtcatcggttcctgacaactgatccttttccttagtaaatatcttatatccatccacctccctccatctactcgagttaggccactatcatctctcttctaagttactataacagctttcttagctggtcttcttgcttctgtcttcatgcgcctcctattgagattctctttttataaagaaataaatcaactgcatcacccctcctacttaaaacccttcagtgatattgcaatgcctttaaaataaaacccaagcccctatcacaactcaaaagaaccccaagcctcctactgtgccattctccaccatagtatgccctgctcccttttgcctatcagactatatacactccctttctctatttgcaaaaaatactcttcccctcagatctacagctgtcaccaggctgactctcactcatccttcagatttcagcctagaa

SEQ ID NO: 908982 - DNA, 614 bp, Homo sapiens
gtaacttcagcacttctgaagcaaacacattttcccctccatcatgctcttcccaaatttgttcctccactttctcctcacctcactaaatggcagcagcatcctcacagttactaaagccagaaactcaaacatcatccttgcctccttctccctccatattccatctgtcatcggttcctgacaactgatccttttccttagtaaatatcttatatccatccacctccctccatctactcgagttaggccactatcatctctcttctaagttactataacagctttcttagctggtcttcttgcttctgtcttcatgcgcctcctattgagattctctttttataaagaaataaatcaactgcatcacccctcctacttaaaacccttcagtgatattgcaatgcctttaaaataaaacccaagcccctatcacaactcaaaagaaccccaagcctcctactgtgccattctccaccakagtatgccctgctcccttttgcctatcagactatatacactccctttctctatttgcaaaaaatactcttcccctcagatctacagctgtcaccaggctgactctcactcatccttcagatttcagcctagaa

SEQ ID NO: 908983 - DNA, 614 bp, Homo sapiens
atgctgggtgtttctcccacctctgtcttgtgttggagcccattttttggatctcatgtctttctttttctcggtttattttgtcgtcttggtacattgcactcttttgtagcttcattggaaaaggtatgcacaggaaacaaattttttcaggacttgaatgccttaaagtgtctttatcctaccttcacattaattgattgtttgggtatagaattcctggttggaaattattttcccctcagatttagaaagcattgttccattgtctttagcttccagcatggctgtcccttatgtcctgaaattttgccatgatgtgccttggtgtagctttcttttcctctactgtgctgattctaaaaattcatgtcattcattttgagaagtttttactgattattttttcccatctgattatctattccttccttctggagctccaattatttggatgttgggtttcctggagaccttttgctttgccatttttctttcctattttccattttctgtttaatttcctcatttcctattttcyctatcttcttctctacttcagagatttgcccaactttattatcattctctaattcatttatttaacaagtttt

SEQ ID NO: 908984 - DNA, 604 bp, Homo sapiens
tttttttttttttgaggcaagatctgtctttatagcccaggctggagtgcagtggtgtgaacttggttcactacaacctcccagggttcaagccatcctcccacctcagcctcctgagtagctgggactataggcttgtgccaccatacctggctaattttcatatttttttgtattgtagtgatgtggtttcaccatgttgcccaggctgatattttggataatacttcttaatcagatatatttgcaaatattttctccctgtctgtggcttgcccttttattttcttaacagtatcttttgccaagccgaagttcttagttttattgaagtctcacttatcaatttttctttcatggattgtgcttttggtgttgaagctacaaattcacaactaaacacaaggtcacctagagtttcttctgttatcttctagaagttctgcagttttatattttacatttaagtctatgwtccactttgagttaatttttgtgaaaggtgcaaagtctgtgttagattaacttttttcttattttgcatgtggatgtcctgttgttctagaaccatttgttgaaaatattagtctttctctattgaatt

SEQ ID NO: 908985 - DNA, 631 bp, Homo sapiens
ctgaaaatcttgtttagtgtagctgccytcatccattatcttagcaagatcttctaaataacatcctgcagcttctacatcagcacttgttgcttcaccttgcacttttatgtaatggaaacggcttctttccttaaatctcatgaaccaatctctctgctggcttcaaccttttcttctgcagcttcctcacctttttcagtcttcatagaattaaagaaatttagggtcttgttctggattaggctttggcttgagggaatgctgtggttggtttgatcatctatccagacctctaaaatattttccatatcagcaataaggctgttttgctttcttatcgtttgtatgttcactgaagtagcacttttaatttgcttcaagaatttttcttttgcatttacaacctggttaactatttggcacaagaggccttgcagcctatctcagcttttgacatgggttcctcagtaagcttaatcattcctagcttttgttttgaagtaagagaattgtgactttttctttcacttagagaccattgtagaattattaattgacctaatttcaatattgttatgtctcagggaataggaaggcccaagggattttgagacaggggaatggccac

SEQ ID NO: 908986 - DNA, 679 bp, Homo sapiens
aatatagtctattgttaaaggtcttgatttatttcattcattgaattatttcattccaagatttctctttagttcttttcttatatatatattttttgttaaatttctctttcagatcacaagttagtttcttgatttctttgtattgtccatctgtgtttacttgtattttactatttttttaatattgttattttgagttccttttaaggtattttatagatttcttttgggatctgttattggagaattattgtgttcctctgaaggtgttgtgttgacttgctttttcatgtttcttgttgatgtttatgttgatatctatgcatctggtgtaacagtgcattttctaattttatggagtagtttccatagggaaatatgatttctggttgatgtatctatagtgcctattggttagggtactttgacttaggttctgagtgggtgccagagtgtaatctccatatgatttctttggctgtaatcaacgtcagtggtgtctgtgaattccttagtggttgtagttatttgtgcaggctgtggtaagacttttctggaaactggggtgccagtcaggccagtcctcaggtccctgggtggcttggatgagccccagatgaatcagtcctcaggtccctaaatascttgtgtgggtattggctgtggtgagaatggg

SEQ ID NO: 908987 - DNA, 570 bp, Homo sapiens
tctgaatggaataatagtctgattggttcaagatataatataaggwtaggaaatggaaaaaagtatagagaaacagatatattgatttgttcctggaagggaaaggggataaacttttttaaagattaacaacgacatatttatatatgatggaagtgatctagatctagtgtggggggggattgatgatgcaagggagacaaggagagagagagagagactttgacctcgagtaggcaagagaaggagttggcttttgttatataaaatcctgttcttcccctaatagcaagaaaaagacatatacacatggtaatagcatgtggaagttcttttcttattgtgcctattttctctctacagtaggaagcgagatcccactaagtcagattgaggaagggatgaaacttgaagtgttgaaaagagagattaatttgtgccatagatattcaggggtcagagatgcctagggggttgtgtcttgcagaactctaaagggaatcatttacatagactagtcagcaaggaagtggtggcagctctgcctatgaaaatgtgctggtcagattc

SEQ ID NO: 908988 - DNA, 638 bp, Homo sapiens
tcttggttttttttctctactttatggaaaacataygttaatagttcttgtttttcataaagatttgcagattatgaatacttccagtatgtgtgtgtttaaaaatgctaccgttctaatctttacctgaaataagaggtaagctggatataaaatcctaagttgaaaattgtttcccttctgtactttaagtataatagtaaagatttctgacatctgtagttactgatcagaagtcttctttccttattacattgatcatttgcaaataattgatctaatcttgtctggtagttttaatatgactttttcttaataagacatatagtttcataatatagtgactatgtatagatttgtttttcatgattctgtgaaatattattttttaatctgaagactaacgtattttttaatatgagaaagttttttatattttaatgtggttttaccaatattattttatataatatattatttattctttcttttgaataattatacttaagttcctattagattttttctattgtaacttattatttcaatataaattgtattatttattatgtcttctaactgtctcttcttggaagtgtgattccttcttcatctcttatttataaacacattttcag

SEQ ID NO: 908989 - DNA, 659 bp, Homo sapiens
gctatatttttcattaggattatttttacaratgacctagagagatattaccattgaatcatacagggtggtgaatgttgaagagcagagtttctgttcttaatcaagtcataaattacaatgatatgttgccaagacagtagcctgctgatgataggaagcagattgctgcagcctgctcaatatatcagagcttgagcttctccttttcatacgtcatatgtagagaagaatggaacttaaggaaagtgtaaatgttaccaagcaatcctcaaagaaggtgatattattaataactcctctctggagatacgaacaacatttattggaagttttatggcaactcagatagagattgtttttattacattctcatggaaatagggtgttttggaattatgatccacttgtaactgcttcttctgtttgcttaaatatcctgttttcataaatatacatctatctggttgatgttttgatgaaacatacaatattttgtggtgcatgcacactattttctcaaactgacaaatcttgtaaaggtccaatggcagcaatctatatgactttattaacacctgccttggcatgccagaaattctgtaggcattttaggaattggacttgggataatgcttcttgctgagttagggtgaact

SEQ ID NO: 908990 - DNA, 669 bp, Homo sapiens
agtaaaaagataaaaacctgtaagaaacaagggtaagaattacagtggacttctcattagaaaccatgtaagcaagaggatgtactattttaaatataagaaaaaatattccatcaaacaataattgcatatccaacaacattatctttcaaaaatgcatttaaaagaccagctaacccaaatagacactggagctaacccaaacttctcttctaggacaccggattgaaatcagcctgggaaaaaaattaaggtatacaagagtagaaaaatgaaataattatcctaggccaggtgcggtgactcacgcctgtaatccaaacaatttgggaggctgaggcgggcagatcacttgaggtcaggagtttgagaccagcctggccaacatggtgaaaccccatctcaactaaaaatacaaaaattagccgggtgtgtttgcagacccctgtaatcccagctactcgggaagctgaagcacaagaatcgtgtgaacccaggaggtgtcggttacagtgagccaagattgtgccactgcactccagcctgggcaacagagtgagattctgtcaacaaaaaaaagaaaagaaagagaagagaagagaagagaaaaaagaaaaaaggaaaaagaaaagaaaaraagtaattatcctagtaaaaaactagaactac

SEQ ID NO: 908991 - DNA, 667 bp, Homo sapiens
aatcttatttagcttttacattaaaaatagcttcaatttaccttttctaattatttttattgtgcctactaaaatacaactggcaatgcactgtcttctgttctttctacacagcagctgctcagtagcagcccctctccctttctccctctcttgcattctcgctcatttctccctctatctctatttatttcagcctctgtttagcatttcttaatctttgagcaaacttattcttctccaaccagcccagactgttaacttagagctgtatctcaaatactatgtttcacagaagacaaacataagccctctaggccgtattgtataataagaattatgtaattcttatgatggtgtaatgtgcagaacatcttaacgaaacagtttcccatcaagaatacgtcatgcatcatgtggcctgcatggactccagaaaggcagagagaaacatcgacagtgtaaaacataatgcttgtaaaatatgatggatgggaagctgaaaagaaaaggtaaagcaaagtatagtttagtcacagtttagccaatttggctaaagaactaagggcaaaaataaagctyaatgtagaaaatagttatatctgagcacaagacatttatttacagtatttaactattattctatgtaatattgaaattgaatgtg

SEQ ID NO: 908992 - DNA, 623 bp, Homo sapiens
aattactaccagccattacaaaaacacactgaagtacagagaccaatgacactagaaacaactacatcaacaagtctgcaaaataacsagctagcatcatgatgacaggatcaaattcacacatgataatattaaccttaaatgtaaatgggctaaatgcctaattaaaagacataaaatggcaagctggatagggtcaaggcccatcagtgtgttgaattcaagagacccatctcatgtgcaaagacacacataggctcaaagtaaaggaatggaggcaagtctaccaagcaaatggaaagcagaaaaaagcgggggttgcaatcctagtttctgacaaaacagactttaaaccaacaaagatcaaaaatgacaaagaagggcataatggtaaagggttcaattcaacaagaagagctaactatcctaaatatatatgcacccaatacaggagcacccagatgcataaagcaagttcttagagacctacaaagagacttagactcccacacaataatagcaggagactttaacattacacagtcaatattagacagatcattaagacagaatattaacaaagatactcaggacttgaactcggctctggatcaagtggatct

SEQ ID NO: 908993 - DNA, 553 bp, Homo sapiens
gaagagaatattatcactcttgctttaaagttaaactataaattcctcccatatttagcttggcctacatgaaaaagatgaatagaggcagttagctggcaaggttagaaggaggatagagtcacctgtgttagatttctctcactgttacaattttgcaaaggcagtttcaggagcatggcaatcagatgctaatctttttttggtctgtttgatttttctagtggcatgggcaaagaaactctgaaattattattattagtagtagtagtagtagtagtattttgagacagagtcttgctctgttgcccaggctggagtgcagtggcgcaatctcagctcactgcaaactccacctccaaggctcaagtgattcttgtgcctcagcctcccgagtagtgggattacaggcatgcacaaccaggcccagctaatttttgtattttaacaaagacagggtttcaccatgttgtcaagactggtcttgaactcctggyctcaagcgatccactcgcctcagcctcccaaagtgctgggattacaggcatgagcc

SEQ ID NO: 908994 - DNA, 566 bp, Homo sapiens
tgggtgaaaggatgagtcattgttctggagcagtagtcctcaatcctggctgaacattagaatcaccttgagaggtttaaatcaaaaaccaaaatttaaaaactcaaaacacaacaaaacaaacaaaaaatagtgtctttgcccttccccagatcaattaaatcagaaactctatggatcccaggcatagataatttttaaaaatctcccaggtgatcgtaatatctagctaattttgagagctactgccatagatgtataagcaatagcttagctgatggaaacaagggttggtggaaatccccaatggaaatattaatgtccacaaaaccaggaacatgagatggagtgcagcattattagaggaatggtgaatggcctggactgtctggagtataaggaatattcatgctttaaggttgtgttaggaccagagtataaaggaaatgtatattcagtataaaatcattttaactgttgtttataagacaacaaagaatcatagtgacattatcagatttgcackttagggagataatgtgaggtcaatctgactatgatatctg

SEQ ID NO: 908995 - DNA, 658 bp, Homo sapiens
cttttgtcgtctgggcacggtggctcacacctgtarttccagcattttgggaggccaaggcaggcggatcacctgaggtcaggagtttgagaccagcctggccaacatggcgaaaccctgtctctaccaataaaatataaaaaaattagctgggcttggtggtgcacacctataatcccagctactcaggaggctgaggcaggagaatcgctcgaacctgggaggcagagattgtagtgagccgagattgcgtcattgtactccagcctgggcaacaagaaactccatctaaaaaaacaaaaattaaaaaaaaaattcttttgtcatgtttcccaagatttaatgagataatatatgtaaagcatttaaaataatgcttgacacttagtaagcactaaatagttggtagatgctagctattattgctaaaagtgatagtaatttgctattaggggcagtaaatgctataatatatactgcattatatatgatatagtaaatattccattttcactgcagttcatttctaaaaactacactatgataggttagggtgaataatattttttctgtatgaattttgtaataaatggtcatttcagaatggcctattcaagatcgcctcatgtataacagaagtgtgatatgtgtaaaatat

SEQ ID NO: 908996 - DNA, 600 bp, Homo sapiens
tttgtggcattcataactgggtatacatcattaagaatgtatctaatataattaagtaaggaattctgaagccagatgcaagcaatatttacaamtcagtatgaagttatgcacaacataaatatatcacagtctcttttactttcataatgtacagttttgaaaaatgaaacatgggctttagaatattctccttgagcatgtgccattaggaaaactacttaaaccaatgtatatagatcaaaacaatttgtatagaattttatttcattgattatcaatccactttatttgaacagtactaagatcaaaatcattttgcaaaaatgactgtaaacctgataaagtagtagcactagagcactgtgttacactgaaagtatatttaaaagtgaaagtaaatcaataataattataccaccccaaataaattatcttttcttattaatactgtgattgtaaaaaatgtagtatagatggattttttaaagaacacaatcatctattaaataaatttgtcaaaagtatgttattccactaattttcagatgtcaacttcaatttttaataagtgagaggagggctgtagaaataaagcag

SEQ ID NO: 908997 - DNA, 602 bp, Homo sapiens
gtctctaactgtgcttagtaattctgccgtcatttattcttaaacgcttgagttgactgttttgtagttgtttctttaaccttctgcatcaaccctttcaattttcccattgtcagctgataacttcactttttatttcaatgataaaatagcagtaagcagaagagacatatcttatcttttccaactccagttcaactttccattcctcttgttctaatgaataaattctttctgcttccatctctagccacttctgtactaaattaaatttcttcttgtctcatcaaagattttccttatcatttttttcacttcttcctgtcctgctagattatttcatcaaaatacaaatacatttcaatatatcttattactaaaaaacaaaacccacaaaactttcccgaacccgtttgtctaaattctttccagctcttgcccatttatctaatcctctttttagcaaaactccttaagataattttatacactgcctgtttacttattttccttcactttctcttaagtttggtgaattagattttcctctccactactctaataaaattcctccaatrtaattgaaaattcaatctgtgttt

SEQ ID NO: 908998 - DNA, 640 bp, Homo sapiens
tcatccataatagcgagtaattgtttgaacctttcttagcccacctattaatcaccaagcaatgatattaaaaatgtgatggtatatatgaaaggaagtattgactctagagactttttatccaggagagaaagaaaaattaagttaacttcttagctgtttgcatgatctagatttttagatcatgtaggcaagtctttaggtgccaacaaatgaaatgaagaaaaaatggattcattgaataatagtacatttcactgagaataattgaaatttcattgatacttgactgattttttaggtttgttctgacatcatttttgctcttagactctgtattagcttccgattggtactgtcacaaattactgcaaacttagtgtcttacaacaacacaaaattattatcttttatttctagagggtgagacatccaaaatgggttttgatgggctaaaatcaaggtgttgggagagctgctttgcatcccttgctgggggttataggggaaaatcagttttcttgccttttcctctttttagaagctgcttgctttccttggctcatgacccctatttctctaccttcaaaactagcgagatcaggctacatyatttgcatgctgctatctctctggtttt

SEQ ID NO: 908999 - DNA, 640 bp, Homo sapiens
tcatccataatagcgagtaattgtttgaacctttcttagcccacctattaatcaccaagcaatgatattaaaaatgtgatggtatatatgaaaggaagtattgactctagagactttttatccaggagagaaagaaaaattaagttaacttcttagctgtttgcatgatctagatttttagatcatgtaggcaagtctttaggtgccaacaaatgaaatgaagaaaaaatggattcattgaataatagtacatttcactgagaataattgaaatttcattgatacttgactgattttttaggtttgttctgacatcatttttgctcttagactctgtattagcttccgattggtactgtcacaaattactgcaaacttagtgtcttacaacaacacaaaattattatcttttatttctagagggtgagacatccaaaatgggttttgatgggctaaaatcaaggtgttgggagagctgctttgcatcccttgctgggggttataggggaaaatcagttttcttgccttttcctctttttagaagctgcttgctttccttggctcatgacccctatttctctaccttcaaaactagcgagatcaggctacatcayttgcatgctgctatctctctggtttt

SEQ ID NO: 909000 - DNA, 656 bp, Homo sapiens
gggacctaaaaaattgtggctaatcaaagacaagaaatggtttagcaatttatgatttccctacagttaaagaatcattgtctttttgagacataktcttaccagatatcttgtctttgcaacccaagagaaagaacagaattccaatatttgagatttaaatatgtttactattgcctaatgtctaaggtcctttaagagtaatctatcaagtatatgttagcataccttctttactatcatttttctgagttcaaatttacagatgcactgtatcaaatcacagtaaactacagtgatgttggctgtctgactgccttttggcatcctacaaattatattaataggtctccgagcaactgtggaaacttgataactgtagccagaatgacctgagcattttgattctaattcctaatactaatttacttacagccatgtaacccatcaatgtaatcaggtctcatctaaaggatggtgatgttttctaggtacactatccatttaattcttttaaaattataaagataatgtaacagaattgaagaaaaaattttaagcttaatgaaaagtaatatctatgtttgtaacatggtaactacagtagtcaccactactataacatggaactgtgaaaaatgtttatttcttcacag

SEQ ID NO: 909001 - DNA, 649 bp, Homo sapiens
tttaaaatcttattaattttagttgaamctttggaaattgaatgatattttttccttttcttttcagggacaaaaacaacctaagaggccaggaagtttattcctatgaaatgttgcttctccaaaggccatctcaactcgattacacattttccaaataaaatctcttatataaaagcttttcttggggtttatctttctcgaaagtgatataacttcagatagaagctgatttgaccaaccaaatgactttgactcagtcttctggttgatcattatcatgtaagaaaactcaggtaattccagataaaccaatgtttttttaaaaattgtttagtcgtttatttatttatttatttttattttactttaagttctgggatacatgtgcagaacgtgcaggtttgttacataggtatacatgtgccatggtggtttgtggtgggggaaggggagggagagcattagagcaaatacctaatgcatgcggggcttaaaacctagatgatgggttgatagttgagaccaatgccttttatttggttttggctttgttttgattcaattgttaagcaagtgtttctcttgcttaagagaaaaagtataatctattttttcctatgaattcctgttgctgactgtgcaacct

SEQ ID NO: 909002 - DNA, 621 bp, Homo sapiens; identical to SEQ ID NO: 907099

SEQ ID NO: 909003 - DNA, 627 bp, Homo sapiens; identical to SEQ ID NO: 907098

SEQ ID NO: 909004 - DNA, 610 bp, Homo sapiens
tgtcagtttgagtaatattcaatcaaattatattattatgatgaagggaactagcataaccaggtttgggagtaaacccagctgaayctttagtgaaaatacagctccacaggtgggaacagaagtaataggttgtgtccagaagcatggcctcctgatgtggagaattcagcctcccacaagtgttagtcagcatttgttacagagggaatggagagtggttgttaattttgtgaattggttcagtgaaggtgtattaagagagttccagctgtactccttaataggagagagtacaattaactgaaatttttgctaatgtatatccaaatctaaatttaattttgggtacatattataatataaaattgatctatcttataatgatagtcaacatgtaatgagtggtttctattattacagcctgagctaaatgctttacatgaaaacttatggatgtgataatgctatccccatttttattagtctgttctcatgctgctgataatgacatacctgaaactgggcaatttacaaaagaaagagatttaatggacttacagttccacatagctgaggaggcctcacaatcatggcagaaggtgaaagg

SEQ ID NO: 909005 - DNA, 646 bp, Homo sapiens
aatctttgcactcttgatatagcaaaaattcctaggtgggaaagaagaagcatgaaccatttaaacaatgaacaaattagacttcatcaaaatttaaaaattctgctttaattttatttaattttaagttccaggatacctgtacaggctgtgcaggtttgctacataggtaaacatgtgccatggtggtttgctgcacctatcaactcatcacctaaatattaagccctgcattcactagctatttatcctgatgctctccctcccctcgctcccctacagaccccactgtgtgttgttcccctcgctgtgtccatgtgttctcattgctcagctcccacttataggtgaaaacatgaggtgtctggttttctgttcctgtgctagtttgctgaggataatggcttccagctccaaccacatccatgcaaaggatatgatctcattcctttgtatggctgcatagtattccatggtgtatatgtcccacatttccttcatccagtctatccttgatgggcatttgggttgattccatgtctttgctattgtgaatagtgttgcaatgaacataaacatgcatgtatctttataatagaattatgtatattyctttgggtagataaccagtaatgggattactggg

SEQ ID NO: 909006 - DNA, 597 bp, Homo sapiens
acaaagactactggaaattaccaaccacttacgagtacggaaagacagctaaaaccacaccacrtgacacacgtatttcactagcaatggaacattcatgggtacagagtctatgcgtaatgtccttaaatgagggctcctcttttattttaaggagaacagaggtagaatttaaaaagttaaatagggagctacgtgttcatacaacaaagcataaagaaacttattcctactctgagcaagtggaatggtctcacgtatgaatgtcctcaggggtagtatctttgtgaagcagaaataggccatttttccctgttaatacccaccctctcccacccccaggtctttctgtaaaccagaagccctctaagactgatttttcctgtatttcctgtatgtccctatattttctcgtatgtcaccacatacacctgtccccggcggtagcagtgtcgtgcacacagccctggtcccctgccccgccccatcttcaggccagtccctgcctggtctagcttcagcttctctgaagagcaagcccccgctggtcccacatgcctctcagcattctgggtctttaaggggaacttgtgccaa

SEQ ID NO: 909007 - DNA, 572 bp, Homo sapiens
tgaaactccagctctgccacgtgtcacctctccctgctgcccacctggccgcaggtgagcaccatctccttgagcatggccagccccagcagccttctcaaggactctttagaccagtggccctgcttcctttcttcctctcttcctttcacactccacaacaggattttaaaatgctcttgaataccttcaggttgccatttaatattttaaaatttaggtttaaataggtactacaaaggagggaatatcttacatagtatagatatcggcattatgatccatggtctctaatccgtgagtcaaataaatgtattgttcatcttccaatgtggtattattttattattttgtggcataattttatttgttatttgttttagatttatttgtatttttgtcaaataatgtgaatgatataatatcaatcctttgaatgttgttggaatttgcyttctggcttttatttcctttacatttaaagaaacagacttagtttacattttctcagatgttacaaatgtacttaaaaagaatgtattttttaggcaaatccatagaaacagaaagta

SEQ ID NO: 909008 - DNA, 645 bp, Homo sapiens
ttattcttactggttcaaagtgaatttccaagttatgtttctgtgagttataattcatagtatccaccatgctaaccaagatrggtaacttcaaggttagttttaaatcaaagtggtaccgctctcccctgtcctttcttatttgaccactcttcacaatgatagcatttcagctaccattatctcttccactcacgtcattatctcttctactctgcctctgcaggccacctaagagtgcttagagaagaccagaacaccaagtcacataatgttttgtcactccaggtgccaccatacttgaagaattatagcctggatgttcttctttgaacctgtggtcatcagagtcctctttagacatgttcctgcattcctgttgggcgtcacattgttttgatctttcttcatgttttagggtatttttttttaaagagaagaagatcttccttttagctacttttgctatctaaagaggctgggaactcaagcctgaaccctgacagaggtcaactgctaggggaatgtggaataaacagagcttttggtccttgagaacaaaatgatgcaattgttagctggagaaacctcaaacctgatctcttcttcaagaatcttaccaaagcatgaaagtgtacacattga

SEQ ID NO: 909009 - DNA, 583 bp, Homo sapiens
gcactccagctatttttttattttagctgttttggcaggtgtgtagtgataactctttgtggttttaatttttatttcccccatgtttaatgatgtcaaacatcttttgacatgctygaatgtcacctgtatatcctctttagtgaacctctttagtgaaacattggttcctttcattctctcattttctagtttgattgaatgatttttactacttcattttgagagctctttatatattctagacaaaagatctttggtggatatgtggtgtgcaaatatattctcctggtttgtagcttttctcttaactcttttaatagggcattttgcaaggcaaaagttttcattttgatgaagtccaacttataaaattttcattttatggaccatgcttttggtgctgagtctgagaccttgccaagtcttagatcctaaaaattttcttcattttcttttctaaaagcgttttgcattttgtttacttttaagtctgtgattcattttgagttaattttcatataagatttgaggtttaggatgagattcttctttttgttgttattttttcttctggatgtcc

SEQ ID NO: 909010 - DNA, 570 bp, Homo sapiens
ttttattttgttctcatttgctatgagctagctagctcttaaaacaygatgttgaataggagtggtaagaaaggacattctgtcttgtgtttattttcaggtggaaagtgtcctgattttttaccattaagtgtgttagctgaaggttttgtagatattccttatcaaaatgagaaagttcttcttatttttctagtttctttttttgagagttttatcatgaacaggacttggattttgttcaattatttttctggtcagctggcatgacataatttttaatttgtgtttatgtagtagattacattgactagtatttgaatgctgaaccaaccttgcatacctagaataaatcccactaagcaatggaatataattttttcctatattgctggacttggtatgaattttttggggaatttttgcacctatcttagggatattagtctgtagtttttgtttcttttgatgtgtctgtctggtttgggtattagggtaatgttggcctcagagaatgagttaggaatattctctctgtttctattttctggaagatgttgtggagaattg

SEQ ID NO: 909011 - DNA, 570 bp, Homo sapiens
ttttattttgttctcatttgctatgagctagctagctcttaaaacacgatgttgaataggagtggtaagaaaggacattctgtcttgtgtttattttcaggtggaaagtgtcctgattttttaccattaagtgtgttagctgaaggttttgtagatattccttatcaaaatgagaaagttcttcttatttttctagtttctttttttgagagttttatcatgaacaggacttggattttgttcaattatttttctggtcagctggcatgacataatttttaatttgtgtttatgtagtagattacattgactagtatttgaatgctgaaccaaccttgcatacctagaataaatcccactaagcaatggaatataattttttcctatattgctggacttggtatgaattttttggggaatttttgcacctatcttagggatattagtctgtagtttttgtttcttttgatgtgtctgtctggtttgggtattagggtaatgwtggcctcagagaatgagttaggaatattctctctgtttctattttctggaagatgttgtggagaattg

SEQ ID NO: 909012 - DNA, 593 bp, Homo sapiens
ggaaaaggtatgtcctctctactgttcttcatattcaaagtcaactatacaatcaaaaatcataagacatgcaaagaaacaagaaaatgagacccataataaagagaaaaagcaggccaggcacagtggctcaygcccgtaatcccagcactttgggaggctgaggcagccatatcacctgaagtaaggagttcaagaccagcctggccaacatgatgagatcccgtttctgctacaaaatacaaaaattagctgggcgtggtgccgggcgcctgtaatcccagctactcgggaggctgaagcaggagaatcacttgaacctgggaggcagaggttgcagtgagccgagattgcgccactgcattacagcctgggccacaaaggaggttctgtctcaaaaaaaaaaaaaaaaaaaaaagagagagagagaaagcaggtagtagaggcacactgaaagatgacacagattctgaaattaacagacaaagactttgaaataactgtgatacatatactaaaatactaaagaaaaatatgaaaaagtatttaaaaagagataatttaagcaaaaaaatgaaaaactatttttaaaa

SEQ ID NO: 909013 - DNA, 667 bp, Homo sapiens
gcctcaagtaatccgcccacctcagcctcccaaagtgctgggattacaggcgtgagccaccacgcctggccctggagtacataattttgrtaagtaacgtctgcagtgtctttttttccctccctttttatggatagacttttctggttattgagatctcatacccctttatgatatattatttgagtagagggtttaaagaattgagatacttgttttcttatgttaatatgtcaagaaagaagttgtttcataacttaggtcctgccttggacaaaatacacccttactgtctgctctatgtttcttggtatgttcagaagaggatttgaacttttgcaggttggctaacagatatggagggtccttagagctctcctgtttctaaccaaatcttcaccccacctattaagtagaaagccttttcatggaagggctgtggttggttcttggaactggtcccctcacagaatttccattcgcttttcctcagggtcacgccctgctttagaggttgcttaggttaagctctccaattaattttagcaggcaactcgagagttttgcaactcaaagtaggcacaccttccttcctgaatgacttttatttgttcctttttcaggctgtgaaactaaatccacaacctttggagacccaggaacaccc

SEQ ID NO: 909014 - DNA, 629 bp, Homo sapiens
tacagagtatatgagcagggtctaaacagggggaaaagtcaggaacagtgtgaacacgaggagacacaggtctcaagcctgtggctgccagaggcagctctgcctgtctcctttgtgtggctagcacctagcccagggctgacaccagccctgtcggtgctagttcacctaatcaaacatttagaggggggtcactcctgttggaagagtgtgcacaaaccaggaacggtaaaatctccaggtggtgagacaataggtgactttcacgcttttctatatcttccattctttctaagaatgtttatttcatagtcagggaaaatgtttatttaaaaagcacacttgtgtttccagggagatcatgtatgtcccgtcatttggtgagttaaaagatgttgtgtcaactgcttctctcccttctccactagcagtggtgatgcagctcccagacccctgcgagggcagcctctctaacggctgctgaggttgaactccctgggaggggcactgcagactggccactgcatcctccaggcctccaggctgcayggagagggtggggaagactcaggtcttcctagtatggattcttcttttcccttcatgttttatttgcaatgacataaaat

SEQ ID NO: 909015 - DNA, 578 bp, Homo sapiens
gcattaacatgtttggattgagataatggttacatagtaaagagagaaaattgttactatgtttgcaaggaggacaattgctggatcagtgtcatggaggaagttgttgagctttgttggtttatctctcatttgtctatctatctatctatctgtctgtcggtctgtctttctgtctgtctgtctgtctgtctgtctgtctatctatctaatctatctatctatcgatctgtctatccatccatctaatgataataggagagaagccacaatctgtacacagctacatggtagatgttttggacacttgtaatttttttaaaaaattgcatctattttctcagagaatctcaagcaaggtcatcaaccaaaagtgcagatggtgaagtgggtttttaatatttgaggagaggagacataaaggaactatttaggaaagtgggagagtaattgactgtaatacaaaacaatcagttacacaaaattaaaattatatattttgttttatttcgtaggtctttctttcaaatcatattttattwtcccaactacttatacaagtaaatacatgaggtaac

SEQ ID NO: 909016 - DNA, 621 bp, Homo sapiens
agtgtcgatggtctttacaatttggtatgtttctgcagtggctggtaccagttgttcctttccatgtttastgcatccttcaggagctcttttagggcaggcctggtggcgacaaaatctctcagcatttccttgtctgtaaaggattttatttctccttcacttatgaagcttagtttggctggacaaaaagttctggtttgaaattctttcctttaagaatgttgaatattggcccccactctcttctggcttgtagggtttctgctgagagatgcgctgttagtctgatgggcttccctttgtgggtaacccgacctttctctctggtgcccttaacattttttccttcatttcaaccttggtgaatctgaggattatgtgtcttgggattgctcttctcaaggagtatctttgtggtgttctcctcttacagtgtattttctaacagtctaacagattcttgagtctccatgtaaatatgcttcaggtaagacatgtatcttatatctgttacttagaataaaaattactaatgataacttattaaataatattctattatagttacagttttaaattataaagtttggaaatacaattcttagctatgatgaatct

SEQ ID NO: 909017 - DNA, 646 bp, Homo sapiens
gagcagagcaacttggagtctctaggctctcatttcccagcatgatgactgcattctgagagcaatgccagtatctgctccagcgacgtgagcccgrtagtcggagccgggtttttgtcatttgaactggaagaattatgacagagtcccccaaagtaagctggaccatagtcagcccagctggacctggtaagcatatgggatgacttggaggcttagaggtgcccagaggggccctgccccagccctccctcccctactgccataccaccttacatgtgcaggaccagatgatcagaggaggtacaggacctgcctaggcttacccaaaagatggtgccttttctggcacacctcagctgttttgtcttgccaccgatgatctcatcaggtcaggatgaaagggtacagggagacagcactagatgttaggagaaggtgcaggttggaggagtgttgcatggctgggtaccttggccagtagctcactggcccttctttggagggatcacttatagagacgggaagggctgtgacttgggagtctcctctcctttcagagctttcttcaaccccaagctggatatggtctcctaagagagcaggagccccagagaagtgggtgggtgtctggaggattaccctg

SEQ ID NO: 909018 - DNA, 646 bp, Homo sapiens
gagcagagcaacttggagtctctaggctctcatttcccagcatgatgactgcattctgagagcaatgccagtatctgctccagcgacgtgagcccggtagtcggagccrggtttttgtcatttgaactggaagaattatgacagagtcccccaaagtaagctggaccatagtcagcccagctggacctggtaagcatatgggatgacttggaggcttagaggtgcccagaggggccctgccccagccctccctcccctactgccataccaccttacatgtgcaggaccagatgatcagaggaggtacaggacctgcctaggcttacccaaaagatggtgccttttctggcacacctcagctgttttgtcttgccaccgatgatctcatcaggtcaggatgaaagggtacagggagacagcactagatgttaggagaaggtgcaggttggaggagtgttgcatggctgggtaccttggccagtagctcactggcccttctttggagggatcacttatagagacgggaagggctgtgacttgggagtctcctctcctttcagagctttcttcaaccccaagctggatatggtctcctaagagagcaggagccccagagaagtgggtgggtgtctggaggattaccctg

SEQ ID NO: 909019 - DNA, 666 bp, Homo sapiens
tgcatgaagttaggagctttaaaaggcaaccatcccatttcctgcttgacaatgtttaactgactccatgcacagtattatctttaaaattagaaagtaagcatgtgttccaccagtaggtgagaaagttgtgtgaccatagaaaggtcacttaacctctgtacatcaatttactcatccataaaatgagaaattgttaaaagaataactgatgatctttatgatttaagtcctttaatgaagattacttttggaagggttctggaaccatgtgtgacactcagttttagagagtctaaacaataagaaaaaaaagtatatagtctagagtacccaaatattttcaatgtgactgcttacttgaaaaaaaaaaaatggctttagtagctgtagcaaagattgtcagcatggaacactatgcagccataaaaaaggatgagttcatgtcctttggagggacatggatgaagctggaaagcatcattctcagcaaactatcacaagaacagaaaaccaaacaccacatgttctcacttatgagtgggagttgaacaataagaamacatggacatagagaggggacatcacacatcaggacctgtcaggggatggagggccaggggaaggatagcatcaggagaaatacctaatgtaggtgacgggttg

SEQ ID NO: 909020 - DNA, 620 bp, Homo sapiens
gcagccatcagagaatgaataagccagtttgataagtctcagtgaaagtcaaaaacrttttctgcagtgtgcaaaatattttatcaagcaacaccttggcttactgtgctagacatctggcaaagaggatgtgttctaactttttttgtccttcatagtgtcaggaatttagaatcataactttttattccatatttagtacatcaaaataaccgcattctatatttaaacatatcaaattgttctgtttttatataatttaatttaagagaaccataacttaattttaagttctgtgatcaaattaacaagattctttttatctaatgtcttcgattttattaaggtaaaagttatataacaaaaaattaactgttttaaagttaacagttcagtggcatctagtacactcacaatattgtccaacaaccacctctatctagttctaatatgtttttattaccccagaaggaaatgaaacagagtaactgcttatcatctttgaattttaaagaacatacgtataattttgagacaaggtctcactccattgcccaggctagagtgcagtggtatgatcatggcttactgcagcctcaaccttctgggctcaggtgatc

SEQ ID NO: 909021 - DNA, 665 bp, Homo sapiens
tgaatcttgggggtgggctttgtttccttcatactgttctcatgggagtgaataagtctcacgggtttgtcaggggtttccacttttgcatcttcattttctcttgtggctgcgatgtaagaagtgccttttgcctcctgccatgattctgaggcctcccagccatgtggaactgtaagtccaattaaacctccttctccctagtctcaggtttgtctttatcagcagtgtgaaaatggactaatacagtaaattggtaccagtagagcagggtgttgctgaaaagatacctgaataggtggaaaccactttggaactgggtattaggcagaggttggagcagtttggagggctcagaagacataaaaatgtgggaaagtttggaacctcctaaagacttgttgattggctttgacaaaaatgctgatagtggtaagaacaataaggtccaggctgaggtggtctcagatggagatgaggaacttgttgggaatcagagcaaaggtgactcttgttatgttttagcaaagagactggttgcattttgcccccaccctagagatttgtggaactttgaacrtgagagagatgatttagtgtatctggcagaagaaatttctaagtggcaaagcattcaaaaggtggcttgggtgctgttaaaagca

SEQ ID NO: 909022 - DNA, 658 bp, Homo sapiens
tatttggcccctttctatcttggcttcagycagagtcctaatttctagtctgaaaacttgccaactttgtgccttaccccttcacactactgcttcctgtcaagaatcttcttctgcctgatcttcctacagctatcttcttcctgttatttggaccaccgttgaaatgtctcatattaagagaccacttcatacccaccaaagaggcacttgttctctgttattctgttttatgttcctcaatagcatttattactttatatatttgatttgtatagtgcacttttaattttcttcctctgctagaatgcaagtgccatgagagtagggaccttgtctgccttgttcatttcatgtcccccacaaccatcagagtacctagctccaagcagccactcaataaaatgaatctgttgaaatggaaaatgcccacatccattaggtggtattctggtctctctcacagccatttgctgaatagcaattcctgagagtaggctaattttaaagggagtgacactgacaattaaagaacaaacaattacaattgccccatggtatacagtacagtaagatcatgtgatagttgattttaggtcaattttaccggattaaggaatatctagagaactggcaaagcatcatttttgggtgtgcc

SEQ ID NO: 909023 - DNA, 699 bp, Homo sapiens
gctgtgctgtgaaaaggggactaagaagcttcagtggataataatgaaatctgagatcaaaagtgtttcaagtttttgttagaaacaaatctgttaagaaaatgcaaagtgtgaagacactaaagtatcgcacasataaaacactacaagctcatagtaagaaagaaaaaagaattctaaaaacccttatttaaaaagagataatttagtacaagtgaaactgtagtttattgcagattgaaaaaaacatatttcctttgtttcccttttaaattatgagtcacatcaatcactcaggagaaaagaagcatgtcagaatattataaatctctgaagttcaataaaagccttaattgtcttgattcagaaaaccctcctctgggatttcttaaaatcttgtttcattataattgaaatttaatcaatatgcagttctgattacttatacccatgaaggagttattaagactctgcatacagaatgccataaccagttgattaaggggaaagaaagtcaaactcactgttagtagtacagagaagaaataacagtggattgacttagaattccattttcagtaattgtgtaagtagaatttaagtcatttcacaattatattcactcatctgcttaagatatggaacgctgtaatttgtcacaaatgcactctacaaggcgagtttaagttttcaaggtac

SEQ ID NO: 909024 - DNA, 548 bp, Homo sapiens
tccctaatagatgcctgttatatcaccaggagattttcatctcagcgatacattgctataatttgcttgggcagcagtgtcagttctgccccaagtttgatcaggctagtctctgtttttcaataaaaaggtcagtaactacaaacatccagtatagcaactagtgatcaggaaatgaggccgaagcagccattaagtagtcatggggaggcagctcagaatgggctgtgaattctggggttggacatctcatttgtggagtggtaggcctgggtcttcctcagggtgcctggttgataagaaatgttggttaatagggaaaaaaaaaaagccaaaagtagaagtaaatttgtttagtcttactcacagagcttcttcccttattcaatcaccaaagaagaggattgttgatctggattggtcaggccaaggaaatattatcggagcaaagttttcactggactaaggttggcaatcartttctctcactctcctcctcctgttcctcctctcctgtaccaaggttaaaggtacaaggttgtgggttc

SEQ ID NO: 909025 - DNA, 669 bp, Homo sapiens
agtaaaatgcttcaaccccacaaaattataagattttttacccattcaaatacttactgtaagtacttatgtaaacataattatggataaaatctcatctcttatgctcctcacaatttgcagtaaataatttaactttatgtaagtttcataaaagatagaaataaacctgttcctgaggccttatagacactgacacatgttagtttcagaataggcagagagaagatggagcaattaaatggtctcccaagccttaaccacaagaatcaagtaaggaatgagaccttcggacttgaccaggaacagtgacaaaaacagagccagagtcaagcagcgagggtaaaagtggaggacaggaaaggagaaaagagcccagttaaaaggtgttgcaaccactatcagaataactctaaaacacaatccaatgggaaattaagatttgttttgcatcatcctattgattctgatttatgtgcatcatctgtttaaactctttgggccatgaatagtacatttgagttatgtgaacattctgaatatagttactaagatacaacttttggggaggcaggtactaccgatgggctcaaggttatttaatcactkttctacctcacaggctgtgaacttatagttttcaaactccaggaaaatgcagctttaata

SEQ ID NO: 909026 - DNA, 684 bp, Homo sapiens
ctaaagtattctaacttttaatccagtgttctttctacaaaggtatcaaaaagtgaccttggtagactcattacgacattaaaacagaatgggaaacaaagttaagaaaaaatatagttccttgggaggccaaagcaggcagatcaggaggtcaagagattgagacgatcctggccaacttggtgaaacccctttagtctctactaaaaatacaaacaattaactgggcatggtggcacgcacctgtagtcccagctactcaggaggctgagaggagaattgcttgaacccaggaggcggagcttgcagtgagccgagattgcgccactgcactgcagcctggcaacagagcaagactccatctccaaaaaaaaaaaaaaaatagagtttcatgcaaaaatgaaaatgtctgcttttcttttatactttctcagaataagactaaacaattcaagaaaaatgatttttgtaagcattctggagtgatacatttgtttttatttatggtccttaaaccttccattttggtttatcctaaaaaataagtttgatcaagaccctcttcctttaagcatctccacttattttattggaagtaaacagttttcctaatgcagaaagcttcccaaagggaagatasttttctgatattattttgattagctggtaaagttactgaaaagt

SEQ ID NO: 909027 - DNA, 630 bp, Homo sapiens; identical to SEQ ID NO: 908684

SEQ ID NO: 909028 - DNA, 585 bp, Homo sapiens
tggtcaaaaccattcacttgcacatggaaagtattcaatacacaatcattatcttgcctcagagccacattaactctattgctctctgctaaaatacaatctatgggaacctcaatcaacttgacattctggagaatgtcatgctgcagaaaactccacagaaattcataagtctcccacatttgtgaatattccaaggatctaaagatctgggcaatgctgggaattccatttaaaggtaataatgaaagctgttgtaagttgtacttcaaaaaaccaagaataaagcacaagcctttcaaaacctttttgattttgaaagcaacatactcaatatttaggaatattacatttgtcaggtaactctgaagtgacagttttaagtggatctacagcaagggagaactctatagcaaatttagactgtatataaattgccctgacactcaggccctactatctagtagagccaatggtgatacaggtagccaaggtgaataagaacactatgtggagtctctggcaagtcacaaaaggagagtcayagcatctgcattctggagcaaagctttgtttctgctgcaa

SEQ ID NO: 909029 - DNA, 590 bp, Homo sapiens
ctgaggccccaggccaaccttcatggacctagcctcttggccagcacctgtacactcagcctccaggctggcactagtggatacaggctccaggccagccccagtggcttcagatcccaggtcatcctccataattatagtctccagaacagccccaacaaacccaagcttcaagctggcctcagtacaaagccagtctcaagctccaggccactcccagtggtcccatgctttacagaacccagggtacaagcctgtttcagaagacccagggtgcaggcccactccagtagaccttggttccagattgaactctgtggaccgagtctccaagaccaccaagctgcaggccagaccccatgaatttaggttccaggcccatcttagtggccccaagttccagacccaccccagtgcaaggtcaactccatgaactcaggctctacatccttcccagtggacccaggtgccagrctcattcaagcacctggccaactcatggagacttaggttctagacccatcccagtgccaggtaagcccttgtagaccaaatctccaggttggtctccatggatacaagctccaggc

SEQ ID NO: 909030 - DNA, 590 bp, Homo sapiens
ctgaggccccaggccaaccttcatggacctagcctcttggccagcacctgtacactcagcctccaggctggcactagtggatacaggctccaggccagccccagtggcttcagatcccaggtcatcctccataattatagtctccagaacagccccaacaaacccaagcttcaagctggcctcagtacaaagccagtctcaagctccaggccactcccagtggtcccatgctttacagaacccagggtacaagcctgtttcagaagacccagggtgcaggcccactccagtagaccttggttccagattgaactctgtggaccgagtctccaagaccaccaagctgcaggccagaccccatgaatttaggttccaggcccatcttagtggccccaagttccagacccaccccagtgcaaggtcaactccatgaactcaggctctacatccttcccagtggacccaggtgccagactcattcaagcacctggccaactcatggagactyaggttctagacccatcccagtgccaggtaagcccttgtagaccaaatctccaggttggtctccatggatacaagctccaggc

SEQ ID NO: 909031 - DNA, 566 bp, Homo sapiens
tacagcagcaacagaaatgaatatatttcaaaatatttttttctrtaatgccttaacaagtacaaaaggaattgtgtcctgctttcacaaaaaataagtaaaatttaatgtgctggcctatgcatttaaatagcctggtagggttacctctgtgtaatcagaacccaatcctctgtagcccctctgagaattttcctaagaggaatcagcatgctcatagttgtgtgatggccctggtaacagtccctcctgtccagcctcgcatttgttgtcctgacttcttgcatccttaattgagcactgggtcagtatttgacattaacttatgatttcctgtaatgcttttgttcccatgacctagtctcttagattagtgcttctcaaagtgtgatcttcagaccagcaacatcagcatcacctgggaacttgttggaaatgcatattttaagccttactctacctactgaattgaaagctctggggataggccccagcaacatgttttaacaagctctctagttaattctgatgcacgatgaagttggagaaccagtcttagatcataa

SEQ ID NO: 909032 - DNA, 661 bp, Homo sapiens
gcgtgcagacgcagaagatgggtgatttctgcatttccagctgaagtaccggcttcatctcactggggcttgtcagacggtaggtgcagcccacagagcagggtgggacattgcctcattygggaagcacaaggggtcaaggaattccctttcctagcaaagggaagccatgacagatggtacctggaaaactgggacactcccactctaatacagcgcttttccaatggccttaggaaatggcacaccaggacattatatcccgtgcatggcttggagggtcccatgcccacagagcctcactcactgctagcacagcagtctgagatccaactgcaaggtggcagcgagactgggggaggggcgtctgccactgctgaggcttgagtaggtaaacaaagtggccaggaagcttgaactgggtggagcccactgcagatcaaggaggcctgcctgcctctgtagactccacttctgggggcagggcatagttgaacaaaaggcagcagaaacttctgcagacttaaacttccctgtctgacagctttgaagagagtagtggttctcccagcatggagtttgagatctgagaatggatagactgcctccttaagtgggtctctgacccccgagtagcctaactaggagacacctcccagta

SEQ ID NO: 909033 - DNA, 611 bp, Homo sapiens
gacccagcaatcccattactgggtatatacccaaagtattataaatcatgctgctataaagacacatgctcacacatgtttattgcaccactatkcacaatagcaaagacttggaaccaatccaaatgtccatcagtgatagactgaattaagaaaatgtggcacatatacaccatggaatcctatgcagccataaaaaaggatgagttcatgtcctttgaagggacatggatgaagctggaaaccatcgttctcagcaaactatcacaaggacaaaaaaccaaacaccgcatgttctcactcataggtgggaattgaacaatgagaacacttggacacagggtggggaacatcacacactggggtctgttgggggtttgggggagagaggagggataacattgtgagatatacctgatgtaaatgaccagttaacgggtgcagcacaccaacatggcacatttacacatacgtaacaaacctcgacgttgtgcacatgtaccctagaacttaaagtataataataaaaaaattaaaaataaaaataacattaaagcaattgaatgtacataataatcagtgacaattttctagtataaaattttctttgt

SEQ ID NO: 909034 - DNA, 620 bp, Homo sapiens
catatatgaataaataaatgctaggtctaatatagaaaaattaataccttgaaataaaggtttattgagtcttttttcagagaagaagcwttcctctaatgaaaaatattaatcagaaccatatttgctaattaataatttaatgataatgtcttatgcttatgtacattaaatatatttatatataaatgataataataatgcctcacacttatgtacattaaatgcatataatatataattatatatctatattatcacttctcacagtgaccttaggaggtagacattttttctcaaattaagtgtgaaaaattagaattcacaaattccaggatttgaactaaagacaactaattctacataaagtggttcatctgtaaaatttagtgtttagaactaatgtttgctatttgcatagggctgcagtatgaaagagtgttgggaaatgtcattagcccgttcttgctttgctataaatatctgagactgtgtaatttataaagaaaataggtttaattggctcatggctctgcacgctgtacaagtacggtgctggcatctgctcagcttctggggaggcctcagggagcttttactcatggcagaaggcaaagcag

SEQ ID NO: 909035 - DNA, 575 bp, Homo sapiens
aggaggtttagggctgggtctaacaatgggaaatgccrcttccatcaacatttcattgactattgtgagaatgggggtcagagaaatacagctcctgtttcagttcagcagtgactctacctatggtgggggtggggatggggtggagacagagggccggtctttggtgaataactagtcatctctgccacagccaggctaccaacttctctttttttttttttgagatggagtttagctcttgtcacccaggctggagtgcaatggcatgatctcggctcactgcaacctccttctcccaggttcaagagattctcctgcctcaacctcccgagtagctgcgattataggcaccccttcccatgcccggctaatttttgtatttttagtagagacagggtttcaccgtgttggccaggctgatcttgaactcctgacctcaggtgatccaccctccttggcctcccaaagtgttgggattacaggcgtgagccactgcgcctgaacccaacttctgttcttaaaaaaacttacatgtagtaccctgactctgcctaaattagatgtactagact

SEQ ID NO: 909036 - DNA, 626 bp, Homo sapiens
aaaggaattcattatcatttcagggcccaaacttttacttgatttgctaactgccccaactatcagttcactaaactgaaaacaaactacttttatatacaatctactaatttattaaccactgatgagctgtggctgctacagactgtctgaggtcacatgaaatacttaacatcaaaatcctccattttcatctagaaatgaagtggaacctccacttacttttcctaaatagtaatgttgcctctgtctgctagaggaaggagacaatggataaaaatcattccagtcaaaggcagagaattttattttgttgttttgtttttttaataaaaatcaatgcattggctagccagtctttaggaattattttggcaaaacagagaaggtcactgattattagacctaacagtgcatgagagcacactttctggtaaatccaaaagaggagtgtgtctggtacttggccatgcatttgatgagtttgaattargatttttatctgtaagtacttgaaaagtgattctcagactagctctgtttaccaggagaagggctgtactgtcatcttctcgaatatttagctagaagcacattagaaacctaaatgctacaataagctattc

SEQ ID NO: 909037 - DNA, 634 bp, Homo sapiens
ctaccacaaactttcccagaacagagaggaatattccaggagattcccaatcacttaaagaggagagaaaaaaagaaagcctggctgtagaaacaaagcttggagaaatcagaaaagaatctgtacctgccaaaggagggtggggaaaaggagtgggaagcaaaagggaagaatcaaatgcaaataaggagcattacattcctaagattataaaatttcattgggggcacaagaaaaacttgcacacttaagcaagttatacttaactgaatgtaacagggtttcttggattaagcctcaggatacgcctttcaaactctaaaaccggtgctcaaattttcaatactacattacaatactacagcatttacggtaaattcgatttacgctaaccacccaattcattttaagttttctgtcctttcctagagggagcggtctccaatttctctcagttccagctttccttctcctttttctcatctgcttaacactgatgtgcttctctgaaactaccttcagcaggagagcacrggccccagagagaccccgaggttcagagccccgacactgaaggcagggacagcgttgttgatctgagcctacaacaggccgagaaacagatctttcccac

SEQ ID NO: 909038 - DNA, 646 bp, Homo sapiens
ctgattctatacatcccttttaaraaacatgtacgctctgaatttgataagactggtttattgctaacaattaagccctttacactgtgccagcctctgtcctgaaaagcatcagtactatttctctgtgaaaacattcagagttggcttcagtagcatttgatacatttcttcacagttggtatagaaaaggaagatgagatctgaactaagaaccttttcccctcattctaatgcagggttttaaactagatagcgaggacatttagaatcatttggttggtttataaatacaggttgaacattccaaatttgaacaccagaaatgctccaaaatccaaaacattttgagtgctgacataaggaaatgctcattggaacatttaggatttctggacttgggatgctcagccagtgagtataatgcaaatattctgaaatatgaaacacttctgatcccaagcattttagataagaatactcaacctataatgtgtaatgagttgcgtattttggagactgcatcacctgcacagaaacctcctctcactcacacttcaccacttttcctaacttgcctgatgtgaataatcacctagagtgtattttaaaaaacagattcctgggcctcaacccagacctactg

SEQ ID NO: 909039 - DNA, 582 bp, Homo sapiens
aagtggctgaaacaaagttcttgtggaagttatccattcagagttgttaaacagaagtcctttcctccagagagctattctacttaaaacattatggattgctttttcaagttgatgatgagttatattctgactcaaaggtgtgtcaaaatataaacttttattcaaatcaccttcatagtcacttttaattccactggaggcctctaaaactgtttctatggttttcaaaaggttatttggatgctgagtaaatgtcatcaacacattagaaacattccaattatctttctttaagtttttccaaagagcttctaaggtgagacagatcaccattttcaagaaagatcctatttctgtgctgttttgtgataatattttatccaaaaaagggatcacttcatgaattatttcccattttatatcttgagggccactatgagtggaaattggattagggtataagaagtccatttggttggtgatgttatttataggaactaagcaacccagaatttcttcccrtaagttgacagaatccatagaaaatgtttgagtctcattgttaaatgctaccgcaag

SEQ ID NO: 909040 - DNA, 687 bp, Homo sapiens
catgttcccatttataagtgggaactaaatatggtgtacatataaatataaaagtggcaacaatagaaattgggagctaaagattagggaaagaggggtgggcaagggttgaaaaactaactattggatactatgttcactacctgggtgatgggatcatcacatactgtcttaagtattaattcctttaatattatgaaacttatttatagataaggaaactgaagcaatttgccaccaaatcacatggctaatctgttgcaaagccaagattagaaactaattagtctgacgtcagcattcaagctctttaccacaacactactcatgctgagaaagcttctcaaggctgaactactgagtcacaggcacagcctttctcactcagaggttagtgacatgacagctttgaattctaaattggaaaaaaatttctgtatgtagcaaactagattgttgtagtccaacccttccactacaaacatccagaaaagtgagaacaatatttttaatgatttttaaggcatcagagagctactgaggcactgggaatttgtgtgccaacattacagaatarggaagacaggagagatgaagtccaacatttgaagctacttttccactgtgggcaactgttgtttccaaaacaaaaatgagggaagagaggctacgaaaataagaactttc

SEQ ID NO: 909041 - DNA, 629 bp, Homo sapiens
ttcgttatggtgatataaacaggaagygtatggtgctcacattcttgaatgctcttgggttctctgagtggttgattaggaaaggctttaatttgaatcctgcaacatttccaccccaaagcaacatttccaccctaaattaaagcctttcctgtaacaccccaaagcagtgttacacagcctttgaatgccgtagaccctggcattggactcgtggtgaatgtatgtatgctctggtgtatactttcagaataagctcatttcattgactttaaatatttgtgctggtaaatacttctcatccacacttaccctatgtggctcttcccaaaagctttgttaccttcaatatcaggacttgctgcctcaccacagaccttcatattatgaaaattatgatgcattttcaagtgttggaactggccatgtcttgctataaacatttgtatatatgtaggatcattggtgtactctttgaacttatagaacacacttcttaccctagcctaagtcatcagtaggctaagcggtatgcatctctgtatctggttttccatccacatgacaagtaatttttccatgttatcaagcagcccacctcttctctttgtgatgataatggatttaac

SEQ ID NO: 909042 - DNA, 629 bp, Homo sapiens
ttcgttatggtgatataaacaggaagtrtatggtgctcacattcttgaatgctcttgggttctctgagtggttgattaggaaaggctttaatttgaatcctgcaacatttccaccccaaagcaacatttccaccctaaattaaagcctttcctgtaacaccccaaagcagtgttacacagcctttgaatgccgtagaccctggcattggactcgtggtgaatgtatgtatgctctggtgtatactttcagaataagctcatttcattgactttaaatatttgtgctggtaaatacttctcatccacacttaccctatgtggctcttcccaaaagctttgttaccttcaatatcaggacttgctgcctcaccacagaccttcatattatgaaaattatgatgcattttcaagtgttggaactggccatgtcttgctataaacatttgtatatatgtaggatcattggtgtactctttgaacttatagaacacacttcttaccctagcctaagtcatcagtaggctaagcggtatgcatctctgtatctggttttccatccacatgacaagtaatttttccatgttatcaagcagcccacctcttctctttgtgatgataatggatttaac

SEQ ID NO: 909043 - DNA, 633 bp, Homo sapiens
gatccttttcaaatataattcagattgtgtcctttctctgtgcagaacctcctcgccatggctttctatttcatccygattaaaagccaagttcttatcatgacctgcaaagtctctctgatctcctccctcctgctctgtaactttcctccttactctttttcctcactcactgtagtccagacgcactgtcagttgctggacacgctaagcacacctccatcttacagagcattaccacttgctgtttgtttttcctccttttttccattcaaggcccccccatgaccaccctgtaaaatagcgccctcccattgaattgttctctagcctccttatcctcatgtactttcctgctgagtccttatcgctgtctgccacattattcataaacattctcttaaagcctgcttctcccacaaaagtgatagcggggctttgttttagctaccatatttattatagtcctagtacctgaagaatgcctgcacactgtaggtactcaacaaatattatgtgaatgaataaataatcaattttattcctctcacatctgccccatccctagcagacttctatttcagagtcctctgagatttaaggaatggaatacatccattttctgcctctgta

SEQ ID NO: 909044 - DNA, 622 bp, Homo sapiens
taaataaggcaccagtgaccaatatctgagatagaaggccttttagacagaggatccaaaatagctatttttaaggaaactcaatgaaatccaagataatacagagaaggaattcagaatcctatcaatttaccaaaaagattcaaataatcaaaaagaatcaagcagagtatctggagctgagaaacacaatcaagatactggttaatacctcagagtctcttaatagcaaaagtgatcaagcagaagaaagaaattgtgaacttgaagacaagcttttgaaaatatagtcagaggagacataagaaaaaagaattaaaaaatgaacatacccacattatctaggaaatagcctcaaaagggcaaatctaagagttattggccttaaagaggaggtagacagagtgatctgagtagaaagtttcttcaaagacataataacttagaacttcctaaatccagcaaaaggtatatatattcaagtacaggaagattatagaacacccatcagacttaacccaaacaagactacctcragacattttaatcaagctcacaagtcaagaataaagaaatgattctgaacgcagcagaagaaaagaaacaaataatatacaaagca

SEQ ID NO: 909045 - DNA, 566 bp, Homo sapiens
taattaattaatgttcaataagtaaatcaaccgttttcttaaatttcattctatcagcagagaaatttgttaggaarattttagtcacaatctagataacatatgtttatgttgaggtgtacaaatatattttcaagtgccattttttctggatctcaaaattgaacaaaagaagccgaaaatgtacattcattaatttatctgataaccaaatgatgtcttcattttggaaacattatagtgaggagaaattgatttatcctctagaataattgaacacgttccctagaaatgggagcagatttaaagtcacaattataatttttttctgtcctaatctttttaatatggaacagtttatacatctttgctatgcacaagattccctgaaggatatgttaaaaatatagtttcacatccatacaaaagagttggattgcataggtgcaggaatttgtaacttgtattacattgccttcctttaattttctgtattaactggatatatgctgcctttttttttcttttttcttttcttttcttttttttttttttttttttttttt

SEQ ID NO: 909046 - DNA, 629 bp, Homo sapiens
ctgatttttgtcagtggactcagactttcttagattgaccttctaccatagtattagwatttttaattatttttattcagattaatatattttaaattttgtaagatgtttttacttccagctatgctcatctgtgttgctggtactggcattttacgtaacagctttcactcatctcagggacatgatctcctctccaattttcgagaaaattctttcctttaaatattgtcttctgttgtactgttagttctcttatactagtcctgttttctcatttcttgagtttggtgcctctttatcattgtgttcatttactttaaaattttaatttttttgttttctatagtgtttgcatttaataaagtatttagctacctacccatttagcaatagggattgactactttatgtgccaccagatactactaggaatggccattaaagtttctgtctcatggtgatgtactacagtgaagggggaattagtaaaaccagatgaaaacaagtcttcaaataaacttccaattttacttttatatgtacatttaataaacagcttgatgagctagtcagttacaggcaatggtgctactttgagagagtaattattcatattatcatagatt

SEQ ID NO: 909047 - DNA, 460 bp, Homo sapiens
gatctcttggcagaaactctacaagccagaaaagagtgggggccaatattcaacattcttaaagaaaagaactttcaacccagaatttcttatccagccaaactaagcttcataartaaaggagaaataaaatactttacacacaagctgagagattttgtcaccaccaggcctgccctaaaagagctcctgaaggaagcactaaacatggaaagaaaaaaccagtacaagccactgcaaaaacatgccaaattgtaaagaccatagaggctaggaagaaactgcatcaactaacgagcaaaataaccagctaacatcataatgacaggatcaaattcacacataacaatattaaccttaaatataaatgggctaaatcctccaattaaaagacacagactggcaaattggataaagagtcaagacccatcagtgtgctgtatttaggagacccatctca

SEQ ID NO: 909048 - DNA, 593 bp, Homo sapiens
ctacaccatctacaatttgatctatttacagtcagcttttaactcatccaggaaacacctgcagaatttaggaaaacccgtaactatttcaaatcttacaattgtttagcgaatgtaaaatctcagaatcagaagagggcttaaagatgatctggtccaaacaccccatttccaagaaaactagagctccaagaacaaagctggctcagaccagagcccacaccagaccaaggatgtcctgatccccgatccttgaggccctctctggctcccctctcccttcagaagcaaacataatggatctgaaaaaagttgcacagctgcacaaatggcaagaggaaagcaaaatcaggactcaactaaaattccatttcattgtaacacaacttggtttcccacattctcttttccttggcagtgttagttatcattggagagtgtggtataaggaggagtcccatgagaaaattcttccttagcattatctcccctagcttcagtccttagccatgcctccagcacagtcaaaatctacagtgctacraagtgccaaaccatagcttccttacatatagctaaatccatttacccaa

SEQ ID NO: 909049 - DNA, 578 bp, Homo sapiens
gatgtcattcaagagcagattatttatttccgtgtgtttctatcacatcactccaccttggcttctcttcctgcactccttgttctgccccaactctcctgcctcccaattacaaggtcccccgtggttacactgggcccacctggacatgccgggacagtttccccacctcaggatccttagctcaatcacatctgcaaaggccctttcgccatagaaggtgacactatcacaggtttggggattagggcacgggcatctttgggggctgttactcaaccaaagcataataccctttatcagattggggggttcccttctattcctacttgctaagagttttattcaaaaataagctttgaattttatcaaataattttactgcatctcttgaaatgattatatcatttccttctttattctgttaatggaaggtattacattgatcggcttaaaaatattcaaccaactctgcatttttggaatgattagcctcaaatgactgccatttttggggtgggctcatcttcacctaaacacatcaatcaycttcacatgaattctgaccactcccaagt

SEQ ID NO: 909050 - DNA, 273 bp, Homo sapiens
tcagttaatcttttctaaacccagacaagggagtatctcagggaaagcctgtctacatcaatgcagactttctctacaaatataaatctccccaacaaacacagcttttcagctattcttgtagaagaagctatctccagtcttccgagtagccatcttgaaatatgtcaaaaagctggccaggcgcaygcctgtaatcccagcactttgggaggctgaagtgggtagatcacctgaagtcaggagttgcagaccagcctgaccaacatggtg

SEQ ID NO: 909051 - DNA, 603 bp, Homo sapiens
caaaaaatcccttactgactaattgaatgtgttataggggcttagctcctccccgtaggatattagggtttgaaatccttgcaccaccatcagcttgacgtggactgctgagacctagaagagataaactttaacagtctgcacctctgttgaatataacaaataattattttaaaaatcaaatagcacccaatgatcattaataaaatgcttaagcctagtttaacaatgcttgtaagaatagatcagatgtcatttagaatctaagtgaatagactggaaaaccaatctcttgttgtctgaaatataaggcaaacagatttttagtagaggtatttctatagaaacagaagaaaaacaaatgttaatcatgggcataatgtatccagatgttagactcaatgcattttcagttacagaggaggaaatcagtggcattctggcacattattctcatctatgttacaaggaataagcttcaggttgtagggtcttagaaaaaaggtaatagcaattctattragtttaagtcagaaaattggaaggtaattttttaaatgttagtgtggagacctgtagcccagaaaggatttaagattcagt

SEQ ID NO: 909052 - DNA, 611 bp, Homo sapiens
caaatctttcgtaagggctcccttccattgtttctaggcttgagtttgtctcagaagaaggaaagcatcaccacaggcctcttggctgaaaccctctgcgtcccacctgtctatctgcatcagtagctgcctggctcagaaaaagtagctcagttggagatgaaaatgaaaatgaagagaaggcagtctgatttatgttgccttcattgtgactgctatctatagttattttttttaaagaaaggattaaggaggaagaaagaacagaatatagaattaaaaaaaaatttcataccaacccatttttagttacctatcatcacactagctggcttagaatgaaaatacctttggggcctgcgtgctaaaatttctaatgctttagttattttagcatgtattagactccaggatcagtataaatttcatctaaaattcgtaaatggtattaatcttattcagaaccagaaattataccttaatgaataaacagtattaccaaatacagaygcaaagaatatagcaatttctcaaaaaaaattttaaatggggacatgtttaagagcataatgtcacaagtactttatatgatagaaacttaatgagaaaaa

SEQ ID NO: 909053 - DNA, 660 bp, Homo sapiens
aattcttttgactgtatacccagaagtagaatttctggttcttatgggagtgctatttttatttttttgatgactttccatattcttttctgtagcagctgcacaattttgcattcctaccaacagtgttgaagtgttccaatttatctataccctggccaatacttattatttcctgttcttttgattgtggccatctaaatttgtatgagataatatctcattttggttttaattggcatttccctgatgatgaatgacattgagcatctgtttatatactcaatggccatttgtatatctcctttagaaaagtgtctgttcaagtcttagcccattttaaaaattgggttatgaatgttttgcagtggagctacatgagttccttatatattatgtattttggaaattgtctccttatccgatagatgatttgcacatattttctctcattaagtaggttctctgtcaactattgtttcctttgctgtacaatttttttaaaaaaaggaagaaaaaatttccttttttaaggaaagcttttaaaagaacatgacataatctaaacaataatttccctgttaatggcaagaatatttgtttttgccattataagcaatactactataaacayacttacacatatagatttactacaat

SEQ ID NO: 909054 - DNA, 502 bp, Homo sapiens
ctcaggaggctgaggcaggagaatctcttgaacccaggaggtggaggttgcaatgagctgagatcacgccactgcactccagcctgggcgacagaacaagattctgtctcaaaaaaaaaaaaawaataataataaataaataattaaaaaaaaaaccaccctatttggtattcacaataaacaaatacttattgaagtatctaaatatatcaaactcactgggaatttctgcagtaaagaaatctttttatttttttattaaaaaaacagattgacaactaacataatagttgtcaaatacaacaagtagttgtatttgttccttaataaatatttatattcagcataattatttaattgttgtaacataattttaacatgttgacctattctaatcacacctgttgacagttgagaattacattgttctaggaagttaaataattttccaaaatatgcatatttaatgatagtgactattggcaacaagataccttcactc

SEQ ID NO: 909055 - DNA, 597 bp, Homo sapiens
aaattaatggggaaaaattggccagaaatataaaagcctgtttttagaaaaataaatgcaatttataagtgaatatatttaaaattaacaggaaaatactatcgagacagaaattttctctcttttttttaaattatactttaagttctagggtacatgtgcacaacgtgcaggtttgttacatatgtatacatgggtcatgttggtgtgctgcacccattaacttgtcatttacattaggtatctctcctaatgctatccctccccccctcccctagtgtgtgatgttccccaccctgtgtccaagtgttctcaatgttcaatttccacctatgagtgagaacatgcagtgctttgttttcaaactaccaatgactttcttcacagaattggaaaaaaactgctttaaagttcatatggaaccaaaaaagagcctgcattgccaagacaatcctaagccaaaagaacaaagctggaggcatcacrctacctgacttcaaactatactacaaggctacagtaaccaaaacagcatgatactggtaccaaaacagagatatagaccaacggaacagaacagatctctctctttaaagc

SEQ ID NO: 909056 - DNA, 641 bp, Homo sapiens
agacaaaagagggagggaaaaaatcaacaattcaaaaagtaaagtgtgtgaatctgacttgctagagaaaggggtagactcagtacaacaaggtcacaaaaaggtgcagccttcgatgagacaaataccggctgaagctggctgataaatatttcctgtaggatctgaagcaggttgtcaccagcaaaacaaaaatccctagggggcagtacataattaacaatttgaagatgtggccgcgtgtcattgtctcaaaaggagccagggaatcctgcccccaaaagcacaacccgagttcccatattaatcttactgtttccctataaacgaatatcagtgtttccccagaggctcagaagacgcctttgctctgggctggcaaatgtctcctggctcatggtgtcattttcctgtgattttaaatcagcatcaccaaacctgttcctctagtctgagcaaaatcacacagcatgtttaggaaagcaaacaagtatttttttctattatcaaagacatgaataaaatcgggactgagagaagaaatctatttacacagggtgcctgaacgagtgtttaaagacttttagaacagtgactctctraaaacaactgaccttcaactaaattgcacccacacacca

SEQ ID NO: 909057 - DNA, 598 bp, Homo sapiens
caacccacattactgtcccaacgaaacgtgaaggatttctactyccattctctttcggtcagctttttgtttgtttgtttgtttttgaggcagagtctcactctgtcgcccaggcttgagtgcagtggctctatcttggctcattgcaagctccgcctcccaggttcaggccattctcctgcttcagcctcccaagtagctgggactataggcgcccgccgcggcactcggctaattttttgtatttttaggagagacggggtttcaccgtcttagccaggatgatctcgatctcctgacctcatgatccgcccgccttggcctcccaaagtgctgggattacaggcctgagccactgcgcccggctcagtcagcttcttaacatccacttaaaggcaatgctctaaaagcccaacgatagtgtaactccaaagtcaggtgaaacccagccaccaagtttgcccccacaaaaagcaaaacaaaaaagtgttaagtcaattggattactgagtttcactcaggaaatacaagagttatttcacctgaattaatcacaaggcttattgcatcctgaggacgacagacaagagtttctctc

SEQ ID NO: 909058 - DNA, 605 bp, Homo sapiens
tacatgtaccacattttctttatctattctaccagtgatgagcatttaggttgattcyatgtcattgctattgtgaatagtgctgcaatgaacatactcatgcatgtgtgtttatgatagaatgatttatattcctttggtatatatccagtaatgtgattgctgtttgtttttaggtctttgaggaattaccacactgcttttcaccatggtggaactaatttatactcccaccgacaatatatatgtgctcctttttctccacaaccttgccagtacctgttatttttacctttttagtaatagccattctgactgatgtgagatggtctctcattgcggttttgatttgcatttctctaatgattagtgatgttgagctttttttcataagcttgttggccacatgtgtgtctccttttgaaagtgtctgttcatgtcctttgcccacttcttaatacagttgttcatttttctcttgttaatttgtttaagttccttatagatgccagacactagacctttgtcagatgcatagtttgcaaaaattttctcccattctgtacgttgtctttttattcaattgataggttcttttgctgtat

SEQ ID NO: 909059 - DNA, 703 bp, Homo sapiens
aggtatgctggttacattaggttgagtttagggccctgtcgccaaattcatgggcatccacagcctcagaatatggcctcacttgaatgtttgcagatagaattaattaaggacctcaatatgaaatcaacctggatttagggtgaaccctaagtccaatgactagtgccctaataagaagaggatgcaacacagtgagacacacagaagaaggtgatatgaaactgatgcacaaattggatggatgtgtctcaaagtcaagcctccaaaaggcaccaaccctactcacacacatcttgatttcagacttctggcctcctgaatggtgagagaataaacccctattgtttcaagctacccaatttgtgatattatgctagaaaactattacaccagttgtcttgattaggtcacacttgtaactgctttttttgtgatcaataaatgtgtagtggacatttgcattaatgctcctagaatgtactccccattttgtggtttaaaaacattttggatttgctctggggaagcccctttcatcccgtccgtttcctcccgccccagtccatgtttttttaatgacattgactccatytccagttctaggacatataacataggccaaagtagatgggcacattttatcccactgaccttagggagctaatgagacaaaaatcgtatttttggctattagaacggt

SEQ ID NO: 909060 - DNA, 639 bp, Homo sapiens
actctcaggtttttttttattattgccaactcctttcatagtatacaaataataaaccataagcaaatactaaacttctgtaaagtattccactattgatatcatgaacacttggcaatatttcagattaaatcatagttctttgtgcaaaaagcgaagagagacaattcattaaaagtttcagtgttttcactgcaaagttgtcaaggctatatgctttgtgagttctaaatgtgagtggtgcatctcaatggagtctttgttccttttcttttttttttttacaaggcatggaggagtgacggcaggaactttctgtgctctgacaacccttatgcaccaactagaaaaagaaaattccgtggatgtttaccaggtagccaagatgatcaatctgatgaggccaggagtctttgctgacattgtaagtaacaaggcagtgaacgaaatttttcactgatagagtacaactaacttcctagaggctgctgaaatcttatgtatcaagaaagatcttattaactgataacattagtatgtagttttcaagctgaattacaagtccacaawccatagaacaacaacatttaaaatttatacttcagaaaatttatggataaaaacttttaaatctcatgt

SEQ ID NO: 909061 - DNA, 647 bp, Homo sapiens
  misc_feature 298: n = A,T,C or G
tggcaagtgaaatgaaatatattggcttagttagtaaagtttattttactcaatcaaataaatatttaaagacataaatctaagcatgttacctgtccagattaaagccttctatggccttctattacacttggaataaagtccgctctcttttccatgatttattcatacccacataatcgaggtctaacctctcagacctatctccctgatatctgccttcctttccacaggatccagtgacacttgctttaatgttcccgggagacttacttctgccacctgaaccaagctctcnctcctcgaatgacctttgtggtcatcagcctttagtagggcttcgcatggtcctcatttctggtgtcctcgtctatgtgtaactcctcctcttgtgcatgagctacacctattaactcaacttctagtgaatagaatgtggcaaaattggtgagaagtcccttttgagagtaggtgacttctgtttggggttctatctacttttcactcccacaccttccagtccttaagtctgagggaagcccgctgctctgttgtgagtagcccaggtggcaaggaaatgaygtctctagctgataggcagggaggccctgacacctgtcaacagcctgtgagggagtctgaacaca

SEQ ID NO: 909062 - DNA, 600 bp, Homo sapiens
ccagtgttaggtgccagaaaaatgtgtggcttttgtttytctttttagaaatgttacataatgacctttagcttagcatattctgtggaaaaagctaaaaatggatttttttgtgggtgaattaacacacaatttgaattattttgcagtattactgtatttgaggtttgccactgccacaagtcagcagacactaaatattgcattcagctttcatatgcagtatttctggaagatagtatgcatatgtgggatgtaaaatatatcttttaagacattttcagtctaaatagacttcccaatctctttcactaagcccatggatcagcaggaatgtttttggagtgttcccacagaatcatcatttcatttatgatggcattacatttttagtcagtcttcaaaaactcatctttgaaattgtgtgaaaaaaatataagcaaatatctttcccccaaaatcctctaatatttcattagccttacagaatgagttaacatatttagcaaacttccaacatttttctcatgttacactggcttataatgttaaaagggacttaggaaaaaagagtttgatgtaccacaggtggactgcaaa

SEQ ID NO: 909063 - DNA, 614 bp, Homo sapiens
taacatcccaactcacagccccatttgcacccaaataaaggacagatacaggaattagacagttgaaaggatttattaccaatgaaggctaggtggcaagatttggttaacatataaccataagggcttgctggcactacctgcctgatgcccctcccctgagttaaattcagatcttcaaattgcccaataggcaaactcagtgggaaggtttagatctgcagagtagacacccatatgaaggaagaatgtctccccctatctcagaaggaactagaggaagagtctaagctcttcaatgcttaaagttttatagagtgattctcaccaattaagaaaagaggacccaaacctgttatcagccaaccaattaagattaactcagttcttctttgcagggaagaatgagtaaggagtggaaagaggcttagaggatcactctgataggtggccatctgtctaggcaatgaatgaaacaaaaactgaatcattctttccattaagsaggccccagtttcttcaatacatgccgtttattctccttcttctattctctactcatttttataccaacctgaattctctcctacttcctacttttctattcattctgc

SEQ ID NO: 909064 - DNA, 638 bp, Homo sapiens
tttgctattgtgaacagtgctacattgaacatatgtgtgtatatgtctttataatataaggatttctattccttcagrtatacacccagtaatgagattgctgggtcacatggtatttgtctttaggtctttgaggaaccttcaaactggttgaactaacttacgctcccaccaacagtgtataagccttcccttttctccacagcctggccagcaccagttattttttgactttttgataatagcctttctggtgtgagatggtatgtcattgtggctttaatttgcatttctctaacggtcagtgatgttgaatttttttcatatgattattggccacatgtatgttgtcttttgaaaagtgtctgttcatgtcctttgcctactttttaatgaggttggtttttttccttgtaaatttgtttaagttccttacagatgctggatattagacttttgtctaataattaggccttctttgtattgaatatcatatgaatagcaattggtcagtcttctgatctttattttaacattaatgatggtcagttgtgtccaaaccacaaaagtgagggagcacaatgaagcctgttcaacctcccatcaaaccatggccagaaactcagtttttaaggttt

SEQ ID NO: 909065 - DNA, 485 bp, Homo sapiens
tccataaacatttactgagtactggaacttctatatgagcaaatccatctttattaaaaatgttcttccttgaaatgaatatatattactgtttaaatwgaatacatactatgattttttttctaagtatatattgtccaggatagcaagctatactgattatgtaaattaaccataatgaatccattttaaagaccaggaattctcttttttgtcctcttttatcattttaagattgttctgagatcaaagcaaaacgactcctaaattacctagacttgctttttgtccctatgtatttcagattataagaaaatacctgattccacgaaactggcatactgtgtaaaaacacaggttttaatttttaatatgtatatataattaaatgtaactatatgtgtacaatttctaaaggaataaacaaaaaagcaaagaaagtcataaaaaattggaatatttcattctactgtaaaagttcattg

SEQ ID NO: 909066 - DNA, 663 bp, Homo sapiens
tgtgatttatgcaagaaggacaatagggaaccccaaacagtggactcagactcaaagcaaagatattaactctagtacaaaagttttgcaaataaatatgcaattatatgttataaattaaaatatttatagacttggtttttatcacagactcggttgatatccaatcttgctaatgtctaatttgagtacttccattctgctttttcagtttattgaaaaggaaagtaatgttagtccaagaaagacctgataaaaggtccaaaatggctttagctacataaaatttgtatatttttattaaaaatatatacatgccaggaaaattgtttttcaaaaaatatcaaaagtgcttagtcctctttatttagaaagatttactgagacattagaaaattctatcactctgtagtcaaataggtaaagaaaccacagaggaaatgcaaatttatatatatatatatatgaaaatttcagcttcactggtaatcaacaaaatgcaaattaaaacaataagattaaattttaactatgatatcagcaaagcctagccaaattatattatggaaattgattgcatgtagataaaaataaaacactggtagggatgctaygttttctagcctttccaaaatactacataaaatattcataccatttcac

SEQ ID NO: 909067 - DNA, 599 bp, Homo sapiens
tttccacagtagacctcaaagtgctctaaatatgcacttgaagattctacaaaaacagtgttccaaaactgctgaatcataaaataggttcaactctgtgatttgaatgcacacatcgcaaagaaattcctcagaatgcttctgggtagtttttatttgaagatatttcctttacctccataggccgcaaagggctccaaatgtccacttgcagatcctaccaaaagagggaaagaaaactgttcaatgaaaatataggttcaactctgtgagtttaatgcacatatcagcaagtagtttctcagaatgcttctgtgtagtttttatgtgaagacattacctttttcacaataggccacatgggctccaaatatacacttgcactttctacaaaaagagtgtttcaaaactgctcaatcataagacaggttaaacattgtgagatgaaagcacacatcacaaagaagtttctcagaatacttctgtgtagttctcatgtgaagatatttccttttccaccataggcctcaaarcgaaccaaacttccacttgtagatactacaaaaagagtgtttccaaactgctcaatcaaaagaaag

SEQ ID NO: 909068 - DNA, 599 bp, Homo sapiens
tttccacagtagacctcaaagtgctctaaatatgcacttgaagattctacaaaaacagtgttccaaaactgctgaatcataaaataggttcaactctgtgatttgaatgcacacatcgcaaagaaattcctcagaatgcttctgggtagtttttatttgaagatatttcctttacctccataggccgcaaagggctccaaatgtccacttgcagatcctaccaaaagagggaaagaaaactgttcaatgaaaatataggttcaactctgtgagtttaatgcacatatcagcaagtagtttctcagaatgcttctgtgtagtttttatgtgaagacattacctttttcacaataggccacatgggctccaaatatacacttgcactttctacaaaaagagtgtttcaaaactgctcaatcataagacaggttaaacattgtgagatgaaagcacacatcacaaagaagtttctcagaatacttctgtgtagttctcatgtgaagatatttccttttccaccataggcctcaaaacgawccaaacttccacttgtagatactacaaaaagagtgtttccaaactgctcaatcaaaagaaag

SEQ ID NO: 909069 - DNA, 615 bp, Homo sapiens
tgtaggcctcaatgctctccaaatatcctcttgcagattctacaaagagtgttacaaaactgctcaatcaaaagaaagttcaactccttgagatgaatgcacayatcaaaaagaagtttctcagaatgcttctgtgtagtttttatgtgaagatatttgcttttcctgagtaggcttaatatccacttgcagattctgcaaaaactgtatttcataactgctcaatcaaaagaaagtttcaactcagtaaaatgaaagcacacaacacaaagacgcttctcagaatgctctgtgtagtttttatgtgaagatattttcttttagaccacaagcctcaaagtgctccaaataaccacttgcagattctaaaaaaagagagcttcaaaactgctcaatccaaagagagattcaactctgtgagatgaatgcacacatcacaaagaagtttctcagactgcttctgtgtagttttttttgaagatatttccatttccaccataggccgcaaaggaatccaaatatccaattgcagaatctacaaaaagagagattcaaaactgctcaatcaaaaaataggttcaactctgtgagttgaatgtacacatcacaaagaat

SEQ ID NO: 909070 - DNA, 607 bp, Homo sapiens
aagctctccaagaatccacttgtagattctagaaagagagtgtaacaaaactgctcattcataagatawgttcaacaccgtgagatgaatgtacacatctttgaagtttcccataattcttctgtgtagtttatatttgaagatatttccttttaccccatgggcgcaagggctccaaatatccactttcagatactaaaaaaagagagattcaaaactgctcaatcaaaagataggttcaactgtgtgagttgaatgcagatcacaaagtagtttctcagaatgcctctgtgcagtttttatgtgaagatatttccttttccacaataggcctcaaagcactccaaatatccatttgcagactctataaaaagactgtttcaaaactgctcaatcaaaagaaatgttcaactctgtgagatgaatgcacacatctcaaagaagtttctcagaatgcctctgtgtagtttttatgtgaagatattttctttttcagagtaggcctcaattgctccaaatatccacttgcagacactacaaaaacactgtttcaaaactgctcaatcaaaagaaatgttcaactctgtgagaggaatggacatatcac

SEQ ID NO: 909071 - DNA, 607 bp, Homo sapiens
aagctctccaagaatccacttgtagattctagaaagagagtgtaacaaaactgctcattcataagatatgttcaacaccgtgagatgaatgtacacatctttgaagtttcccakaattcttctgtgtagtttatatttgaagatatttccttttaccccatgggcgcaagggctccaaatatccactttcagatactaaaaaaagagagattcaaaactgctcaatcaaaagataggttcaactgtgtgagttgaatgcagatcacaaagtagtttctcagaatgcctctgtgcagtttttatgtgaagatatttccttttccacaataggcctcaaagcactccaaatatccatttgcagactctataaaaagactgtttcaaaactgctcaatcaaaagaaatgttcaactctgtgagatgaatgcacacatctcaaagaagtttctcagaatgcctctgtgtagtttttatgtgaagatattttctttttcagagtaggcctcaattgctccaaatatccacttgcagacactacaaaaacactgtttcaaaactgctcaatcaaaagaaatgttcaactctgtgagaggaatggacatatcac

SEQ ID NO: 909072 - DNA, 607 bp, Homo sapiens
aatgtacatgtgcagattctacaaaaagagagtttcaaaactgctctatcaaaagaagcatttcagtctgtgaaatgaatgtatacattacaaagaagttttccagattgcttctgtctagattttatgtsaacatatttccttttcaaccatacactgcaaagcggtccaaatgtccacttgcagattgtacaaaatgagtgtttccaaactgctcaaccaaaagaaagtttaaactctgtgagatgaatgaacacatcacaaagaagtttctcagaaatcttctatctagtttttatataaagatatttgcttttctaccataggccacaaatagctccaaatgtccacgtgcaaattctacaaaaagagaggttcaaaactgctcaaacaaaagaaaggtttaactctgtgaaataaatgcacacatcacaaagaactttctcagattgcatccatctagattttatgtaaagatatttcctttcctaccactgactgcatagcgctccaaatgtccacttggagattcttcaaaaagagtgtttccaaactgctcaatcaaaagaaaggtttaactcggtgagatgaatgcacacatcacaaa

SEQ ID NO: 909073 - DNA, 610 bp, Homo sapiens
tcacttcagtgcacaactcacaaagatgtttctcagaatgcttctgtgtagtttttgtgtgaagataattcattttccacagtacgcctcaaagcgctccaaatatccactcacagatyctgtaaaaagaaagattcaaaactgctgaatcaaaagatacgttcaacaatgtgagctgaatgcacacatcacaaataaggttgacagaatgcttctgggtagtttttatttgaagaaatttccctttccacaataggcctcaaattgctctaaatatccacttgcagattctacagaaagaatgtttcaaatctgctcagtcaaaagaaaggttgtactctgtgaggtgaatgcacacttcacaaagtagtttctcagaatgcttctgcatagtttttatgtgaagatatttccttccccactataggcctcaaaggctccaaatatccacttgtagattctaaaaaaatagtgtttcaaaactgctgtatcaaaagaaagattcaactctgtgagatggatgcacagatcacaaagaagtttctcataaagcttctgtgtagtttttatgtgaagatatttgtttttccacagcaggccccaatgaact

SEQ ID NO: 909074 - DNA, 606 bp, Homo sapiens
caaagcgctccaaatatccactctcagattctgtaaaaagagagattccaaactgctgaatcaaaagataggttcaacactgtgacttaggtgcacaattcacaaagatgttcctcagaaatcttctgtgtagtttttatatgaagatatctcctcctccaaaacagatctcaaagccctccaaatattcacttccagattgtacggaaagattgtgtcaaaactgctaaatcaaaacaaaggttcaactctgtgatgaatgcactcatcagaaagaaggttctctgaatgcttctgtgtagtttctatttgaagatatttccttttccaatatagggcaaaatagggccccaaatattcacttgcagattctgcaaaaagggagattctaaactgctcaatcaacagataccttcaacaatgtgatttgaatgcacacatcgcaaataagtttcacagaatgcttctgggtagtttttagttgaagaaatttccctttmcacaataggcctcaaatcactctaaatatccacttgcagattctacaaaaagagtgtttcaaaactgctcaatccaaagaaaggttgtaccctgtgagatgaatgc

SEQ ID NO: 909075 - DNA, 510 bp, Homo sapiens
agttttgaatctccctttttgcagaatctgcaagtggmtatttggagccctattttgccctatagtggaaaagcaaatatcttcacataaacaaacacaacacagaagcattcagagaaactactttgtgatttgtgcattcaacacgcagagttgaaactatcttttgattgaacagctttgaatctctctttttgtagaatctgcaagtggaagtttggagccctttgtggcctatggtggaaaaggaaatatcttcaaataaaaactacacaaaaacattctgagaagctactttgtgatgtgggcattcatctcacaaggttgaacctatcatatgattgagcagtttcaaaacactctttttgtagtatctgaaagtggatatttggagcgccttgttgcctacaggagagaatcaaatatcttcacataaaaacaagacagaagcattctcagaactttctttgtgatgtatgcattcatctcatggagtttaacttttctttt

SEQ ID NO: 909076 - DNA, 640 bp, Homo sapiens
atctttgttttgatacagcagttttgaaacactctttttttagaatccgcaagtggatatttggrgccttttgaggcctatagtggagaaggaaatatcttcacataaaaactatgcagaagcattctgagaaagtactttgtgatgtgtgcattcatctcatacagtagaacctttctttggattgagcagttttgaaacactctttttttagaatctgcaagtggatatttagagcgttttgaggcctattgtggaaagggaaatttcttcacataaaaactacccagaagcattctgtgaaacttatttgtgatgtgtgcattcatctcacattgttgaaggtatctgttgattgagcagtttagaatctctctttttgtagaatctgcaagtggatatttggagccccttgcaacctatggtggtaaaggaaataccttcaaataaaaactacatagaagcattctgaaaaacttctttgttatgtgtgcattcatctcacagggttgaacctatctaatgattgagcagttttgaaacactcattttgtagaatctgcaagtggatatttggagcgctttgagaccttccgtggacaagctaatgtcttcacataaaaactacactgaagcattc

SEQ ID NO: 909077 - DNA, 593 bp, Homo sapiens
aactttcttttgattgagaagtttggaaacactttttgtagaatctgcaagtggacatttggagtgttttgtggcctatggyagaaaaggaaatatcttcacataaaaagtagacagaagaattctgagaaagttctttgtgatgtgtgcattcatctaacagagttgaaactttcttttgattgatcagtttggaaatactctttttgtagaaactgcaattggacattgggagtgctttgtggcctatggtaggaaagcaagtatcttcacataacatctagacagaagcaatcagagaaacttctttgtgatgtgtgcattcatctcacagatgtaaaactttgttttgattgagcagttttcaaactccgtttttgtagaatcttcaagtggacatttgtagcgctttgaggcctatggtggaaaaggaacataaaaactagacagagaattctgagaaaattcttgtgatgtgtgcattcatctcacagagttgaacttttcttttgatagagctatttggaaacactcttttcgtagaatctgcaagtggatattggagcactttgaggcctctggtaaaaaaggaa

SEQ ID NO: 909078 - DNA, 628 bp, Homo sapiens
tttgtcagattttcctgatcttcattgattgcacaatgtaattctcaactcycattttcttcaccaggattgattactttttgtattactgtttgttgatttttcatttttccctgcaattcactgtgatgtcaactcttggtcatgttaaggatgtttgtattcctaatataatcagtaaaataataaatagctgtgagctcaatacttacggacttactctttgctataccttctccatcatttttgctttaatattacaagcctatatttacttttcatgtattgtttccaagagccaatattttggattctctggctatgaaaaaggcttgacaataattttgatcaaaaaattctctaatggctgcagtgtcacatgaaagtttcctgtcattggatacaaaccaggaagctgtgatgcatcctgtgaaacctcaaacttctccccagtttgaatatcaatagcgtagtccttagtagtaattttacattcagcacttgggtgaaccacacgcagacacagatacattgctcttttataattcatactaattttatccagtaaacagatgaatagattctcctgctttttctcttttgggaagaaacgtgtgtgtgtgtgtgt

SEQ ID NO: 909079 - DNA, 628 bp, Homo sapiens
tttgtcagattttcctgatcttcattgattgcacaatgtaattctcaactctcattttcttcaccaggattgattactttttgtattactgtttgttgayttttcatttttccctgcaattcactgtgatgtcaactcttggtcatgttaaggatgtttgtattcctaatataatcagtaaaataataaatagctgtgagctcaatacttacggacttactctttgctataccttctccatcatttttgctttaatattacaagcctatatttacttttcatgtattgtttccaagagccaatattttggattctctggctatgaaaaaggcttgacaataattttgatcaaaaaattctctaatggctgcagtgtcacatgaaagtttcctgtcattggatacaaaccaggaagctgtgatgcatcctgtgaaacctcaaacttctccccagtttgaatatcaatagcgtagtccttagtagtaattttacattcagcacttgggtgaaccacacgcagacacagatacattgctcttttataattcatactaattttatccagtaaacagatgaatagattctcctgctttttctcttttgggaagaaacgtgtgtgtgtgtgtgt

SEQ ID NO: 909080 - DNA, 570 bp, Homo sapiens
caaagtgaaaccacagacattgtttctagtttttctycagccacatttaactgcaaaggtacagactctgtaggcaaagaataggaatttatcaggattatgtttttttctccaagtgaatgtggtagtgagaaagaggcaggagaattgaggttgcatgctaggtagtgataataagtttgccctcatggaaatttgtcttaaatataaagagggcagaggggcaacatgtggaggagagacagtataaagatgggaggattcatgggttgatgagcctggtgtaggagttggtgtactgcagaaaacaaactgagaaaaacaaactgataaaatacctttggaatagagaagttcaggaaactgagaacccatgttgattggaggatcatgagaatgtatattcttcatttttgaaatgaagaaatagaaatcagggagtcaggagccaaatcacagaaaagtgatggattgacctaagaaagagtgggtaacagcagaaatgaatagtcatgacagtacatgtcacgtaacagagtctattgacatagagtcctaatggaagtttta

SEQ ID NO: 909081 - DNA, 668 bp, Homo sapiens
acattgaagctctggaatcctgagcatcttctgtcaaggaacacaaattaggagaaaacaaagaaaccyatgcagacatatccacagagatcagacctcaggaatatagacttgatcacctcataagggatgaaacctggcccactgaggtgaaggcagaataaaaagcgaatatcgattggatcagggggaataacattataaatactgatgaaaccctggtgaacagttgcagaaatgagaacagtaatagctcctcatattcttcttgcatgatcatacttagtagtacctaattattaatcatatacttctttttcatttctgtagtactttatactgaatttttttgtcgtggttaccttttataattggtctataatttacaaaaataaagatggcatcgaaactggaagagaagagaattaacattacctagagttaaatgtaataactgatatgactttgggtcttccctttcatggaaacaatgagcacactttaatttgtctgaggtcttactgtgctgtttatgtgggagcatgctgttgttgcagttgggagtttaaacatgagaagaaacctgtgtgtaagtgtggagtagccaagggtcagtagtgtagattgtcttggtcagtatttattctagcacccaaagctgggatcca

SEQ ID NO: 909082 - DNA, 652 bp, Homo sapiens
tctcattggagttagggtgtatcttaatctagtatgctctcatttgcatccttaccttaattatatcagcaaaaatcctattttcaaataagatcacattcagaagtcctgggtggatatacatttatgggaggaacactattcattcccactacaggtatggaaaaatacgttgtccttggtaaacactattgggaaataagaccctctatttctaggtgtcaagaatatctaaaactttaacttttactatggatcaagcattacccattaatgtattaactcatttgatactcagaaaactccatgaattaagtactgtctgttgccatctccaacttacagatggaaaaactgaagcacagaagggttgaaaatgttttgacagttattatagctgttaaatggctgagctacatttaaatccaaatattctaacacagagctcatgctcttaaccactatcatattcccaataaggaaacaggacggggaagaaaggaaaagcaaacaaaccaacggtttgaaggactaatatgcctaagtgcatgtgttaggtaatctaactttaatgatagaccactttagtaggtcttatcagtattccttattttccygaattaaaaaatgacggtaaaggaataggaatttt

SEQ ID NO: 909083 - DNA, 578 bp, Homo sapiens
tgtatattcataacaatgatagcttcaggtaagtcagatgcatgacttatatcattttgaagttggaagcaaagaagaaggagagttttcttagagcttttcatatttgaaggactaaggaacacaggcagacatctgtcatgtaatttccaggcatttaggttactagtactatgagcaagttaactttgtcctaagccctaccatttggagaatatattttgaatgttggctttcaatatgttaaggttgaacattaaatatttttgatatgattccaaaggaaagagtactagcatgcttatgtgtttattatttgtatctatacataggctcactatatgttgtagcccttcagagtattttataagaattactgtgatctcaaatagtaatcatactttccctcagcctccttcctagcattgggcataatattttagaaaggtaagaaaaaagagtttttattactagacttcttctaatatgcaaactaggtcacccaaagattaggaggaaactggtstgatacgtggagagtttcacgtttcctagttacaaatatgcttagtaagaca

SEQ ID NO: 909084 - DNA, 579 bp, Homo sapiens
ttaaatgatcatttattttcatcaaagcctgttctatatatgccacttcattttctaacttttggtatgaaaaaatcagtttacttacartatgttaattgtattgtactactataaacaggaacataatttccaattcagttttaaataattttaccagtactactaacttttaaggaaattaattcagttggttactcagtgtttgttacagaaagagtccagaaaagtattcaccctaagagaatgtcaatcatataatgataatttgtgaaagctttgagaatcaatcatcagtaagttactatcagtttataaaatattatcacatttgtttaaatgtgactttagatacttttatgccaaaaataaactcacatgagcacatgacagtctgagctctataatcagtgtgcttctgctgtgcagaaatgttagaaacgtattgtctaaatatctttgataattaaaatgtttaatatttaatgaaatttgttgttacttgttttaaatcttttttcttttaataaagatttaaataagaaataactgcctgtcttttggtttctttaatctaga

SEQ ID NO: 909085 - DNA, 601 bp, Homo sapiens
acatccatacattcagagtaaaggcatggaggaaaatcttccaagcaaatggaaatcagataaaagccagayttgcaatcctaatttcagacaaaacagattttaaaccacaaagatcaaaaaagacaaaagaggtcatgacaataatggtaaagagtgcaattcaacaagaagacctaactatcctaaatatatatgtacccaaaacagaagcacccagattcataaaccaagttcttagagactcacgaagatacttagactcccacacaataatggtggagacatcaacaatccactgacagcattaggcagagacagaaaattagcaatgatactcaggacctgaactcaacattaaaccaaatggatctgatagatctctacagaattctccatcccaaaacaacagaatatacattcttctcatcgtcacctgacacatactgtaaaatagaccaaataatcagatataaaagaatccttagcaaataggaaaaaactgaaatcataccaaacacactttcaaaccataatgcaataaaattagaaatcaagactaaaaaaatttatcaaaaccacacaattacatgaaaattaa

SEQ ID NO: 909086 - DNA, 456 bp, Homo sapiens
tttgagatctttctaacttcttgaygtgggtatttagcactataaactttccttttaacactggtttcattgtgtcccaaagattctggtatattgtgtctctgttttcattagtttcaaagaattgtttgatgtctttcttaatttcattctttatccaaaagttattcagaagtagcttgttcaacttccacattattgtatggttttgatggattttcttggtacttatttctatttttactgcactgtggtccatgagtgtatttggtacgattttgatttttttaaattttttgagacttgctttatggccaagcatgttaatgatcttagagtatgtgtcacttgcagttaagaatatatattctgttgttgttgaatttttctgtagatgtctattaggtccaattgtacaagtgctgagtttaaatacagaatatttttgttagtatt

SEQ ID NO: 909087 - DNA, 655 bp, Homo sapiens
aatttatgtttggagattgcagtaaagacaggcgtaagaaattattaaagtattaatttggggaactaataaatgtccatgacatcttcacaatttatattcttctgccatggcttcagccagtccctccattcagggtccctgacttcccacaacactcccatattcattggagcactactcaaaatagccaagatacagaaacaaaccaatccatcagcagacaaatgggtaaagaaaatatggtatgtatacacattttaagactgaatatcattcagtcttaaaaaaagaaaatgttttttatttgtgacaacatggatggatcttgaagacattatgctatgtaagataagtcagtcacagagggaaaaatatggcataatttcacttatatgaggtaactaaactagccaaacttatagaaggagaaaaaggaacggtgttgccaggggatgggaggagagggaaatgggttcagtgggcatcaagttacagtttaatgagatgaaaaatctctaccgtaaaacaaagtacctatagttaacactaaagtgtgatgtacttaaaaacatattaagagggtwgttctcatgttaagtctatttgcattttcatttaagctgttattttatgtgctgacaattaattgaaa

SEQ ID NO: 909088 - DNA, 687 bp, Homo sapiens
catctgcttgtacatctatgataagaccactaactcttcatcttctcactctgatagatcacacggctcaatggccagatatattctaaaggatgttaatccctatagccttcccacatgagaaatgagacaatcccactatacgcaacattgtagacggtcttcatctttaatgaatgaagacagtggggtctcaatgggaggtattgtagaagttaaatgtcctcagataccctacatacaggacagcatgattcctctctgatttgtttttaaactcagggtctcagtggaaggcatatcagcataggatgggctgtacagactattgctctcgtccttgacaccccactcatctgtttcaaggtcacacctctgctctgttttgttttgtgttgtttttttgagataggatctcactcggtcactcagactggagtgcagtgactggaatgaatcactgcagccttgatctcctgaactcaagcaatcctccctcctcaggctcctgtgtagctgggatcataggcatgtgccaccacatctaattaatttttgcattttttgtagaaacgggatkttaccatgttgccaaggctgcacttctgctttagatagtagatattcctcctggagacttagctatccttgagcagtattcctaatttccgtggccctcgtaacttt

SEQ ID NO: 909089 - DNA, 584 bp, Homo sapiens
acacacacacactaggttcttgcatctgagggtggggcctgaatctctgtacatcaggcacaggaaggtgycactccttgctacttttctccaggtctcatgatccaatccctaatatttccattgtggaatacgcttgacacttacttcacatcatttgctctatctttgcattaactaatgatcatatcaaaacactgtcttttgaaaaaatttattgcagaggggtcacctaggaaagatgcacttggtaggggtcacctgtgcccccttgtcctcctttgctattcaaatcgtcctcaaacctaccctctggctgaggtgggcagtccaacatgcaggcaggcgcctggctgcctggaggcagcccttctcgttgccctgtcataattcaagcaggtctttctgatgccagaggaaatgcctacaagccttagaaaagtcttagagatttttaataagggttattagcctctattcctttggaacaagaaagggtagagctgactttgatcatgaagttttcgattctctcgctgccgtcacacctcttccaatgcctcagtaggagacaccttctcacc

SEQ ID NO: 909090 - DNA, 584 bp, Homo sapiens
acacacacacactaggttcttgcatctgagggtggggcctgaatctctgtacatcaggcacaggaaggtgccactccttgctacttttctccaggtctcatgatccaatccctaatatttccatkgtggaatacgcttgacacttacttcacatcatttgctctatctttgcattaactaatgatcatatcaaaacactgtcttttgaaaaaatttattgcagaggggtcacctaggaaagatgcacttggtaggggtcacctgtgcccccttgtcctcctttgctattcaaatcgtcctcaaacctaccctctggctgaggtgggcagtccaacatgcaggcaggcgcctggctgcctggaggcagcccttctcgttgccctgtcataattcaagcaggtctttctgatgccagaggaaatgcctacaagccttagaaaagtcttagagatttttaataagggttattagcctctattcctttggaacaagaaagggtagagctgactttgatcatgaagttttcgattctctcgctgccgtcacacctcttccaatgcctcagtaggagacaccttctcacc

SEQ ID NO: 909091 - DNA, 628 bp, Homo sapiens
gacatgctatacaaagtatttactgtctgagaactacccaagtatactggagtcatcagggaaacccaatgttctctacagcctaccacaagctactggacagggcttcacagattcgttccttgaaaaccactaatgcaatctgcgcacaacaataccatacaggagcttcccctcacccccaaaagtaatgcataactagggtcatagtaaaatcaaaatgcttttattatggtcaaaatcagagccattgagtcctaacagcttaaactagatatagaaagcagggcaagtagtgtaaaacctccacattttctaggcccttcttcatatagcagtttgattatacttcaatttggtgttaagaggacaataatacaaagtaaatgtccacaaaggaccaaaacaccaaattttccatgtccaacaactctctataattaatctactatgtagctagtgtccacgccaaatgttcagttcttaacattcgccaagaaggaatgggaagaaacagatgagtgacttcagatagggagtacactttctcttcctagtctccatcgaacaatctcacttttttaacwgagaatcccccacagctacatccaagttaagagcaaaatac

SEQ ID NO: 909092 - DNA, 602 bp, Homo sapiens
aatgtggtgttttaaaacattgaaaaagctaaatacagcaggcatttttaacataaaatttaaagataaaacattactgatattgaatgaaacactggtgtttcaatttcattcctaatactgctacaacagtaaaaattatattgtataatttattccgtgcatagcataatggtttaaatacaaaaccttattctgtataagatattttccaatatagctacattaaattactatttaattattacaaaatttttattaagttatcaagtataactgtgttttacaaatgtccttcaaagtgaaattatctagatagactttattctgaaataaaaaataaattcagaaccaatataacataaatattttatacatattttgctttaatattgtattagaagcaaattgggatccaagccctgatttcatgttttgaatattaactgttgaagcttcatggaaattttcaagagtctgtgaaatccyaagtaatcattattatattgtaaaagataaaaaatatctattaaaaactagtattctattaggtcaatataagaaggtacaaatgcctcaaaattaagatgaacaaaaaacta

SEQ ID NO: 909093 - DNA, 593 bp, Homo sapiens
cttctagttttgaaggtaaatccaggcaggaagaagtragaaatcaggaaagtcgtctctgaattgtgctattattacctgacattggtgcactgtggaataggcatatatttatatggacttctttctcttgtgaatggtgttgtttcttaacaccaaaactaacatgtctattttacatatccgtattcatacttaatcacacaaatacttgaaaattctataggtttgctattcacttccctcagggcaaattaaatgtcatttaaaattttcttctacattttgacttacaatttgaactaaaattctattaggaacaatactctttcatattccacaggttccatatgctatttttttcacatatttgatgttgatcaccactttccaatcaatcttatcttctctatattcaacatatgcacagtctttaattttggttacttttgtgtcaagccatttcacaattacagtatcttttctgttttttactttccatgtgagatatgaatatagcataatagagtggataaaagcattctcaggctattttccttctgacatttactgactgggtaaccccagaccag

SEQ ID NO: 909094 - DNA, 614 bp, Homo sapiens
agccaggaagttgtcagtgatttcrgctgccaacagcgcttcagtaaagatatttgctacctcatattcttttaatgtgaagctttcatatatgaaatagaacaggtcacttttggacaaaaacataagagaattttaagtagagcaatgagagcacacacatagctgtgctctggattgatcaaataaaagctacaccttctccatttgcccacatgctgtgtgaaaacaaagatccacataaatgtcctgtgttgctagttattagttccttctccacctggctgtatctacatatacatacacatgcaatggcttggatggactaggccaagcccatctaaatcaccttttatgcctctaataaaaagagctcactggtctaagtgaagaaagtgcaaaacaacactgaacttttgagttgaaataggcttcagattctcaagtcaatcttctctcattggtcgatgagaaaactgagtctcagagataatgcaggtgactcagccagatcagtcaaggaaaaggtgttggagacaagatgagaaccttctagtgaatcacatttactcaagataggtctacaatattctgaaaacccgtatgacaaacat

SEQ ID NO: 909095 - DNA, 585 bp, Homo sapiens
aatctagtgatcttctagaatactctcaggtacaacacatatctttgcaaagaacatatctcacagacagtttacataggcaaaagkggcatataagatataatatatatgtgtatatgattttaagaaggttctcaattcaatatcatatgatattctgattaacaaggacacctctggagcatgttcctttcagttcttagatgattcataaacataacttggaggccaaagccaaaaaaatggcttaggaaaaacttgggctaccatgaatgttactttaagagtgtcctctgacatcaaatgccgttaaaaaatgatctacttagtatttcaattatattgtagaaaacaagaattctccaattaagatataagcaggaagaaataaaacaggagaaaagaagcacaaactccagaacaaatgcagatttggcaaggactggttggacatgaaagttaacctgctttaaacacatcaaaagatgaatcttacgagaatcagccagataaaaatgttaatgttcttttaattatgtgttctgttatgttcactgcgctaaagtcatacaaaaaaatgttgga

SEQ ID NO: 909096 - DNA, 680 bp, Homo sapiens
gcatgcttaatttgatttgccttcttggcccataaaatatactaattttttattatgtttaaacctattgaaatatttatgccataatcagaaaaagaaaaacacatataattgatatttttaaaccagagtttattttcatacttaacaattttaggtatacctaacgatttttagaaaaataggattctttgccataacaaggattttaaattgccactttagaaggacagatacaatcataatcttcttaaagaccaaatgagaaataatgtttaaaacaatgaaccatctcagattataacggtgatactgttagatataaattcataaattcaatgttgttgaggcaggcatgcttcatgcttctgtctctgatgttttcaaaacctgacagagcagtgctatgtggagtgaagcaaaagcacaaattgagtcaaagctatttatcaatgtctgttaataatctacacatcaaactgcaaatcattccattaaaaaaaagtggtagggagaaaagagttttttattcatttgtaaattgttttctttcaatgttcagaattttttttttaaattttgacttaatggagaccactatctgtacaaaatttmtgaaactcgcttttacttcagatatagtaaaatacaatgacaaaacaaggtacctatatatcagt

SEQ ID NO: 909097 - DNA, 588 bp, Homo sapiens
tagagagccaagagcaaacaaaccccagagctagcagaagacaagaaatagccaagatcatagtggaactgaaggatatagaaacacaaaaaccccttgtttttrataaatgaatcctggagttggctttttgaaaaaaaaaaataataaaatagatagactgctagctagactaataaagaagaaaagagagaagaatcaaatagacacaataagaaatgataaggggaatattaccactgaccccacagaaatacaaacaaccatcagagaatactataaacacatctatgcacataaactagaacatctaaaagaaatggataaatttctggaagcatacactctcccaagactgaacctacgaagaaattgaaaccctgaatagaccaataatgagttctgaaattcaggcagtaataaatagcctaccaacgaaaataaagcccaggaacagatggattcacagctatattctaccagaggtataaagaagaggtggtaccttgtctacttaagcaattccaaacaatcaaaaaggagagactcctccctaactcattttaggaagccagcatcatcctgata

SEQ ID NO: 909098 - DNA, 630 bp, Homo sapiens
aacatctttttgttaaaaattatttgttacaagaaatctgcatgcgaacttgggagagatacagtcttctgttgactgtggcattcaatcaatccctcaggtggaaagaatgtgttacagctggtttgttttagcagcatggcaaccaggtggtaacatattgtgagcttaatatggggcaattaataagtttgaatggccaattatgaattcatcttgcatcattctggagctgcctcaattgatattcattcagtgcttactggaaacagaataggagatatttatattttggtacttggattagagttatgcaattcttctctcagtttaccttcttttcctggaaagtttttcttgctaagaatggtgtctgacaatgattaaaatatcacttgactttttgccaaggcagtaactggaagtctgacagctgtgtagttaaacttcttggttcctgctaatatgatattacaaatttccataaaaaactttgaacacctaaaatagatgatattctgggaattgtyacctatgggccaattaatgacactcaaatcttttgagaagggattccagtagtatcatataaaacagaggttcttaaactttggaaagtatctaaatcac

SEQ ID NO: 909099 - DNA, 545 bp, Homo sapiens
tatagctaattgcttatctagagcagtgaatttcaaccctagctgcccattagaatcacctagagagctttagaaaaatagatgcccaggtcctagctcagttcaatgaaaggaaaatctctataactggggcctcctctagttatttaatttccctagttatttacaaaattgaggtaataagagcccctatcttatatggttgttgaaaagattaaatgaaacataggcaggcttagcatagagcctgcctcaacaataagctcttgtaataattatcatagcaaatataagagggaggactgtattcattacattctgcagtaagatctccatctcaggtgagagggaacattatgtttatagaggtcatcaacttttttctctaagattgaaataaaaaaggaaaacaatccaaaaagaaattggttgagcttaaaactgtggacctcagtcatccctgggagaaaatggattaccatcattaatgtctgctgtatccagcccagakgcaagtgccagaagtatcttaattacaatcagct

SEQ ID NO: 909100 - DNA, 627 bp, Homo sapiens
aacagtttccaccacccacgagaagctcctgcatgctgttcttttggggtcaacatctcccccgactcccaacccctgccaactactgatcttttctccttcctatcattttgccttttctctcagaaaaggtttcgttccatgcacttgcctgcatgccactgttgctagctagattgttagcccaatagtgtgaagtgggggagttctgtggttctgatgaaggctcagtctcaggtggcacctgttcctgggtctctgatgctgctttctcagtggtcctggtgcatccccagctgcagatttgctgctcctgggagagcagaggactatttttctgtgacttattctcagctgcagtgggtttccccagtaccttaaagtcaatgaccagagcagatgttttcattagtcctagtggtggggcacagtgtcttgggcacatactagttttaggactcttcctaaatgttttaacttcactttagaatcataagaaaaaacacaataataaagaatgtagaataacgtatccagcctggattatattcatctttacacctatgaggttgtaaaatatctttttatatatrtgttttgtgaaggaagaggcacacaaaggcagaa

SEQ ID NO: 909101 - DNA, 570 bp, Homo sapiens
cttatccctctggctccccttatctttacctaaagatggaccgcacactgagtcccattttcaccccacactctcctttggtcattttcaccccacactctcctttggctatgcagttctcctttcctaaatgtgagattaagactttaaaaaaaaatggagaccaggcacagtagcttatgcctgcgatcccagtattctgggaggcaaaggcaggcagattacgtgaggccaggagttcaccagcctgaccaacatagcgaaaccgtttctactgaaaatgccaaaaattagctgggtgtggtggcacatacctgtaatccagctgcttagaagactgaggtactagaatcacttgagcccaggaggtggaggttgcggtgaaccgagatcacaccactgcactccaacctgggtgacagagcaagactctgtytaaaaaaaaaagaaaagaaaaaaaaaaaaaggaaattatcaagatctagaactacaggtcccttgccttgggagtactatttctagctcagcttagtgagcctctaatatctcaaagtaggcaatatttccccc

SEQ ID NO: 909102 - DNA, 618 bp, Homo sapiens
agctgcaatggaattctttctcccccatggcttcctactccttggcctttatacatgaatctgtccatataaactttatcgaagaagtcagggaagaaggaagraggagaaatgagaataaactgagctggcagcacactcagctttcatcatgaggtaagcctgctctcggacctgcttcctcatagcagtgcctattgcctcagaatcatacagacactgtcacaacgttatagttccctttaactgtactgtagatagcaacctgaacattgtgaaatgttaagctttccctctgagattcgctttcagagcctgcataatggtgaaactactgactcagctggtctgaggaaccccacaaggagctggctcacaagctgaaatgctcacatttcatctcccttactctgaccactcaacgactacaatttttcagcccctcaccctccatgatcccctttaaaaactccagtccagaacttcttggggagataaatttgagagtctaaccctatttcctcacttggctaccctgcaatcattaaactctttttctgttgcaaaccctgctgtctcagtgtaattggtttgttactgtgctgagggcatatgaac

SEQ ID NO: 909103 - DNA, 595 bp, Homo sapiens
cttcctacgtcaaagctaggctcctggagctgtcagggcagaggattcctctctgtgggtctgagtttccaaatgtattaaatgagaggtggatgtgatattgctaatttcatgctgcagggggcaccattttcattgtagtctatgtatcactcagatgtgccagtcacataaaatgaagggagatggtatctctagaatttgataacataatgatcctagataatatctaattttttttcaagttctaaaaattctgactcccagaaaccatataattgcctatttccctcaaactttttgcgggagcagctgtagacattttggataataggcatatgcacagcacattcccaatgcgtattgtggtcatgttcagttctcggtataatagttccaaatctgtttattttccttcctttcaagaaaacacgccataaactaactagatgagagttttattgctctgtggatacccttatatttgytttactttatatactaagaaaataatttacaaataagtgctttatatatgtttaattacaaattatagcgcacttcattgtgcatttgaaaactaatctcctagtgc

SEQ ID NO: 909104 - DNA, 604 bp, Homo sapiens
agtcacacgtgacttctactatctagtttttccagcactgtgctgtggatgaaatgacattgaaagcaatgtcaagcgccaccagaaaatataagaaaagtgaagatgcaagccaccaatcaactcttctaaattcctttggtaaactcttctggtattccaaaatgagtctggctttagagtctgagaagtttctggcagtgtggaaaactgacatgggaaatctgttgtaaaattatgccccagtccatggaagcatgcaaatgcagagggctctcatttgttgagttttcttcatgtttactgcctgctccccacccacacttagaatgtgcgctctaagaagacagagacctggtctctgttgctcatggctgcattcctagaacaaaggaaaaggatggaacatggtaggtgttccatccatattgctgaatcaaattaatgaaaatcacttaacctctatggctctcactctccttgtaattaaaacaaagaaggaaataaaattcactgcatagtgttcttatgacaaataaataygagagaatgcatgaagtgtctagacatagcaggaatttagcaggacttttctgtcagaatg

SEQ ID NO: 909105 - DNA, 591 bp, Homo sapiens
cgtatctgacacacaaacaatttcctgagtttaggcccatattccaaatgcttcctgaacattttatttctactggatagctccttcatgctccagattcaaccagtcccaaagaaaactgatcatcttttttcaccttctcaacttgctcttcatttaatgtttcccattccaagggataatcccaccatttgcctccctctttgctcttccacagctcagcagtcacagattaagtatttctcagatctgctgttttttccttttcatttctgcagttatacctcaagtcttgctgccatcatctccttcttatgtatggtagaatctccagccagcacagtttcacctgtgcgagcacactgctggcattgagtctcctggaacatacacccccgtgtctttttctgggtgtcaggccctggctgtctgtccctttatactcaccctcacaccaacccgtgaactttccctaacatagcaaaaagtacgcttgaaagtcagtgactgttgaatgacygatctttactaagagattctaagaagcaagagggggcaaagcacacagctgtttctcatccctgaagctcc

SEQ ID NO: 909106 - DNA, 671 bp, Homo sapiens
gcttcagaagaaataggtaggacaaccraagttgatgctttaaggaaacaaaagaatgctatatgcaacacagcctataattcacttaagagcaggatttgtgataactatgtgcccttacactgaacagtggataaagtagaaatcttccaggtgttcattcggaactggagttaatcagaagtcagtatggcaaattagcatccaaaatggagtcgccgtagcctacatatgtgctgttttactttcccaggaataatacatatgattttagttgttccacatactcaccggcatttagtactgtcggtctattatataataattgtatctatttcagtgggaatgcagtaaaaagaactccagcaagactgcttataaatacaaagaagaaaaaaatggaaggagggaaaaaaaagggaggaaggaaggaagaaaaaaagaaaggaaggaaggttgcacacaaatgcaatgctgaatagaaaaaagaaaatatggacatagaagagcatcaataataacaaggaaaatattatcaacaattgagtgctaacgaatttgagaacctaggtaaaatcggatctacaaatatttaaaataggatttataaatgtatatcatgtcaactttggcataaaactatagaacttgaataaactaagtaaataaat

SEQ ID NO: 909107 - DNA, 676 bp, Homo sapiens
cacacacacacacacaaaaggtaactacatgaggtgataaatgtgttggtattattattattatttttgagacagagtctcactgtgttgcccaggctggtgtgcaatggtgcaatttcagctcactgcaacctctgtcttgcaggttcaagcaattctctcgtctcagcctcatgagtaactgagattacaggtacccaccactacacctggctaatttttttttttttttagtagagaaggggtttttcttgtttggccaggctggtcttgaactcctgacctcaggtaatccacccaacttggcctcccaaagtgctgggattacaggcgtgagccacgttaattagcttgattgtagtaatcattgcacaatgtatgcatacatcaaaacatcatgttatataccataaatatatgcaaatttaatttgtcaagtatatgtatgctcaataaatctcatggtgggggcaggagggaagacatgtaagcaaagaaaatggtaaacagtgaaatctaaataaacattgactatatgaaaaaaagggataaatggggattaggctattggtgagtttgttttgactaactggygagttttcaagacctgaaacttagtgaaattcaaattattttcaaattaatgagagatataaaacatacatatttgatgtca

SEQ ID NO: 909108 - DNA, 582 bp, Homo sapiens
taaaatgaagcatagacagagtgaaaagaggaagtgaatattctaaatggacttcagtatgagggaggttcttctgtctaaacaaaggcatggcgttgagaattagcctgggatgcaaaaggggatttaactatttggtggtgttaggaagcaaggcagaattttaacctgaaataatatgtaatagcaagccctgaagattatgagatagggtatgacatgaaggggcatttaagaaaaatggtttagacgtagacttcagaataaatgggaaccaagcaaaactaggctcaaagatgttggttaggaggctgcttcagtaattcaattctaagaagagaatggaaaaatatcttcttggtagtttggatttggaagaagaaggagttcaaggttgaaaggaaagtacaaattgtcatatttcctaacatgcaagtattagtcactyactgctgtggtaatgctgtgtaacaaatccctcccaaatttagtggcttacaataatatgcatttacttatcttgcttataagtctttgggctggccagggtggctttgtttctggctgcaacttggtggggct

SEQ ID NO: 909109 - DNA, 666 bp, Homo sapiens
ttcaggtacacaggagggaccaagtgaaagacagagaatgaagtaagtatttctgaggtggaaagatcttaaggaccttctagcccagtgttttgcaacttccaagctacagacaaggaaggtaaatttttacctgtctagcaagagcttctactgtattgcagagggaagaatatattaataacatttattgagcatttactcttaaggtctttcttaatcataaagacccaggtctttatgattcttgagactgaattgttaaccattttgatataatatcttcaaacaggtcttaaagtcattaatcaagttactaacgcttaaaagcctaacttaaaaaaaaatctacaagatgggcattatgacagagatgaatagctgtccacccaaattcttactcccctttgcataatatagagttgttgttgaaaagtagcaaagtgcctgcctggcaacagactgcatttctcaccccacttgcatctaggtgaggccatgtgagagaggaatttgcatgcaagtctgtgtgatacttacgggycagggctttaaagagcattgcaccttctccaggttctctttctccttttcccaactaaattcaaatgataatttgatcctagggcagatgtctccaaactttttctgtaaaaggccaagtag

SEQ ID NO: 909110 - DNA, 632 bp, Homo sapiens
tggtaatcaaacaaagaagcaggtggtaaggatgtgggggttgaaaggaagtggtgcatcaagcacatgatctatagctgtgatggtttascatttcctttgaagcatatggaacatgttctgctacttgagataatggggaacatgctctagtttaagatacaatcgttttatgagcctgggagtgctagaagcaaggagccagcaagtctagacacattccagaggccattaggggttttatgccctgagccctggattccatccaagccatgaggggttttatgccctgggcttagattatggtgcagcagggcagccttccaccctttggcacagagcctggtgttccaaaggccacgaggggttttcggccttggaccccggacatcttccaagactcttttacattatgtctgacatgcaagccctgcatcagcttttctcccaacaaatctaacctaataataagagatataccagaaaatcacatttattttcatgatgaaaatgttcttcaaaggaagcaatctgttttcttgctttataccactttaacttccatccaacaaaaattttctcaattattttaatgcatggggtaaaaggatagattttagtcaaatgcctag

SEQ ID NO: 909111 - DNA, 656 bp, Homo sapiens
gagaaagtatatggaaattctctgtactttctgcacaatttttctgtgaacctaaaactgtgtttaaaaaaaaaaaaaaaamcttgtatctataaaaaggttaccttgaggttgagtcctcggccacatgcttgtgaagcatataccacaataaaggatcctaaccacatttttgacaataaagattattctttatttcatttaaaaaaataatttctatagaagacaccactgggaaaatggtaaaatttgatgtactatacattatactattgtgttaatgtttaatttgctgattttgattattgtgatatgcagtgtgattatatgaaataatatgaatgagaaagagaatatgataaaggcaaatgttaacaattgatgaacctaagtctaaggtagagttatttatactattctttgtgccttttctataaacttgaaattatttagaaatgcactttttaaaaaatttaaaatacaaatgtttttcaaagtctagagctttcctactcccattgggtgggctggctgaggtcataagtacatcatgtaccctgtgagcaatgcagaatatatgatttaagctcctgagagtattatctggctgaggaagaagtgttcccttttaataggtgagtgaggagtggcataca

SEQ ID NO: 909112 - DNA, 656 bp, Homo sapiens
gagaaagtatatggaaattctctgtactttctgcacaatttttctgtgaacctaaaactgtgtttaaaaaaaaaaaaaaaaayttgtatctataaaaaggttaccttgaggttgagtcctcggccacatgcttgtgaagcatataccacaataaaggatcctaaccacatttttgacaataaagattattctttatttcatttaaaaaaataatttctatagaagacaccactgggaaaatggtaaaatttgatgtactatacattatactattgtgttaatgtttaatttgctgattttgattattgtgatatgcagtgtgattatatgaaataatatgaatgagaaagagaatatgataaaggcaaatgttaacaattgatgaacctaagtctaaggtagagttatttatactattctttgtgccttttctataaacttgaaattatttagaaatgcactttttaaaaaatttaaaatacaaatgtttttcaaagtctagagctttcctactcccattgggtgggctggctgaggtcataagtacatcatgtaccctgtgagcaatgcagaatatatgatttaagctcctgagagtattatctggctgaggaagaagtgttcccttttaataggtgagtgaggagtggcataca

SEQ ID NO: 909113 - DNA, 687 bp, Homo sapiens
gatttgaaagtattttctaaatcttttgaaattttttttataactctattttggaatttactagactattttatcacatcttctctgctgagcacagtactagcttgtarttggagaatatgaggaagattcatgttatttatttttaataaaacaggtattgttgtcactaagccagacctgatcacctgtctggagcaaggaaaaaaacccttcactgtgaagagacatgagatgattgccaaatccccaggtaggtgcgagtgaaaatgaatacaacagacaacacagataagaggtcccaaggtcaaagagaaagccggtccttaaaatgtgatttaggaagctgtgttccaaagagaatagttcctgggattctgttttttgttttgtttttaatttggctctcacaaagggacatcttctgtcttatgcttttaaattttctaaggattctacttttctttcggtgagcttccttcaacttcacagtgagagccagagtcctcttcatggcatataagagactgcacaatctggctgcttttacatcgtcttggggacacagaaatatctgcatgactttgagaaactaaactgtttttagtctttttgcatcaggcctgaaatgtgtgagggcagtagtatcagtttcatttctttgttcatttttctgcatggtccatt

SEQ ID NO: 909114 - DNA, 687 bp, Homo sapiens
gatttgaaagtattttctaaatcttttgaaattttttttataactctattttggaatttactagactattttatcacatcttctctgctgagcacagtactagcttgtagttggagaatatgaggaagattcatgttatttatttttaataaaacaggtattgttgtcactaagccagacctgatcacctgtctggagcaaggaaaaaaacccttcactgtgaagagacatgagatgattgccaaatccccaggtaggtgcgagtgaaaatgaatacaacagacaacacagataagaggtcccaaggtcaaagagaaagccggtccttaaaatgtgatttaggaagctgtgttccaaagagaatagttcctgggattctgttttttgttttgtttttaatttggctctcacaaagggacatcttctgtcttatgcttttaaattttctaaggattctacttttctttcggtgagcttccttcaacttcacagtgagagccagagtcctcttcatggcatataagagactgcacaatctggctgcttttacatcgtcttggggacacagaaatatctgcatgactttgagaaactaaactgtttttagtctttttgcatcaggcctgaaatgtgtgagggcagtagtatcagtttcatttstttgttcatttttctgcatggtccatt

SEQ ID NO: 909115 - DNA, 661 bp, Homo sapiens
tgattctggtctcaccttagagccatatgaggcccttcgttaaaacaacatggatgcttccacccagaacaataaacaagctgtggagagggcataagagatttctgcaaattggccatgtgatcctaatgagaagcctgggctgataatcactaagttaatcattgcctctcaagctttaacgagcttctaaatcacttggtaattttggccccactttatgtaaagtgattctggaagcttgaaaagggtccaggaatggttgttttatacaagtcccctgtgaatgctgatgttgctcccccgggctcattattagcattagtcagagaagcaggcacagctcagggtcccttacccttagcacttttgtcacaaccaaattcttctggcacaaataaggacaacccatctccatcctaaagttttatattatttgctggctctttaaagtttacagatgaaacagagacctggaatctacacttcaattagcagcaattacaaaaggatttgtaaagacaacaagagagggacagagagtgggctgatacaaagttgtctgtyagaaatttttatttatttaaacaaataactttgattattgattagatatatatcattatggtttagggtatgaaatataatgtccaatatggca

SEQ ID NO: 909116 - DNA, 584 bp, Homo sapiens
atcaagctacctctgactttcttcacagaattggaaaaaaaaactactttaaagttcayatggaacgaaaaaagagcccacattgccaagacaatcccaagccaagagaacaaagctggaggcatcacactacctgatttcaaactgtactacaaggctacagtaaccaaaacagcatgatactagtatgaaaacagagatatagaccaatggaacagaacagagcctcagaaataacaccacacatctaccaccacctgatctttgacaaacctgacaaaaataagaaatggggaaaggattccctatttaataaatggtgctgggaaaactggctagccatatgtagaaagctgaaactggatcccttccttacactttatacaaaaattaattcaaggtggattaaagacttaagtgttagacctaaaaccataaaaaccctagaagaaaacctaggcaataccactcaggacataggaatgggcaaggacttcatgactaaaacaccgaaagcaatggcaacaaaagccaaaattgacaagtgagatctaattaaactaaagagcttctgcacagcaaaa

SEQ ID NO: 909117 - DNA, 592 bp, Homo sapiens
tggtttatcagagtctagtattgcaacccctgcttttttttggctttctattatttgcttgataaacattcctycatccatttgttttgagcctatgtgtgtctttgcacatgaggtggctctcctgaatatagcacacctatgggtcttgactctatccaatttgccagtctgtgtctgttaattggtgcatttaacccatgtacatttaacgttaatatcgacatgtgtgaatttgatcctgtcattatgatgctaactggttattttgccaattagttgatgcagtttcttcatagtgtcgattgtctctacaatgtggtatgtttttgcagtggctggtactggtttttcctttccatatttagtgcttccttcaggagctcttgtaagacaggcctggtggtgacaaaatctttcagcatttgcttgtctgtaaaggatttcatttctcctttgcttatgaagcttagtttggctggatatgaaatactgggttgaaaattcttttctgtaagaatattgaatattgatccctactctcttctggcttgaagggtttctgccgagagatcagctgttagtctgatgg

SEQ ID NO: 909118 - DNA, 584 bp, Homo sapiens
gggcatgcccctggccttgtgcagctcttaaatatttgcagttgccctgaccstgtacccatttcaatggcaagcctactggcttggagtttgccttccaaccggatttcttccaccaattctggttaaagtgttgccagcatttatacccaattatttttttatgtaattctgagtcacttccttgagtggtccaaattattttctgaggtgccaatattatttttgctagcaatatactcccaaagttgcatatgttttgagtgaacttcctagaatcaatttttcccacaagttctattatttaggtgctgttttgttttgcattgtgaggattacaagttgcatatgtcttattatgaactaaacctcattttacgaacatgaacctctccaactctgtattaccttatagtttctgaaagttataatgtgttgaatggtttgcaaattgcaaaataacttacttcctcagagagattatttcatttctttgataccactagtgttgtatttgttttgtattaccccgctgtgtaaagcccacttgggttactatttttaaagcctgcaagacttctaac

SEQ ID NO: 909119 - DNA, 612 bp, Homo sapiens
gtttgccaacaatgtctatgaaggattagccaccaaaataaaagaaarcatcactattatgcagtaattcccaaaagactcaaaagctatgaactataaactttgactgactggtaaacacagcacatatctctttcaagtacatatgaaattgcatggaatcatattgaaaatattgattttttttaatcctcattaggagatttctctgctttcacctgggtttcttcctccaaaaataaagagcaatcatgaaatttaaatcattcagtgttccagttcctatggcaaatgtagcatatatcttgttcaacagataataaggcagttaactctttatcctgtatgccactgccaggatggataaactgttccaaagtttagtaaactatgtgctgtattaaaaatgatatgagcacattattcaatatttgtagtggaggataaagttcctgtgtgtctccaacttgactatatccagcagagaaaaggttttgatttatttggagtaaaacacttggaatacaatagaagggagcaaggacttctcatagatttttcccattaagcatttttgggcaagccttagaagttactctgcaggatggatct

SEQ ID NO: 909120 - DNA, 571 bp, Homo sapiens
gccattttcattatattaattcttcctatccatgaggatggaacgtttttccatttgtttctgtcctctcttatttccttgagaagtggtttgtagttytccttgaagaggtccttcacattccttttaagttgtattcctaggtattttattctcttggtagcattgtgaatgggagttcactcctgatttggctctctatttgtctattattggtgtaaaggaatgcttgtgatttttgcagatggattttgtatcctgagactttgctgaagttgcttatcagcttaaggagattttgggctgagacgatggggttttctaaatacacaatcatgtcatctgcaaacagagataatttgacttcctctcttcctatttgaataccctttatttctttctcttgcctgattgccttggccaaaatttccaatactatgttgaataggagtggtgagagagggcatctttgtcttgtgctggttttcaaagggaatgcttccagattttgcccattcagtatgatattggctgtgggtttgtcataagtagctcttattattttgagata

SEQ ID NO: 909121 - DNA, 654 bp, Homo sapiens
attcagaaggggctgcccatttggcagagttgtagaattgctagttcatctttagagttgctcatagactggagctgatcaagtaattacaaaaccagtcaaacaaggtctatatcctcttccttgaaaatagctagtgagaccaaagtagtcatctggtcaccatgctaggatcctctgcttccctctcacatggcatagtcagtgttctaggtctccactgtcttggagctgaggaacaatttgatttgatttggtaagtcatatccccgtagctttaacacagtgacttcctattcctcattctgaataggaaagagtttggggtgcagggtagttttacagctaagtggaaaccagaaagaagaaaacagacagtatagagttttctcagagtagaaaggagtcacgagaaaaagtaagggaagaggtatggatattacctcactccaacaaccaatacatactaccacatctctaacaaaaataaacctcaagcctgagggattccttttctctaattcctcattttcagcagaataaggaaagtagatacttcaggcataatatgcytaagtgtatcaacattagctggcctcagaatctggaaagaagctcagtaaatcagttttgatttacactatcctacagcct

SEQ ID NO: 909122 - DNA, 625 bp, Homo sapiens
ctctgcacaaaactacaaaacactgatgaaagaaattaaggattaaacaaacaaattgagaaacatcccatgtttatggatcaaagaattaatatcattaaaatgaccatacttcccaaagcaatttccacattcaatgcaatttctaccaaattaccaatgtcatatttcatagaattagaataatcctaaaattagtatggaatgagaacagagcccaaatagccaaagcaattctgaacataaagaacaaatctggtcctgacttaatcactatgcaatctatgcatgtaacaaaattgaacatggattttatcaatttgtacaaataaaaaaatgtaaaaaaagaacaaagctggagactatagtagccaaaacagcatggtatttttagacaaatggtatggaatagaaagctcagaaataaagccatatatatatatatatagtgtgtgtgtgtgtatacacacatacatgtatatataatgtgtayatataatgttttctacatgttctaatatttatattccattccattatacatattccatttctgtatataggttatatagaattggaagactatctgccattaaaaagaatgaaatcctgtcatttgcagcaa

SEQ ID NO: 909123 - DNA, 627 bp, Homo sapiens
accaaaaagtcaaagaacaagtattggtgaagatgcaraaaaaagggaaccctcttacactgttaatgagaatgtaaattagtaaagccattatggaaaacagcatggatgttcttcataaaattaaatatgaaacttaccatatgatttagctaacccactactaggtatatactcaaagcaaatgaaattttcaccttgtaaatacatcttcactcccacattcattgcagcattattcacaacagcccatctatggactcaccctaaatgttcattggtggatgagtaaagaaaatgcagtatgtatacacaatggaaaactattcagccttaaaaaagaaaatgaaactcttgtcatccgtaacaatttggataaacccagtgaacattatgttaagtgaaataaattaggcacagaaagacaatactgcgtgatcttacttacatgtgtaatctaagaatattggactcatagaaacagaaagtaaaatgatggtcaccagaggctggcggaaagaaggtgttaaggaggtgttgttggtcaaaggatacaaaattttagttagaaaaaatatattgaaaagttatattgtatatcatgatgactaccattaataatattat

SEQ ID NO: 909124 - DNA, 542 bp, Homo sapiens
taggtgaaagaaactttcatttgctgttcaattccatcttcctggcagctgaattctcattatctcacacacctagcaaggatttgcctataaaatktgtgtgtgtgtgtgtgtgtgtgtgtgtgtgtgtgtgtgtgagagagagagagagagagaatctcgctctgtcgcctaggctggagtgcagtatcatgttctcagctcactgcaacctctgcctcttgggttcaagcgattctcctgcctcagccttctgagtagctgggactacaggcgtgtgccactatgaccagctaattttcgtatttttagtagagacagagtttcaccatgctggccaggctggtctcgaactcctgacctcaggtaatacacccaccttggcctaccaaagtgctgggattacaggcatgagccacagtgcccagccatatttgcctacaaggtttcattcagtatcttccaaatgcctcacctcttctcttagagatgctcctgaaaaaaaacaaactgattttgtaatttccttcttgtacaaggta

SEQ ID NO: 909125 - DNA, 541 bp, Homo sapiens
gcctattttattacctgtaatgtaataatcacaggttccasagatcagaatatttgagaagcccttattcagcctacctaccacaggaagtgagagtgtgaaggggaggaagtcagtaaagtgtatattaattgagccagttttcatggtggaccactggagctcaatcccactggggaactctgggagactgtggagagcagagcttctcaagcttcagtgtgcatcccccctggggatcttattaaaatgcagattctgattcagtaggtttgaggtagagcctgagattctgcatttccaacaagtttccaggtgacaccaatgctgttgatctggtaccatgctttaaataacaatgatgtagaatgtgcctcaaagctatcccaaatcaggggcaaggaggttgggatatttattcaccaactccctgttcttcattagtggaaagctgctttcaggccacttcctgattgccctgtatgtgggtggagaatggtcctgaggcaaaaaaaaaaaaaaaaaaaaaagttccaggtgg

SEQ ID NO: 909126 - DNA, 631 bp, Homo sapiens
caaagcatacacaagtatcaatagccaaattgatcaagtggaagaaaggatatcagaggttaaagatcaactcaatgaaataaagcatgaaggcaagatcagagaaaaaagaatgaaaaggaatgaacaaagcctccaagaaatatgggactatgtgaaaagaccaaacctatgtttcactggtgtacctgaaagtgacagggcgaatggaaccaagctggaaaacacagttcaggatgctttccttgcctgattgccctgagggattttgtcaccaccaggcctgccttacaagagctcctgaagaaagcactaaatatggaaaggaaaaactactaccagccactgcaaaaacataccgaaatgtaaagaccattgacagtatgaagaaactgcatcatctaatgggcaaaataaccagctaacatcataatgacagaatcaaattcatacataacaatattaaccttaaatgtaaccgtgctaaatgccccaattaagaggcaaagactgkcaaattcgatgaagagtcaagatccattggtgtgctgtattcaggagacccatctcatgtgcaacgatacacataggctcaaaataaagggatggaggaatatttaccatgcaaatg

SEQ ID NO: 909127 - DNA, 619 bp, Homo sapiens
cttatctcccaattgagtgaaggaacaaatgcactgattataacccattatggatgattggtctattttaactartacctttcttttttgctctaaaactattctaattcggaagttttcctgcttttagaattaaaatcctacttataccatcagaaatatacattccaattactgaggttaaagagatttccaagatacttaaaaagaaattataattttaaaacaggttcttttttctttttttaatcttctctattaaaataaataaactaccacccaaataattagtttgctttaaaataatctttagagctaaaagttcaaaagaggatttaatgcaataaaaacaaagaaacatttattgagttaatttaactcagtgaatctcaacattttattttatattcttactttatcatcggctatttaggaaaactattcagagttttctaaaatattcactaaataactatcattgaaaaagataaactgattacctttatttacttgaaagctgaagccctttttatgtttataaaatagaaatttgcatacagtcctattgatggcatattaatagtgcaagcaacattttaaagcttgacacttcttgatg

SEQ ID NO: 909128 - DNA, 599 bp, Homo sapiens
taagtgagtgggtgtagctgtgttgcaattaaacatttacaaaaataggtaaccagtgcaaaggctacaggttgtcaacccctgcttagaataatgtttctcaaactgcggtgaagaaccaatttttaaagaatgtccagtccactgcaaaacaagacttttacaaatacaacaaagatgaatcactagaaaatgaaattttaaaaacatacatatgaaatacaagcttttttattattagattcaaaagacacaaaacaactgtccaattgcttgattctttgcctgtattagctataatccagttgacaaccctgcaaggaagatgctgttgacctaattttaaggaggaaactgaccctcaaggattatgagtgactcattcaaggccacacagctagtaagaaacagagctgggactccaacccaggactgtatgattccaacactcacactctacatatgccaagttactgatgaaaagcctgtgagacaaatcactgttataagtgcaatctgggctgggaaagaaataagaaaagactcataaaatggaaartgatctacagggaaggtagcaaagaagtgccctagatata

SEQ ID NO: 909129 - DNA, 610 bp, Homo sapiens
gacttcataaaaagaccaaacctatgattgattgaagtacctgaaggagatggggagaatggaaacaagctggaaaacacacttcaagatattatccaggagaacttccccagacaagccaacatgcaaattcaagaaatacagaaaacaccactaagatagtccataagaagatcaaccccaagacatataatcatcagattctccaaggtcaaaatgaaggaaaaaaatgtcaagggcagccagagagaaaggccaggttacctacaaagggaagcccatcagactaacagtggacctctcagcagaaactctacaagccagaagagattgggggccaatattcaaaattattaaagaaaagaattttcaatccagaatatcatatccagccaaactaagcttcataagaaaaggagaagtaaaatcctttcaagacaagcaaatgctgagggatttcgttaccaccaggcctaccttgcaagagctcctgaaagaaacactaaatatggaaaggaaaaactggtaccagccaytgcaaaaacatatcaaaatacaaaaaccaatgacgctatgaagaaactgcatcaactagcatgcaaaataacca

SEQ ID NO: 909130 - DNA, 616 bp, Homo sapiens
gagtcaggccgaccgcctggaaaaccaactgagccagtgtgaagctstgtaattccagtcaaggcattttgcatctctgagctagagtcccttcatgcagaatgtggcaaaattaacatccacagataagggtaaggtttccatggcaagttaggtatttaacaatagtgaccattaatacaacagcctcacgtaaaacacttcattaaacacagtcttaaggaatctataaattcgaaagcaagatcctttctgtgttgtctttgatagaagttgaaacacttaagagaacattggacagccacacccacagttaaattactaaaaccaatgccgctaatttttctagggtactgggtgacatcttaactgcttccttcactcaagatggctccattctctgctggaaccactgtcaatcttctatatataataaaattttactgccttaaagtcttaaagtttttttaaggcagctgctttccttgacatgtctttttaacaaatgattatgatcagagcccatgtaattctgtcactgttttcaaagaagaaagtttaatctaataacttcctattaaatttttagttcttgcaggagcacgtttgaaggata

SEQ ID NO: 909131 - DNA, 616 bp, Homo sapiens
gagtcaggccgaccgcctggaaaaccaactgagccagtgtgaagctgtgtaattccagtcaaggcattttgcatctctgagctagagtcccttcatgcagaatgtggcaaaattaacrtccacagataagggtaaggtttccatggcaagttaggtatttaacaatagtgaccattaatacaacagcctcacgtaaaacacttcattaaacacagtcttaaggaatctataaattcgaaagcaagatcctttctgtgttgtctttgatagaagttgaaacacttaagagaacattggacagccacacccacagttaaattactaaaaccaatgccgctaatttttctagggtactgggtgacatcttaactgcttccttcactcaagatggctccattctctgctggaaccactgtcaatcttctatatataataaaattttactgccttaaagtcttaaagtttttttaaggcagctgctttccttgacatgtctttttaacaaatgattatgatcagagcccatgtaattctgtcactgttttcaaagaagaaagtttaatctaataacttcctattaaatttttagttcttgcaggagcacgtttgaaggata

SEQ ID NO: 909132 - DNA, 619 bp, Homo sapiens
ccaatatggtagctgatatggtttggctgtgtcctcacccagatctcatattgaattatagctcccataattcccaygtgttgtgagagggacccagtgggaggtaactgactcatggaggtgggtctttcctgtgctgttctcatgacagtgaataagtctcatgagatctgatggttttatagaggggagttcccccacacaacctcttttgcctgccaccatgtaagatgtgactttgctcctcattcaccttcagccatgattgtgaggtctccccagccatgggaactgtaagtcaattagacctctttcctttataaattacccagtcttaggtatgtctttattagcagcatgagaagagactaatacagtaagttggtacaggtagagtggggtgctattataaagatacccaaaaatatggaagcaactttgcaactgggtaacaggcagaggttggaacagtttggaggacttagaagaggacaggaagatgtgggaaagtttggaacttcctaaagatttgttgaatggctttgaccaaaatactgacagtgacagggacaatgaagtccaagttaaggtggtctcagatggagatgaggaacttgtt

SEQ ID NO: 909133 - DNA, 672 bp, Homo sapiens
atcagaaacctgcactcgaggactataatccatyttttgaagaggattaaaacaagacagcaattgcctgtgaatatcagtgtcctaaggtagtcacagtcaaaaacatgattggcaaagaaatttgatcacctctgtggtcaacaataacctaacacaataaccctaattatgattgaaaacacatactcagacatcagaattttagaaatcccatacattttgaaacacatattaacattattcactaaaatgtaacctgaagaagatcaaacaccactttattttgacaattccatgtgactaaacatgtcagataatcctgtttacctctgctttgaatgctccaggggtcagaaaagacaattttgaagctgaaatttgattttggggagcctatcaaatgtgttaaaggtttaaaacacttgacattatgaaatagaattccaggttaccataagtcacttatttagccaaaatgctgactcaaaaaaagaaggtaaaaacctttacacattaagagagaagacttagctttctaaacaatctgtctcttgtttttccctttttctttcggtagtttatttgcaaggcaaacaaaaatctttcatcatcctttaacattacctgaaaatcttaatcagtttgaccatgagctgagattctcctaat

SEQ ID NO: 909134 - DNA, 680 bp, Homo sapiens
atatataaatctcaagagtcgtaacaacctccaacctactttcttccttttttwtaaattgataattttaagtctaaatgttatttgttggcaaaatattatttgaactgatatgtggatgtaggggatatgtgaccttcactgatgttagttggaatgaatttatatatttatctgcaaaagtataattgatggctttaattacagcatgctgtcccaaaccattcatggcattgttggtgatacacagcttatgtgctccttactattatgtactgtgagtttagctatttaatgtttcctccatgcatgcgagagtttaaattgttataacatcataatttgataattgtgatggagaattacatggtgtcaagaaattatgctaatagaatagacttaggaattcaaagataatttagctaaagcctaaaagataggaattagccacttgagtggaatttgggaagattatgtaaaaaacagttttgaggccaagtgctggggttcacgcctgtaatcccaacactttgggaggctgaggcgggcatatcatttaagcccagtagttcaagacgaggctgggcaacatggcaaaacctctttacaaaaaaataccaaaaatttgctaggcacggtggtgcactcctgtactcccagctactcaggaggctgagtgg

SEQ ID NO: 909135 - DNA, 678 bp, Homo sapiens
ttgttcaaaatctgatctttatctattcagcaaatatttatatattccttaatggcatagagctaggatctgaagatacagtggtgaaggttcaygatgaccctgtcttcctaggatttacagtttttaagagtgcaaacttaacactaataggacaagatagtaattcacaggtgcactttgggtctcagttcaatgttactgaatggtcttccctgaatctctcaacttacaggttgcattatagtggcctgtattcttctggagtccttttcaatcaggtgtaagttttgtgagctctgtcaacgtgtagacattatcagcatcactcatcacctaccactgtaactctgatactaacaggaatcaacaaatgtcctatgtatggcttttgaactaataacagttttcactttttcaaagggtggtagaaaaattagaggaagaagaagtaggaggaggaagaaaagggtgaggacaccatggaaagcaaaatgtgtgtggtccacaaagtctaaaatatttactgtctgtccatttacagaaaatttgctcaccctcttagcacatagtaaaatcccaagtaatatgtgttaaataaatgcataaatgacatttcagagcattgggcactcaaaagtacagtgacacagatagtaccagatactcacatccaca

SEQ ID NO: 909136 - DNA, 601 bp, Homo sapiens
ggccaacatcatcctgataccaaaacctggcagaaatacaacaaaaaaagaaaacctcaggccaatatccttgatgaacatagatgcaaaaattctcaacataatatgagcaaactgagtccagcagcacaacaaaaagcaaatccaacacaatcaagtagactttatccctaggatataaggttggttcaaaatacccaaaccaatacagtgattcactatacacacagaactaaaagcaaaagccacatgctcatctcaatagatgcagaaaaggcttttgataacattcaacatcccttcatgttaaaaaccttcaacaaactaggcattgaaggaagatacctcaaaataataagaaccatctatgtaaaccctacaaccaacatcatactaaatgggcacaagctagaagcattctccttgaaaaccagaacaagacaaggatgacttcactaaccaatcatattcaacacagtagtgaaagtcctagccagagcaacaggtcaaaagagggaaataaaatayatcaaaataggaagagaggatgtcaaaccatccctgtttacagacaatataattctatacctaaataacccca

SEQ ID NO: 909137 - DNA, 601 bp, Homo sapiens
ggccaacatcatcctgataccaaaacctggcagaaatacaacaaaaaaagaaaacctcaggccaatatccttgatgaacatagatgcaaaaattctcaacataatatgagcaaactgagtccagcagcacaacaaaaagcaaatccaacacaatcaagtagactttatccctaggatataaggttggttcaaaatacccaaaccaatacagtgattcactatacacacagaactaaaagcaaaagccacatgctcatctcaatagatgcagaaaaggcttttgataacattcaacatcccttcatgttaaaaaccttcaacaaactaggcattgaaggaagatacctcaaaataataagaaccatctatgtaaaccctacaaccaacatcatactaaatgggcacaagctagaagcattctccttgaaaaccagaacaagacaaggatgacttcactaaccaatcatattcaacacagtagtgaaagtcctagccagagcaacaggtcaaaagagggaaataaaatatwtcaaaataggaagagaggatgtcaaaccatccctgtttacagacaatataattctatacctaaataacccca

SEQ ID NO: 909138 - DNA, 570 bp, Homo sapiens
tatgaaaagtttcacctcgtttacacaatcacataattataaaatattacagyggggaagaattgagatgttattaatccaaacacttcatcttagagcttaaggaaatgaatctccaaatggttaaatgacagggatattttgtttcatagccaagatcagcacctagattttctgactgctcacgcagggacctcaccatccctcatgtctaagaaagatttctcctaaaccagagctgttatagaaatgaaagcaaatccgtaactctcctcaatagcttatctcacagttcttaaattcttactgattcaattcaaccaactgcaattccaactagtactgtctttggggacgatgagtaaaactagcagctcccttagccaaagaaaaggagtgattttactctcctatctgttatttattgttacattatgaatgaacaaatatgttcttcctcatttatgtaacatatttcctttgaatttggagatgtcatttgtaaaatatatttaatagagcaaacagtttaaaaacagaagttcaaaaataatgcacttcacattgaac

SEQ ID NO: 909139 - DNA, 617 bp, Homo sapiens
tgggatatttacacatcaattctgccagtcattcaytgcaggctgcttcctggtggcattaattctctggcacttttaacctgtcatgcacctgggttgcagtgtaggcttgaactacaaaagaaagctctgaggcaaagagaggtttatgcagacaagagccaggccggggaacataaaaatgacagagccctgggaggtttgagtggggcatctacagcttctcctacaagctcctaataggaatgtgagttgctttggctaccatctggttcccctctcttcctctttattgtagagtttcattgatcattccttgtctgttcacaggctccctcttattttcttctgttttgtttgctaagttctgtgtatttgaaatgtaaatttcaaaagctgttgtacttggttatgaaatagaagtaaatttttttttttttttttttttttttttgcttaatgcctttatgggctatccccagaaaaatgtttgtagattcaatgcaaacgttgtttcaaagccatttctgatactttctttttctagcatttgttatcaataaaatgagattgttggataattgagttctgcatggatgagctattaataaagaaat

SEQ ID NO: 909140 - DNA, 667 bp, Homo sapiens
aacaagaactggacaagactggaatataacgctagccaggcatggtggctcacgcctgtaatcccagcactctgggagactgaggcargaggatcacgtgaagtcaggagttcaagactagcctggccaacatggtgaaactccatctctactaaaactacaaaaattagccaggcatggtggcatgcacctgtaatttcagctactcaggaggctgaggcaggggaatcacttgaacctgggaggcaggatttcagtgagccaaaatggcaccactgcactctagcctgggtgacagagtgagactccatttcaaaaaacaaaacaaaacaaaaagactgaaatataatgggaaaaatcagcttaactgcgggtcaggtaccaagtctcaagttaaaagttaggcgctacatcttattagtaagattaatgttagatcctaccacttgctaagatgatgcaataatttacaattattattaaaaagtacccaatttaaaaatgggcaaaatattggaatagatacttcactaaaaagatataggaatggttcataaacacatgaaaagatctcaacattattagtcatctaggaaatgcaaatcaagaccacaacaatataccatttaacatccactagaattactataataaaaaaagacaataa

SEQ ID NO: 909141 - DNA, 510 bp, Homo sapiens
cttttgcagttcatatgtgattacatattttttctttcctctgtctctttcctctcttcttttactccagagtaatgtgcctagaaggagacagtgcatcgaagcaagtttactctcagcatgtcaagaaaacattaaaatattatttgcctgatgattgcattggacacattttgtgaaatacatgaatccctcctacctgggatgtcaagagactgctcttttgctgggagaatggactgatcttttgcatcagctcaacgctgcttttggggagccattttggatacaatatatgtattgcttcctttaaatgggaaataaccatggtctgtcaacaaataatcttgtttgataaatctgacccagatggtgtgctaggttgcaaaaccgtcttcttctgctttggaaaaactcagctctgtccctccatccctccctctgccaccagcctctgtscacccccaagcccagctccctgatggcaacagtataaccactgaggctgaa

SEQ ID NO: 909142 - DNA, 543 bp, Homo sapiens
agaaataccatttgacccagcaatcccattactgggtatatacccaaagattttagatcattctactataaagatgcatgcacacatatgtttattgcggcactattcacaagagcaaagacttggaaccaactgaaatatccatcaataatagactggataaagaaaatgtggcacatatacactatggaatattatgcagccataaaaaaggatgagttcatgtcctttgcagggacatggatgaagctggaaaccatcattctcagcaaactaccacaagaacagaaaaccaaacacctcatgttctcacccataagtgggagttgagtcccacttatgagaacacatggacatagggaggggcacatcacacactggggcctattgggggctggggggccagggraggaataacattaggagaaatgcctcatttaggtgacaggttcatggatgcagcaaaacaccatggcatgtgtatacctatgtaacaaaactgcacattctgtacatgtaccccagaacttaaaatgtaataaa

SEQ ID NO: 909143 - DNA, 543 bp, Homo sapiens
agaaataccatttgacccagcaatcccattactgggtatatacccaaagattttagatcattctactataaagatgcatgcacacatatgtttattgcggcactattcacaagagcaaagacttggaaccaactgaaatatccatcaataatagactggataaagaaaatgtggcacatatacactatggaatattatgcagccataaaaaaggatgagttcatgtcctttgcagggacatggatgaagctggaaaccatcattctcagcaaactaccacaagaacagaaaaccaaacacctcatgttctcacccataagtgggagttgagtcccacttatgagaacacatggacatagggaggggcacatcacacactggggcctattgggggctggggggccagggaaggaataacattaggagaaatgcctcatttaggtgacaggttcatggatgcagcaaamcaccatggcatgtgtatacctatgtaacaaaactgcacattctgtacatgtaccccagaacttaaaatgtaataaa

SEQ ID NO: 909144 - DNA, 476 bp, Homo sapiens
attccaggactctacagggttctggggaattaaccgattatcgtacacagcgctaacaaagcacctacatgattccttctaggtacacaggccacttcacacacattatttccctcattctccccacagcctggtaaagcaggagaggcaggtgttttcatccccatgactctcatatagtcttagagactttgtcctcctgtcaatgcctcaagggtttcactactgagtgatcagtacatctatacatttcacataagcagagctgaagtgctacctctaattcagcttcttcaccaaagctcagatcctcagaacaatgaccaactttgcattcctttttcaacttcagctgcctcatttgaatgacaccattttaatgacaataaatgtatgggcmccgtgaagtaagaaatattaccctatattaatacccatctgcctgccatctccctaagatcctgaggcgtgtttca

SEQ ID NO: 909145 - DNA, 602 bp, Homo sapiens
gaaatgctgagaagctattctttctgacaacgttggaatcaaagagtggtcaccaaggtagtagagtcaccagagaggtggtgcacttcctaggctgctggactcacagcagcccaccccttcttgcactgccttcattgccggcaactgtcactactgtcagagcaagaaccacacaggttctattttctggtctcctccaatgcctcccattggcagaacaaacaggaagccagctggcaaaggcatctgggaaatgtagttttcaattcccaagcccagcagcattgatcaaagaatagaaatgtgtgggagctaagaccaaacagaaaaataaccagcccagcccaaccatttggctagtcaatattcaaacactgcctttacccacatttaagcttccagacagcaataacaccctctttatgcttccacctagtatgatgcaattaagccttgtacaagtgaagatggtcttaccccctcttaawaacaagctgagatacaaagatccaccaatcatgttattcatctcttgctcaggcacaatctcatctgattattctgtacccaagagtccaaattattaagtaaaccaccac

SEQ ID NO: 909146 - DNA, 628 bp, Homo sapiens
ttgctaaagttttcactggtggtgacctgtagccatgacctgctggtaatgggaatgccagagcaggtgtgatacttataggcatttgcaatatatcaagggatcagcgcccacaaagacatcagagttggtggttattgctaagttgaatttacatcttacattaggataatgaacaaatgaggctatcagcaagcgtgacaatctcagggctttcttctagcattcaaggaagattttatctcctacttggcagggcagacataactgaaagtaggctgaagacctaattactatagtcacagagatgtttggatgctcagcttattcaggtctgctatgcaaagaccaggggattctgaaaaatgggatgtggatatctttatagatgtcctgagaatttgaccttatgaccccctttctgctagctctgacttttatgtatttaacattttttaaaaattttctaaaacattttaatagacatactttccaagaatgttatgtactgcagttgttcactgaagattcattaagcatccatttattgagtgtcccctattgctgagaactctgctggaaggtgctasgtaggcccttgggacacaatagtgagaaagggagcctt

SEQ ID NO: 909147 - DNA, 651 bp, Homo sapiens
ttttatatttatcccttgaatttacaaatcttataactgttttgtaacaattcaaactaaaatggcctcttgattttggcactactgtaggctaaactaataaagaaaactttattattataaatttaaagaaataaggaatataatataaacaaattggggaaaaacatatgtctgatctgaaagaaaaataagagaaatctctggtgctaaaaacaaaaggagaacctaatagcagagctgtgagctcatgagctgaagttacgggatcctagagaggtatggaatatcttacttacagataagctctagggtgcaggatctggggttttaatcatggttccaggacagaaattgtgtctttggggcccatctgctctaggtccgttggatcctagagaggtatggaataccttacttacagataagctctaggtgcaggatctggggttttaatcatggttccaggacagaaattgtgtctttggggcccatctgctctaggtgtgttgctggacctgagacaactgcataaaactgagytctgggacagctgcctcctcaaaaaagggaatgttgaaaaactttctctgccagcacctctacccagggaagtgataagaagctgtgaatgaagaagaaaataaacaa

SEQ ID NO: 909148 - DNA, 565 bp, Homo sapiens
  misc_feature 231: n = A,T,C or G
taaaaggtggctgggcagcaggagggtagcagttttggggtgaacgtggagttccagagagtatcaggggactggaattagagggtgaacgggagtgactagagatacagctgggaattagaaattggatcctcctaaacgttcttcagaagattcaaggctgaaaattactcttcaattatttactctgtttctgtaagtgcatcttcagatcgacccagctccaagtcnagactgtgggggtcgaggattctacaaggttgccttgggtgagtggcttttatttgtattgattaattatatctgccactttgcaaaaaagtgacttgaggtgaggcaagaacatttaatctctctgaatctcattttcttcctctgacaaattgggctcctgacaccaggtgagaggtgtccaggtatcctggtaaccaggtctgaggctgtggaaattaaataagaacacgtgtgaagcgccagcacagtgcctgggacccagtaaacctcyggaactgctggcccttccccaaaacaacttgccattgttcccagcacaaagaaatgataa

SEQ ID NO: 909149 - DNA, 582 bp, Homo sapiens
aaatacttgttatattgttatatgttatttttttaaattttattattatactttaagttttagggtacatgcgacaacgtgcaggtttgttacatatgtatacatgtgccatgttggtgtgctgcacccattaactggtcatttagcattaggtatatctcctaatgctatccctcccccctcccccaaagttatatgttattttcaagattaaatgtggtatagtactgatagtgaaacatgaattggatgacctagtttacctttttttttttttagtatttaaatagaaacacattgtaaaagcacgaaacatatcagcataggtagatcttgaaagcataaagttaggaaacactgaatgctatataacatatggacattagatggtaagtaacatgtatattttttttcctccatatgtttctgtatgtaaaaattacttttattctatataactgcaactwtaaggtactctcaccacatacacacaggagaaaatcaactatgtgagagaatgagataatttgtttgactgaagtaatcacttcactgtgtatatctatatcaaaacatcatgtt

SEQ ID NO: 909150 - DNA, 582 bp, Homo sapiens
aaatacttgttatattgttatatgttatttttttaaattttattattatactttaagttttagggtacatgcgacaacgtgcaggtttgttacatatgtatacatgtgccatgttggtgtgctgcacccattaactggtcatttagcattaggtatatctcctaatgctatccctcccccctcccccaaagttatatgttattttcaagattaaatgtggtatagtactgatagtgaaacatgaattggatgacctagtttacctttttttttttttagtatttaaatagaaacacattgtaaaagcacgaaacatatcagcataggtagatcttgaaagcataaagttaggaaacactgaatgctatataacatatggacattagatggtaagtaacatgtatattttttttcctccatatgtttctgtatgtaaaaattacttttattctatataactgcaactataaggtactctyaccacatacacacaggagaaaatcaactatgtgagagaatgagataatttgtttgactgaagtaatcacttcactgtgtatatctatatcaaaacatcatgtt

SEQ ID NO: 909151 - DNA, 660 bp, Homo sapiens
aattgataccttccttgagtatcactaaatctactgtgctatgctaggctttaaaatgctttgcaccactctcagagtcattgggttatatgtttttagctaatcattggttagtaataaagaggctgcccctcttgaggtggtgactgacgcagttatgtcttctgcatccttatgcttaaaaacagcatcatcttgagcgtaaagtaaacattcttaagtaataactgagcagataagtccaatataaatagcgttcaaatcaccagaacctagttccccaggtgaaactttttcattttacagacaaaagaaacagagatttgaaatgatttgcttttgggattttgaaagttggaaattggaaaataaaatctagcttctcaaagctagaaagccttcctttaatttttgatgcacagtgtttctattctaaagtaggcatacatgaaatgccagcactgggctttgaattattcaaactccactttgctcatcctccctcgtgcctacttgtcccactgtgggtgcgcaggaaatgcttgttaagtagctcaccactcttaatcagaaacttgggaataagagtgtttagcatttgagtttaattaaggttttaaactttcaggagtkcttccttaaacccattttcagtctttc

SEQ ID NO: 909152 - DNA, 668 bp, Homo sapiens
tagctcatggttgaagaaaagtggaaaataacaagtgcccatttaggtttgaagaatccagaatgttttacctttgactttatgagttatagaagcttggctttgctctaggyttcatgttcccaaatgagccatctgtcagtatattcacttaattcttactaatttcagtttcctgtaaaggaaacaacttacatattgatgcttaaatccagaaagtgtaaaaggttttcttaaactgttaaaatatagtgtctgatataaaggatgtaagttactcagctttctgctccctaagccaaacagtgtttgtcttcagtgtgaaatttaactgtaaaaactacttgtaatgtcaagagattatagatcatattattaataaaatggacctgggtctaatattttttttcttcaaagggagtgtgaagctgtttattcttttatttgcatatgagtttttcttttagttttagtttttcatgttcatatttccactgatttgaaaacacaaaatttatttttataattttgttgcttgtagcataatcaagtgcaaaatcaagtgcaacctacttgtgactaaatctctttggatttatagctgaggatattgttagctaggttttgtcaatccctaatcattttttaaaatcaatgctgtattccca

SEQ ID NO: 909153 - DNA, 613 bp, Homo sapiens
actttttttgttctatgtctctgaygctggttcagaacagattcacaggaaagtggaggtcttgctgagtaaagaagaaacaccacttcccaaacgttagatgtagtctgtgcatcttttatctttgactcatctactctaccctgccctgggaaaataaaacaagagttctaagttgtaaaggacaggcaagcctaaagacagctcatgtaaatgggagcaagaacagtttcttgtgttataatgagcccctccagaatgctgtccttggttatcctgttagttggattttcagagcagactggtagctaatcaatcatgttcattgtgtaggcaacttctgacttggaaggaatggctgctgacccagaagccacagcctttgatgaatggggcttcttacaagaggtggttggaacatgtaactaaaaagcagtcacgtggtaataatccattttccatatactggaatgttttctgctaataccatcacctgaaatttcatagaaatatataaaactattattttttcaaagttcaatgtgtaaaaaggatcacttaaaacttttagtttgttgagctgcaaacattcattcactgtacattttttgta

SEQ ID NO: 909154 - DNA, 692 bp, Homo sapiens
cgtcaaagtaaccaaaaaggaatgaagcctctctccatggaaatattttaaaagatacacaattttttatcctatagacagtttcaatgctgcctggcctatgggtgactggatgagatgactccaaaggggctttcacttcatttatgaggctattccatgatcaaacactgcggaaacactgcctggttatatcttcctcctacatatctgaggaggatgaagaaagtgagagagctggctgagagagagcctctttgagtgacaatctctatttcacatgctatagaggcacaggcactgtttagtgttgaaattcttttcacagcatgtggcaggtaacccctggcagcgatcttctgtcccagagctttctacactgttgccctctcttcaccagagacagctacaaggctggggcaaggtgtggacttcacttttccagatgatggcaagcagccaggaactgtcaaggggaaggaaagaactccaagatcacccagcaaaacaggaaactgaagggggatgagaaaccacattgcatctcagaatctcgccacttaagctgtatctytccagatgcactatatttcacctaaattcaaacatttccaaatgatattaaaaaaattaaacctcatctttttcgtttaaaaaaaaaatatgtgtttcttggtaaatcacacaactct

SEQ ID NO: 909155 - DNA, 641 bp, Homo sapiens
tctagcaggtgctgccttcctggctaccagtggtaggggcaggtggggtcatgtgccctgccatctgggtgtttcctgggacaacaagaagctgcagcctccagccgagttcacacagaagtggggccactgggccaacagctttaacaaacattgcctgcctggctaccagtggtggaggtgggtagggtcatgtgctctgccatctgggtgtttttgaagacaacaagaggctgtgccctccaaccgagtttatacaaaacaggactgctggactcgaagctctagcaagtgttgcctgcttggctgccagtggcgaggattggtggagtcgctggttgagttcagatagaagcaagatggctgggctagaagtatgcactaagtgctgtctggtaagctgaggtagagcaatctcactgctcccaggcactacaactgcagcttctactggggctatggcaccagtgctgttcccctctgtttctcaaggttcatagtggtctccttggactcaatagttgccccaacaaaatgtccaggtggctctctgtctcaktctagaagcatggtatggagttgtggggtggccagtgggattctcctgtttccagttttgcacaggtccctgtggtaagcat

SEQ ID NO: 909156 - DNA, 595 bp, Homo sapiens
tgtttcccagcacagcaagatgaacaccttccccataatgccttccacaatctgcctttctggaacaaggcattcttgtgtcctagyaattttcagatgttcccacttggaagacattctagagcacagacaatcttattactaatgaaaaaagaaagccagtatcctctctttttattctttcccctcccccacaatcttgcttcatagtggtggtgggggtggggggaagattacccagaaaaagcagaaaggagactcgaaccccacagcccttagagatattcctgtgttggatattaaccccctggtagctccacagtttcataactgtactctttacatattcatattctcgctctgatacattcgcaaacccaaggacagcatatgtcaaaaccagaaatttcaggcaacttagtaacaggacacgctaccaacaccacccttactcaacaatacccgggaaacatcgcgcgctggccagccgcggagacacagttcccaagcaacgcataaactgaagaacttcctctccctgtcagtttgtgggcagcttccctcgtatacataggacttggagtctccgtgttca

SEQ ID NO: 909157 - DNA, 204 bp, Homo sapiens
ctttattttctaaaatttgtatccaaaggtatgtttacaatttacacttctttgaattacatatttaatattttctattataaatattttataaggagtacactaaaattttgtaagttataaatgtatggcatagatatatttttattatatgacttctgtcaaaatcggtaaatattttacrtaatactactactcctagtc

SEQ ID NO: 909158 - DNA, 599 bp, Homo sapiens
caggggaaaaccacctactcaagcctcagtaatggccgatgcccctccccccaccaagctagagcatcccagttcaacttcagtctgctgtgctggcagcaagaatttcaagccagtggatcttagcttgctgggctccacggtggtgggatcctctgagctagaccacttggctccctggcttcagcctcctttccaggggagtgaatggttctgtctcagcagtgttccagttgccactggggtaaaaaaacaaaaaacaaaaaacaacaacaagaaaaacctcctacagctagttcagtgtctgcccaaaaggccacccagtttttgctttaaactcagggccctggtgatctaggcacccaagggaatctcctgttccgtgggttgcaaagaccatggtaaaagcgtagttttctggaccggatagaaacgtcccacacagcacagtccctcatggcttcycttggctaggggagggagttccctgaccccttgcacttctcaggtgaggtgacaccccaccctgcttctgcttgcccgctggggctgtacccaccgtctaaccagtcccgatgagatgaaccatgtacctcagt

SEQ ID NO: 909159 - DNA, 703 bp, Homo sapiens
tttttctataatcactaaatcattttctatcaaatagaacatattttaatgaatccttgaaattgtttatttgtcctgccataagtacacagttctactggatgaacattttctttcagcatctggaagacattctctaattgacttttggcttcttttttcattgttgagaaattgcttgtcagccttgttatcatttttgaagataattcaacagatcttgcttcataaattgctctctagtgatactattgtttatctagttactaaggtatttctgttagtgctaatgaacagatactgtgcgtcctgcatcatggatttattcggtactagaaaattctcaaatagtgtatacacacacacacacacgcaaaattgtttctcttatgttatcctgaaatcatctccttcattaatttatatgaaaagcatattttaaaacatcttttgtttcagtattccatagcccttttcctctgtaatatgtggtgaaatctctttaattttttcacgtttttctccctctatcttcctctgtctgtcctctgtctgtctctctctctgtctctcattctgttttcggtcttgtctgtttaatttgctgtttaatattgctatttgatattctcaatagcagaagtccttggagaactatttgtttgtttctattgatttttattcattrtgttgtccctcttta

SEQ ID NO: 909160 - DNA, 622 bp, Homo sapiens
tatgagtctgtttttgtaccagtaccatgctgttttggttattgtagtcttgtagtatagtttgaagtcrggtagcatgatgcctccagctttgttctttttacttagaatttctttggctatttgggcttttttttggttccatatgaattttgaaatagtttcttctaattctctgaagaattagaagaacttctagagttcattgtttgagtttggacccagagagcccctaaacatgtaaatggtagtttaatgggaatagcattgaatctgtaaattactttgggcagtatggatgttttcatgatattgattcttcctatccatgagcatggaattttttccatttgtttatgtcatatctgatttccttaagcagtggtttgtagttctccttgaagaggtcctttacttctcttagctgtattcctaggtattttattctattttgtagcaattgtgattgggagttcaatcatgatttggctctctgcttgcctgttgttggtttctaggaatgctagtgaattttgcacattgattttgtatcctgagactttgttgaagttgcttatcagcttaagaaggttttgggctgagatgatgggtttttctagat

SEQ ID NO: 909161 - DNA, 555 bp, Homo sapiens
aacattcaactcctcattacttatgcaaatttctgcagccagcttgaatttctcctcagaaaatgggtttttgtttttctatcattgtcaaattttacgaacttttatgctctgctttccttataaaactgaatgcctttaacagcacccaagtcacatcttgaatgctttgctgcttagaaatttcttctgccagataccctaaatcatgtctctccagttcaaagttccacaaatctctaagacaggggcaaaatgccaccagtctttttgccaaaacataacaaaagtcacctttgctccagttcccaacaagttcctcatctccatctgaggccacctcagcctggactttattgtgcatatcactgtcagcattttggtcaaagccattcaacaagtctctaagaagttccaaactttcccatatttttctgtcttcttctgagccytctaaactgttccaacccatgcctgttacccagttccaaagttgcttcaacattttcaggtatctacagcagtgcccaactttactggtaccgatttactgta

SEQ ID NO: 909162 - DNA, 505 bp, Homo sapiens
tggtttgatccagtagctctacactgttctcaaggactcagattcctcctgtctctccactctgatgtctatggtattgatttcattcctargctggatccccttatgtttgtattattggtaccagaagcaagcagggcgatatcttcctgatagagtctgattttccgtagacttcctctgaagggtgaagaagttttactccagaagttcccagcaaacttcttttccatatatcattgtctcaaattatctaaagacctgccatcctagaaccagtcactggggcgggggtagggggagcgggggaatgagattattataattagcttagactaatcaggcttcacccctgaacctgaggtataatgaatattggattgtcaaacacaaggtccactgcacattttattgtcattagttatttagttacctgtttcctcctctaagttatactttcctggaggttaggaagcaaattttttttcctctacccccacaaagc

SEQ ID NO: 909163 - DNA, 695 bp, Homo sapiens
tagggcaatccaattccctttcctgcttaggaagggaagaggattggattgccctattctgggttacatgctcactgcttggctatgggagagaggagtgccttgattgacaatctcttttattgtacacattatggaagaggtattggtattttcccacaaggaaattatggcgctatcatcagaaggtgctgtgtgaacatgaataacacgtgctaacaggtatgcctttttgtccccagtcattcattcattacaggtgttaagttatataatgtatgactaagaataaaaattagaataagtaattgaagaatacgtacaacatttgattaatagtattaacctgggtaataaattgactgaagcatatctatctcattaccattgggtgctatgaatgttccattgataaacttcttggagactataagaagcttcttatttaaagaaaaactattttaaagaaaccattttaaagaaaactattattttacttattagtttaacatgccccctcccactgcggtagtatagtttttaggcttcttgacattcattgcactttcccatggcagcattacmccagttttccatttgtctcaggggaaaacaacttcatctccagcaccatggttgggccctgatgaactgaagccaagatttttcacctgacctcaaggattaggtcccac

SEQ ID NO: 909164 - DNA, 662 bp, Homo sapiens
gtgggactgtaaattagttcaaccatcgtggaagacagtrtggcgattcctcgaggatctagaactagaaatagcatttgacccagccatcccattactgggtatatacctaaaggattgtaaatcatgctgctataaagacacatgcacatgtatgtttttggtggcactattcacaatagcaaagacttggaaccaacccaaatgtccatcaatgatagacacgattaagaaaatgtgacacatgtacaccatggaatactatgcagccataaaaaaggaagagttcatgtcctttgtagggacatggatgaagctggtaaccatcattctgagcaaactatcacaaggacagaaaaccaaacacctgcatgttctcactcataggtaggaattgaacaatgagaacatttggacacatgatggggatcatcacacactggggcctgttgtggggtagggggaagggggaaggatagcattaggagatatacctaatgtaaatgacgagttaatgggtgcagcacaccaacatggcacatgtatacatatgtaacaaacctgcacgttgtgacctgtaccctagaacttaaagtataataaaaatatataaaaaaaataaatgaaactgttctgtttgtatgttgggattacaaacacag

SEQ ID NO: 909165 - DNA, 506 bp, Homo sapiens
aatagataagtgactggttaacaataaacaaatggctaattcatgcacatgaaagatttaggcagtgatattcacacatatggcactgctaaatgaaaaagacatttctgtatctaaaaatagtatcagtaccagaactagtgaataatgttttatttttccaaaggtcaacaggatattacttagtctgccaaattataatagctagagcccagtcattagtggcaaagtcaggaacagcagtaatgattttgaccctagaaatttcaatcctactttcaatgagttaatcagaagaagtcatatacctctctgaaatgctttaaatatgacatatttgagttattcttcagaatatatttatcaaacatgtgtgctgttaataaatatttatgggggcataaaagtatattcacatatttctcaacatgttgtgatctatcttgtatctcagcatagtttctgttgtatgatagawtgtttaattttaataagggtgctgacct

SEQ ID NO: 909166 - DNA, 613 bp, Homo sapiens
taactattattaagatgctaattccttctgtattggtgtataggagtcagattatatctgtccatgtagtaattccctatgacttgtcacttgggcatatttgatttttctagcctgcagctgagttctttcaccattgccctgataccaacatacagcaagggctcattaaattcccttccatcttcccagcaaaagaccagagctctttaaatagaacatctctttatacactcacaatgacctgtgaaagagctaatacatggaaattcaaagggattgttaactttctgttaatacttaacctcatgactcaaatatacaaaacctagattttcatgaagctgaattattgatctgttaacagccctgcccatattgagaagacgataaatgaaatccagaagtgaaaccactgaattccaaagggaatctaggggaatcctaggtcagaatctgaacaagaatgtaagatttattcattttccaaccacgcttcagccagtctttaaaagcaggcaacaaatacaatttttcttgacctccattaagccctttatgwttttttttttttttagagaaggggtcttgctatgttgcccaggatggtctg

SEQ ID NO: 909167 - DNA, 649 bp, Homo sapiens
aaaaattcaattgacaaattgaagaatgcaacagagtctctcaacagcataatttatcaaacagaagaaagaatgagtgagtttgaagatagactatttgaaaattcacagaggagacaaaaagaataaaaaataataagacacacatacaagatctagaaaatagcctaaaaagtgcaaacataagagttattgatcttaaagaggagctattggtgagaaagttaattcagagagacaacagagaactttctaaacctagagaaagatattaaatattcagctacaagaaggttataaaacaccaagaagatttaacccaaataagagtacctcacgaaatttaataatcagactcccaaaagtcaagaataagggaaagattctaagaatagcaagagaaaagaaataaataaataacacataaaagagctccaatgcatctggcagcagatttctcaatgcaaaccttacaggttaggagggagtggcatgatatacttaaagtgctgatggaaaaaaacttttaacttagaatagtatatccatcaaaaatatatttcamagattaaggagatacaaagagcttcccagacaaacaaaagctgagagattttatcaacactgtacataacctacaagaatggct

SEQ ID NO: 909168 - DNA, 586 bp, Homo sapiens
tgccattcattagggttctacccttgtgacccaagatcctgcctccaaataccatcaccacaggggttaagatttcaacaaatgaatwtgacatggacactaatattcagaccatagcaccactataatcacttctttgcatataccctaaacgttttttcctctttatcaattgatgaacaaaatgtcaactctagttatataatgcaattctcctacttcaggcctgcacccctacaggtgaacatacttaatatgtttgttcagacttccatactggcttgttttattttaaattcattagcatcagcctccagtgagttcttaatgctacaaaataatcatattatgtttccctgacttataccttctctcaacccactggatgattctttcatactttcccttaaggtttaatagctttctctcatctgtattctcaggagataactctgactataaaagtagaagcgatcaacatgaactttcaaaaactccctctgtgatatctccctagctgcctggatctgtagtcatatgctctgccatcactcctttacctctggataaacatctgttctctttg

SEQ ID NO: 909169 - DNA, 574 bp, Homo sapiens
gaattccattcaatgatttttgcaatttgatcagcttgaagatgtggataaaggaaatcttcaaaaataaaactgtctagtgaagataaaagcatataatgtaggatctgcagcagcagccatcattagctattgctcttccctacgaactgaaaaaaagctgcagacttccataccaactgacagaatgattgcttccatcccaagcctctgtggtgcagatgtaaatagtaaagtcatgtaaatagcattaagggaaaatttcaacattctctacatttatcacatttcctcattttagagaattcatgagtattaaatgggttattatgaaaaatgttcattctcagtgatcatcagagtgtggcgaaattcatggtgatgagattaatgtctgttacctctgttttttccacaagtgcaccactgagctttagtgtacatttttcttgtttgttttcctctttgccattccactccagtcacacaggcttcytgcaatcatctattcaatatgcctggacagaggtatatgatgtccagttttctatgacccaacgtcagcattgggaaa

SEQ ID NO: 909170 - DNA, 620 bp, Homo sapiens
ctcatagttcacatgccatattgagaacctgacttacttgggtagacatgggagccatctatgggttttaaatgtgagtgttccagtgtcacgtttgtcttttaattaaagtccaggggctgggtttaaaacggatttgtgggagacacatctggagtccagaggccctttggacactgtcagtaatgctgaaaatatttgctgggggtttaaattaagggaatagtacaggccataaatgaaaagagaagacagatgtttttaaatgcttagtacaattactgagggttagccattggtagatgtggagactgaggaaggcagaatcagaaacattccctaagcttctagtgtgagtaaattggtaggctaaaatgctccaatgaaaagagagaatgagaatattgcagtagcaataatagctatctttaatttagcacctttacactaagcattcttctacgtgattttcactttttttaaactttaccctcacaataacccaagaaagctaaattccattattttcattttagaagaaaaaattggggtatatgaatgttgaatgttttacataacgtcacacaggygggaaatgatggagccgagttttatactca

SEQ ID NO: 909171 - DNA, 656 bp, Homo sapiens
aatttactgtaaggctaatgagatacaagattcactgcccctcacttgcacagaggtctttcaaaggactagtttattcatatgatttgtacaagttgtaaaagtaatatatttaattttgattggcaagaccactgcctctttctactgtaatttattcttggtcatacttaccctaccactcaaaagtataggagtggagaaggtcactttggagatctagctgagagtaaattaagttggggatacatatagtttgggtttggtgctatgtaactatcatggttctcagttatttctgggatggagtcaagtttcttctggctgctccaagtgcagaaatggcttccaagaactttctaccacccactatgccaactcaccagatatcgggctgtgaatatactgggccagagattatgctgcaatgtgaatatgaatcatgctcctggtactctgaaaagctagatagaggaggggaaacaaaacttgaagttcatggagaccagagctaatctgtggcaaatctttccagtcatcagacgtgcaacattttaagtgaaagacttgtttctcattgacacctggtcaaaacgaaagttcttttctrtcaagaatttttaataatgcaatgtgtgtaatatatatcacatgaa

SEQ ID NO: 909172 - DNA, 693 bp, Homo sapiens
ccttcctgaagcaagggctgaaagagccaggggggtttagtttartgtgttccgaatgagttaatgggtgacataccagtgagtattttctatcacattaattttaatgtattctacttgtctgatgtaaaagactcaaaatgacctcccagtgttcctaattagtgctctcagtacaacttctttatcatttcttagaagtggcttctactatgtttctaaatttagaaaaaattacaatttataagttttgcatgtatactttgggggttgaataaggagattaatatctatgtggaattatcataagtaaaacaattgatgaagataatacagtgttagaaaaggtttcatgaaacattcttaaagacatgtgaaccacaaattttctgtggcagatgcataggtacatgtcttccttgtcaaacactgattaaaagtgctatgtggcatggaagataagaaagtagcccatgtttataaaaccaaactgtaaatttaactgtaggtataaatcagtaatctcaattttgaaaataattcaaagattgcatatgttggtctgttatttaaacattatttagaatttggaggtaagcagaacaagacggcagaatagaagtctccaccaatcaaccccctcaacaaggacagtaatttaacaactatttacacacaaaaaaatgcacctcc

SEQ ID NO: 909173 - DNA, 686 bp, Homo sapiens
ttttatattttcacggtagtctaagttcactcaactgcagtatttgatgttaaatgtacgctttaygctgttaagataatttagtttctgtgtttggtcacttttgcttaaaggattgtaattacataatgcatgttgaaatcatattaagtaacctggccacttgcctatttacttcttgtggctaacaataatgaatgaaaccatttatatatgttgttttagtatatcacaaaattttatagaaactagaagctcggtgatgaataatagacatccatgagccttcttatttgttttgaatttgagacattttctagaatattgctgtttgaatgaggcttcagtactttacagaatcgttgcctgcacatcttggaaacacttgctgggattacttcttcaggttaacccaacagaaggctaaagaaggtatattgctgttgacagtgagcgactgtaaacatcctcgactggaagctgtgaagccacagatgggctttcagtcggatgtttgcagctgcctactgcctcggacttcaaggggctactttaggagcaattatcttgtttactaaaactgaataccttgctatctctttgatacatttttacaaagctgaattaaaatggtataaattaaatcactttaaaaccatgtctgtacatttttagagggcttcagc

SEQ ID NO: 909174 - DNA, 591 bp, Homo sapiens
gagatttcacaactgctgcacaaatatgctctaaaggaactgatgggctgggygcggtggctcacgcctgtaatcccagcactttgggaggcctaggcgggcagatcatgagatcaggagttcgagatcagcctggccagcatggtgaaaccccgtctctactaaaaaaaccacaaaaaattagccaggcatggtggcgcgcatctgttaccccagctactcgggaggctgaggcaggagaattgcttgaacccaggaggtggaggttgcagtgagccaagattgtgccattgcactccagactgggtgacagaggaagacgccatctcaaaaaaaaaaaaaaaaaaaaaaaaagaactgaagaaactgatgatctatagattatcaacctggaggagagtgttgagattcagcctttacagctctgaccttccttggacattttctatacaatattttaatttgtattaccatcttaaactagaggaaaataaggttttccaaatttgacattaaagaaggcagtgcatattttggaatagtgaatcaagatccccaaaaaacctgtgacagattagcacaatgggctaa

SEQ ID NO: 909175 - DNA, 665 bp, Homo sapiens
ctatatgctagccactgtgctaagtgctttatatgggttttatcacttaatcatccaataaggaaggttatgacttataaggaactgaattttacaggcaaggaaagtgaaatgaaagaggttaagtaattttctaatgctccatagagtacatggtagaccagagatgaattcaagcagtctaagttaactactcttcatgcttggcacatggttgaaagaacaagaagtatatcttgtcaatagcgattgcaaatcctataaaatcacctaagtgtatggattttctggatgccttagcacatagccatgtatgtttgtgtgcatatacattatttgtttttgtagatttatatataaataatgtgtctaatgtctaagtacttttgcccttttttacgttattagtttatactggtgggggagattagccctaatatttattagagggagaaaaagtcatttttacagcatcctgcacatagcaactcttcaacgaatgcctattgaattcatccttattttctaaggaaagtggcaatggatcagaacgagaagatccaggttttagttctggttttaatggtgatycactgtgaggaaaagaccaggttggctgtcttctccaatctttagtcttcccgtgtctaaaatgagttcagaag

SEQ ID NO: 909176 - DNA, 514 bp, Homo sapiens
tgggggaagggtgctattttgtcttccaaaatagacgcttctgtgtaatagcagtggaacaaaggataagcaaggttaatatgggcatgaaggcagtggcaatcagggartctggcttttgagatatattatattaggtgttatgctattctattggacacattataaaatatctgtaataaaataatacaatgagtagtgctaggacatttggattttgtccataaggaacgagataaaattagattcattctttaccatatgccaggaaaaattttcaaaatttataagtaaaatataaatcatagcatattaaagaaaaagatagatgtggggcagactttctagccatgatgtaaaatgcacacagagaaaatatattggtaacttataaaaattaaggtaaaagaaatttttgtgaactagccttacaaaagtgagagcagggctttccttatagattgctaatttcctccaggggcaatgactttcctggataattagagaagtaaag

SEQ ID NO: 909177 - DNA, 416 bp, Homo sapiens
ttgataggaagtacattgtatctatagattgctttggggagtataccttccacaagaatgattcttccaatccatgagtgtgggatgtatttccatttgtttgtgtcatttataatttcattcagcagtgttttgtacttctccttttacagatccttcacttccattgtcaagtatattcctaggttgttttttgttttgttttgttttttctgcagctgtttttaaaggaattgagttttttatttgattctcagcttggtcattgtcgatgtatagcagtgctactgatttgtatacactgattttgtaacctgagacttaactgaattcatttattaaatctagaaatcttttggcagarttcttaggattttctaggtatatgatcctatctttggtgaacagcaataatt

SEQ ID NO: 909178 - DNA, 510 bp, Homo sapiens
gctttgtatcagcaactttactgaatttatcagttcagtagttttttcagtggastctttaggcctttccaaatatagatcatatcacctgcaagcaaggataatttgagttcttcctttccaacttggatgccatgtatgtctttctcttgtcttattgctctagctagaactcccagttcttctttgagtaacagtggtaaaagtggtaatccttgtcttgttacagatcttataggaaaggctttcaggtttttcccattcagtatgctattagctctgagtctgccataaatgcttttattgtgttggtataagctccttctataaccagttttttaaacgttcttattgtgaaaggatattgaattttatcaagtgcttttcagcatcaatagaaatgatcatatgattcttgtccttcattctgttgatataatgtatcatgtttattgatttacttatgttgaaccatccttacatccttgagataaataccacttagtcata

SEQ ID NO: 909179 - DNA, 623 bp, Homo sapiens
ttctgggtgatttcattaaccacttgcagtgactttcctgatctggagatgattttctaccagaatcggaagtactcattcctttggtatttatttagtgtcttccatatgccaggcatatgctcagtgcaagatagaaagctctttgtcttcaaggaagttagggtgtagagtgggagactgccattcaaactaacaattcccattcatgatgatgagttccactgaggtctgcacaaggtgctactagaaagatggggaagtaagccaacacagcctagtgggggcactggggaagccttctttgagtggaagatgatgcctgagtaggcataggaggaggaagaaaagtgttctaggcagaggaaacagcacttgggaaaacagagagtcaagaaaaagtaaaaggagttgaggatctccaagtattttgcaatggctagaggatcaaccccatgtgtgtgggctgaaaacaaggctaaagaggttggtagagcctccctcatgtgctgtgatcaaggagttaaactttatcccaaaggctgtggaaaatctctaatggagtgtaagtaggggaaaaacaaaatayagacatgtgtgttggaaagctctgtcaacaagat

SEQ ID NO: 909180 - DNA, 635 bp, Homo sapiens
tttttttttgagatggagtctcactctgttgcccaggctggagtgcaatagtgtgatctcagctcactgcaacctccacctccctggttcaagcaattcttctgcttcaccctcccaagtagctggaattacaggtgtgcactgccatgcctggctaatttgtgtgtgtgtgtgtatttttagtagagatggggtttcgccatgttggccaggctggtctcaaactcctgacctcaggtgatccaccctcctcgacctcccaaactgctcagattacaggcatgagccaccatgcctggccgcatctccatttctttatatgccaagcaaggataagaattccaaactctatagactttttaaaaatttttttaaatttttaaattttaaaatttaaggccaggctggagtgcagtggcacgatcttggctcactgcaacctctccctcctctgcaaccactgcaacctcgctgcctcccaagtgattctcctgtctcagcctcccgagwagtgtgattacaggtacccaccaccacgcctggctaatttttgtatttttagtagagattgggtttcaccatgttgccccggctggtcttcaactcctgaccatatgtgatccacctgcctcaac

SEQ ID NO: 909181 - DNA, 600 bp, Homo sapiens
gttaaaggcagattgttaactgattaaaaaatgaaaccaattatatactgttataaaagacaacacctaaaccataaaatacaaacatttggaaagtaaggtgatgggtaaaattatacaaaccaaaaggaagctgatgtagatatattagtattggaaaaaagaaattgctagggaaagagtcatataatgaaaatttcagtccactaggaaggtaattcaaaattgacgttactgaccaggtgcagtggctcacgcctgtaatcccagcactttgggaggccaaggtgggtggatcgcttgaggtcaggagtttgagacaagtctgaccaacacggtgaaacccagtgtctgctaaaaatacaaaaattagttgggtgtggtggtgcatgctgtaacccagctacttgggaggctgactgaagcaggagagttgcttgaacccaggaggcagaggttgcaatgagctgagatcrtgccactgcactccagcctgggtgacagagcaagattcttgtctcaaaaaaaaaaaaaaaaaaaagtttggcattacctggtaagtaaatgattaagcagcctcatatttgaggatgttaacgc

SEQ ID NO: 909182 - DNA, 570 bp, Homo sapiens
gcctgacaatgtggctggcatttactgagttctcaacaaattatctctggataaaagaatgacagattgcaaagctagaatggacccccatatttgcctaaatctaaatctgattctcttcctctatttaccatatgccttctgtaaacaggctacaccaaaggtctcttataattaaaaaaaacaagcaggttctgacttccagttatccacatagaggcattttagtacaagaattcaggatttgaaatgtggacacttttatcccaatacttgggaaacaagaggagctacagactcctcacttgtgtactcgacatggagaaggacagaatttacactccacagcatcagtgttagagcatctcatgaaacaatctggaacagttgatatgctcctgaacatagttaatatgatactaataactcagggatcactgaaatgaagaagggcatctgtgtatctagttatgaggaactggaaaagacagaggacgggaaatgagacaggctctgaaatagttagctcagacatcattttacccagatgrttctccttaacctcctata

SEQ ID NO: 909183 - DNA, 696 bp, Homo sapiens
gaggctatataaatttataatcattcactagatggtggaaggcagtatttagagtcagagagataatytggggtggtagtgtaactggaagggtaaaaacagggcatacagagtcttgttggccatagttaaaactttaggttttgctccaattagaggagaaacttggagatttttgagtgaaagaatgacatcatgtgaccacacagggcactggattgacatcatctaaacatgggcaaaagcagaaccagggagaccagtggtgatgatgaaaagtggctaaattctggttttactttgaagatggaactgataggggagaaagacaggagtcaagtattaaatcaaaattttcagaataaaaactggaagaatgaattgccatttactgaggtgtggaagactcaaggagaaaaagtagtggaggaggcatgtcaagagctcagaaatacctgtttagaaaaaattatttttagataaaaacaaatcatattcatattttcactgtggtgaaaatctgaatcaaaatattgttccctattttgttagataaaaacataatcattttgagatttctgaaattattaacagaatccatttttagtcatttgctaggcccatatctggaggattcttctcctatccaatatatgtattacaggagaatatacctgtaattgagtaattaggcct

SEQ ID NO: 909184 - DNA, 581 bp, Homo sapiens
aaagcatctcagacaatgcagccaacttaaaaactcaaacagtacttagtttcgcccactcctatctactacaaaatggagacctgaagtgtgagtaaaatacatgggggaaaataaaaagcctaacaaagcactaagccaaaaactaggaaatacagacagccccttacttatgataggtgagcttacttatgatttttcaattttaccatgggtttatcaggacataaccccataataaatccagaagcatctggacttaaccatggtttgacttacaatttttcagctttacaatggtgtgaaagcaacatgcattcagttgaaaccgtactttagattctgaactctgatcttttcctggcctagcaatatacaatgtgatactcttgcaatgctgggtagtgcggtaagccacagatcctagtcagccacacaatcgcacagggtaaatacccaatacttactaacttcttgaagagcactacgcccactaaaccatcaacmagtatagatactccaggtcccctaccagctactctcgagcctcatcaggagacagagaaattgataacctggtc

SEQ ID NO: 909185 - DNA, 622 bp, Homo sapiens
tgggaattgtgggagctacaattcaagatgagatttgagaggggacacagccaaaccatatcactgtcaaatgtttattattgttactatctttactgggtaagtcaaggacacagttctgaaatctgtctcttatactactataatagtaatgagacttttaaaagtaatacaccaatttttgtcttttttcttattctatcaatttatatgtatattgatttttaaataaggcaggtataagcgtttttagataattatatagtggatgtggcaaatacagagatatatcataatttaaaatctttactaatgtttagccttgtgcctgataggtacctagaaatgttaactattattgcaactggtcttctctttcatataacactgacttgaacaaaattatttttcaagatatttgcaattttgatttaggggttcatattcagagataaatgaaaaaatgtttctattagagtatactcagttattaggtgaattttaatgatttttagataatatgctaggtagaacattgaatactttacaagtattatctaattatattctcacaatattcctaamagttgtgtgttctattatctccatttagtaacttaag

SEQ ID NO: 909186 - DNA, 669 bp, Homo sapiens
ttaataaagaaggaaattctataatatgctataacatggatgaaacttgaggacatcatgataagtgaaataagccagttgctkaaggacaaatactgcatgattccacttatataaggtatttaatgtagtcaaactcatagaaggagaaagtagaatactgatttctagcagctgaggagagaggaaaatagggagttgttcaatgggtatagagttttggtcatgcaggaagaaaaagttctagatttctgcggtacaataatatgcatatagttaatagtactgcatcatacagttaaacatttgtcaacagggtaattttatgttatatggtttttaccccaatagaaaaataagtataaaaagtcagagatgctcgataattctccacatacacctacacacacactcacaagcccaggcacagacatatgtttaatttttagcaagctgcaaagcatgattggtttacatcttttcttttaatcatgatgctctcctataaaaaacattacaggaaatttcctgaaagctttgtcctatcggatttctgctctcaacagaagctgtctaatttgcttcccagacagcttttgcttcatgcatatcacatttaatattcatgatagcttagtatggtgggacttgcagaaccctttttatagg

SEQ ID NO: 909187 - DNA, 653 bp, Homo sapiens
tcacaggtcttagaataattgggtagagcctgaatgttttcaacaagcttcaaatgtcaatatctagaaattaattctatacccctcattcccatatacacacctcttccttgaaataggaatctattatgctcctgcctagagagctaaatcttggatatagcatcctgggtaaagaaggagttgatggcttctctacttggtatctagatttttcatcaattatcttgttttcaggccctctattgtgtctgatatcctgaagtctagaatatttctgatttaattttaccaataggtaagtctcctgccttatatcaggatttaggaggagttgtcatttggctgtggaggaaatctgaaagatgaattgctgctgcagaatttcagccttctctcttcttccttgtttcagtgatttttgttgcctccaattccagggcccagaggtaaaacgttgtttatttcttgcaggacctttcttcttcagttagttataagcttcctatgctctgatcaccatgtttatcttacatttcactttccaaatgtcatagaccttacttttttcctccttttcccatgcctttttcttgtaggttttaattcttcrctaatattttagtggggtttgagaggaagtaaacacacat

SEQ ID NO: 909188 - DNA, 659 bp, Homo sapiens
gtgcttggctgtttgaaactgtcatttctagctatcctagaacttgtcaatggtagggagtatacctctttctttaaaaatcatattataaaaagatgcctaaatgtactttttttctgttgtaaccctaatttatattatcattccagaaagtttttcttaatttcaaactaatttttgataaattagatttaggtttaaattgttctgctcgccaatctttgactaatgattgtcaaagtccttctatttcaaagaatcccttggtcgaatggtatcacaacatatctcactgtgaaagagaggattaaggaacaaggttatttcctcaactggcaaaaaaagattgttgatttgattataacttttatatgctgaattgatctgtgtgaaaaatggtatttctggcactgtgatcctctataaggaacaaacttgattattaactgtggcacacaaatcatgatgttctgttactatcgattatcaattattcatttccttgtaaccattttcccttcaaatattccaaccgcttacataaaagtcacctaaattttcctsaagtcacctgccaaggaaaacagaggatattcagaacatatgagacaggtgaggaaagtggtgggaatcaggtgggatttaaatatttcccctgc

SEQ ID NO: 909189 - DNA, 631 bp, Homo sapiens
ttcatcaaatactagttacaagtacattctcacgaatgctcttgaatctttcacccaaacagaaaattaaaaataacttgaagcctctacttagtgttccctttttccaactcactgcttcttccacagggtgtagacactatcctaaagattttgattatcattttctagctttttttccccgttgtttgtcacataaacacatatgcctaaacaatatataactccattttgctttatcttggcctttaacaaagatgttatactacatacagtatttggggaataacatttatcactattaaatgtctaggacttgaacatattgatgattcaatttgttcaagcttgttcaatttattcagtttatttcatagttgcatattttatcaactggataatagtctctttattcttttacatctttatcagatttattttgttttaattaaatttgtattgagatagtttcacctagagtatacaaaataatgcagagatcccttatacacttttcccagtttcccccaatgctaacattttgcaacactacagyatatcacagccagaatactgacacacaatacttaacatttccccagttttacttatactttgtatgtgtgtatat

SEQ ID NO: 909190 - DNA, 570 bp, Homo sapiens
acagctgaattctaccagaggtacaaagaggagctggtaccatgctttctgaaattattccaaacaatagaaaaagagggactcctccctaactcattttatgagaccarcatcatcctgataccaaaacctgccagagatattaaaaaaaaaggggggaatttcaggccaatatccctgatgaatatcgatgtgaaaatcttcaataaaatactggcaaaccaaatccagaagcacctcaaaaagctgatccaccacattcaagatggcttcattcctggcatgcaagatgggttcgacatatgcaaatcaataaatgtaatccatcacataaacagaataaatgacaaaaaccacatgattatctcaatagatgcagaaaaggccttcaataaaattcaacaatccttcatgccaaaaactctcaataaagtaggtattgatggaacacatctcaaaataataagagctatttatgaaaaacctacagccaatatcatactgaatgggcaaaggctggaaacgtgccctttgaaaaccagcacaagacaagcatgccctctctcacca

SEQ ID NO: 909191 - DNA, 705 bp, Homo sapiens
aactgttatatcatgtctaactaataggagttgtacttacaaatttgaaycagattttgtttgtaccaggaaacattcctgcactttcagaactactggtggctgtgttctagaaccatcattgaagaggtgtaatttaactccagtttgtctcatacttcttattcaatttgataattgtattagtcagggttctctggagggacagaactaataggatagatgtatgtataaaggggagtttattaaggagtattgactcacacaatcacaagaggaggtcccacaataggccatctgccagctgaggatcaaggaagcaagtctgagtcccaaagctgaagaactaggaatctgatgttcgaggtccggaagcatccagcatgggagagagaagtaggccagaagcctacaccagtctaatctttctgcattcttctgcttgcttttattctggttgcactggcagctgattagatggtgcccacccagactgagggaaggtctgcctttcccggtccactggctcaaatgttaatctcctttagcaacaccctcacagacacacccagaaacaatactttgcatccttcagtacaataaagttgacacttagtattaaccatcacaaatgattttgtgaatccaatcttctttagctgttaacaaacagaatgatgatgctattgttgcttctgaattgta

SEQ ID NO: 909192 - DNA, 654 bp, Homo sapiens
actcaaggtggatcaaagacttaaatctaagacctgaaaccataatgattctagaagatarcatcggaaaaacccctctaaacattggcttaggcaaagactgcatgaccaagaaccaaaaagcaaatgcaacaaaaacaaagataaacagatgggacttaattaagctaaaaagcttctgcacagccaaataagcaatcagcagggttaacagccagcccacagagtgggagaaaatcttcacaatctatacatctgacaaaagactaagatccagaatctacaaagaactcaaacaaatcagcaggaaagaagcaaaaataccatcacaaagtgggctaaggacatgaatagacaattctcaaaagaagatagacaaatgactaacaagcatatgaaaaaatgctcaacatcactaatgatcagggaaatgcaaatcaaaacacaatgtggtaccacttcactcctgcaagaatggccataatcaaaaaatcaaaataatagatgttggcatggatgtggtaaaaagggaacacttttacactgttggtgggaatgtaaactagtacaaccactatagaaaacagtgtggagattccttaaagtactaaaagtaggtctaccatttgatccagcaatctcactactaggtat

SEQ ID NO: 909193 - DNA, 590 bp, Homo sapiens
actcaaagtgggtactcatcaatacaaataccatactgaggtrtattaaatatctccttgccaacttttttctatgatgtcactgtgagctttatgcaagaatatttgttactttatattttaaaaacctttaaaataaatgatacatggaataaaagattagcagtagtagataaatcatcaccatttgatcatttatatttggtgatgatagagtgatagacttaatgtcattccatgcatgtgaagcacatttaaattattagcaacatatcaagaattctgaatgaaacaacacacttaaatctgaagtctcctctctactctccttatcatttaatgctatgtatatctgggctgtctaattacaaacacatctagttagatgagaaactgttatttccagatgatgctgtgcaaaattcttggttagatttgggtttaaggtctaaatgaatgctattagtatattatggagagtgtctgatttggaataaagtattgatgtactttctagaaacagaattagtaggagcaaaacttttctgtaggagatctggaatcactgagcagtgagaaatgtcaaggtc

SEQ ID NO: 909194 - DNA, 589 bp, Homo sapiens
tggaggggattggggataggagtatggcatagtcacatctgtgctttagaaagataataatgctaaataaataaaggatgtatttaygtgagaagcagcaaaagtagtgctgtggaattgggaatgtgcatagactttggatggaagtatggaatttggaactagatttttaaattccaatctcactggttctacagttcctattacttacaaactctctgttatgtctaattctacaggtaacttccatttataagctacatggtcctagaaaacttgtctgtctaaatttctttatctgtaaaaacaggattaaaagcagtatagcttcaatcaacatattattgtatgaaagtcattaaacttataagtacatttgactaaatatattaattataaacacttttttatttgtataaaaaagaaatataaaaaactaactagaaggttatagtttatgttatctgtaaaattaaaaagtgttacatccgtcaaattaaaagtttactgttttccactgagatatcagtgataatagtgatagaaagtaggagatggatttacaggtatttgtgagataaaactggca

SEQ ID NO: 909195 - DNA, 636 bp, Homo sapiens
aaaaaaaaaaaaagaaaagaaacaaaatacaacagatgaggcttatctttaatcatgccacttaatctccactttctcaagaagtaacgactgttactaatgagtgaatattcctcctgatctttctcttgcattcataagttattatatgcacccattaaaaatgcaaaatactgtcttgaggtactactctgacttcatttgtttcatgatttcataatgtgcgtgccatttgcagtctgttgtttttcacttaataatgtgtcaggaattgttctccataccagctcaaagctatcaatctcattttgaaagaactgaataacattccataatatattagtaacataatgtatttaactcttcttcatatgggcatttaggatgtttcgaaattttttgttattaacaaatagcatctgatgaatgctcttagacatgtgtgtttgtgcacatgtgcaagtactgctatagaataagccaaacacctaggcgtgggactgatctgtastatgatatgtaacacttgagcttttagcaggtaatgacacacaactcttcaaagtagacctactacttcacaatacaactcatggtatatgtaagtacttatcttcctactagctcccaagcagt

SEQ ID NO: 909196 - DNA, 605 bp, Homo sapiens
ttgcttgtctgtaaaggatttttatttctctttcacttatgaagctcagtttggctggatatgaaattctgggttgaaaattsctttctttaagaatgttgaatattggccaccactctcttttggcttttagagtttctgatgagagatcagctgttagtctgatgggcttccctttgtgggtaacccgacctttctctctagctgcccttaatattttttcctttattttaactttggtgaatctgacaattgtgtgtcttggagttgctcttcacaaggagtatctttgtggcgttctctgtatttcctgaatctgaatgttggcctgtcttgctaggttggggaagttctcctggataatatcctgcagagtgttttccaacttggttccattctccccgtcactttcaggtacaccaatcagacgtagatttggtcttttcacacagtcccatatatcttggaggctttgttcatttctttttactcttttttctctaaacttctcttctcacttcatttcattcatttgatcttcaatctctgataccctttcttccaattgatagaatcggctgctgaagcttgtgcatgtgtcacgt

SEQ ID NO: 909197 - DNA, 605 bp, Homo sapiens
ttgcttgtctgtaaaggatttttatttctctttcacttatgaagctcagtttggctggatatgaaattctgggttgaaaattgytttctttaagaatgttgaatattggccaccactctcttttggcttttagagtttctgatgagagatcagctgttagtctgatgggcttccctttgtgggtaacccgacctttctctctagctgcccttaatattttttcctttattttaactttggtgaatctgacaattgtgtgtcttggagttgctcttcacaaggagtatctttgtggcgttctctgtatttcctgaatctgaatgttggcctgtcttgctaggttggggaagttctcctggataatatcctgcagagtgttttccaacttggttccattctccccgtcactttcaggtacaccaatcagacgtagatttggtcttttcacacagtcccatatatcttggaggctttgttcatttctttttactcttttttctctaaacttctcttctcacttcatttcattcatttgatcttcaatctctgataccctttcttccaattgatagaatcggctgctgaagcttgtgcatgtgtcacgt

SEQ ID NO: 909198 - DNA, 646 bp, Homo sapiens
gggaatagccattgccactcatccctgtggtgtctgagcaattgtgctggmagtgaatggtcccacagtgctaataactgagccactggactgccttactgctcccaaggaggttctatccttgcttcctgatttagcacgaggccgttaaagatttgcagttccctgcagtttggcttctactccatccacttccagctcccttctccccactctctaatttgtgacctatgcttccctgtggtttctgcacattgcctctctcctctgtggtcctctggctttattcctatgaccactctctccaccactatttagtctcttggcattatattgattccaaacttcccaaataagaacatctaattggtccattgagttgctctgtccctcttaggcagagccacaccaacatcttcaggtgtctttgggtccaggcagctacagccaatgagacagcagggccatgaccacagcagacaccagcatctcatgggctctgttctgatacagaagtagttagcacacagttcttttcctcctcctctttgttccctctcctgttcctgcccacttttggaacatgccaatctgtatcaaaggcatgccttgatacagcaggaaatacccagtaacaccttttatt

SEQ ID NO: 909199 - DNA, 629 bp, Homo sapiens
atagaagaatgaaattggaaccctatctatcaccacataaaagattaaatcaagatggattaaagacttgaatrtaagatgttaaactgtagaagttctaaaagaaaacctatgaaatacccttctgcacattgccccagcaaagaatttatgaccaagttatcaaaagcaattacaacaaaaacaaaaattgacaagtaggacctcattaaattaaaaagtttctgcatagcaaaagaaactatcaacagagtacagagacaacctactgaatgggagaaaatattcacaaactatgcatccaacaaatgtctaatatccagaatctataaggaatttaaggaatcaacaagcaaaaaacaaccccattaaaaagtgggcaaaggacatgaacagacacttctcaaaagaagagatacatacaaccaacaaacatgaaaaaatgctcaacattactaatcaccagagaaatgcaaattaaagccataatgagataccatctcacactagtcagaatggttattattaaaaagtcaaaaagtaacagatgttgatgaggatgtgaagaaaagggaatgtttatacactattgtggaaatggaaattagtgcagccactatggaaagcag

SEQ ID NO: 909200 - DNA, 542 bp, Homo sapiens
atcagacaagagaaagtaataaagggcatccacattgaaaaggaagaagtcaagttattcttgtttacagataatataatcttatacttgcaaaatcctaaatgctccaccaaaaaattattagaattataaacaaattcagtaaagtttcagaatacaaaatcgacatacaaaaatcagtagcatttctatatgggaacagtgaacaacctgaaaaagaaattaaaaaataatttatcttacaatagatacaaataaagttaaatacctaggaattagccaaagaagtaaaagtttgctacaatgaaatctatataactttgatgaaagaattgaagaggatacacacacaaaaggaaagctattctatgttcatctactggaagaatcagtattgtaaacatgtctactacccaaagcaatctacagattcagtgcaatccctatcaaaataccaatggcattcttcaaaaaaatagaaaaaacaatcctaaaatttatatggaaccccaaaatayccagaatagccaaatatatcctga

SEQ ID NO: 909201 - DNA, 609 bp, Homo sapiens
agaattgttcttgagctacagtaaaataaatytctatgttacttttgttgggtaaactttgctgattttctacttgaggttttgccattgaattgcaggtacctttgtaagataatttataacgattgatttagcaagattgatgtccaacaccaaatgttttgaacctgtaattgcctctgcaggcagcaagccatattatctcatacacaagatgaggttcatttggaaattaacccactatttcatcattaatatatggcatatcttaggccacagactttccatattaaagcatgaaaacctttactaaaaattccttttataaaactttaaagacaaacctacatatgcacagcaaacataaaataaaaactgcaaaatgtatttgaccttcaacaactaactttattatatgttagtttgcttctccattttctctcccaactgagtttctgtaatccatcaacctcatcttttactttttattgatatccttagttgttgatgccaacccaatgcgtttttaaaatgtatggttatgcttctctctatagtgatgttgctaaatggacctgctaaattctttaattcaaaggaatggatgct

SEQ ID NO: 909202 - DNA, 620 bp, Homo sapiens
ttggacagtgagaaaagggtaggaaaaaacaaagcattaaatagaaacaacatgatttttcyttcccaagagaaatttttttttttaacactttcttactcctttcagggctctgagggactttgaagcaaattgacccaatgtactaaatagaatagtaattgcatattcgacaggtgttagtgtgtctcttggaggaataggtgtcctggggatagaaagctcagatgaatacgatatcatcctttggacagacagctggaagtcaacggtaagcgtcactacatgtggaacagcataaacaacgtcctgtgctaaagtgaagggacatggctttcccagtaagttctttatttcaaaatcacatatattagggactttttgttttctaatgatgaatcgatattctgcctgctattttgggatgtcactctgactcttgctctcatacaatagaaaaatggaactacatagcaggaatccttggaagattgtattagtctgttttcgcactgctataaagaactacctgagactaggtaatttatgaagaaaagatgtttaattgactcacagttctgcaggcttaagaggaagcatgactaaaaggtctcaggaaa

SEQ ID NO: 909203 - DNA, 582 bp, Homo sapiens
ccatcttagttttatatttaaatagaatcagtgctcgctataatttctccattgctaagttattaaggtgattttttcttaaaagactggattttgctgctcaatagtagaaagggtggtggcttaatagttatagtagttttgttttagaaaggtcttatggggatgattccagtatgcatgcttgtctttcttacttaaagaacaacctgactcagagtaaatatcctaagattaatttatctcattgataaatgtgttcacattgtttcaccatcttttggtataaatatgtggctttggttagagcctaaggccaaaatgatttttttccttgtctgtgacatgctttttctacctgaatatccatttgattctttttgtatttgaagttcagtagctttgtttgattataccttagtgttgtaattattcaatatgatttctcagaaacacattttatttcaatttgcatacmcaagcctttatttcaaaaatgctttcctctttttttcttttgggagcacttattatgttgaagtttttctgttttgttttgttttctatatccattatctcaat

SEQ ID NO: 909204 - DNA, 582 bp, Homo sapiens
ccatcttagttttatatttaaatagaatcagtgctcgctataatttctccattgctaagttattaaggtgattttttcttaaaagactggattttgctgctcaatagtagaaagggtggtggcttaatagttatagtagttttgttttagaaaggtcttatggggatgattccagtatgcatgcttgtctttcttacttaaagaacaacctgactcagagtaaatatcctaagattaatttatctcattgataaatgtgttcacattgtttcaccatcttttggtataaatatgtggctttggttagagcctaaggccaaaatgatttttttccttgtctgtgacatgctttttctacctgaatatccatttgattctttttgtatttgaagttcagtagctttgtttgattataccttagtgttgtaattattcaatatgatttctcagaaacacattttatttcaatttgcatacccaagcctttatttcaaaaatgctttcctctttttttcttttgggagcacttattatgttgaagtttttcygttttgttttgttttctatatccattatctcaat

SEQ ID NO: 909205 - DNA, 645 bp, Homo sapiens
gggacattcttatcaaaaatatatgagcccaaagctaatccaattagttgatggagaaagcataagaattactgcaggaaaacattcctttacaatcacaaatagctcctcagagacatgacacaagaaatcagacttttgttaaattctgtttatggactctcagcagaagaaaagaaaggcataatacaaaaatgaatcaaaacagaatgtggctatgtagaatacaggagtactaagtgaataaaatgtgtggataaaattaatattatggggacttatataacataaactaaataaagaagtaacattgacttgttccagatacacatggatgtgctgaagaaccctagacagaaagaggtacacaaaccatacacattcctcaatccccagagacagctggggattgcccatggctactaccctgtgcttctgctttaaattttgattaaagcgatatgaattcctttcatcttgtcaatgtctccacaattctttaccttcaatttgctttgtatctgtcttggagagatgaaaaaartattacttttattgtggttagagcagacactgacatattcttcctccattctggatttaaaagagaaaacaaaataaagctagcctttgtggcatggagta

SEQ ID NO: 909206 - DNA, 477 bp, Homo sapiens
attctttctactgacaagtctttagaaatcttaactctttcaaccaattagcaatctgaaaatgtttgaatccccctgtgagttttaattcagtcttcccccccaccactcctgtcaacttcaagatatcctgcctctataggctgaaccaatgtatatcatatatgtattaatttaagtatttgcctataatttctgtcttcctaaagtatatggaaacaaatggtaacctcactgcctcaggcacactgtctcaggaccttttgagactgtcctctgccatgatttctcatatttgctcagaatataactctttaaatcttttacagggtttggatgtttatatgttttggctttgtccccacccaaatcttaaattgtagctcccataattccsacttgtcttgggagggacctggtaagaggtaattcaatcatgagggcaggtctttcccatgctgttttcatgatagtgaa

SEQ ID NO: 909207 - DNA, 547 bp, Homo sapiens
gttatataaagggaagttcccctacacrtgatctctttcttgcctacagccatggaagatgtgaccttactccttatttgccttccaccatggttttgagtcctctccagcaatgtggaactgtcagtcaattaaacctcgttcctttataaattacccagtcttggctatgtctttattagcagtatgagaacagactaatacagtaacttggtaccagatagtagggagctgctgtaaagatacctgaaaatgtggaaatgaatttggaactgggtaacagtcagaagttagagcagtttggagggctcagaagaagatagaaaaatgtgggaaagtttggaacttcctaaagacttgtaggactcagaagacaagaagatgtgggaaagtttggaacttcctagagacttgttgaatgtctttaaccaaaatgctgatagtgatatggacaataaggtcttggctgagctggtgtcagatggagatgagaaacttgttggaaactgaagtaaaggtcactcttgctatacaaagagacacgaca

SEQ ID NO: 909208 - DNA, 676 bp, Homo sapiens
cagaaaagctgaaaattctaaaaatcggagtgcctcttctcctcaaaaggatcacagctcctcaccaacaatggaacaaagctggatggagaatgactttgacgagctgacagaagtaggcttcagaaggtcggtaataacaaacttctctaagctaaaggaggatgttcaaacccatcgcgaggaggctaaaagtcttgaaaaaagattagacgaatggctaactagaataaacagtgtacagaagaccttaaattacctgatggagctgaaaaccatggcacgagaattatgtgatgcatgcacaagcttcaatccatagagtggaagaaagagtatcagtaattgaagatcaaattaatgaaataaagcaagaagacaagattagagaaaaaagagtaaaaagaaatgaacaaagcctccaagaaatatgggactatgtgaaaaggccaaatctatgtttgattggtgtacctgaaagtgccagagagaatgcaaccaagttagaaaacactcttccggatatgatccaggagaacttccccaacctagcaaagcaggccaacattcaaattcaggaaatacagagaacaccacaaaratactcctcgagaagagcaaccccaagacacgtaatagtcagattgaccaaagttgaaatgaaggaaaaaatgtt

SEQ ID NO: 909209 - DNA, 659 bp, Homo sapiens
aggtttctcgttaacagctgtcatcctgggaaaatasttgcctgcaaccttatttattcatctgtaaaaggaattcctgaacaagagtatctccaaactcctttctagttttaactaggagtttccagaaatctagcagagaaagatatggggataacaaagtagaagtctatattgcatagtgttatttaggaccatgttctctggagtcagtcaaacctgggtttaaatcctggctccattatttacttactggaaaaactgggataagttaccaccccaatcatctgtttccttgtccattaaacacatgcttataatagtgactacctcttatataattattattacaacaagcaaagagctaataataattcaaagaaaaggtcacgtatgaatgagggctcacaatgcacttacaagaagacagcaattgagaagatccttgaagatgaaggagggtctcagtaggtagaatcagcagacgagagataagagacaaaaatgagagaagttctttctaaaggagggtaaaactcacaaggttttcacacatgtagagaacaggatatacagtacaatagaaccttctacctttcatgagtgatgcttccctgagggctgatcactcatgatcactcatgattgaaactacttca

SEQ ID NO: 909210 - DNA, 567 bp, Homo sapiens
ctcttggtaatttcctaaaatacaattgattagaacttgtttttattaktttccccatacctggttggtgggagttcactctggtttaaaagtgtaagtagatggaagtttaagtttacaggtagcagtaaaaaaagatgctacctaatctgttgcttgatcactgttactctcttgtctaaaaccttcagttactctcaaagataagttcaaatttatccatgctccttcatctggaactgaagatcttccacaaggttaccatcacctgccactccagcttcattttcttatgctgacctaaacatatgctaaactctggacataccaaagtactcactcactgcttcttaatttaatacttactcctactgcctctaggcccttgataatattatttctatccctgatgtgatttagcaccagtgtattggaataaaatagaaagttagtcatctaactttctattttattgtgttaggtagggactgcttttgtatatttgtcactccagaatgtttaagtgagaacagatgtgctgagttaagaacacaccagttaagctaa

SEQ ID NO: 909211 - DNA, 612 bp, Homo sapiens
acattcaagttattgcattttttatagccaatattaattcctctacctccatagttaccctttcctgtgttcttcattccctyatacattttcatgtttccatcaataactattttccttctgtaaggtgatacacttttccagcttttgtttaccaaaaacatctttattttatctatatgcttcaggaatattttaattgaccattaaattctagatgatgattaattttctttgtatttttgtagcttaaaggtgatgagcttcctgaatattcggactgtcttttatcaattttggaaaatccttagccatcatctgtttgaatattgctctaatctgtttcctctcatccttctaagactccagttacacatacgtaaacatgtctgagcgtgtcctgcatatctttccctttttaaaaaaaatctgttccttcttctttctttgtttaagttctggagtacatgtgtagggtgcgcaggtttacagaggtaaattgtgccatggtggtttgctgcacctatcaaccaaacacctaggtgttaagccccgcatgcattagctatttttcctgacgctctcccatcccccacccacccttccccaaca

SEQ ID NO: 909212 - DNA, 647 bp, Homo sapiens
cattttatatcagctgcggtcactgagtgctgactgcagcagytatgacttagtttcatgcatcttctttatgctgggatctgggttaaagcagcagcttctgcctgaaacatgttattctcatggcagtgattcttacagctgctttctctcatcatctattagccagattatgtcacctgaccaagcctgacgttaagcacaaggaaaagaattatcttccaataggaatctcataacaaaggaaagggatacccattcatcttaaaggaaaggcaggaaatccctgggaagaacaacaattaaaaggaggtgatttttcctacaaagaatgcatgcctctgcgagcaaaagtaaaggcaaaacgaccatctcagtggctcctggggccctgtataagtcaattcaggcgctataacaaaagcaaacaaacaaataaatagactgtgccactgtaaacaacagaaatttatcttcacacagttctgaaggatgaaaagtccaagataaattttcatctgattgcatttctggtgaggtctctgttcctggtttgcagacagcgccttctcactgtgtcctcgtatgacttttccttggtgtgtgcatggagagagagggagagaggaagctctgtggtatctcct

SEQ ID NO: 909213 - DNA, 618 bp, Homo sapiens
aggcacctgccaccacgcccggctaattttttgtatttgtagtagagatgggcttttgccatgttggccagactggtcttgaactcctgacctcaggtgatccactcrcctcggcctcccaaagtgctggggttgagcgagagaggaagagaggaagggaggaagggaggatggaaggaaggaagtcctgtttctgaagtgagaaagacatgagttctgtttccatgtccacaactcactttatgcaaagccttaaacaaacttgaacttctctgaggtttagcttcccctcctctaaaaggggaacatgctggttgtcttgcagggttgatttagggatcaaacaaagtcaataggtgaaaataaaaagaaatggggtggaagtaattacgaatcagctcctaattaagaaataaacaatgtgtttctctttcctctccctaaattcagttgtttcccaggcattcgccccatgtgtggactgcagggataatgtgtctctggacagaagtctctctcgtttgactgctgtggattcccgcagactctagaacaccagtctccctcctctcctggccatcctgcagggagccacccttgtagtctttctagaaccca

SEQ ID NO: 909214 - DNA, 559 bp, Homo sapiens
aaacaagaatatgaatccttamtttccattttcaaagaaatatgttccatatttgtcactttagagctccaaatcataatcactgtgctgcatgatattataagattatattattaaaagttataatccatataaattctctaaccattatatttgttagacatagattattgcttccacttccaattttccacaattataagtaatactaaggtaaatgttccttaaatatatatttttgtaagctcaattaataatttaagataaattcatagacatagaagtgcagaaacagagcatgaacacttttaaggcttttggttgaattcatatctgtatgttctctgcaacaatggagaacattgttcttcataacttttacaatcttataggcaaaaaataaataaagttctcatttcaatttatatttttgaatatttttcaataaacttattttgtatttttctttcgtactgaaacaaccagatgataaaacaataattcaataactgacacaccaaattttagacatgtcttggcctttagacttcatgttatg

SEQ ID NO: 909215 - DNA, 638 bp, Homo sapiens
ccagcctcatgaatgatcttagctagatcttctggataactggttacagcttctacatcatcacttgctgcttcaccttgcacttttatattatggagacgacttctttccttaaaccccatgaaccaactcctagctccaaaaatttcttctgcggtttcctcacttctctggaacattcatagaattgaagagagttatggctttgctctggtttaagctttgccttaagaaagtgttgtggctagtttgattttctatccacatcactcaaactttctccatattggccatagagctgttttgcttttgtattattatatgttcactggagtagcattttaattgtattcaatacattttcttttataatcataatttggctaactggtgcaagaagcctagctttggcccttctcaactttcaatatgccttcttcactaagcttaaacatttctaccttgccaagatagaaatcgagggcccaataggaggttttgcagcaatgcaagtgagacataatggtaatttagacatagttgtaacagtgaaggtggtaaaaaataattagatcctggatatattttaaagttagagcaaacaaaatraaaacaatttggatgtgtggaataagata

SEQ ID NO: 909216 - DNA, 709 bp, Homo sapiens
cttgaccacagaactgagaaaagctgtggctgaacaataagcggaacagttttctttgactgtaccacccctcccccaagctgggacagtggcacacacagagaatttccctagacccatggtttctacagrgggaaaagtgaattggaggaggatattccatttcctcgccattttgggtccctttgtgggagggagatatgtgaaggacatgaaaaagttcttgtgtggctattttagaaagtacttgagataggttttatctcagacatccacacacgacctctctatgtgctttgctggctgcaatttgtttgggtttgagaagagtaatttcatcttggtatctgcaacttttatactacaaagtaaaaacctatagtagttgcacaaagtataaaaagaaaggattcaaaacatacaaccacagaaaaccagaaaaaccacaaaggaagacagtacagaggaagaaggaaacaaaggatctaaattagaaatcaaattccaaaacggcagtagcaattcttacctatcagtaactgccttgaatgtaaatggattaaattcttcaataaaataaccaagactggctcaatggatggggaaataaagaatagattaaactctctattataaaaagatacagagtagccaaatggattaaagaaaaagtaaggtctaatcacatgttgcctagtagagacttgct

SEQ ID NO: 909217 - DNA, 645 bp, Homo sapiens
aaatcttgactctacttgttaattttctgtcttgttgatctgtctaatattgacagtggggtggtaaagtctcccactattattgtgtgggaatctaagtctctttgtaggtcwctaagaaattgttttatgaatctgggtgctcctgtattgggcgcatatatatttagaatagttagctcttctcattgaattgatcccattaccattatgtaatgcccttcattggcttttttgatctttgttgggttaaaatctgttttatcagagactaggattgcacatcctgctttttttgtttgtttgttgttttgttttgttttgtttttgctttccatttcctttgcttggtcagttttcctccatccctttgttttgagcctatgtgtgtctttgcatgtgagatgggtctcccaaatacagcacactgatggatcttgactctttatccattttgccagtctgtgtcttttaattgggacatttagcccatttacacctaagggtagtatcattatgtgtgaatttgatcctgtcattatgatgccagcattgatgcaatttcttcatagtgtcattggtctttatatttttgtgttttttcagtgactgttactggcttctcctttccacatttagtgcttc

SEQ ID NO: 909218 - DNA, 550 bp, Homo sapiens
atgactgattggtgtacctgaaagacatggggaaaatggaaccaacttggaaaacatatttcaggatatcatccataggaactttcacaacctagctagaarggccaaaattgaagttcaggaaatgcagaaaaccccagtcagcacccagattcataaagctagttcttgaagaacttcaaagagacttagactccctcagaataagagtcagagactttaacaccctaatgaccatattatacagattatcgagacagaaaattaacaaagatatttaggacctgaactcagcattggatcaaatggacctgatgcatagctataaaactctccacccaaaaccaacagaatatattttttttattactacatggcacatctaccattgaccagataatcagaagtaaagccctcctcagcaaatttgaaataactaaaataacaaaaaacagtctacacagtgcaatcaaattagagctgaagactaagaaattcactagaaaccatacatttacatggaaactgattatcctgctgctgagtgact

SEQ ID NO: 909219 - DNA, 635 bp, Homo sapiens
attccacagtgcttgtatcattcctacgttctgatttcagaatgttctttactccaataaagcagatcagtacatggttgtcattttcttcctccatacttacataaagacacttgggtaataaaaaatgatgaatggtttttgtgtagatcatcacccttattaacatgggcaaaaacaatcaatattttattcacaggttaaagtagtagctggttttgagagacccagctttctgttgtatttcatttttctctagtccatagttgaaaactgagtgcgtagtgattttgcttaacagtctatcaatgggaatagagtaactttcaaagtggagaggctgtcgatttttctttcttcctgtaattttccaaatgtgctgtataggaagctaaattttatatttgctgaagtttaataatatagcatagtggctagaaccacaaaaactatgctggttgggtttgtatcttaccagctattgatcttggcaacactcactcttacaatgcctcagtttcttcacctatgataaggcaggtgtgagaaatacaggaattaatagttataaagtgsataagatagaacctactatttaaacattagctatttttgagctgtcttgctgataatca

SEQ ID NO: 909220 - DNA, 678 bp, Homo sapiens
taaagcatggcatgctctgaagtcatattagaaaagtcctttgctttcatgcaaaactagtctccgtggcttttcattgtgtagatcgggttaaaagcagaatataagaagcaagtttttggatgagatgatagaacttacgtagtacttgtctgtcaatcctaaaagaattatttgtggccaaatcctctcctctaaccaccaaataaggagcttgacttcattctcactgttaagaatcagaaacccagtttagaatatccaattcctggtgaacttttaaaaattaatatatatcttgatactttataatctattgtgtggcatccaacgaatgtgaggtaatctggggagttagaaatgccttgcatttcgtgtggaaaaggtgtagtcgtaagtttggcctgggaaggttaacactgtctttgcacatagaaagctaagggcagtgtcatcatcattcgtttgtgaggaggggactgaaaaagcaaaatcatcactactagcctattctaaaggatcttaatcccattccatttttcagattttttttttattatgtagtatcccctggatataatmtttttggtgaagggggatgtctctaatttccacgtggtaccccctgtcatatacaggttatgtatctggcagtctacagctgcaattcatggctgt

SEQ ID NO: 909221 - DNA, 640 bp, Homo sapiens
ttcatgtgatatatattacacacattgcattattaaaaattcttgayagaaaagaactttcgttttgaccaggtgtcaatgagaaacaagtctttcacttaaaatgttgcacgtctgatgactggaaagatttgccacagattagctctggtctccatgaacttcaagttttgtttcccctcctctatctagcttttcagagtaccaggagcatgattcatattcacattgcagcataatctctggcccagtatattcacagcccgatatctggtgagttggcatagtgggtggtagaaagttcttggaagccatttctgcacttggagcagccagaagaaatttgactctatcccagaaataactgagaaccatgatagttacatagcaccaaacccaaactatatgtatccccaacttaatttactctcagctagatctccaaagtgaccttctccactcctatacttttgagtggtagggtaagtatgaccaagaataaattacagtagaaagaggcagtggtcttgccaatcaaaattaaatatattacttttacaacttgtacaactcatatgaataaactagtcctttgaaagacctctgtgcaagtgaggggcagtgaatcttgtatctcatt

SEQ ID NO: 909222 - DNA, 663 bp, Homo sapiens
aacagaagatgtataattttcatctgtacatggcaaatactctaaaatcaatcacatgttcacccataaagcaattataaacaaatttttaaaaaagctgaaatcataccaaccatactctcaaaacacagagcaataaaaatagaaatcaaaactaagaagatctgtcgggccaggcacagtggctcatgcctgtaatcccagcattttgggaaggcaacgcaggaggaccacctgaggtcaggagtttgagaccagcctgaccaatatagtgaaaccccatctctactaaaaatacaaaaattagccaggcgtggtggcaggcccctgtaatcccagctactgggaaggctaaggcaggagaatcgcttgaacccaggaggcggaggttacagcgagccaagattgcaccattgcattcgaggctgggcaacaagagcgagactccatctcaaaaaaaaaaaaaaaaaagaaagacagaaaaaaagaaaaaaaagaaaaagaagatctgtcaaaaacatacaattacatggaaattaacctgctcctgaatgacttttgggcaaacaatgaaattaaggtagaaatcaakaaattctttgaaactaagaaaaacaaagaagtaacatgccagaatctctgggacatagctaaagcagtatt

SEQ ID NO: 909223 - DNA, 444 bp, Homo sapiens
cacatttgaagctattgggatgaaacgaacrtattttgcatgtgagaaggacataaatttgtggggccatggatggaatgctatgggccgattgtttctgtcctctcctaaattcctgttgaaacttaatccccattgcaacagtattaagagttggggccgttcaagaggtgattaggccatgagggcttcttcctcaggaaaggaaaagtgcttcataaaagggctggagaaaactagctaggcttcttttttttttttttttcctttttgtcccttctatccttctgccatgtaaagactcagtattcaaggcattatcttggaagcagacaccgggccttcactagatatctaacatgctggtgccttaatcttgggctttccagcctttagaactgtgaaaaataaatttccatggtttataagcagaaagggactgag

SEQ ID NO: 909224 - DNA, 623 bp, Homo sapiens
tgatgggtccaatagaaacttgtgttcctcgcctggggacaatggtggggggtgttgcaaaatcagtccaaggcrtctctgtggttgctgagcaatgcagtgaggaagaaatggaaaataaatgctaagtttcctggcaaattatgaactctggatagggataggatggtggggagacaaatagtatgaaattatcaaaccgtaaaatccagttggaaacaggagggcaagatcacatgcagagtagttccaattcacttactcatgcaggcaaggagatgggaaggcactggcccaaggagaagccagcttctcctgtcccagccgaattatgtttatctttgtaatttgattttgtcatggaaacactgtcagtgttcagtgttctttgtgcaataatgttcatgtcaaataagaaagcaaagtgatgggaggaggcatctgtagctatgtgttcttcacactgtattgtttgtgatattcaataacacaaaagtaaactgtgagtgagagtaaattccatggaccctactgtgcttttgtgggtgtccttactggttttcctcaaaaggtggcacactcttttttttgttgttgtttgttttgttctcatgtccattaaa

SEQ ID NO: 909225 - DNA, 631 bp, Homo sapiens
ctcctaaatatcatcaccttggagattaagtttcaacatataaattttgggggaaagcaaacattcagaccacagcattttttgttagtgtttcctataaatggtatggctattcactcctttggcaatcattttgttggcttgtctatcttttgcttataaacttataatatttctttatacaaaatatatacttatcctttgataggattatgtgcagcaagaatcttttccaagcttatggcttatcttttcacataccatttttggaatcttttaatgagctactattcttcattataataaactttaattaatagcattatatacattcatcttatggctagcatttttgcatcttaattcagaaacctctacctgtcataaggtataaaagatagtttccaaaattttcttcttaaatgttggcatttgtcttacacagttaagtcttaagtccatctgaaattttgctttttacatctgttaacaggttccaatccaaatttctttcctatgaatacccaattgtcccagaataataattaaatagcctactcaataaccatttttttgctatgcgaatttttttatattaygttgttatatatatatatgtatatatatgtgt

SEQ ID NO: 909226 - DNA, 580 bp, Homo sapiens
gatctgtaatttaagcaaacacctctcactggattgtacagaatataggtagaaagactgggaaatgcagggaaagaaactaacatttattaaatgtctcacctgcattatgtgatttggttgtcattgtttatagatgaaaaactcaaaacaaaaataattaagaaaacttccatgaccacacaattggcaatgaatcctcagaaaccatccagaggaaagaggatctggatgagtactgatgcagacaatttagcaagaagtgtttggaaggtttggaggcatcatgtctttatttttatttgtaaattaagcaatgatatttggttgaggctgaaaatgaataggggatatgaaaatagtagaaaacattttttagtagccaggaaaatggaaggagataatcaagagaaagcagtaaaaggattggtaagaggtgttacacatctattaaatagtaataaaagcagataaaatttattgagttcctattatataccagacactggctaagcattttatatgcactgtctcatttaatcctcaaracgtctaattaggggagtataactatatatcc

SEQ ID NO: 909227 - DNA, 621 bp, Homo sapiens
ggggttttctaaatataaatcatgtaatctgcaaacagagataatttgactttctctcttcctatatgaatattctttatttctttctcttgtctgattgccctggccagaacttccaatactatgttaaataggagtagtgagagagggcatccttgtcttgtgctagttttcaaagggaatgcttccagcttttgcccattcagtatgacattggctatgggtttgttacaaatagctctcattattttcagatatgctccatcaatgcctagtttattgagagtttttaatatgaagagatgttgaattttatcaaaggccttttctccatctattgagatgatcctgtggtttttgccattgattctgcttatgtgatggattacgtttattgatttgtgtatgttgaaccagccttgcatcccaggaaagaagccgacttgactgtggtagataggctttttgatatgctgctggatttggttcaccagtattttattgaggattttcgcatcgatrtgtcatcagggatattgacctgacgttttctttttttgttgtgtctcttccaggttttgatatcaggatgatgctggcctcataaaatgagttagggag

SEQ ID NO: 909228 - DNA, 683 bp, Homo sapiens
atttagcccatttacattttaatattgttatatatgaatttgatcctgtcatcatgatgctagctggttattttgcacattagttgacgcagtttcttcctaatgtcattggtctttatattttggtgtgttttgcagtgactgataacagtttttcctttccatatttagtgcttcccttaggagctcttgtaagacaggcctggtggcaacaaaatccctcagcatttcttgtctggaaaggattttactcctcatttgcttatgaagcttagtttgactggatttgaaattctggattgaaaattctttaagaacattgaatactggcccccactctcttgtggcttgtaggatttctgcagagtgatctgctgttagtctgactggcttccctttgtaggtgacctgattcttctgacagtgcttaacattttttccttcatttcaaccttggaaaatctgaagattaggtgtcttggggttgatcttctcatggagtatcttagagttctccatatttcctgaatttgaatgttggcctgtcttgctaggttgggkaagttctcctggataatatcctgaagtgtgttttccaacttggttccattctccccgtcactttcaggtataccaatcaatcataggcataatcatttggtcttttcacatagtcccatatt

SEQ ID NO: 909229 - DNA, 566 bp, Homo sapiens
tttgaattataagaattgatatggttaatttcatgtgtcaacttgggtgggccatagtacctggatctttggtcaaacatcacaggtgtttctacgcaggtattttttggatgggactctgagtaaagcagattaccatccataatgtggctgtaccttatccagtcagttgaaggccttaagaaaaaagattgacctcctgctaaaaggagagaattttgtcagcagactgcttttggatttaagctacagctcttctctgggccttctgcctgccagttcgcgctgcagaatttggacttaacagctgccatgctcatgtaaaccaattctttaaaataaatctctttatccctgcatatttatacacacacatacatgctattgattctgtttctctggaaatccctaatacaaggataaatttttaaaaattcctacaagcattttggttgggaaatcaatgactcaaacagccctacccccaccaaaaagtaggaataacaraatatagagttctctttgccatccttaattgtgatttttgctttctttttgacacttgt

SEQ ID NO: 909230 - DNA, 607 bp, Homo sapiens
aacatttttaggaagctttccattctatcccaatccagaaaacatcagggccaggcctgggagcttagtcactattgatttcctttcaaagtacatctgagttccaatcacagcccagcccccacaaaaaggaggtaatgtggaaaaagccaccctcaggaatcctcttggagagagatggttaaaaaaaaaaaaagcccacttagagaaggaaatacatccatcgtctgtgataaggcccccatacgtgagcctccctaaaatacctgcagctcacctcgttcagtggggtgagtgtgttttggaagaaaggctgcaccacaaccgcaaagtcctcacgctgtgtgtattggtgccagtaggagaaactggagatgccatgctggggacagagagagaagctgctcaaccctcctggcaaggctgcacagacagggtccagtcctgctgccttggattggttgttgacgggagtcaactcaccctaaargacagtgactttaaggggctactctagtgggatgcaaacatacttttattctccacccattcatgggcacggacatttcaaagccctatgctggttctcaggatcagagatgagttg

SEQ ID NO: 909231 - DNA, 622 bp, Homo sapiens
tatgtaatttttattattgacactttygggtggttattaacaacaataagataaaatatattttcaacttattcttgtgcctgtcctcttcaagaaatagaatcttcatacttgttagcacactttaaaggagaaaatttaaagagggagcacataaatctgtaattgcccacacaattctaaaggaataaaatgtatcaaaatagaaaaaaatcttgattttggcataaagtttccctaattaaaccaaagaggtgcataataaaaaggaaaaaaaaaactagtttttttttatagtttgaaaagaaagcagaagcaatatgagtcagactacagaatgagcatggacaggaaaattgtcaaaatggacactaacatatgtcctggaaaactcagccctaaggtgtacattgacatttaatggtacagcaacaaggagaagttatttttttttggaattataaataggaatgaggaagaataagctgaaaattggatgaacacttaagttcaaccattcttgaaggtaggactggtggcatatgagaagcttagggggtcaggtaataggcattattataatttgaaaagtatgagcaacatagctactttcatcaattca

SEQ ID NO: 909232 - DNA, 637 bp, Homo sapiens
aggaaggttgaagtcacttctaktcactattaagtcagttcttcttcaccttaataattagctttcagtatcctggaagacccaggtatattttggaatttcaattatgtataaccatatgggttatatatagattttttcctacaaatttctattttttcacttcctcattaccaacctaaaaaatctctcctttaggaataaaatgttgcttattaggtgtcagtccaaaagttgaacattcacatattttccaagatggctgtgaaaaaaatttatttttttcaagtatgagggaattcatattttaattattacagaatctctggaaatcagtattttatcttaaagtttgaaaagttaggcttaatatataatagtatgtttaaataacaaattagaaatgaaaatttgttttaaaactgctcaattagcaacatctatgaacatctctcttcaggagtaaaacaatctctaatccttttgttgaatttctttgtcattggctaatatgagggcattgttatttttagtaagaaaatttattttattcacatttattatgatagctgatgtgatgttataactctttttgcatatttttcacttccctgattgatatccatgtctattaatt

SEQ ID NO: 909233 - DNA, 620 bp, Homo sapiens
gctgtatttacccaatgcctgtaccctcattgtatctaggaagtaactaacttgcttttaattttactggctcacaggcagaagggacttgcctkgtctcagatgagactttggacttggacttttgagttaatgctggagtgagttaagactttgggggactgttggaagggcataattgtgttttgaaatgtgaggacatgagatttgggaggggctggggcagaatgatatggtttggctgtgtcccacccaaatctcatcttgaattgtatttcccataatccccacgtgttgtgggagggacatggtgggaggtaactgaatcatggggcctgttaccctcatgctgttctcgtgatggtgagtgagttctcatgagagctaatggttttataaggggcttttctcccttttgctaggcacttcttgctgccaccatgtgaagaaggatgtgtttgcttcctcttttgccacaattgtaagtttcctgaggacttcccagccatgctgaactgtgagtcaattaaagctctttcctttataaattacccagtcttgggtatgtcttgactaactgagagcagactaatacactcagtctcttgaaaaataaaacc

SEQ ID NO: 909234 - DNA, 659 bp, Homo sapiens
taattttgacaaagcagccaagaacacacaaatgagaaatgccagtctttccaataaatgatgctgggaaaactggatagccacctgcagaagaatgaaattagacctttctctcacaccatatacaaaaatcaactaaaaatggattaaagatttacatgtaagacccaaaactatgaaactactaatgaaaacatagaggaaaactgcatgacattggactgggcaataactttttaaataggatccccaaaacacaggcaacaaagcaaaaacagacaaatagaattacatcaaactaaaaagcttctgcacaacgaaggaaacagttaaaagagtgaaaagagaacctacagaatgggaaaaatattttcaaaatatacatctgataagggtttaataaccaaaatatataaaatactcaaacaactcaacagcaagaaaagaaacaaacaaaaaaccaattacagaacaccaagaacatgaatggacgtctcctcaagagaaaacatacaaatggccaacaggtatgtgaaaaaatgctcaacattactcatcacgacacaaatgcaaattaaaaccaccatgagatgtcacctcacacctgttaggataaaagaccaaaaaagagaagtgtcmgtgaaaatgtggagaaaaga

SEQ ID NO: 909235 - DNA, 592 bp, Homo sapiens
ccttaataattgaaacttaagcattcattaatataaaacccagtcatatttggggggcatagaaatggagaaaactgtgacacaaagaaagatctaaagtacccagacatgattatacagaaaaattggtattcttatagactgagctatttttaaaagttagtgagttttttagtttcaaaatagcaaaatgctttctataataacttacttcttctagattagcactaaattaagttttataaagcctgtaaaacatgagagcctttcttgatatgaaaataatttatacttaacaataaaacatgagcatgtctggaatcatctgggctctggatatgatgaatttgtttaaagagctatacaacctacaagatatttatgtctgctagccagacacaaacattttctaatgagatagaagacaggttgattttttttttcttttttttttttttttttttagatgaagtctcactgttgtcccccaggctggagtgcaacggcrcaatcttggctaactgctacctccgcctcctgggcccaagtgattctcctgcctcagcctcctgagtagctgggattacaggca

SEQ ID NO: 909236 - DNA, 642 bp, Homo sapiens
ttgcttggtttgtaatcgttagttgtagtgaaatgagaatgcacccctggagcagaattcctcaatgactagcaaagcagcccagccatttctctggttaatggatttaacaccatcaattactgktgtcatatttgctttctaccagactattgagtgtcgtggttctatggagattagagtcactttcataggtcaagaaacaaacaacatcccctagaagtggtcctggtccatttgacattgatagaacgctgtagatcaggggtgtccaatctattggcttttctaggccacattggaataagaagaattgtcttggactacatataaaatacatcaacactaacaatagccgatgaaccaaaaaaaattgtaaaaccatatcctaatgttttaagaaagtttacaaatttctgttggcccacgtccaaagttgtcctgggccacatgcagcccatgagctgcgagttggacaagctcgccacagattcaaaagagttcttagtaaaagaacattgccagggaagaaactctagaagaactcaaaaagaaaacaaagttgatcaattctccaatggttagtggcaagaatggtttcatggttgtgagaatgaaggcaggcaaataataaagtgcatt

SEQ ID NO: 909237 - DNA, 649 bp, Homo sapiens
tttttaaaatttgataggaaagaaaatgattacatacataccctaatacttttttttaagccttggggaaaaatgcaactaggagtcagtcaagagaatttaaaactttctcttactctacacatcagagagtacatcagtctgctatccctttgctacaactgtgagaagtaaagtctgaaaagaaatgtgaaagtctgaaagcccactaaatgtgaataataatagcgatttgagttcatagaaacaggcaaacacattcgaaattccttcatcacaaatggaaagaaacacaattaaaagttttctaatactcccaaacttgtttaaaattagctgatgctttgaaaattacttgaatgtttttataaggaaagtgatgctgatcagcacagttgtagcatttccatttggccacttgacattcttcattgttggcttggagtttttattctttgctatttttttgtattggctttgcaataaaaaccaccatctatttctcttttagtacaaacatatttccagtttaattgttgcaataaaaaatgttctatgtcgattttcctaaaacaacatattaaaataatgataaatartaaaatcgatccattgataacaattagtttgaagtgttcatgcatactaa

SEQ ID NO: 909238 - DNA, 716 bp, Homo sapiens
taggattagtggaaagccccactaggatcattataatgaaatctctcatgtatgaaggaaagaycatgccatttttgcaaagtcttcttattttggataagagctgcctgctttttacagggtcctggtagaaattgttcagcttaccatcagagtcgtgtggtcatgcatcttgaggcacacatcagaaattacgtgatttccatcccaatgaacaagtgagcccacggacacttcattatgaaggggaagtagctgtataaagtagggatcagacaggtctagtagatataagttgtttgagcaaaatattcatgtttaccaatgtgccttctcttgcatgtggccccttcatggccctatggaaagagaccagtgatcatgtgtttctccagagaaaaagaactaataggagatagataattggacagatgaatacatgaatagctagctagatgaacggatggatgggtgacagatggatgaatagatggatagatggatggatgaatgatagatgaatgaatgaatggatggaaaaatggatgaataaataagccaacagatagatgatgaatagatagatagatagcaagatagataagatgtattatactaagtgtcccacatggttatagaggcttagaagtcccacaacctgctgactgcaaactgagaaccagaaaagcctgtaatgtaattcagtcgaagtctga

SEQ ID NO: 909239 - DNA, 743 bp, Homo sapiens
attgactttatgagatcagaaataaaacagattacatttttaggcactatgacatggtaacagaaatgatgaattaatgtgtaaccagagtcaagtgtgctcattattatcccccaaaactgttagaactaataaactaatgcagtgaagttggaggacagacaatcaacctaaaaaatcagttgtgtttctatatgctaataatgaactctgaaaaataaatcaagaaaacaattttatttaccatagtatcaaaaaggaaaaaattaatcaaaccaaggaggtgaacgatttgtacactgaaaactataaaatattgatgaaagcagtcatagaagaaatttttaaaatgaaaaaatgccccaggtttatggatcagaagaatcaatattgttaaaatgttcatactgccaaatgtgatctgcagattcaaagcaatatctatcaagataccaatagcatgtttcatagaaatagaagaaaatctaaatttagtatggaaccacaaaagaccccaaatagacaacacaatcttgagcaagaagaaaaaagctagaggcatcaaactttctggttttaaactatatcactaagcttaatcaccaaaacagcatgataatggcatataaacacatagttcgatgagagaaccatgaaagagtccaaaaatatatgcatrcatatacagacaactaattttcacactgggaaagaaataaactcatcaatatatgacaggaaaa

SEQ ID NO: 909240 - DNA, 630 bp, Homo sapiens
gctttacagctaattcattttctcgcccattagtgggagggggaggagrtggccattcacttaattcagcaggtggagctgatgggctagtaaaacacaccctttttagtttccctttcttttctttaatttcctccagtttttgctcctcgcatctagaatctaaggttagttttttacactcattttcctcttcctcatctgaatctgtctcatcatctgtttgaaatggcccaagagctgcctttatcaatgcccacactgaccaaacagaaactggaattttggctccttctttatacacctttttaaaatctctgccaattctttcccattcatccaactccacagtcccttgttctgagaaccatgggcaaaactgctctactctactaaagagtgttaataatttctgagtactagctttcactccccctctccataaccaacaccttagaaaatttaaataagcagaatgtttgctttcattctgtcccattgttaccctggttctcccaagcacccagcttacccactgagcttctttcagtcatccttgggtgtcctttgaccatgtgtcctccacttccacatgctctggcattccttcaccggggtcttcgtagccaa

SEQ ID NO: 909241 - DNA, 531 bp, Homo sapiens
cgctaatttgagggtgaccttgggcaagctgctccagtttcttgggttctagccacccacccttctactgccaaaaaggaggggctccgattaggttatctgatgatccttccagctatgacatcagcttatgttcccaaaagctgctgtacgatgaggcctcctgcccttcaggagccaaaacaaaaagacacactggaccatttcatctccaccaggagcttaaggaacgttggaggccgcgtctaacctcagtcccccaggaaaacactgtctgagcctgcccagagtgcaagcagccccccactcctttcggaagccagccacgcaccgccccacttcaggtgcccatccatcagctgggtttcctggggaaacagagctcattctttagctctcttttatggcttttacccagaattgatttgaataaatcagtctaatgctgtctctacaatggaaccaattgtaaaagagctttatttcctcagctttraaagcaggttggagctgccttcttcccacagcaag

SEQ ID NO: 909242 - DNA, 519 bp, Homo sapiens
attagtagtttagtagttttactactatttatctttgggcataattaagttcagtatccaggtcccagctgtaaagatgtgtgtgagttgtagaattccagragaccctggtgggtcacacaaataccaccccacagctatccagtgaccttatagagagctctgatcttctggaattactgggaagataaaaagggtgtcagcagaataatacaaaccatttgtcacctaaattctctacctgtatctggcagggaaaacccatcaccattagaagggccttaattggaagcaataccctaagataatgaccattttcttggtttgagcaggactggaatcctccctttgacctctcaaagtcacaccgcggcgggtggagggacgtgggactgcctctgtcaccgacccatggtgtagttcttgccctctgactccctcttccccaacttccagaacattctctaggacattttctccttggctttcagaatccctatctgcctttttatgccagaa

SEQ ID NO: 909243 - DNA, 671 bp, Homo sapiens
aagccactcaggatatagtattctgttacagcagcccaartggactgagacagtactctttgtcatgtgtggccactgaagtctctgcttgattagcttattggcctgctattgattgaacagatttccttaaacacctggaatcagtcagtctcccaatccttgccaagggcctgtgtgtgcatgctgggacatgccttccacattcagccaggcagctgacaactctgccttcgccttcacttcctgctgacacagaagctcagggtccatcagaagtggcagcttaggggcttctcgggttttttctgagtttgcacagagcagagccttccagattctctggaatgtgttggagcatttcaaagccccatggacatctcatttttcagcttttccttttaagcttccttgttagcctgttgtttttcccaactatgtagcagtcaggttaaacagttgcctgtaaatattttcaacaaacatctctgggaaaaggtttttctctctaggcaagctctgaatctggtcaaatagagacagcctttcaagtggaaccttccagggaaccaccagacaaaccaaagaattacagttctttgggaaggaggctttgaagaagctccacctccattctgctttttctggtggctaacaggctgctggttatc

SEQ ID NO: 909244 - DNA, 569 bp, Homo sapiens
atactgttaatctttctctcattcttccccaaggagacctccagcyttttaccagagtaactgtgcactggggaaagagaaataattagatttttaggggactattggacactggatctgagctgatgttggttccaggaaacccaaaacgtaattgtggttctctagttaaagtaggggctcctggaagtcagttaattaatggagtttagctcaggtctgacttacagtgggtccattgggtcccaaaactaaacctgtggtcatttgcccagtgtcagaatacataattgatatagacatacctagcatctgccataatccccacattggcacctgactattagggtgagggctctcatgtgggaaaggccaaatggaagccattagagctgtctctaccgagaaaaatattaaatcaaaaacaatatcccatccctggagggattgcagagattagtgccatcatcaaggatttgtaagacacaagggtggtgattcccaccacatccccattaaactcacctatttggcctgtgcagaagacagttgtatcttggagaatgaca

SEQ ID NO: 909245 - DNA, 643 bp, Homo sapiens
ctcagttctaatttgattgcactatggtctgagagaktgtttgttgtgatttcagttcttttgcatttgctgaggattgttttacttctaattatctggtcaatattagaataagtgctatgtgttcttactagaatgtatattctgttgatttggggtggagggttctgtagatgtctattaggtccacttgatccagagctgagttcaaatcctgaatacccttgttaattatctgtctcattgatctgtctaatattgacagtggggtgttaaagtctcccactattattgtgtgagagtctaagtctctttataggtctctaagaacttgctttatgaatctgggtgcttctgtattgggtgaatatatatttaggctagtagctcttcctgttgcattgatccctttaccattacataatgcccttctttgtcttttttgatctttgttggtttaaagtctgttttatcagagactagaattgtaacccctgcttttttatttcctttccatttgcttagtcaatattcctccttccctttattttgagtctatgtgtgtctttgcacatgagatgggtctcctgaatacagcataccaatgggtcttgactctatccaatttgccattctgtgtctt

SEQ ID NO: 909246 - DNA, 582 bp, Homo sapiens
actccacgtggttttagcaattagacctttattaataccatggagcagctggaactagaaatagtctcaagtgcttacattctctgaacataccaatttccagagtgggtggcagctgttgaggcccaggtttatccatcttgggccaaaattctcatactcttgaccccatgtattggacctggattttgtggctccccaaaaacatggctacaaagctttgttctgaaaaatcaaagcctcctcattaaagtaagcatcttctccccctaatcctttgtcccctccattgtcattagttcagattttagaaaagaactactcttcctgtacttggggttttgtttctccccaagtgggagagttactggttcataacgctcttacacctgtcccctacccaaggcttctccctgtaaccttgggccaggccggacttgacgagaagacaagaattgatctaatccaattgcctttccagtgaaacaggctccgtttccccaggcatcacttacttatgggatggccgatttccatgccaggmcagctctgggtattttgacgttctttcttgtattccac

SEQ ID NO: 909247 - DNA, 578 bp, Homo sapiens
acaaacacaaaagggatcctttagaaggtatttttaaatctcccactgaattgcgtgtgtcatatatatatatatatatatagagagagagasagagagagagagagagagagagacagacagagagacagagagagagacagagacagggccttgctctgtcacccaggctggagtgcagtggtgcaatcacagttcactacaaccttgaactactgggctcaagtgatctgttccaccccagcctccaaagtagctaatttttttaagtaaaaaaaatttttttttttgtacagacaggatctcactgcattgcccaggttggtctcacatgcctggcctcaagcaatattccaacctcggcttcccaaagtgctgggattacaggcgtgagcaaccctacccggcctgagttgtgtttttaaaatcaaggttctctttgcatgtctaatagtttttgcttattaaaacacatagctgctggattgtgtagtgtgtatattttttacataatttattcaacctagcctaataaaatactactactactatttctgcatgtgtgtgtgtgtgtattt

SEQ ID NO: 909248 - DNA, 627 bp, Homo sapiens
ttagtgtgcttggcgaatcttcagtgagtgatgtgggtacagtgtcgccctcactaattgggccatggcaccctttgtgtcaggagggaactaaagctcagaagaacaaacattggcaaaggctgctctaggaaccctagcagggccagcaacccgcttctctgtgggtcaaccctccccttgtgtaaacacagacccaccgatggagtctgagtcaatgatctttgagggggctccaattttctcagccccaaataggacatcattcctggatcccctaggcttcaggggccctaccagtccactacttacatcagtgcttttgacaactcttcattgtgccttttcacttcccatgttaaactttctgatttgtttgttttcaccttatcttctcatttacaagcctaggagtctccacaggggaccatataagctggttttggccagtgtgctactacattgtaacaattgaaacctcctgagcatttagggtgcaggagctgaagatgagaaaaagaaagacttctcatagaaaaagaacaaatgtgcgggctattctggtcctttctaagatttttgcttgyggggaagagttggagggctagggagatggatgtggaggag

SEQ ID NO: 909249 - DNA, 606 bp, Homo sapiens
atattgtttcaaatgactggatcttattcttttttatagctgaatagtactctattgtgtatctgtaccacattttctttatccattcatctgttgatggacacaggtgacttccaaatctatgctattataagcagagctgcaagaaacataggagttcagatatttccttgatatattgatttcctttctttaggctatttacctaggagtgggattgctggatcacatggtaactcaatttttagttttttgaggaacctccaaactgttctccatagtggttgtactaatttccattcccaccaacaaatgtccccttttctctaaatccatgccagtgtttcctattgcctgtcttttggatataagccattttgagtggggtgagatgatacctcattgtatttttgatttctgtttctctgatgatcaatgatgttgagcaccttttcatatgcttgtttgccattggtacgtcttcttttgagaaatgtcyattcaaatcttttgcctatctattgattgaattattagattttttttcctatagagttatttgagctctttatgtattctggttattagtcccttatcagatgggta

SEQ ID NO: 909250 - DNA, 674 bp, Homo sapiens
atacacctgaccagagtatgacaaagctttcagcccatwccaagtaaatatttaatattagactccctagaatttttattacctctttatttccctattctctattattttgggaggaaaaaatatcctgcttcttcaagtctcttgtaattgctctcctttttattttatcattctctcatcaatttttgaccatcagagagttcttagcttatgatagacactccataaatatttaggggttattggactaaggtatggatgatactaagcctccttcagaatgctttttcattcatatgtctgctactcttgattagaacttacaaggacatcaagtatgcacccccatttcctaatgataaaatcatatgcttgctcccacttcacccacattgtgtaccatgcagatgcttcaatagcatcttcaatgttttaaaagtgccgcctccaaaattcaggtgttaccaatataacagtattagaaggtggagcctttaagaagcaattaggtcatgaggctcctcttcttatgaatgagattaagacccttacaaaagaggcttcacacagagttcagatcatatgcccttctgccttccaccctgtgagatacaacaagaagaccatcaccagatgctagctccttgatcttggacttccaaaccgctaga

SEQ ID NO: 909251 - DNA, 576 bp, Homo sapiens
ttgctgagataagctgtgggaagcacttagtactgctcctagctcatagtaaatgcacaataaagctacaaaacagcctaaaccttacttattacatttccccatattgagaaccaaatttctcaagtcagtttgggagaagctattgtaaataaagctctgtgaagtgctgagccatactttcatttccctatactcatgaagtggggcacgtatccactgagccctttcgggtgaggacagcgtgttttgcctgagctcactctagtaagcaaagaactgcttgtgtcctttgatctggtaggcaagtgctatagtggaaaacctagtgataagtaggcacagaataagttataaattttcccaaagatgtcattactgccttccacaaagtttgagggtctacatgaaaatcagacaagtccatctccatcttcaatccyttacaggtgaggaaagtgaggctcgaaagataaggccatttgttacatagatgggaaataatggagctgggatttaaactccaattgttctggcttctaaccttaagccctttccatgcaacctttaatatca

SEQ ID NO: 909252 - DNA, 463 bp, Homo sapiens
tgcaaaatattatttcaatatgtaatcagtataaaatttactaatgagataccttacattctttttcatactaaattttctaaatctagtgtgtgtggtttttttttctttttttttgagacaaagtctcactctgtcgccaggctggagtgcaatggtggatctcggctcattgcaacctccgccttccaggttcaagtgattcttctgcctctgcctcccgagtcgctgggactacaggcgcgtgctaccacgcccagctattttttttttatttttattttttggtatttttagtaaagatggggtttcaccatgttggtcaggatggtctcaatctcttgacctcgtgaaatgcctgcctcggcctcccraagtgttaggattacaggtgtgagccaccgtgcccggctatgtatattttgtacttagagcatatatcaattcagaccctattttcttt

SEQ ID NO: 909253 - DNA, 619 bp, Homo sapiens
cttttgtatgtggcacactatgtgaatacaaaagcatagacgagagccattttccttatgaagtatacaaggtagttttaaaggaaagcaggataagtaataaaagcattaatacattataagaaggtaacatgtatttatgtgtccaactagtatcaaggcaagtgtgtatgatatgagagaaaaacaatatgaaccaagatatttgggaagacgttcaagcaggaacggaactctgagctaagttcctttcagagttctgtagagaaacagaactaattgttaaatattcaaaaaattttgagttgattgtttaaccttggtaaaccttggtagcttgaagcagaactttggtgtaaaccttggtagcttgaaccagaccacagtggaagaatttatgctagggaaattgacaaaccctgtaaagcaagatacttttaatagagctggtttactagcacaccactgccctgtttcattattaataaaacaagaataatagtatgtgcctgccaatattattgtgaagggttcagatgatttgtaaaatgtctaacatgttgtctactatgtagtcaattctcaayagatgacagccatggttataaatgtaatactg

SEQ ID NO: 909254 - DNA, 618 bp, Homo sapiens
tatttatatatttttccaaaaataacaaaatgctatgcacatcagaccaaagcgtatttgaatttagccatgacttgaactatgaatctttgttcttcttgctatgtagaaaacactggctgtccatcaggaaggctaacaggcaaaggggcagtatgatgccattcaagaagcactagtctgcaagacaggaaatgagggacaagggactccttgactctattcctaatagtgttgtctttgttgagtgcacctacattttgcctcacattagttctgagctatattaaaaaagtatttctttcatacccagaaacagtataatttttgtgtaccccctaccaagtaaaacagaagtatattcagctttaataaactccaagttagcaagaatgagagatggttgtgtatgcatatgaccaataagcatgagactcaatccataagtattaattagttctataataattactgtgaaaggcaatctggtatcrttggaaatagaactagatttgataacaaccaaacctaggttgattctagttttcacactttttgggtgtgagctttgacagattcctcaaatttctgggcctcaactggtgacacagacttagc

SEQ ID NO: 909255 - DNA, 599 bp, Homo sapiens
tatttctataccaggccccacaaacattttcaatwtttgtcactaggatatataatgtgtcatagttgaagactttccaggtcatctaatttcacagatttcaatctagcttgttacctctgcgtatggagttcctacttctgatctaccctggccctttggaatttgatgcatgtcccagcagccaagacactccagccacacctgcagtagcttcatatcctctctacacccttctcctactatttttgagatcctggcatacacgttatctgcattcttctgaccctctctttacatttctacattaattttgctttttctaggcttgatcgttgcattctctaaggatgcaggctgggcacaaccctattttctctcttagctcctcaggtgggatatccagctcccacattctcttgacctgtcactgaccccctggcagagtctattccacatcttataagaacaaagtcttcaattcttagctgcctaaaacataatacagctaacaaatcgtgacttatttttatttctggcagagtccttagaagacacttttgctccttaaagagttgactgagcacttgccatgtgaa

SEQ ID NO: 909256 - DNA, 666 bp, Homo sapiens
taattgccaagtgcctgtggctcaaccataagcatcccaagcacatattaaaaagtctaccgataatatctcccacactaacaatgtattttaatgtcatttattaagaggttagtatttacatataaamttacatacaagttctttcagtgttaagaaaatcagagtaggtaatttactaaatcttttgttctacttttatgttgtctaggtgagttcatgtgtctagggtagttatttgtgtgagtagccagctttgagtgaggagggaaggctgactagatatcagacattatataatatttggggttaacaaactctttgggaaattatttaaatccatttttattctgtaggtattagctacagtgaatgagtaatttttgttcatttgttctttatttttacttttctcttgttagaaaggggagttggacaaaatggaaattttggaatgaaggctgaatctgattatcttagacattggaaagtctttgaagataagaaagggaaagaattacactgttggttgggggtgtaaatttgttcaaccattatggaaaacagtatggcaattcctcaaagatgtaaaaaccattcgacccagcaatcccaatactgagtatatacccaaaggaatagaaatccttcatgcatcattctatc

SEQ ID NO: 909257 - DNA, 631 bp, Homo sapiens
gcatcatctaattttatttttttccctttagaaaaaattatccagaagctgataccgtctgtcttaattaccatctgttaatttccttaccaagttctggagattaaaaatggacactggaggaacctaaagttatcttcctgattgtcaggaaacatctcaaaatcatcttctacctgtgtggcatactccctctggtcaagaccatgcgtgacagaacctcattttttttcctctccatgaaatttttaaaaacaaaaacaaaaaaccaaaaactaatgagggaatatgcacaatcagaacgttaaaaaggcagctgtgtattccaaatctagagtagagcctaaaacatagtaaagtctcaataacttagtaaatgatgtaagaaaaccaataacttcaatattcactgtatttggacatttggacagaaacaacatataaaaagttatgacatagagaagaataaagataatctcccttattctattctttaaagtagcatttacaattttaagaaagaaaattagctactgagctgccataagatattgaagttttcacataagtcctgatttgatccttacaataawcttatttggttaatattatccttgttttgctcatggag

SEQ ID NO: 909258 - DNA, 574 bp, Homo sapiens
cttttgcctccagccaatgtcatttcctgctttttaggttgttggttttccccctggcttactgcgtagttgtcttccaggaaatttctttcagcatctttctgggaattcccttttcctcctctggattttaaatttcctgttttcagaatcctctgtcttcctttttcatggtgaacttccttgtttccatgaaagctctgtaaaggaaacagtgtcccactctggaggaactggggaagatttcatagaggaagtgaaaattgagttgggattagagaatgtgtaggaattttctagaaaagagtaatccatgcagaaaaaatagcgtgtgtaaccacccataagcattatactcataagtgagaaatccataggttattaagtatggaagtttgggaaagtcgaagttgatgctgtaaagtgtagtcaaattttgaagagcaatatatgacatgttaaagattttgaaacttgggygtgtgcagtggctcatgggcccgagtgaggcgggaggctgaggtgggaggattgcttgagtgcaggagttggagaccagcctaggcaacataat

SEQ ID NO: 909259 - DNA, 558 bp, Homo sapiens
tgttgacactctgtatctagctaatctggtggggacrtggagaacctttgtgtctagctcagggattgtaaatgcaccaatcagcaccctgtcaaaagagaccacttggctctaccaatcagcaggatgtgggtggggccagataagagaataaaagcaggctgccagagtcagcagtggcaacccgctggggtccccttccacactgtggaagctttgttcttttgctctttgcaataaatcttgctactgctcactctttgtgtccacactgcctttatgagctgtaacactcaccgtgaaggtctgcagcttcactcctgagccagcgagaccatgaacccaccaaaaggaagaaactccgaacacatctgaacatcagaaggaacaaactccggacacgctgcctttagtaactgtaacactcaccgcgagggtccatggcttcattctaaaagtcagtgagaccaagaacccaccaattacggacacagtattatttctgaggactctgttctgttccattggtctatatctctgttttggtaccagtaccat

SEQ ID NO: 909260 - DNA, 163 bp, Homo sapiens
tgtcttaaaaatgatatatrtatcttaatttaataatacttcactggtttaaaatgctaacaatcatctgagccttcagtgagtagaaatctttttgctggtggagggtgttgcctctgtgttgatggttgtttactggtcagggtggtgtttgctgaaggtt

SEQ ID NO: 909261 - DNA, 578 bp, Homo sapiens
caagtggatttttaaaggaaaaaaaaaaaaagacactttcaagtcgtttaccaagaatttacaataaaataacataagctataaaaaataaaataaaataggctattggctatttcaatgacagaagaggaggataaagttaattccatgggctcacacattcgttgtgaattaaaaatagaggattaggacagagaaaagtcaatgaactttacaatgagtagcccaggtgatttggaaggtagataaaccagtgacagaaaattgacagggagggacatttgatggaagttacttagttttgttttgataattgcaagtcctttctagaaagtttgtctctgaaatcaatactatgtagtctatatataacaggtatctcttaatggatgaggcattctaaccaattaatgtgctttactgataaaacctttgtgcctaagaaaaagcaacatagtaagattacaaggactgtatttaaaatgstgatgaaacatttgcaaagaaatgcctagaagtctaaagggaaaagaaaatggcaatcagagtcaaggagaagcaacattgtgcttatacac

SEQ ID NO: 909262 - DNA, 659 bp, Homo sapiens
ctggttaggaaatctaaaggaccatgacttcatacaaatacrtaagtgtgccaaagaatatgaaaaatatggttgaaatgatacttattatatttctgttcctgcgtgcaggactttcttaagacagtactcaggaagaaatctgtggcagagtgaaagaaaattaagaagagattgtacttcctgaaggcctattataatgtaattatgtaatctttctctaaaggtgacccttttgccccgcctaactttttagaattgtatttccttatgttcagtctttccagccatggttgaggtgcatgtgtccctcacagaaatccagtagaatgacaaaaacatttgacatttacagcatctcgtgaccctccgaggcacagaagtaatttaatagtgatggaaaaatttgccatcaaactacccaagtgttcctaaatagtttggcagttaatagtcctgagctatttcagaatttctcagtgtctcctactgtacggcattgttcactaagatagcaaaagcctccactaacaaagatacattcagatttttacaaatgcagagtgaacaacaaaaaaagcaaggttatgtctgaatgcttaaaatatttctcatttataggcagaagttttttgctggctataaaacaaatcagaacc

SEQ ID NO: 909263 - DNA, 673 bp, Homo sapiens
ggctgtgaatggggggattgaagagatattgatcaaaggacacaacatttcagttacgcaagagaaataagttcaaaaaatctattgtatatcatggtgaccacagttaataacaatatattgtatatttgaaaattgctgagaatggattttgattattctcaccacaaaaatatgtgaggtaatgtgtatgttcaatagcttgatttagccattccacagtgtatacacataacaaaccatcatgttttacacataaatatatgcaatttttacttgtcaataattttttttgaaaaggaaaaagaattttttcagtttttaaagataatttagaggatatgtatagaaaccagggctttatggactcaaaaataaagatcttccttatccccaccaaaatattcttaaactaagaaatggatgaagataaaatccaaagttaggttctttgtaaggattaaaagtgctgccctataaaaaatttctgctattcaaatgaccttgtaagggtcttaaggacatacctattgaatcttttgttaaaggccgtgaggactttaagggagttgtaccacaacagcyttacatagggcccaaaatagaaaatggcatgtctaaaagagacttgtggttgtggcttttgttttatgtaataggcctcaatatgact

SEQ ID NO: 909264 - DNA, 619 bp, Homo sapiens
ctcctagagactttacctcaatarccaacagtgaatctcttctctcctatagatgatttccatgtaataatcttgcatttccacccattaatcaagcagtaagcagtgtgctagcccctatgggcaagtgtcacgtgtcacacattgtttgtattccaatactttttatgtcagtgtaggcccttcatcaaatctgtgaatttagctgaagtcactgataataatgaattatttcagtagcgctatgactggttaaaaacaatcttgatcaaaacttgagagataaaagagcagctttgcactcttccctcatcccctcccttccatctacccattcaacaacctgccaatccatgtaacatgtattcagcattaatatggaaaacttcatttatttaattctaagatgtcagtgataatataatgcaccatcaatttaaccactgcttagaagagaggaagagggaaaaacattgaatagataataaacatgattcttataaaatggagcaacagtagtatacatttatctgcatgattgcaagcaatactcttctttagtatgaccatcaacattttagactaaaccttctttttaagcctagaaagtcttatggat

SEQ ID NO: 909265 - DNA, 556 bp, Homo sapiens
actgccatctgcctaacctagtgacatgccaattatcaaacatggttgtgactaaagactcagggatttctggactgcaccatttakaatcaagttccaaattcagcatacaagttggaggcctgttggggatgtggggaaaggttgatgaaacagcggaattcccaaacagctaacttgggtgtggcaatccagggaatgaaaatcttggcaagttgtctcccttataagccctgagtatgatagtacataagcttcaacttagttcaataaaccaaggatatcaatatgctaaggaatctataaagaaataaatgcttctgtaagtatccaagcagaaaattcttgtaaaacttgtctgttactagtatgtggtatctgaccctacttcatcattcccaaaacttggattgtgtttgctccaaaaatgacagcctgttcctggaggaacgggtgttggctgtgctgatcacagcactacatgagcagcacacatcactggaataggaggaagcaggtgctgagattataattaaatatgtatataggaaacagg

SEQ ID NO: 909266 - DNA, 656 bp, Homo sapiens
tgggaggaacatttaagcccaggagccaaggctacagtgagttatgatcacaccactgcactccaacctgagtgacacggtgagaccctgactctaaacaaaaaaaaaaaaagaaaaaattattaattattataagaattaatatgttgttaaatattataattaactactaattattttttcttttcttttttcttatgtataaacgagtaagaaaacaaaacaaagaacaatttagaaataagaaaaggacagaagcaggcaataaataaaaaagacaatttcagcagctaataattatatggaaagatgctcaatgagataccaaaacacatccatccaattgggtaacatcttaaagtcttataatcctcacgttggcaaggatatggaacagttaaaattttcatacactttcagagacagtataaatgcacacaccatttaaaatagcaatttaaaactatcctgtcaagtggacaatgtatgacaccctatgatctgtgtaggtacaataccctccccctgcaaagatattcatgaccatatccccagaacctttgattatattacctcatatgccaaggggaattaaggttgcaggtagaatttaggttgctaayaaaatgacctaaaatcataagattatcctggat

SEQ ID NO: 909267 - DNA, 627 bp, Homo sapiens
atttgttatatattcttgcttatgtggaacacatccttctgctttcctggattatttctgcctgtagttatgaagtctctaaaaaataattatgttgttggaacgcattaatctcattaatagagctattactgccaccagtgaataatgttgatgataggcttttaaaatcaacttttaaaactacttttaagagttttgtttacttacgtactgtctctacttccaaaaaaggatttgagatgccttagaacacaaagaccaaaacccattaacattgcatataaaatcaaagtcaaatagcaacaacgaaatggcatcccaaaacccagactgagcaaaacgacctcatttgagcacaacatttaattctggtagctcctattgctcaattacaggaacgtaataggtcatttcgggtgataaatgctattctggtgctgagaacaaagaggaatttatcatgtgaatttttctttgcaattcaccaggttacatggtgaatacggtctttgacagcagctctcaggaaccacgcaaaggcatctwtaagggctagcttcgtgggcacgtaacatgtgccccaagcttagaagagccccacacttggttcaatgctctgctgtt

SEQ ID NO: 909268 - DNA, 592 bp, Homo sapiens
ggtgggctcagtctttctaatatatatgtgtgtgtgtgtgtgtgtgtgtgtgtgtgtgtgtgtgtgtgtatatatgtgtatatatatatgtgtgtrtatatatatatatatatatatatatatatgctaatggcactcaagtgtatatcacatagagcttacttttgagaaatgtgtaccttgcatctcacccgagtactttgaagcatctacacttcatatgtaccacacggaaattatcattttcctacattattgaagctctacctgatccagttttttcccatatcggtgacatattttacctacttaaggtccaagctgtaaaactgaaaatcattttggtagtttcctctctcaacttttacaccaaatccactgatactttctgtcttttctagttcctaaatctataggaagtctgaccatttctcaggatctctgcaaagtggctgcattgtcttttctattgaaatgctaatcatattggggttctttaattttcatgcacttgtcaagcactatgacaactatgaggatgctgtagggagaattaaatcaaatttattcactcaaaagtttgacagcttga

SEQ ID NO: 909269 - DNA, 677 bp, Homo sapiens
tctgctgagaaatctgctgttaayctgataggttttcctttatagtttacctggtgcttctgtctcatagctcgtaagtctttcctttgtcttaacttttgataaccctatgacaatgtgcctaggtgataatctttttgtgatgaatttctcagatgttctttgtgcttcttgtatttggatgtctaggttgctaccaaggccaaagaagttgtccttgattatccccccatatacattttccaagcctttagaattctcttcttcctcaggaacgtcattattcttaggtttggtcatttaacagaatcccagacttcttggaggctttgttcatatttacttactcttttttctttgtatttgttggattgggttaattcaaagaccttgtctttgagctctgaatttcttttttctacttgttcaagtctattgctgagactttccagagcatttcacatttctaaaagtgtgtgcaaagtttcctgaatttttttgtttttcctttcagctacctatttccttgaatatttctcccttcgcttcttgtatcattttttggatttctttgcattggtctttgcctttctctggtgcctccctgattaacttagtaaataaccttctgatttctttttaggcaaatcagggatttctttttggtttggagccat

SEQ ID NO: 909270 - DNA, 651 bp, Homo sapiens
gctaatttttgtatttttagtagagactgggttttgcaatgttggctaggctggtctcggaatccygaccttagatgatctgcccatctcagcctcccgaagtgctgggattacaggcgtgagccacacgcccagcctaccctggtaaatcttaagctcacaggagacagggtaggagggcatgaacacaggcaatgtaatatgactctgctggtagttaggaactgttctctaagcctcaacttcctcctttgtaaattagaaataattattttttttagctcatagattcactatgagaattgaattcaataatatggttgaaaaattttaatgttttattcaaatgtaacaaattaataaatgggtcctagaggtgggtggcagagggtcataagcacaaaaaactaacatgtattaagatgggataggagcgttgatataagtaaatgaatacataaatacataatataagaaatgtcagttactgaagttctgcctgaaattactcctgaaaaaacagtgtagatattgtattcaaggacatattataaaataaggattaaaaataagacaagttgctgcattaaacagtttctcaaacgtgtttctgaagaaccctggagacatgaaagtcagtttctttccttg

SEQ ID NO: 909271 - DNA, 613 bp, Homo sapiens
gtgacagagcgagactttgtctcaaaaatgaactaattagacaaataaataaattttcattattctttctatatttgtcacttggtactctatggtaaagacatgctttytcttatactttatttctttatattagcatgagctcatggattattatgcttttggttcagttttcattgctgtcatgtattttgttggtcaaaattatcccatatttgcctgctatgaggcccctggaatgagctgctgtcttcttttgatgtccccatcattttctaaagcacttttcctattttatgataccacaagctattccaggctcatcttgtgctttgcttgctctgaccctggaattagggtgttttaccaatgattcctggttgcttttattacagaatagtatttggaaaccatggttggggagtaaggcatgttattgttattggagtaccattggtttcaggccttctcagtgaacaggactagaaaatgtatgtacatacacatgcacatacatacacatatatacacacatttgtatacatttccatacctatcagtatatatactaaaatccacaagtttatcgcagtacctctaatttcaatttgac

SEQ ID NO: 909272 - DNA, 688 bp, Homo sapiens
gtaccagccactgcaaaaacatgccaaatggtaaagaccgttgaygctaggaagaaactgcatcaacgaatgagcaaaataaccagctaacatcataatgacaggatcaaattcacacataacattactaaccttaaatgtaaatgggctagatgctccaattaaaagacaagacttgcaaattggataaagagtcaagacacatcagtgtgctgtattcaggagacccatctcacgtgcagagacacacaaggtctcaaaataaagggatggaggaagatgtaccaagcaaatggaaaaaaaaaaaaaaagcaggggttgcaatcctggtctctgataaaagagactttaaaccaacgaagatcaaaagagacaaagaaggccattatgtaatggtaaaggcatcaattcaacaagaagagctaactatcctaaatatatatgtacccaatacggaagcacccagattcataaagcaagtccttagagacctacaaagagacttagactcccacacaataataatgggagactttaacaccccactgtcaatattagacagatcaacgagacagaaagttaacaaggatatctaggaattgaactcagctctgcaccaagcagacctaatagacatctacagaactctccaccccaaatcaacagaatatacactcttctcagcact

SEQ ID NO: 909273 - DNA, 688 bp, Homo sapiens
gtaccagccactgcaaaaacatgccaaatggtaaagaccgttgatgctagsaagaaactgcatcaacgaatgagcaaaataaccagctaacatcataatgacaggatcaaattcacacataacattactaaccttaaatgtaaatgggctagatgctccaattaaaagacaagacttgcaaattggataaagagtcaagacacatcagtgtgctgtattcaggagacccatctcacgtgcagagacacacaaggtctcaaaataaagggatggaggaagatgtaccaagcaaatggaaaaaaaaaaaaaaagcaggggttgcaatcctggtctctgataaaagagactttaaaccaacgaagatcaaaagagacaaagaaggccattatgtaatggtaaaggcatcaattcaacaagaagagctaactatcctaaatatatatgtacccaatacggaagcacccagattcataaagcaagtccttagagacctacaaagagacttagactcccacacaataataatgggagactttaacaccccactgtcaatattagacagatcaacgagacagaaagttaacaaggatatctaggaattgaactcagctctgcaccaagcagacctaatagacatctacagaactctccaccccaaatcaacagaatatacactcttctcagcact

SEQ ID NO: 909274 - DNA, 592 bp, Homo sapiens
ccactctaatctattctacacaaattatccttagtaatctttgtaaaaagcagaattgactatggcataccccttcttaaaatatttcaataattttgcaattatccttaaagttaaaatcctatccaggacctcaatgtcctatatgagtaggttcctctctgctctttcttttttaccccagaccactcttgcccttgttctctgagcaacggccacaagtgactgtggggaataattttcttcctgtccctccctcttcactgcattcctcactacgcctacctccagcagccagatcagcataacatgaccttggctggactaattagaagttctcatgaggaactataaatcttgtccaggtagcctaaagaagagaaatagtgaacttagattatcagcagcaatactggtctaacaacaactctagttttgtccagcggagagaaaacagtacaatgagagtagctttgattcctgggcaattaaatatagttataaagtaggccaacatcccacaccttttaagtttttaagaatggcactaaactctcycaatctatctgggagttgctattgttctttctct

SEQ ID NO: 909275 - DNA, 464 bp, Homo sapiens
gtaacataaaccaaattactccccagaagcaaggcagcaatgcacttacatgtgccccacagagggtcttccaatactcactgctgctactgcttccagggaggtagggatcacctcactctgcccactacagcttgtgcccatgcccacaacaacctgaggacagccctaaccagcctggcacctcctctgccagtgcccaaacataccacccaggactgaggatcatcccatcctgtctaccactgctggcatctatgccgtcttcccaggggactgaagatagacccactcagcatgctgctaccatcacaaccagtacccaccagcacataccacctgggcamtgaggacttgttcaccgaacctgtcacattcactgataacacaagtgcatgttgcctgagatcctgaggactgtccctccaccatcacagtcatttcctattccatgcacacttccc

SEQ ID NO: 909276 - DNA, 660 bp, Homo sapiens
catcaccccatgttcagtacatctaagtggaactttgtgattacctctgctgcccttttaagccccttgtccttataccttaaatactaatcctcagacttgacttcagtctattttggtgacttattagatttttcttttagctttcctccaggggacatcaatttccaaccaccacaagcacaggtgcaacttctgctcttataattcccacccacactcctaactccactctatctcctgataacaccatattaagtcactaatggctagagtttgaaagattgaatgttaaaagcataattagagacttaagggaaacaaattgtacccataaaatttagaattaatttcaggaaaatagggcaattgaagcaccttgtgcaattggaaatgacttttctaaatcagcgactgtgcctgaaatcagccccctcctaacttcctctgcttccttcttgtttccttctaagaataagggcaggtcggtgggggtaagtttggtaaacagcaatgcgtattgcttgtcaggatatcaaccacaaagagctcaccttaaagttaagctttctctctgtaatggaratagaaaatgggaggaggtgtgtgggtgagaccaattattgcccttgggcgagctccagaaattgcaagagcaga

SEQ ID NO: 909277 - DNA, 647 bp, Homo sapiens
  misc_feature 601: n = A,T,C or G
aagtgaaataagctagacacagaaagacaaatacattatatgatctcccttatatgtggaatcaaaaacaactgaacctataaaaacagtagaatggtgttgtccaggtgtaggragggctggagaaatggggaaatgttggccaaaggttacaaagtttcagttatgtaggataaataagttctggaggcctaatatacagcatattgactgtacttaataatattttcagtctatatttgaaatttgctaagagagtggatcttacacacagaaaagataactatatgaagtgttggatgtattagttttattgtggtaattatttcacaacgtatccatatatcaaaacattacaaagaatctaaagtatatatttttgtgttaattatatctcacagccggaaaaatattaactacctctgctactttttttttttttttaaacggaatctcactctgtcacccaggctggagtgcagtggcgagatcttggctcactgcaacctctgcctcccgggttcaagcaattctctgcctcagcctcctgagtagctgggattataggcacctgcaccatgcctggctaattattgtattnatagtagagacggggtttcacatgttgggcaggctggtcttgaact

SEQ ID NO: 909278 - DNA, 563 bp, Homo sapiens
taaaaagtgctgcaggcttaaaaaaaaaaaaaagatgggagygtatgttcattggaaggaaacacacaagtatttccattaaaatggctatataataaatgtgaataagttatataatgtctccgtgaaactgccaaaaggaagctaggtattaatgttaactaaatgagaaaataaagagtgaaataactataatagagcaacacctactatgactgaaaggagtaatatgtagagtcaactttgtaaatattcaagatacagatgacagatgagggaggttcactaacaatgagaaaataaagtgtgatataatgagtggtgaataatggaatagagaactacagctcttcaattatgacaatttttaaaggcgaaaacaggaaaaccagcaacggcaaattatagatagaaaagaaaaaaacatgcatgtaagattgagagtggaaaggcctgatcattagatgctaaaattaataagcagagatgaataacaattcatatgcataaaaatatttattcaagataaatatttcaacaattcaaggaagaggaaatgttaa

SEQ ID NO: 909279 - DNA, 653 bp, Homo sapiens
tattttttaatttgtctgttccatctaaayttttaaatgtattgacacaaaaccttcatgataatcttgtatttgaaaaaaattctgtttgagctgaggtaatttttgctttttcattttttcttgatcagcttcaccagatggtttatcgatttttttttttcttttttagacagaggctcactctgtcacacaggctggagtgcagtggcgcaatctcagctcactacaacctctgccacccgggttcaagcgattctcctgtctcagcctcccgagtagctgggattacaggtgcctgccaccgcacccagctaatttttgtatttttagtagtgatggggtttcaccatcttggccaggctggtcttgaactcctgacctcgtgacccacctgccttagcctcccaaagtgctgggattacaggcgtgagccaccgcaccccaccggtttatcaatttttattagtctttccaaagaacaaactttgccttgttgatctctctagaatttttttttcatttatgtcacttattcattatagtcctccccgatccccctgctttaatatctccatgccatgccgctaacttctagcaaagtaaaatacccgaatttcgagaatttttatggtgaatgttaaatggtgcag

SEQ ID NO: 909280 - DNA, 573 bp, Homo sapiens
aagaaataagcaagaagaaatggtcaatagagaaagtatgtggtatctttttgtacttaataataatgattagcaaattctaaccagggtctacaataatttcattttaaaacaacaaattgatgatatgaggaggtaacaaaagtatccaaactgaaacatagcttagagaaaaaaattacagaggtagataaattaccacttgaatagccattaaattataaaggctgggcatggtggctcacaaatataattccagcactttgggagactgaggtgggcagatggcttgagcccaggagttcaagaccagtctgggcaacatggcaaagccctgtctctacgaaaaatacaaaaataattagctgggtatggtggtctgtgcctgtagtcccagctactcaggaggctgaggcaggagaattgcttcagctagggaggtggaggctgcagtgagctgtgattgcaccactgcactccagcctgggtgacagagcgagatcctgtctcagatagctagmtagctagctagctagctagatagatagatagatagatagatagagataatca

SEQ ID NO: 909281 - DNA, 573 bp, Homo sapiens
aagaaataagcaagaagaaatggtcaatagagaaagtatgtggtatctttttgtacttaataataatgattagcaaattctaaccagggtctacaataatttcattttaaaacaacaaattgatgatatgaggaggtaacaaaagtatccaaactgaaacatagcttagagaaaaaaattacagaggtagataaattaccacttgaatagccattaaattataaaggctgggcatggtggctcacaaatataattccagcactttgggagactgaggtgggcagatggcttgagcccaggagttcaagaccagtctgggcaacatggcaaagccctgtctctacgaaaaatacaaaaataattagctgggtatggtggtctgtgcctgtagtcccagctactcaggaggctgaggcaggagaattgcttcagctagggaggtggaggctgcagtgagctgtgattgcaccactgcactccagcctgggtgacagagcgagatcctgtctcagatagctagctagctagctagctagmtagatagatagatagatagatagatagagataatca

SEQ ID NO: 909282 - DNA, 583 bp, Homo sapiens
tcagggatgatttataatcagtattgagctaaaatgcatttcctttgcagctcagtccttcgtctgcattccacgaattctttgctttcatagaaatcattcattttctacttcaaaaaaccatggtgacattgaagtcatttgagtaagtttcactatgttttaaatctagtcacttaaagaatatgttttttattttccctgctacgtttatccagtactcatgaatacaaatatttgtaatgataaccaagatctgatctcatttccttctgaggatcttctcatttcattgtgtgcaaagatgagactcaaggaatatatttttatcagtaactgtataagcatcccacccaattttaggtgaaaacagaggttgaaagctagccacccataaaatatatctgtttatactagaaatgaactagtataaacagatatatgtttatgtctaaatgctcattgctttgcaaaatatgttcttaccatttatttatttttcacagctggttgaatcttgaactactctgtaacactgcatgccttcccamtgaggtgcccattatataacctcctctttgaa

SEQ ID NO: 909283 - DNA, 613 bp, Homo sapiens
ttgagtaacttttgagttcttgtttttattcttagagtttgtgargtgtctgaatcctgtgaataacaaaatccccaaatacttgctatctaaatttcatggtatctaaaagtattttgtgacagtcatgtaacctacatattaccctcataaaatgaagcttaggcaattatgtatcactatgaaagtggaaagattattaactaattttgttaaatctggtcctgataacattatagtatgaaggaatgaattcagagatgaaggtgagatgatgaaagaaaattaataagaaatttgaaataatttaaactttttctccagtggattgttcccaatgtctctttgttaattcttcatcagtcatgtggtatacattatacatggttttgcaatgttaaactgtctctcctatagatattgggatttatttctagcaacaaaactagatttttgtttggaaaagataattgttgaaagagaaaaggaggttataattcaattgccttttcacagctggagagaaattaattttagccagtgttagaaaaattaagttctataacatttcttttgctttgaataaatgcagtattagctttggtggtgagtc

SEQ ID NO: 909284 - DNA, 655 bp, Homo sapiens
aaagttcctcttattattggtttttagttttattccattgtggtcagaaaatatatttgatataatttcaattcatttaaattagttgagacttggcttgtggcctaacgtgttctatcctggagaatgttccatgtgctgatgaaaaaaaaagtgcattctacagctgttagataaaatgttctgtaaatgtctgttaggaccatttggtctaaagaagtttaaattcaatgtttccttgttgattttctgtctagatgatccgtctaatgctgagagtggggtccccaactattattgttttgcagtctatctctccctttagatgaaatagtatttgctttatatatctgagtgctctggtgttgggtacatacatgtttattattgttgtatcctcttgccagatggacccctttatcattatataataaccttctttatctctttttacactttttgacttaaagtttgttttatctgatttaagtatagctactcttgcttgcttttggtttctgttgacatggaatgtctttttccatccctccactytcagtatgcagttgacccttgaataacgggtttgaacccacatgggttcacttacatgcaatatttttttcagtaaaagttacactgattgtaaccctcc

SEQ ID NO: 909285 - DNA, 413 bp, Homo sapiens
cagagcctttcatatttctacagtgaagcctctggctattcacactaagatgaaccaagatcataatagctgcaatcaattcaggtcaggtttgccacctaaagagtcagccccaagcttggaaaaaaacatttggttttcagagctctttggatatcagaactgaaatgagattgtgcacctatgctaataatgttggctttttttatttttattttttgcctaaactagtgtgaattggtttttatcactagcgacctaaagggccatttattcccagaaagatattctgagacctcatctcttaaataattgaacaaacccttgtaggacagttgggacagttggtgtgggtactggtgcccctggagggaagaccttmttattctttgtttgggagtttgggtagtggt

SEQ ID NO: 909286 - DNA, 594 bp, Homo sapiens
tctgctccccatttcccccctgccacaatyatcttattgaatgttatgaccatccagtaggactcacagttgttgctgaggagcaaatttttcgggactttgctgctaagaattttaaaaagctctgggtaagagacatttatctgactttccaaacaacttaacagctaagataccaagcttgcaaacagatacttgaagatcgaaaggtgttctagttatccaaaaacatttggtaaagatatcagaaaagagaaaaaaataacagaaaaagaagtcaatgaaaatgttggtgtattggcctctccttttgaaatctaaagaaatcattgaagggacactttgtaaatgtagctacctgtgttcaaggtcatgtgatttacctatctggcagcaactgtgttttcagatcacttgggattttcccttgtaaggactgtcaaatagagaggaaatggaatgtgttgcttttatgggctaatactagtctaagtagttttgtatgtggatggtaaactattacctataaggagggtgaccagttgtctatcggtacataacaatccattctaaaagataatgttttaaggcaac

SEQ ID NO: 909287 - DNA, 594 bp, Homo sapiens
tctgctccccatttcccccctgccacaattatcttattgaatgttatgaccatccagtaggactcacagttgttgctgaggagcaaatttttcrggactttgctgctaagaattttaaaaagctctgggtaagagacatttatctgactttccaaacaacttaacagctaagataccaagcttgcaaacagatacttgaagatcgaaaggtgttctagttatccaaaaacatttggtaaagatatcagaaaagagaaaaaaataacagaaaaagaagtcaatgaaaatgttggtgtattggcctctccttttgaaatctaaagaaatcattgaagggacactttgtaaatgtagctacctgtgttcaaggtcatgtgatttacctatctggcagcaactgtgttttcagatcacttgggattttcccttgtaaggactgtcaaatagagaggaaatggaatgtgttgcttttatgggctaatactagtctaagtagttttgtatgtggatggtaaactattacctataaggagggtgaccagttgtctatcggtacataacaatccattctaaaagataatgttttaaggcaac

SEQ ID NO: 909288 - DNA, 654 bp, Homo sapiens
caggctttttagctatatcatgttcayagtactctcctgtcatccctcacccatcatgaccttcactgtagagaaaacctagcagggccctcttcccaggtctttggttttgcctcatcctcttccaataactggcaacatttgcccatcgtgtccaccatccttaatgtgggaattgatgaacacctcaatactaagatggaaatgactatgaatgtgttctatctcacataaattattcacattttgacaacaggctcctactaatgagacctaatattccttatgagcctttaacacgaaacaaaatgtctcagtgtcgatcagtgccttaaaactctctcctctcgaggcttctgtggtacccaagtcctcttcctatgagtgagtattctctgtgcctctctctgcacttcacctacttgctctctgtgtctttattttactctctcaatttctcatttcttctccttcaccttagacctccctatacactccagtctcgcctgaaaatctttcataggagaacatttccccacctgcaggaagggtctgggattaatcttgttgttataacgcagatagctgctgtaaacccatttatttaacatacatcccctgaggtttatattggagagaagtgcagtctgcagt

SEQ ID NO: 909289 - DNA, 576 bp, Homo sapiens
atagtgtccgaaaatggatgaaaggaggaagtaacctccacaaacatcttaaactttatgagtaaggmaaatatacagatatgctaacaggatcctgaattgcaaagccacggcacttaaacaaggaactggagtatggctcttttctccttaacaatttccattcccatgcatttcctaaatgcaaaaactcactgtcatcattcacttaacaattgtcaacatattcacacgattaactgctatttatatagtacactttaacgtttttatgctttttatactcttctatgagtttatcctatgaaactcttgcagaggagcaccttttctctaattggtttgcggacccttttaccgaaagtccacccctaactcgctctatcacaaagttcagttcacaacaaacgctgacctaaactggaaattcattccgggcgctagtgtagacttggcgccagttttaaaagcggtcatgtccaaacctggcagaaaatcctaaatgagacagtatggtggttcgggtgcttaatatttgtgatataagataaaatcgagattttactaggttttgtt

SEQ ID NO: 909290 - DNA, 587 bp, Homo sapiens
ctgtgacacttgggaactacaatttgagatgagatttgggtggggacacagagccaaatcatatcactctcccaactagaaacaactgaaatactcrtcagtaggagaatggatacataaactgtgaaaattcatacaatggaatacagatggttcctgacttaacaatggtttggctgacttatgatttttgaactttaaggtggtatggaaaccatactttaagtacccatacaaccattctgcttttcactttcagtacagtgtccaataaattacatgagatagtcaacactttattatcaagtagtgttagatttttgagcccaagtataggctaatgtaagttctctgaacacgtctaaggaagtgagcctaagctatgatgttcagtaggttacgtatattaaatgcattttgactaactatattgtcaacttacaacaggtttatcaggacataccccatcataagtcaaggagcatctatactacatcagaggaaaaaaagaacaaatggatactacctgcaatcatatggctcaaactttcagactttatgttaagtaaatgaagccaggttaaaaa

SEQ ID NO: 909291 - DNA, 664 bp, Homo sapiens
attcactaccaaagctctgagagaacttcatgtcyttcaaactctgtctgggtattgacttagggttgagtttggggtttgtttcttcaatttgcagcaatgtggcttttgagaagtggtagtagtaatggagccaataatgtcccaacaaggcaagttctgagcagcatcactgcaactcaggtattgaggatttagtggcatcttcttgttaaaggtgctaaagactacagcacacagtatctgtgagcttcccatcaacctgccatgagacagaaagtgtttcagaaaattgaagttcagaccttatgctaagcgatttgagtcactgactaccaactacattgtttgtatcaacaaattctctcaacaggctggtggccagggaagcacctgctaccaccacagatgtcactgcaatgaagcattctgctcaacaattacatatccaagacccagaatgaagctctcctgcaaaagtgacattttaattagacttgattctctttgagaaataatgcagtaagctaaattctccctttgccacctacccttaaagtcatcactctaagccaaaacaacttttaaaaaaagaaaacaaaattagagggctaacattctgatttcaagatttattataaagatacatggatccagacaatat

SEQ ID NO: 909292 - DNA, 619 bp, Homo sapiens
ccatggtgtatatgtgtcacattttctttatctagtctatcattgatgggcatttgggttggttccaagtctttgctattgaaaacagtgctgcaataaacatatatrtgcatgtgtctttaaagtagaatgattaataatcctttgggtatatacccagtaatgggattgctgggtcaaatgctagctctgttttaagttctttgagaaatctccaaactgttttccagagtggctgaactaatttacattcccgccaacagtgtaaaagctatttctccacttcctcgctagcatctgttgtttcctgacttctttttttttttttttttttgagacggtgtcttgttctgtcgcccaggctggagggcagtggcatgatctcagctcactgcaagctccacctcccaggttcacaccattctcctgcctcaacctccctcctgagtagctgggactataggcacctaccaccacacctggctaattttttgaatttttagtagagacaaggtttcactgtgttagccaggatagtctcgatctcctgacctcgtgatctgcctgcctcggcctcccaaagtgctgggattacaggcgtgagccaccgcgcctggcc

SEQ ID NO: 909293 - DNA, 662 bp, Homo sapiens
actgaaagaaggagcatgctgtataattccgcttatatggagtccaagatcagttaaaactaatttatggtgatagggtttgatatagtggttattttgggaagaatagtgcttgggaggagaatgtgagaaccctctcagatactaggaatgttttatatattgatttaaacgtttgtacacttacgatgtgtcccctttactggatatgtcttaacctcaactttaaaaagaaatctatgtagctgaaaatatcataaacaaaattaaatacatattataaggagctaattttgaatacataaaatcataacagcactctctctgtctccagtactactctagtgctttatatacataaactcacttaatcctcaatataatcctataagtaccactactatccccatttaatgagtaaagaaactgaggcataaataacctaaatataatttgtttgtggtcgcacagttagaaagtgccaggaccagaattcaaattcaggcagtctgtagagtacttacatttaattacaccaaaagcaaaaagaccaacagtccattagagaaatggtcaatagacatgaacagaaaacagaaaaatmatgtataaaactatgttactcttcattcactagaaatgacatttttcaaaattttaaa

SEQ ID NO: 909294 - DNA, 647 bp, Homo sapiens
ttgccagaactgcaagaaagcctacaattatagacattctaacctaaaaaattatactgaagtatgagtataggaatgaaaaaaatgttataaaagaaacaatcataacaaattagtcattaaccttcataaggagatctgttctttgaatagcactggtaggcatgagcttaagatttagcttggacacaactgtttactcaaatatccatctatggtttggataatcagtagggaagtcctgtgagatgcaagtagtccttcctcctgatttgacttgaagcacacagaaaggattatcttttatatctacatgagtgattttaatggtgataaacctaagaagaaacattgatgtgtatgccatagtttagaaaagaataaaagtatgatagagcttaaagtgaatcctgcttgaatcatatctgttccttcattacatccaacctgctatcaatagcaaatcagagggaaaaagcagcagtgaatatttggaaattgctaatacagagtagaacatgtgagaggtacgtgagtgattatgctcagtgacactaacataacattttatrgcaaaccctggtttacatggcacgatgttaagcataaattccctagctgcacttccacgcatttagaatgtagag

SEQ ID NO: 909295 - DNA, 659 bp, Homo sapiens
gagcacacctgtgcccatatacttgggggactgaggtgggaagattgcttgagcctgggaggatcacttgagcgtgggaggttgaggctgcagtgagctgtatcccaccactgcactccagcctgggcaacaaagtgagactctgtctcaaaaaaaaaaaaaagtatcgtcattaataagtttggaaaacactgcttaacatctaccacatcccaacttggagagtcagaatttatatatggatgtgatttgagtggtcctgctgtattaagaacataaataactatacttaacccactgtttgctgaatttattttttacagaatcctttcttagaatttatcttttaataatctctggaaatagtgttctgagacagtgcttaacaagtttaatctgcaaaaaaaattacctgggtatattactgcaatcataatctgacccagtaggtcaaggatgagagctaagagtctgcatttctaacaatctgcacagtgaagacagtattgcaggtctgctgatcacattttgagtttcagtgctagagagaacatactttaggaaccaaacaaaagtccccccacacaytagtttatcattcatcagatatttattgaacatacagatactgtgtgggcatggcatcagacaaataccaa

SEQ ID NO: 909296 - DNA, 599 bp, Homo sapiens
ccaggaagatattgtaaatatgtaaagtgagctccatcagaatacaaggctgagtgaagagaygtgtggagaatgaaacactgaaattaaataaaaagaaaaaaagtaaacataaggccactttgtacagtagcctgccagtggcactcctaaaaatgcttttgaagaaataaaggacgttcaaatagcaagagaggaagtcaaactatccctgtttgcagatgacataatcttatattgagaaaaccccatcgttccagcccaaaagcttcttaagctgataagcaacttcagcaaagtctcaggatacaaaatcgatgtgcaaaagttgctagcattcttatacaccaacaacaatcaagccaagagccaaatcccaaacaaactcccacaaaaagaataaaatacctaggagtacagctaacaagggaagtgaaagatatttacaaagataactataagtcactgctcaaagaaatcagagatgacacaaacaaatggaaaatcattccatgatcatggataggaagaattaatattgttaagatggcaatactgcccaaagcaatttgtagattcaatgctattcccattaaact

SEQ ID NO: 909297 - DNA, 598 bp, Homo sapiens
gatttctagatctgagtttgaagcatctttagattgtgaaatgacaattacagtggcaatctgatgtattttcctggtttgcagttttgaatgtctctggatatgtcatttggtgttttaatgaactctcagagtaaacaatataccagtaggcatgaaggatgtccacacataatatgttgtactgatttttatgaggtttaaagtcttccagtttcagcttgccaggcttgggaaaagagcagttttagttttttgttaaactagaaaaatgtaggattcaattcagtttacagttggataagaaaacctcaaagaaaatgaacaggaccagaatctgatcatgggtgcattatagttttctattaaaacataatctccttttttcagtggtttctatttttgtcaaaagtaattacaaaataaatctacttttatctaacttgagtatttatatatgtaacaagaataataatgtcatgtatattttaaaatargatattttagctggagctttgttagtatccaagggtttttattgacttagtatcagtcagccttaattttttaaaactagctggtaatgaggaatctttgg

SEQ ID NO: 909298 - DNA, 624 bp, Homo sapiens
taaataattgcatcatatcctagtttgccatccatcatacaatttttatatacttactacattttgagcattactctaggagctacggatataacagtaataaaaaacaatcttcccctgacaccatgaaacatacaacagcatgttttgttaaacatggtagtattcaaggaattatttgagagaaagttcagttaacctagaagtataattgactttgctccaatttcaggatgtctagactgtggaagacaaatttagatgcctatagattgcaaatttagaagcttaatggcgataaagaagtcatttttatcttaactgcattgtaagtaaaacaacaggactagcataaagataaatggtagttacagtcagactcaatgccagggaccaatggagaggggtagggaccattgaaaattattcacattcagccaattcatatatatgagcatgtaggtctatattttttaaagccataaatccacatacttatatgtaatctcttaattaaatttattaatgtcggcaaccaattaatagctaacattttgaaaacaaggtatggtccaacgttgtacaagctgaaaamatattgactagccaacagtagccatgtgg

SEQ ID NO: 909299 - DNA, 604 bp, Homo sapiens
gggaggacatgcccggggccctggcccagtgctgccagcagaccctgtacacacttggagtggaccttargaacagggacacttgatgagggctttagtctgcggctgcaattctccagagacagagtttctggtcagacaggagcaatccccatcacactatcttctcttcaactcccccatcaccaccttatccaggaagaagtgattctgccaggaaaaagggggctcaaaccttaaaagaatgtattaggtgtacaaaaaaaaaaaagctcagtgcaaactaacatttcactgagatcacatgtttttcctatcaggacaaaaatccaaaaggcaatcactcagtcagtcgggagaaaataggcactcacgtgtgctgctggtgggggctttaactggggcaacccatggaaggggagtgtaatttggcaacattcattaacataactaatgtatatgcccttggaccaaacaaattcgtttctgaaatttaacctacaaatacagctgcacacgagtgaaatgaggcttccctaagattattcattacagcattgtttttaacagcgtaacacagggaacaaccccagtttccaccaat

SEQ ID NO: 909300 - DNA, 596 bp, Homo sapiens
tagccaggatggtctcatctattgacctcgtgatccgcccgccttggcctcccaaagtgctgagattacagcatgagccaccrcgcccggcctgtagtggcgtcttttataacccagtcatggagtaaccgccatcagttctgtcatgttctgttgttcactcagatccactttgctacaatgtgagaagtgactatagaatatgaatcccaggagacagggatcactggggttcatctcagagactgcctaccccagaactcaaaaagaatatctttgctttgtatgaaaggagtgtgaaaggggagaaagctgagagagacgctggccagtggccccagttttctcagtgaagtggaaagtaaagtgatgccctgaaagtgagaaggcgggagaggcagactggggagggagagtgaggtttggagtcaccattcaggagcatgggaaaggtggcccttttatgtgtagaatggtcaggtagaatggagagctcagctgaggtgggaaatcaaaaatgtgcagaagcaccagtgtgcctcgttgtgtgatttttctctctcaggtgtaatgaagcagaaatgaggacactggat

SEQ ID NO: 909301 - DNA, 648 bp, Homo sapiens
ctattgatatcagtttataagcaacacwggtatacatttttaaaactatgttcattgactcagttcctgaaagatgtctttatgagtttttcctacagaaattggaagccatttttatttccttatgcgccattgcacccaggcatcaccagaagtctatctagcatcccataatttagaaagtgctgatcttgcgcacctcagctgactaagtatcaggcttcaggcctaattgctgtttagtctctgcctaagtcacttacttcaactccccttcttccttgcttttccaactcattcaacaattgtttatcaatcaactataaattatgacagaccctgggtaagtagtagaaaataactgtgcacatgcccagtcattgcctttaaagatcctgcatttaaaagggtaagacaagcagggaaacttcccaccaaagtcagcctcagcttgaccctggttcatcaggcaaccctgatttaaaagagcaaactcttaggtagctttagccttttccccaacaaggctcacccccagcaccagtccaggccattttggctcagatcactatcccagactatcaggcccagaatgcaaagttagtgatttcccaagactcctcctctgacagctggaatgacataact

SEQ ID NO: 909302 - DNA, 544 bp, Homo sapiens
ataaatggtgttgggagaactggccagccatatgcagaaaattgaaactagaccccttccttataccatatacaaaaattaactcaagacagattaaaggcttaaaagtaaaacccraaactataaaaaccctagaagaaaatctaggcaataccattcaggacataggcacagacatagatttcataatgagaacaccaaaagcaattgcaatgaaagcaaaaattgacaaatggtatctaattaaactaaagagcttctgcacagcaaaagaaactatcattagagtgagcagacaacctacagaatgggagaaaggttttgcaatctgcccatctgacaaaggtctaatatccagagtctacaaggaacttaaacaaatttacaagaaaaaaatcagacaacccataaaaaactgggcaaaggacatgaacaggctcttcccaaaagaagacatacatgcagccaacaaatatacataaaaaagctcaatatcactgattattagagaaatgcaaatcaagaccacaatgagacaccatct

SEQ ID NO: 909303 - DNA, 538 bp, Homo sapiens
gattttctcccatgcccccactgcccagtgctgctgtaggtttgttgtcctccttctaagtaatatcctggtaaaatattctgagcaatattgaaactaagtgaaaatcactgaagacttrcatttttttccagtctgagatagccgtatgataatatcttactgctaagtgagtagatatcaaaatgaaaaaaaatcattaaaatctgacagttaaaaaagattgagtattcatcacgaccaaaaccttcattttatctatgagaaatctgaggcacagagcactgtatgattaggtctacaagaacctgatagtcagtcatgattagagcacaatacacacttagttgtttttctctaactaatatctatggtttctgtataagctagacatatttaatcaatgaggaagacattatatttaatttaaaagaaagagctagaaagaaagagagtgggacaaagtgagaaagccaaacagttacttgttgaaggatggttttttggttttatattactggcagtagaatgcagaaga

SEQ ID NO: 909304 - DNA, 651 bp, Homo sapiens
tcttttgtacattgcccagtctcaggtatgtctttataagcagcatgaaaatgaactaatacaaggagtctgcaccctcatgttcattgtagcattgttcacaataatcaaaatatgaaaacaagcaaagtggccatcagtggatgagtgaagaaagaaaatgcaatctatatgtatgtatgcacgcacacacacacacacacacagagagagaaaaagagagagagagaggagagagaggagagagagagagaaagggagatacaatggaatattattcagccataaaagaaatctggttatctgtgacaacataggtgaaactagaggacgttacacctagtgaaatatgacagacacagaaatacaaatataacatggtctcacttatttgtggtatctaaaaaagttaaacttatagaagcagaagtagaacaatagcttccaggggctgaggggtagggggaatggagagatgttgatcaaaggcacaacattttacttatacaatgaattagttctagggatataatgtccagtatgggtggtgatggatgtgttaattaatttgattgtgrtattcaatatactatatatatatatgtgtgtgtgtgtgtgtgtgtatatcaaagcattgcattgtatactttg

SEQ ID NO: 909305 - DNA, 674 bp, Homo sapiens
taccacattttctttagccagtctatcaytgatggacatttaggttgactccatgtctttgctattgtgcatagtgctgcaatgagcatatgcatgcatgtgtctttataacagaatgatttacatccttcgggtatacacccagtaatgggattgctaggtcgaatggtatctctgcctttaggtctttgaggaatcaccacactgtcttccacaatggttgaactaatttacactcccactaacagtgtgtaagcattcctttttctccacaacctcaccagcatctgttatttattgactttttaataatagccattctgactgctgtaagatgatatctcatttttgttttcttttgcatttctctaatgattagtgatattgagtatttttatatgattattggccacatgtgtgtcttcttttgaaaagtgcctattcatgtcctttgcccactttttatggatttgtttgtatttttcttgtaaatataacttccatatagatgctggacataagacctttgttggatgcatagcttgcaaagattttctccctttccgtaggttgtctgttcactccaatgatcatttgtattgctgtgcagaagctctttagtttaattagatcccatttgtcaattttacttttttgcaattgcattggcatct

SEQ ID NO: 909306 - DNA, 674 bp, Homo sapiens
taccacattttctttagccagtctatcattgatggacatttaggttgactccatgtctttgctattgtgcatagtgctgcaatgagcatatgcatgcatgtgtctttataacagaatgatttacatccttygggtatacacccagtaatgggattgctaggtcgaatggtatctctgcctttaggtctttgaggaatcaccacactgtcttccacaatggttgaactaatttacactcccactaacagtgtgtaagcattcctttttctccacaacctcaccagcatctgttatttattgactttttaataatagccattctgactgctgtaagatgatatctcatttttgttttcttttgcatttctctaatgattagtgatattgagtatttttatatgattattggccacatgtgtgtcttcttttgaaaagtgcctattcatgtcctttgcccactttttatggatttgtttgtatttttcttgtaaatataacttccatatagatgctggacataagacctttgttggatgcatagcttgcaaagattttctccctttccgtaggttgtctgttcactccaatgatcatttgtattgctgtgcagaagctctttagtttaattagatcccatttgtcaattttacttttttgcaattgcattggcatct

SEQ ID NO: 909307 - DNA, 601 bp, Homo sapiens; identical to SEQ ID NO: 903563

SEQ ID NO: 909308 - DNA, 601 bp, Homo sapiens; identical to SEQ ID NO: 903564

SEQ ID NO: 909309 - DNA, 655 bp, Homo sapiens
ggacctaagttatgaaacaacttctttcttgacatattaacataagaaaacaagtatctcaattctttaaaccctctactcaaataatatatcataaaggggtatgagatctcaataaccagaaaagtctatccataaaaagggagggaaaaaaagacactgcagacgttacttatcaaaattatgtactccagggccaggcgtggtggctcacgcctgtaatcccagcactttgggaggctgaggtgggcggattacttgaggccaggagttccagaccagcctggccaacatggcaaaaccccatttctaccaaaaatacaaaaattagccaggtgtggtggtgggtgcctgtaatcccagccacttgggagaatgaggctcgagaattgcttgaatccaggaggtggaggctgcagtgagccaagatgattgcaacactgcactccagcctaggcgacagagtgagactccatctcaaaaaaaaaaaaaaaaaaaattatgtactgtcatgtgaggtggctagggattaatttttccagtaaatatgtcaaaattgagaaatgaaaatraacactgtgctccactgtcaccccttcaggctgctaccaggacacagccccgtgctgctcagagaatgcttgagtgtcctctt

SEQ ID NO: 909310 - DNA, 598 bp, Homo sapiens
gtaccagctaccaatttacaacagattttgccctctcgggaaaataaaaatataaaaagaaaaaatattgctctctgaatgaagctaattagaggctctctaaamagtcggctagcttgaatataatagtgaagggaaatattaaagattttcaaataacttattgaaagaaaaagagggaagaaaaatggcagagcatttagagttagaacagacatgaacaatacagtagcaggaaattcctcttatttgctatttaatcaaccttcataacgtaggtattattagacacctatcacaacatgcaaaaggaaaacagcagacttcctgggattgaacatcagacacaagtaattcaaactagagtaaaataaacatcgttaaagtataactcttgcttttttgccagttctggctgtcttgatccagtattgtaacatttaaagaatattaatcagtcacacttaaaatcaatttaggagattttttatttcttaccagtttgtggataacagtaaatgtggataattatgctcagttttaaaaggtggaaagtgatttcacttctagtcatattttccacattacttctgtagaa

SEQ ID NO: 909311 - DNA, 663 bp, Homo sapiens
gttattatctttaaatgtgaagacacaatatgtcaccgtaaacatcaagacatgggagttttggaggaggaaataaattgatagacacatattgtttttctccacaaatgagaaaccaaaggtccaagagaatacacaatgtgctcaaggtcatatgcttagaagttgtcagaactgagatttaagttgggagtgagaaatgtttgagaagaaaaaaatctcttcaagagtagggggctatttaagagcaaacatatttaagcttaacaaaatattatcgttttgtaatatattaagcaaaatattaccacttggacatggctgttttcattcattctgcgaatttgctcctgcataaaaggaaacacattctaaattacttagacatcttctggtacaacacatttatcttacattgcaccagaagtatacataacatcattcatgaaatttagaatagactgtattctatgccacagttagcaaaaaatgtcaaaacactttttattttctaatgtcagaaaaaaattttagctaaaggctaagctcactatagtttggaaaaataaacaattagtaaggttcatactctgaggaaaaataataacctaccatttctctaggactacatatttttctayttatggctatttattaattatt

SEQ ID NO: 909312 - DNA, 679 bp, Homo sapiens
gttgttcagtttccatttagtcatgtggttttgagtgagtgatttccattcttttgcatttgctaaggagtgttttacttccaattatgtagtcaattttagaataagtgctatgtggtgctgaaaagaatgtatattctcttgatttggggtggagaattctgtagatgtctattaggtccgcttggtccagagctgagatcaagtcttgaatatccttattaattttcaagacagtatctttccttcatttatgaagattacttttgctggatataaaattcttggctgataagtgctttaaggaagctaaagataggactccaatcccttctagcatgaaggatttctgctgacaaatctgttaatctgatagattttcctgtatagattacctgatgtattgcctcatagctcttaatattctttccttcatcttaactttaaatatctcaatgaatgtgtgcctaggtgatgaaatgtttttgtgatgaacttccagggtgttcttttagcttcttgtatttgaatgtttagatctctagcaaagccagggaaatttttcttgattattccctcaaataagttttccaaacttttagatttatcttcttcctcaggrgcagcaattattcttaggttccattgcttaacataatcacaaacttcttggaggctt

SEQ ID NO: 909313 - DNA, 632 bp, Homo sapiens
  misc_feature 397: n = A,T,C or G
aaatgaatcgtgaacataatgtcctttacttcaaatactacactctcatcccacaccccctgttctgttgagcattgtcactaaaataacaaacaygatgggtgtcaggggcagtggaggaaactaaatatttttttagccatacactgctgaaatgaggcattatcacatgagccagtctttcaatttagaacacactcattccttaatttagtttgatgtgaatgcacatacagataagtgcatatagcctcagtgtacagtttgattcattttacaaatggaactcacccatacaccaacatatagaagcccttcatactcccttctaatcatgatcttacttccaccccagggaagccattagccaaacttttaacatcatggatgctaattnttgtactctatgcaaattgcatattaaatagttatttttttcattctggcttgtttccctcaatactatgtttgtgagtagctacattttgttcattctcattgctgtatagtattgcattgtatgactacaccaaaatttatttatccattcaactgttaataggcctttgagtagttttgaggttggctttatgaatactgttgctatgaatattcatgtgcacatcttttgg

SEQ ID NO: 909314 - DNA, 580 bp, Homo sapiens
tgattgaggttaacctgtaatatgggaattattagcatccagccaaaatgaaggatgtgtggtaaagcttaactgatataataatgtgttgtatttagaagaatgtgttgtacctagcaggtattcaataaatattactgtttcttctcttgttatggttgctatttcattttgcttggcctgtctcctttaacttacagtgtttttttaggtagttgaacactgaaataataattaaaagacaaagtatatagaaaatgtggttttcctttctcattaatctgtcagtcacagagttaggtcactgaaacatcaaatttaaagctccaaaagatctcacaaataattttgtacacgttccccattttttagatgaggaaaaatttctcaaacctccaaactcacccagcctgtcatctctaacttcctattcaattccagaaggaacagttggggagctgaaataggagagggatttctatgtcagctttgcatttttcaactcattattatagaaatctatttcagtgagactttaataattttatggataatcgtrtgagccagtcacacatattct

SEQ ID NO: 909315 - DNA, 616 bp, Homo sapiens
ctcctcaaatctttcgtaagggctcccttccattgtttctaggcttgagtttgtctcagaagaaggaaagcatcaccacaggcctcttggctgaaaccctctgcgtcccacctgtctatctgcatcagtagctgcctggctcagaaaaagtagctcagttggagatgaaaatgaaaatgaagagaaggcagtctgatttatgttgccttcattgtgactgctatctatagttattttttttaaagaaaggattaaggaggaagaaagaacagaatatagaattaaaaaaaaatttcataccaacccatttttagttacctatcatcacactagctggcttagaatgaaaatacctttggggcctgcgtgctaaaatttctaatgctttagttattttagcatgtattagactccaggatcagtataaatttcatctaaaattcgtaaatggtattaatcttattcagaaccagaaattataccttaatgaataaacagtattaccaaatacagaygcaaagaatatagcaatttctcaaaaaaaattttaaatggggacatgtttaagagcataatgtcacaagtactttatatgatagaaacttaatgagaaaaa

SEQ ID NO: 909316 - DNA, 552 bp, Homo sapiens
tggctcactgctagcacagcagtctgagatccaacttcgaggccacagcctacctgggggaggggcatctgccactgctgaggcttgagtaggtaaacaaagcggccaggaagctcgaaatgggtggaccccaccacaactcaacaaggcccactgcctcaagactccacctctgtgggcagggcatagctgaaaaaaaggcagcagacaacttctgcagacttaaacatccctgtgtgacagccctgaggagagcagtggctctcccagcatggtgtttgagctctgggaacagacagagtgcctcctcaagtgggtccctgacccccatgtagcctaactgggagacatctcccagtaggggccaacagacacctcatatagacagctgccctatcccaggaaaacagggtctggattggacctccagcaaactccaayggacctgcagctgagggacctgactgttagaggaaaactaacaaacagaaaagaataggatcaatatcaacaaaaagatcatctacaccaaaatcacatttgtaggtcaca

SEQ ID NO: 909317 - DNA, 583 bp, Homo sapiens
ctctaccaataattttttaacttttctgattagtcatacctataataatctagatacccaatatataaagttctaattattttaggtcactttttaaatatgagtagttttttaaaaatatcataataccagtaaagaagtaagaatgaaactcatgtctccagaatatccaaagcaatctaagcaaaaagaacaaatccagaggcaccacattgcctggcttcaaactacactacaagctagcataaacaaaacagcatggtactggtacaaaaatagacacatacaccaatgtaacagaatagggaagccagaaatgaagccatatgcctacaaacaattgatcttcagcaaagttgacaaaaataaacaatggagaaagaagaccgtattcaataaatgatactgggaaacaggccagccatatgcagaagaatgaaactagactcctatctctcaccatatagaaaaattaactcaagatatattagattagacttaaatgtaaagctgaaacyatgaaaatcctagaagaaaacctaggaaaaactcttctggacattggcctagaaaaataatttat

SEQ ID NO: 909318 - DNA, 520 bp, Homo sapiens
tcttggataatttacttactgattaaattacctactgtgtataaagtgtgatgataggtgtggctcatcaggtaaattgtttattttttatgtmtatatatatttttgagatggagtcttgctctgttgcccgggttggagtgcagtggtgcagtcttggtgcactgcaacctccgccttccgggttcaagcgattctcctgcctcagcctcccgagtagctgggattacaggcacatgcccagctaatttttgtatttttagtagagatgcggttttgccatcttggcaaggctagtcttgaactcctgacctcaggtgatctgcctgccttggtctcccaaagcgaggtaaattgtttattaaacagcaaatgaataaatataaaattgcttttcaattaaatgattagcttgaaactataattcaagggtgaacttaaggcagaaaatgcgtcttcatcacctttttaaattcccaggtcctgagtacctaacacagtaggcatttaattttttttt

SEQ ID NO: 909319 - DNA, 635 bp, Homo sapiens
ggttggtttcccgcaaactattttcgtaatagtaagttctcataaggtctggtggttttataaggggcttccccttcattcagctctcattcttctgtctcctgcagccctgggaagaggtgccttccgccatgattgtaagttacctgaggcctccccagccatgcagaactgtaagtcaattaaactttttttctttataaattacccagtcttgggcagttctttatagcagcatgagaacggactaatacacctgccttcacaacagctctcttatccacccctctgtattcccattgccctgacttgtttcagacatgcaacctttcactcctgccttagtcacatgtctcctctcccctccagctccctgcacagcccccacccacccacacagcaatcagatttataacagtctgacaatcacatctctcttttacttaaacctttaaaggattccctttccctacaaactacatacactccttacctgatctaattttatttccatcttcctctccagtcctggttcttgctgtatgtaatcttagaccctatacccttgacttcagtaataatgaacaycttaccttttcttgaatatgttctagttctatgcttacattaatctc

SEQ ID NO: 909320 - DNA, 668 bp, Homo sapiens
tgcagaaatcaaccatcttctgcatcgctsatgctgggagctgtagaccggagctgttcctattgggccatcttggcttctcccccaaaaccacgtttttatttagcttgtttgatatgtggttcacacacacacacacacacttattctggcttcactaaattggaattctccagttacatgtaagtatactatgaacttttcaaaggcagcaactgtctttgtttctgtatgtctagcacctaacacagctatcagagcccatatcaagccataggaaattgattgtggtttaggggatgaattaattaccaattaacagatagatttatgaaaaataaattcatgtcagaaaatctaaattctaagcaattttgtttacctctgactgtttgtggagcttcttttctctttatttcctcaagcctcactattgcaattacaactttaagaatcctttgattcttcatctctgaggcatatgttctttaaaaaataacaataatttccatttgaaaaacctcaaattagacttgataactttaatttagaaaaacatcaaaacaatctatgttccctcagtatacaaatttgaataaagttgcatttaaataagttctcacattcatacagagtatcttcaatttgtggatttcaaatgcaaaata

SEQ ID NO: 909321 - DNA, 587 bp, Homo sapiens
ccatcctctattatccatccatttatctatatatttatstatcaaatctataatctatgtatcagttgtctacctatcatctatccctgtatctatttgcctatctatcatccctctactatctgcctatctagctctctatcatctatgcatctatccagttatctctctatatatctgtcatatatttatctacctatctctatcatttatgtaatctaactcacctattcctatgtattaatatatctgttatctatctatcatttatgtatttacctaggtctatcatttaattgtcctaatttatgtcttttctattaattatatacctaccatctatctcgttctaacagttatctatttctatctagttgaacctatttagtttatttctttccatctgtaatagaatatgtctattgtctatctatatatccttttttgctttttttgagacagtcttattctgccacccaagctggaatgcagtggcacgatctcagctcactgcaacctccacctcccgggttcaagttattctcttgcctcagcctcccgagtagctgggactacaggcccagcca

SEQ ID NO: 909322 - DNA, 527 bp, Homo sapiens
cttttgcagttcatatgtgattacatattttttctttcctctgtctctttcctctcttcttttactccagagtaatgtgcctagaaggagacagtgcatcgaagcaagtttactctcagcatgtcaagaaaacattaaaatattatttgcctgatgattgcattggacacattttgtgaaatacatgaatccctcctacctgggatgtcaagagactgctcttttgctgggagaatggactgatcttttgcatcagctcaacgctgcttttggggagccattttggatacaatatatgtattgcttcctttaaatgggaaataaccatggtctgtcaacaaataatcttgtttgataaatctgacccagatggtgtgctaggttgcaaaacgtcttcttctgctttggaaaaactcagctctgtccctccatccctccctctgccaccagcctctgtscacccccaagcccagctccctgatggcaacagtataaccactgaggctgaatcagagccaaaccctttc

SEQ ID NO: 909323 - DNA, 466 bp, Homo sapiens
ctaaagatacttaaaagagtccaggcgcggtggcttatgcctgtaatcccagcaatttgggaggcaaaggctggtggatcacaaggtcaagagattgagaccatcttggccaacatgatgaaaccccgwctctaaaactacaaaaattaggagaatcacttgaacctgggctgggaggcagaggttgcagtgagtcaagatcatgccactgcactccagcctgggacagagtgagactccatctcaaaaaaaaaaaaaaaaaagatacttaaaagatgaagaaaggcatgttgtgaaaatgtagtaccagtacattatatttgtaactcagataaaatggagaaactatttgaaaaatataatttatctacaagagaaactgaatttgtaagttaaaactccttcccaaagaaaactgaaagtactgagacaattgaaaatttatatgagaacaataaacctagac

SEQ ID NO: 909324 - DNA, 598 bp, Homo sapiens
cctgtggaagaggccatctctcttttcccttgggtgttgtgacatgtgaaagacagccacagattttcgtttgcctaggacagttccagtttatgcccactgtcctacagtaagtattaattacattacctttcactctccagaattttccaggtaagtgataaattagacagttgccttagaaatatagatataaaacaaaggattgcattggatatttttccagtatgaaaaaagaagaaaaaaagcaatgctaaggaaacagccaagggagaacacagccagggaggcacttagcctgaaatcattctctagctggattactgcagtagatttctattccaatttatttccttacttttgaaatcagtttgaatttggatctctagtatctgcagctaaaggcaacctaactgatatactccgtcacctcaagtgatacgtgataagagcttgatgtgtattcttccacatttctycttggtcatacaacaagtacattctcttacatacatatttcacacaataggtttttgggtttttggttgaagtttgtttttatgagagtgaagttattacacatgtatttaataacata

SEQ ID NO: 909325 - DNA, 516 bp, Homo sapiens
tctgaagccatggcctgagctgcaccttggcccctttttgccatggctagagcgggtgggatgcagggaaccaagctcctaggcttcacacagaagggggaccctgggcctggcccatgaaaccattttttcctcctaggactctgggcctgtgaagggaggggcttccgtgaaagtctctgacatgctctggagacattttccccattgtcttgctgattaacatttgactcctcattacttatgcaaatttttgcagccagcttaaatatctcctcagaaaattggtttttcttttctattgcattatcaggctacacatttttcaaacttttatgctttgtttcccttttaaaactgaatgcttttaaaagcgcccaagtcaactcttgaactmtttgctgcttagaaatttcttccacaagatacccttaataatctccctcaagttcaaagttccaaaaatctctaaggcagggtcaaaatgctgccagtctctttgctaaagcatacata

SEQ ID NO: 909326 - DNA, 596 bp, Homo sapiens
ttacacattaagaggtgatttctgtgggaacatggctttatttagccccagtgtatttccagaggccctagaacatggcrtagagcatctgcatgttttccatgccctgaagaagaacaaagaaataattgaaagagatctgaccaagggaaggcctaggaacaagggtgagtgatgtcaaaatagcaactagtgtgaacagggagccaagaacaagttggggttatgtacatttcagtggagcatggagtaacaaagcgccagatcctacccttctgactgctgatgatctgaatgcttgtgttaaaattcacatgttgaatcttaatccccaatgcaacaatattaagaggtggggccttaaagaagtgatgaggtcatgaaggtggagccctcatgaatgggatgagtgcccttataaaagaagctcacaagagatagcccctttcatcatgtgaggacccagcaaaaaggtcccaactatgagaaagtggccctcatcagacactaaatctgttgacgccttgatctgggacgtcacagcctccagaactatgagaaataaacttctgttgcttatgagctacccagtttat

SEQ ID NO: 909327 - DNA, 714 bp, Homo sapiens
tttccaaataagattatgacacaaagcctgagagttgatatacccctggggtcaggcagagtaaaggtatattgctggtcttgccagctgaaggcaaattgcttctggtgggccttatggacaggaawggagaaaaagacatttgccaagtcaagggctgcataacaggtactaggagatgtgttaatttactcaagcaatgaaaccacatcttgtacagaagctgcaattggagtcaccacttggttaagcttaatccactgtcattctttaagatccatctgtcttctgcacaggccaaataggagagttgaatggggatgtggtgggaataaccactcctgcatcttttaagtcctcgaggcatgcaatattgtttttgattcactatttttctatgtagaggcagctctaatggcttccatttggcctttcccaccataatagccctcaccttgccagtcagagagctaatgttggggttctgccagctgctaagtatgtctatgctgattatgcattctggcactggggaaatgaccacagaatgagtctggggaccccctggacccactgtaagtcggacctgagctaaaactctattaattacctaacctccataagcacctactttaactggagggccacaatgacattttaggtaccctggaatcaacatcagctcagagccagcatccagtagtccccaaaatg

SEQ ID NO: 909328 - DNA, 580 bp, Homo sapiens
ctctttttaacctggcttcatttacttaacataaagtctgaaagtttgagccatatgattgcaggtagtatccatttgttctttttttcctctgatgtagtatagatgctccttgacttatgatggggtatgtcctgataaacctgttgtaagttgacaatatagttagtcaaaatgcatttaatatacgtaacctactgaacatcatagcttaggctcacttccttagacgtgttcagagaacttacattagcctatacttgggctcaaaaatctaacactacttgataataaagtgttgactatctcatgtaatttattggacactgtactgaaagtgaaaagcagaatggttgtatgggtacttaaagtatggtttccataccaccttaaagttcaaaaatcataagtcagccaaaccattgttaagtcaggaaccatctgtattccattgtatgaattttcacagtttatgtatccattctcctactgaygagtatttcagttgtttctagttgggagagtgatatgatttggctctgtgtccccacccaaatctcatctcaaattgtagttccca

SEQ ID NO: 909329 - DNA, 638 bp, Homo sapiens
agaaactgcatcaactaacgagcaaaataactagctaacatcataatgacaggatcaaattcacacataaccatattaaacttaaatgtaaatgggctaaatgctccaattaaaagacacaaactggcaaattggataaagaatcaagacccttcagtgtgctgtattcaggagacccatgtcacttgcagagacacacataggctcaaaataaagggatggaggaagatctagtaggcaaatggaaaacaaagaaaggcagggtttgcaatcctagtctctgataaaacagactttaaaccaacaaagatcaaaagagacaaagaagaccattacataatggtaaagggatcaattcaacaagaagagctaactatcctaaatatatatgcacccaatacaggagcacccagattcataaagcaagtccttagagacctacaaagagacttagactcccacacaaaaataatgggagactttaacatcccactgtcaacattagacagatcaacgagaaagaaagttaataaggatatccaggaattgaacccagctgtgcaccaagcasacctgatagacatctacagaactctccaccctaaatcaacagaatatacattcttctcagcaccaca

SEQ ID NO: 909330 - DNA, 616 bp, Homo sapiens
atcaactagatcctgactccagaaarcagacaccaagatggtgttagatgggcaagaggttttttgacaaagggaggaagagaaggcaacaagagtcttcagacttcagttgaaatctgatacctatagaaggaaatagggaagaaagggacatcaagtagtagaagggttggactgcagagcaattcaggagttaatccaggtcaatagagagtccccataccatagtcactcttaggatgagtcctgtgtcttcccagaatgagcctgtcaccctaagttaattatgcccctgcagcagaagatcaaggtagtgtgttttcatggccaccgcaagtgcctactctagataagagatctgttcttcagtgagtcatcaaatacactcttaacaaatacaaaatacacaaaatttaatttaattagcttatccaaattcaaattaacctgtacaaaacaggaacataaaatgatctttgaatatattatgtgatggtacatttatatttcattatatttattactcttcttttaaaaagcatcttccaggtttactatcacctttgcatgcatgaatagttgaatagatgggatgtcagaggaggcctcctctgca

SEQ ID NO: 909331 - DNA, 565 bp, Homo sapiens
aaaaaaagagaaggaaacactggatrgttgatcttcaacagaaataacttcaggaagtcacaaagcagtagatacatttatcccaataaaataaagctatataatctgtatacaaatagatagatacacatctgggaagtaaatgatgtagcagaaaagaaagaaagaaaaagagaaatgcaaaaatgataggtaatggcaaaagaggctatttggaaactgaatatattttttcaggcttttatgtggtgctttccattgtagtatctgaaagccacaccttcctatctatttgcctgtctataaacctgtagtgaagtcttataattttattttgcctcagcattcattttgaatgtaagttgaactttcttatgcaggaaatagggcttagtcatccttgacacagtttttggctctccatctcctctcagttcctcaagatggtagatccagatgtctgccttatacaaccacctcctggtgaccatttccctacaggaagcttggtacaagctacttgagtcccccaccgagccccacatcctcacaaatatgctatagt

SEQ ID NO: 909332 - DNA, 636 bp, Homo sapiens
gaagacaatgactaaagagaagaatctaatcatgtggttcaactggagaatagattaagaagaagaaagaatcaggaaatttaaaaaaaataataattaaagaatacccagaaagagaaatgaaaagcaaaaaagacagtgaaaaagagtaaagaaagcttaaagaacttatagaaaaccatggggaggaccgttatctacattgtgagagttcgcaaagggaaagaaagagagaaatgagaaaaaagcttatttgaagaagcaatgaccagaaattcctcaactctgaggaaagaaatagacattcagatccaggaaggccaatgaatctcagaaaagattaaccaaaagtaatataccaagatacattataatcaaaatgtcaaaagttaaaagacagagacctttgaaagcagaaagtgtaaagcaacttgtaatatataaaggtatttctgtgagcctataacttaccagcagaaaccttgcacactagaaaggagtgtgatgatatagtcaaagtgtcaaaggcacaaaaactctgttaataaagaatagtatacctggtaaggttgttcttcagtaataaaggggagayaaagactttcagagacaatacatgaaaagttcatcaccact

SEQ ID NO: 909333 - DNA, 642 bp, Homo sapiens
agcgtcctgaatagctaccactacaggtggttgccaccacaaccgtctaatttttttaaactcttttttttttttaagagatagagtcttgctttgttgcccaggctggtcttggagaatgcattttgctctttaaaagatccctaacatgaggtgtgtttaggttgaagtgggtatgtgcatgctatttaagattataatagtgaaaggatgttgggtgccaaattaggcataaagttaaaagagatctccaacacctacaacaatattgaaattcagaagtagaaaaatcaaagctctgctcatgcatgtcagggaatgtataacatattaatagaatccatgtcaatactaatatttaagtttacattaccattattgacttaacctaatgccaatgtcacagtgttgttattttatgtagtaaatgctttagaagtggttcatggctggcagtgattggaagaagataatattgcctaaaagtaaaaatctatattccattgtgaaatckcagctaatacaccactttgatccattatttaagatcattctataaagaaatatgaaaaatagcaataattttataattttgttatatgtagtaggatacatcaactagaaaatatttaatgaatttta

SEQ ID NO: 909334 - DNA, 400 bp, Homo sapiens
atctatgacagactggatttaaaaaatgtggtgcatatatgccatgaaatactatgcaaccataaaaaggaatgagatcatgtcctttgcagggacatggatggagctggaagccattatcctcagcaaactaatgtaggaacagaaaacgaaacactgcatgttctcacttagaagtgggagctgaacattaggaaaaatagctaatgcatgctgggcttaatacctaggtgacaggttgattggtgcagcaaaccaccacggcccatgtttcytatgtaacaaacctgcacatcctgcacatgtacaccagaactaaaaataaaataaaataaaataaaaaagaatacaggaattcctcagagatactgcaggtttggtatcagaccaccacaataaa

SEQ ID NO: 909335 - DNA, 429 bp, Homo sapiens
ggaacagaagagagaacccagaaataaagccaaatactaacagycaactgatattaaacacagcatacaaaaccataaactgggaaaatgacaccctattcaataaatggtgctgggataattggcaaatcacatgcagaagaatgaaactggatccccttctctcatcttataaaaaaatcaactcaatatggatcaaatatttaaatctaagacctgaaaccacaaaaattctaaaaaataacattggaaaaactcttctggacgttgacttaggcaaataattcgtgacaaagaccccataagcaaacacaacaaaaacaaagtaaataaatgggacctaatttgtctaaaaaagcttctgcatagcaaaacaaataatcagcagagtaaacagacaactcatagagtaggagaaaatattcacaa

SEQ ID NO: 909336 - DNA, 675 bp, Homo sapiens
cctggctgtgcactttgtttggaaggagaaatggccagatgtgtgattatatactgattcatgggctgtagccaatggtttggctgaatggtcagggacttggaaggagtatggttggaaaaytggtgaaaaggaaatttggggaagaggtatgtgaatggacctctctaagtggtcaaaaactgtgaagaaatttgtaactcacatgaatgctcaccaaagggtgacctcagcagaggaggattttaataatcaagtggatgggttgacttgctctgtggacactactcagcctctttccccagccaccccgtcattgcccaatgtgcccatgaaaaaagtggcatggtggcagagatggatgttatgcatggactcagcaacatggactctcactcaccaaggctgacctggctacggccatcactgactgcccaatttgccagcagcagagaccatcagcgagccctcaatatggcaccattccttgggataatcagccagtttcttggtggcaggttgattatattggactcgtccatcatggaatgggcagcattttgtcctcacccaaatagacatgtactctggatatgggtttgcctatcctgcaggcaatgcttctgccaagactatcatctgtgaactcacagaatgccttatccactgtcacgg

SEQ ID NO: 909337 - DNA, 613 bp, Homo sapiens
atatcaatccttcacaaactattcaaaaataaaattaaattaaaaggtagagcaagcacttcccaacttattctgtgaggccaaaattaccttaataccaaaaccaaacaaagccatcataggaaaataaactacacactaaaataccttatgaatataaatgcaagatttctaaacaaaatattagcaaactacatccagcaatatatagaaaagaactgattattttccatgaccaaggatttgtcctgggaatacaagcttgttttaacattcaaaaataagtcagggtaaaataccatctcaatacaataaaggacaaaaaaatacatgatagatacagaaaaagcatttgacaaaatcacacactatttaaaacaaaaaagtaaaaaaaaaaaaaaagacccaggaagctggttatagaaggaaactagctcaaccaaataaaggttatttacaaaagccccaagccttatttacaaaagccccaagccaacattatacttaatagtgaagactgaatgatttacctctaagttcaggacagatggatattctcacagtgactgygcaacattgtactgaaggatctggcccggacaatttggcaaga

SEQ ID NO: 909338 - DNA, 653 bp, Homo sapiens
tagaaaaggccaaattgactggcttaaccagaaaagaaaattcatcatctcaggaaacaaggaaaggttcagtggctccaggatwgtttaattcagtgacccaccaatgttaacaagacccttcattctctctatatttccacttgaccatttgcagcatgtcatcttcatttcaaagctgcaaaatgaacagagttatggctgtccaatagaataaaatgagctgtttattcttaagcacctccttttagggcaagaacatccttcgctttgctagaattttgtcatataaacttgtcagaggcagttcttggcagagatattagacttccatgattgtcctagactttggtgttaaggttaggttgggatctcctcatgagcacacagttgggtggaagaagggaaattcttgaagaaaattgtggttttggcaggaaggaagacagaaaggaattttgaatggtcactaattgcacctcctatagatgccctttagattatgaatgattaagcacaaagaagttacataacttactccaaactatttaatagaagtggaatttcctttctttctttttgtatggaccccttctttcttctaaaaagaattattatattcaaattttaactacagaaaaacaagatagaaa

SEQ ID NO: 909339 - DNA, 593 bp, Homo sapiens
cagaggctgttcaggtaccagtcctcctgctcttgagtaagagaagaaaatgctgtatttgtagtgaaaagggtgctggttcaacgctarcaggattttccaattgaaggggtcaaggaaacatgtgcagattaaacaagcacaatttttagtttcattatatttatatgatgattgtagctacttattagttatttataacccaccacagctggttcggtggctcatgcctttaatctcagcactttgagaggctgaggcaggaggatcagttaagcccacgagttggaaacctatgggcaacatagtgagatcttgtctctacgtttcttttttttttaattatccaggcatggtggcatgcacctgtagtctgagctactctggaggctgaggtgggagaatggcttaagcccaggaggtggaggttgccaccagtcaaaatcacaccactgtacttcaatttgggccacagactgggaccctgtctcaaaaaataataaatgaataacccaccccattctaagcaggactatgatgaaagatatataatagaaaagtatgatatgaatcaattagtgaatagtggaaaa

SEQ ID NO: 909340 - DNA, 593 bp, Homo sapiens
cagaggctgttcaggtaccagtcctcctgctcttgagtaagagaagaaaatgctgtatttgtagtgaaaagggtgctggttcaacgctagcaggattttccaattgaaggggtcaaggaaacatgtgcagattaaacaagcacaatttttagtttcattatatttatatgatgattgtagctacttattagttatttataacccaccacagctggttcggtggctcatgcctttaatctcagcactttgagaggctgaggcaggaggatcagttaagcccacgagttggaaacctatgggcaacatagtgagatcttgtctctacgtttcttttttttttaattatccaggcatggtggcatgcacctgtagtctgagctactctggaggctgaggtgggagaatggcttaagcccaggaggtggaggttgccaccagtcaaaatcacaccactgtacttcaatttgggccrcagactgggaccctgtctcaaaaaataataaatgaataacccaccccattctaagcaggactatgatgaaagatatataatagaaaagtatgatatgaatcaattagtgaatagtggaaaa

SEQ ID NO: 909341 - DNA, 635 bp, Homo sapiens
ttattattaactgtcgtcactatgcacagtagaccttctaaacttacttgtcctaactgaaattttgtatcctttgaccaatatctccccaattcctactctcctcaccctccaccaggccccaaccccttggtaaccatcattctaccctttgtttctatgaatccgattttttcaggttctacatataagcgagatcacacagtatttgtctttctgtgtctggcttgttttacttaatataacatcttccaggctcatccatgttgtggcaaatgacaagatttcctttctttttaaaggatgaataatattctgttgtgcatatacactacaatttcttcatctattcataccttgctttttaactttttaagaagtgtcatgtaactcaaagttttatattttcatgtggttaatccaagattattttcatttgttacttcttgctttggtactatgcttaggcagtccattttcaaaacattatttatttttaaactcctgtgttttcttttagtatttatatattcttatttttaacattcaaatcamtctgaaacttcttttaagagtaacctatgagtaaatatatctatctatctacttacctacctaccatctacctatccatc

SEQ ID NO: 909342 - DNA, 629 bp, Homo sapiens
aatatgtgaccatccaagttctcttgtgctacaggaaagacatggattgggaggagtgtgatcctgagaaatgggttgcagacagttatataaacaaagacaagagtggcaactttgaaactgaaaacactgaacattacttttgggtgtaagaatttcataccccccaccctgatttgagacaatcagcaactctatacgtaagtcttttcgtttgcttcaactgggtaagttattcccatgtttgccagcatctttcacttcctctaaagcataggagattgagatccacgtcgcagagaaggagaagtagagaacatgcactgaggaatatggctcatgtactaagagagctgtaggtcttgacatttttcttggcataagtccgaggaacaactatggatgtacattctatggcttttagacaaaagaagatgtaatataagactaaatatggtaatattcattaccatgggtatactcctgaaggatttataacttaatatgttggtttaagtgtctgaaaagagcattcatagtcttctatgttgactaattgaaatccggacttaaaggaggcctayagtaaatgagtatgagatgctagaacttctgtgtcaaagtatagc

SEQ ID NO: 909343 - DNA, 633 bp, Homo sapiens
caccaggatcctagaaaagcttgtggctgtcctcagtagtccataaataacagtgaggaattacatattgattccattggcctctctgatakcaaagagttttagagatgttgaaggggcataaaactcagagataaggtagacatatctctggcagatggtgagctcagtttctgggtattccaaactttcatcaagttctgagaagcatgcctgctccacctgacccagtcatgacaaactaaatacatccctgcattctgggatagctcactgaacagcagctctaacaccagctgccatgcaccttgacattgctcccctccagccaaagcttataaatgacaacaagtgacacagagaaaccagggctgttttctgtctttatgcaagtaaatacagcatatactcctggtaaagttaaaattataccttctccttttaagccttttggttgaaggtttacaaaaacatgacaacttttgaaaatcagatctctaatccagataactgaaagaaaaagaaaggaaaatgtataaaaaataatattgtccgtaatactgtcaattcaaaactttacctcaaaattcttttcactcatgaagtaatgtttattaactgttcttactgaga

SEQ ID NO: 909344 - DNA, 624 bp, Homo sapiens
attcaggtcatttctaggtttttttctytcattttcattttgaataattgtctcacactgattttttaatcattaattttttttttctcaacaattagaaaccagcgttgcaatgctacagtgtgatgtggtgcttaaaaatatgggctgtggaattgcactgttgggtgttgatcctgaccctcctagtatcttcaggctgagtagtgttggcagtaacccaagtctcctaatttatggggcggatttagcaccatacttggcaccagcataagcatccagttaatactatttttttggtcacaaaaatattccttgatatataagaattatctctagtacagatttctgaaaatggtattatttaacaaaagggcataaacactttaggacgcttgataggtattgataaattgtttttcacaaattcttatcaatgtatttgcctatcagcagtatcataccaacaaccaatatgatatatttaaccccctttgaattagagaggcgataatatttaaatatttaattttttaactactagatcgatggaagattttttaaaaaataccatatatttaattgccatttagatttcttcttgtgtgaatttgtttattaatg

SEQ ID NO: 909345 - DNA, 574 bp, Homo sapiens
taatgtatattttaactttytttatagagtattttctttttgtgtttttcacatatgcagacaatcagaatcaggcaatttaatcaacatctttagtagatctatgtcttttgtgttgtgaactaattgtctcatatgatttagaaactcaaattactttttctaataaaacttagattttttgtatgttatttgactaattctagtccctttcactctacatcttgcaagtttttaaaacattttaaatgataagctatgatacgttgaactcagactatcataatcctttaaagatccatatatagttaattttttctaactttcttttggagatttaccaatacaagaaccacatatttaatgtgtatatttagtcactattagatttgcagatagtcattggattaaatcaagggagaggaattttgtccatgagaagacaagagatttcaaataaagctgaaaaatcctgttacgactgagttttgttcaagtacaggtgtagtatatcctattaaagtgggtagttgaagtgatggaaatagaagccatgttgcatttgttgtgtaaa

SEQ ID NO: 909346 - DNA, 602 bp, Homo sapiens
aattattttaaatatataataggtaacataataatcctgcaaggtatgctttatagtttataatttagacctaaggatattcaggctcagagcaattaaatcattggtccactaagatacacatacattacacataaattaaaatgttatgcaaaaattaaaaatcaagttcaattcaaacatgcatgtattttctatgaaattgtgctatctccctgttcagaaaaatctccctgttcataagaaaagtgaggaataccaaacttggattcaagaaactataagcaagaatgaagagctgaaactaactctcatgggtaaaaaatgtcaaaaaaaattatgagctaaatgctagtgtgtcatgtaataaataaaaagaaaatgttacattcagattatgttttcccattatcataactggttgaatgtgaaataaaaagaatcaatgagttcacagtttcacttgtgcaatattaaaatatttttatataactaactttaaaacttattttcttcaataaagtaactttgctgctttggtgaaatratactactattaacaattatgatatttattaatttactactatgtgacagccaca

SEQ ID NO: 909347 - DNA, 587 bp, Homo sapiens
ggcctcctaggagaacccaacatctaaagtaataattaayagaataatggaaactgtggataagtaataacatattagtttatatattaacttaaacaggagcagcagaatgaagcaccgtagaacatgccagctcttaatgttttacacgtaatcacatttttcctcttcttgacatcatttttttctctagaacatataccctatgtatcttcctccaaagtagaaataatcagaccacagtttctcactatgtgcacatgaatcatcagattccaggcaatgcctgagagtcctcatttctgagaaggtacctagaaatctggtctgtggatcacactttcagtagtaaagaccagacttcatatggaatgacactgctggttatttcagctgcatattttttttctaacttttctaatttgaggctctacttaacctggacagttgggacttgaataagtaccagtgactttaagtaaaatccataatatatcttggattcattctaaattctcagctctccacagattatgattaaaacaataaagatactcctaatagttttattgaatttttatccagaa

SEQ ID NO: 909348 - DNA, 619 bp, Homo sapiens
ttttccaatcttaatcttcagttctcactcattcccggtgatggatgtgaccatggtagaggagacttgctaacatcgagaattcaatcttcctggaagcttttctatctttttaagtcctggatctggtcctcagaatttactacctcaaggataaaagacaaaagattctctttctattttaccagaaagatgttctagatttcatactttgtcttcaattagtaactaatcaccctccatctttctattggtattttttctttaatgtatcaatagcacctaccaagagccatttgattttattgtcatcataattgctacttccatgaagttgccaagcagctggtctattacacccacaagagcattcccttccactaatatcttctcccagttcactccccgggaaagccacatgccatggtctatcattgcttcatctaacaccagtaattgggtagtagccttacagtgagtgatatggctccaaaatctcattttagtgcctgtttcctattatcactctaacactaattttcataggttattttcccaaggcaatagaccctgagatagaatttacatgccrttggtacattggagaatgctctcggga

SEQ ID NO: 909349 - DNA, 626 bp, Homo sapiens
agaaggcaatcgccatggactcctacgataaaacataaataagtattcccagcatttttaatagtaaatgctaaatttcaaccctaaattgtttcttttcttctctgtgatcctagagcgataggatattctygattattaatatctactgcataagaatatgccaaaaggatgaattggacaaaccaaatgcacaagatatccaaacttaaaagaataggccaggcacggtggctcgcgcctgtgttcccagcactttgggaggccgaggcgggtggatcacctgaggtcaggagttcgagaccagcctggccaacatggggaaaccccctctctactaaaaatacaaaattagccaggcatggtgcccacgcctgtagtcccagctactcaggaggctgaggcaggggaatcacttaaacctgggagacagaagttgcagtgagccaacaactgcactccagactgggcaacagaagaagactccttctcaaataaataaataagtaaataaataaataaataaataaataaataaaaagaataaagggtaacacatccctaggcctatatgatgtgagtagaaatttgaacacaaccactcatttgttcatttagtcaaagtt

SEQ ID NO: 909350 - DNA, 571 bp, Homo sapiens
ccgcagtcaatcaggggctgaagtagaggsgtctgtcttgttatcacaggttaaaggcggcctgtgtgctgcctcaccttgcctagaactggctgcacctgctggtcttttgcttctcccttaacccctggttaccttcattctctattctcctgcctcaatatcatggatatctatccagaaaactgaaaaattgtgctcacacaaaaaccgatgcctgcaagttcatagttttgttcatatttactgaagacggaactcagccttcaactggtgcataaggaaaccgtgatgccttcataccgaggaataccactcagcaattaaaatgacacacatacctactgggatcaatcagacgccagctgaaggaacctctgaaggttcccgctggaggagtcctgggtctgggtgatgccgcagggtggctggaccgggcagccaacagcactgggaggggcacagggcgggctaaggggttcaaggaaggctggttgcagaggctcggcacctgagagctatttttgaggagctgcaccttgattttggcagtggttgcgtgactctgtac

SEQ ID NO: 909351 - DNA, 557 bp, Homo sapiens
ctcttcctatcttcttttaagccctccaaactgtttcaacatgtgcctgtgacccagttccaaagtaacttcctaattttcatgtatctttagagcattgcctcactccttagtaccaattttctgtattagttcattcttgcactgctgtaaagcaatacaagagactgggtaatttacaaagaaaataggtctaattggctcatggttctgcaggctgtacaggaagcatgctgataacagcttttggggagtcctcatggaacttacaatcatggcagaaggcaaaggcggaacaagcgtgtcttacattgctggagcaggaggaagggggttgtgccacacacctttaaataaacagatctcatgagaacagcaccacagggatagtgctaaaccatttatgaaggatctaactccatgatcacaccacctcccatcaggcctcacctccaacattgggrgttacaatttcacatgagatttgggcaggaacagagattcaaaccatatcacccatttttactgggctctggaattataaacaaaaggcaatg

SEQ ID NO: 909352 - DNA, 555 bp, Homo sapiens
aattcgattttctattcatctactgggtgtttgcaggaggtagaactctgtgtttatctcacacaattgtcgtgtctcagcacatgtggcagcctgatattcaaagaaacaatggttagtgataatgaaacactagtgaacccatatttttgcaatgaagtaaagtttataagtcatttgtaatcagcaattctaacgtactttgaatatgaagttcatgaataacccataggttcattgggaaactgtattatggggcaatcatgttacaatttctgttagtaaaactactctgtaatcaattccatagatgtgaggactgcaaaacaaatgatctaaaaccactttataaatgtacaaaaatgaattaactgaaatgtattcttttaacttgaagtgactcatgcaaatgtgaaaatgaacacacactattaaatgagaacacaggctatttattcrgaatttgctatatcaagacaattagccaccataattcgcatttgacagagttttaaaggctgacagagttttaaatacagacagagcagtggaaaa

SEQ ID NO: 909353 - DNA, 621 bp, Homo sapiens
tatatatgtttttaaactgtatgcactcccctacccattcccatatcaagcagcagaacattawacattattggcttcaggtgtcaaaagattgaaacgttcaaggcttgcagaacaactggtaatttaaataagtatccaaacaagaaatagataggtaatcctccttccaaaatctaatcataaaacctccccaaattattgggtaattatcaaaccaaatagtcacagcaacgatccacagggccaggataaaacagcagcagctggaatctatctgtactaagtaaaagtagctgctgtactctgggagagaagaaattcaagtgcaagcaagttaactgactatggatcaaacaacaacaacaacaaaaagtcatcaaaatcatataacaaaatccagggtcgacacgatgtattatctaaaatgtcatgttttcaaacaaaaattactacggatgaaagacatgaaagtaggacccatactcagaaaaatatatcagttaagagaaattgatgataagcagttgaatttaatgtactatgactttaaaacaactactgtaaataatcttcaagaatattaaaagttgttttcaaacaactaaaaaaaatcctact

SEQ ID NO: 909354 - DNA, 586 bp, Homo sapiens
ttaatgcagcctaagctttagatgatgtcttgtagcagctagaactgacacttcacttattaattcacttgtgcattcagcaaatatttaatgaatgtctactgagtacaaggcttcagtttcaggtaaasaaggagtgagcagtgggcttttacattttagtgaagcacatgtagagaaaacacttcattctctttcataaaagctcttgttaaaccatggtctctattggaaattatgaagtaattattaatgatgtgtaggacattacgtttttattctattttgttaggttgtgttttgtttaaatattcactccacaaattttgtatgttatttcagcatttgaggaaactgtcttcctgaactccacaaattttgtatgttatttcagcacttgaggaaaccgtcttcctgaactccactgcatctcaggtaacgttgtattacatgttcatctatcactcttctcttgtggaaaatttttaagctacaatttgatcagcactggcaaatttgtctggcatgctaataaaccctctgaggtactaactgacactgctctatattagtaattcctgttcta

SEQ ID NO: 909355 - DNA, 662 bp, Homo sapiens
gatgccatccaagcctttgagtgatygaaccttcataaaaggtcctgcagtggtgtattccatttacctctaggccagaccttaaggctaattgggaaggagtagggctggagttcctgcagatgagataaaggacttcttgtaaagtcctttcccctgaagagtagtcctttgttatagaaaaaactctgggcacatttcacagtgattactattcccctggcaagagccagtagatgtctttcttagagctttactgtgaaaatctgatggaatgcctggtggttgaacccacagtgtgaggacctccctcagactttggactccagttttgttctccaccacactattccatgttcggctccagtaatccttcattatcattcaactctagcagctccaggtcagcaatctcagctatgattctcttcattcatccctctccccagattgtggaaggatgatttgctctacaacatcatttccccaacgggcccaagaagcgttgttgattatcttcttattcacatttgtttgtttgtttgttcacttattgattgatgttatgaggatgtggtgtcacctttcagtctctttaaatgtcaaagctgaaaccaggagactacaatttttgtgcaaaaagtttcaaggattatttgcat

SEQ ID NO: 909356 - DNA, 588 bp, Homo sapiens
tatccatctcaggatttcacacctgcaggtctacaatgtccatctgtctcttgttagtaatgttacttttgacaacttggtcaaagcggtgtgcaatttcttcactgtrtaattactgtgattcctttctcttgattgcaactaatagcaatctttggggacatattttagacaatgtaaatatcctacttctcatcaaaattttcttttagattcaatattatttgcgattttttctgatccaattttttttttattatactttaagttttagggtacatgtgcacattgtgcaggttagttacatatgtatacatgtgccatgctggtgcactgcacccactaactcgtcatctagcattaggtatatctccggatgctatccctccccactccccccaccccacaacagtccccagagtgtgatattccccttcctgtgtccatgtgatctcattgttcaattcccacctatgagtgagaatatgcggtgtttggttttttgttcttgcgatagtttactgagaatgatgatttccaatttcatccatgtccctacaaaggacatgaactcatcattttttatgg

SEQ ID NO: 909357 - DNA, 609 bp, Homo sapiens
agctgtggtttcaggccaagagtttgtgtgctcaaacttgcaaagctcatgcctgcagccttggaagagaagactctattcaatgcgtsgattcagtcaagtctaacagacccaattttctcacccagccttgaaggttctctctactcttctaccaccttcaaggtacactgatgttcctgaccttcttttttcttcaaaccacatataaggctttttagtctccactggatgcacttaaggaaagtagataaactgtatcttaatacagagcaaagtctgctgatgtagaagatcaaataacacatttcatgaacttgaaatggcagatggacgaattataattatttgatgcctgagcaggggtcctgccgtaaagacttctgtggaattcaataatatgaaagaatatcagatcctggtaaggggtgcttacagcctaagtagagaaacaaaacataaagacacgtgaggaacaatcgcagagctcacgtaaacctaggcagaattatgcagcacatactggaaaaggacagactgaagctgaatttagctctattctccttaactgccattttgagcattcactgtgagccaggcacagtgcta

SEQ ID NO: 909358 - DNA, 426 bp, Homo sapiens
cacacggtggaaaggaatatttagttgacagtagtcttcttatatttctatgtagccttyagatacttttaaatttagtttatgtgttgggaaaaaatgaaaagactctattttgaatatactgccttgcatttttattcctatgtattatgaattagaacataacatattctgtatacctaccaggcaaattaatgtttactcagtatgagtaatctttttaggctgttcacatctacatgtctttattattatctattgaagctcttctctgaaaaagtcacaggtctcttggtccttgtgacttggctttgtattgttataggcagatgaagaaagttacaaaatgcttgtctatttgcaatctaatattctaccatttttgctaaatgatagacatcttgcagataagcatttgcttgtaga

SEQ ID NO: 909359 - DNA, 315 bp, Homo sapiens
ttgttggcagaattctgatctttgtggctgtmtgactgaggccccaggttttattggctgtcagaccctagaggccactcataatttcccgctacatgaacctttacataggcagttgcaacatgggagtttgtttcttcaaggttagaaggtctcaactttggtctgctagcagtcatacatatatgaccttttatatacttcaggtatgctaagctatagatagatctagatagacacatagagtaacctaatcatgggagtgtcattgcatcacctttagcatattctattaatgaaaactaagtcacagat

SEQ ID NO: 909360 - DNA, 599 bp, Homo sapiens
agaaataacatttgacccagcaatcccattactgaatatatacccaaaggaatataaatccttctattataaagacacatgcatgtgtctgttcattgcagcgctattcacaatagcaaagacatggaatcaacccaattgcccattaatgatagaactggataaagaaaatgtggcacatagtataccatggaatactatgcagccataaaaaggtacaaggtcgtgtcctttgcagggacatggatggagctggaagccattatcctcagcgaactaatgcatgaacagaaaaccaaacaccacatgttctcacttataaatgggagctgaatgaagagaacttacggacacatggtgaggaacaacacacactggggcctgtcgggtggagatggagagggagagcatcaggaagaacagctaatgggtgctgggcttaatacataggtgatgggttgatctgtgcagcaaatcaycatgacacacgtttatctatgtaacaaaccagcacatcccacacaggtaccctagaagttaaaatatatgttgacaaatttaaaacaggaaaaaaaagttttacactattccattgtatg

SEQ ID NO: 909361 - DNA, 579 bp, Homo sapiens
  misc_feature 202: n = A,T,C or G
agttttaaggagaaaagagaagaaataattttaattttatttttcattatgtcaagtccttttctatgtcccagactgagccccacctaaaatgagtatttaatttggatacttgatactatacctcattaatttagaaagaaaatgattaaggagtgtgtgtgtgtgtgtgtgtgtgtgtgtgtgtgtgtgtagtgtgtangacaggtctgtgtgcagctacaaagaaaatgtgtcccatataattatacatgtgtctccacaactattttgctgctagtaaagttcagtgcaagccctgtgttttgactcttgtgtatctctctaaacgatttctcctcctgatagccttactctagacatactaaaaagcttgcattaccaaatgagtagaacaatgtatagtttccttctcactcctctttctctcaattataagaaatatatttcgcttcatcatcacttttacaacgaagatttacttgaaattatttgccccattcagaaactttgagaatacttaatcagtttcamctttgtctcttcattcttccttttgcaaatatctcaaatgttttg

SEQ ID NO: 909362 - DNA, 715 bp, Homo sapiens
tttccaaataagattatgacacaaagcctgagagttgatatacccctggggtaggagagtaaaggtatattgctggtcttgccagctgaaggcaaattgcttctggtgggccttatggacaggaawggagaaaaagacatttgccaagtcaagggctgcataacaggtactaggagatgtgttaatttactcaagcaatgaaaccacatcttgtacagaagctgcaattggagtcaccacttggttaagcttaatccactgtcattctttaagatccatctgtcttctgcacaggccaaataggagagttgaatggggatgtggtgggaataaccactcctgcatcttttaagtcctcgaggcatgcaatattgtttttgattcactatttttctatgtagaggcagctctaatggcttccatttggcctttcccaccataatagccctcaccttgccagtcagagagctaatgttggggttctgccagctgctaagtatgtctatgctgattatgcattctggcactggggaaatgaccacagaatgagtctggggaccccctggacccactgtaagtcggacctgagctaaaactctattaattacctaacctccataagcacctactttaactggagggccacaatgacattttaggtaccctggaatcaacatcagctcagagccagcatccagtagtccccaaaatgtct

SEQ ID NO: 909363 - DNA, 617 bp, Homo sapiens; identical to SEQ ID NO: 908455

SEQ ID NO: 909364 - DNA, 625 bp, Homo sapiens
ttgtcagcattactgcatcgtttatacttatgcattcatactatgctgtttcataccttgattctctcagcatggaatatcaactttccccttctatgcacatagagggggtttgtggcacaacggaagaatctcaaactttggaaacctccatgttttcaaaaggatgccagcaaacctgctcaaactttaccctggaaagaaaaaatatctttattatcctagtgagaaaacaaacctgccttctgccctggaaagagacactatttctaccttccaaggcagtttgacataaaaacattcctgaacagctaatctggaacgaaatatatgttaatgcctttgcttggaaagtgcagaaatgggagccacccatggagaattgtctcccaacagctgatgcacttggcacattgtattaaaattatccacttaagtgtctggttggtgagctcatttagggcagaaaggtaatctttttcatcttttcatccctactattcarcataatgcttgtcagcgagtagagaatcaatgtatgtttataaaatcaatgaattaataaagacttttaaaatatggagaatatggggagctatatttcaaattattttatagcgaataa

SEQ ID NO: 909365 - DNA, 695 bp, Homo sapiens
agacagctccagggcataaactaatcacttcagggtgaggaagaagctgactcctgattcccaagaggcagtgtcacacarttagattgtttattctagctcaacacaaatttgacacatttccccaaaactgcctgtctagggtcctgtcaaaacaggatgatggaaagtcagaataatgttttagcccagtatttccaacattcctgtaatccattccatttcagtcatgttttgatgtaaaggatattttccccactaatatttgaaagctatccattcttgcgtattctagttacaccgagcatacattcattgtggaataagcagcagccaatggtatccaggatcttctaaaagtagtattcgagggctttttttgtatgtcttaaaattgttaaatctgagtgaatgaacttatctactcccaaagcaagatcttaagttgtttttagtggccaatgaaatctttcccagggagctagaagatgggctacccaaaggaaaatattctatatatttttcaatgaacatatagaagaattacagaacaaacaagacataaaatacaacattatagcaaatgtttttgaggagggtgaatgagattcttaattagttcttttgcctctgccaatattgtctataccattgtccttacacaatatttacacaaaatattgcagctaataagc

SEQ ID NO: 909366 - DNA, 554 bp, Homo sapiens
agtagaagataaagattaaagataccaatttaaagtaaattggtagaaattctttaggaaaatctatggcagtacattagaggagatttagatatccttacacttgactgtgtcagatttgcttggagaaacttaccgaaagaacataacgaaaatattttaaaatgaagagttacttataaagttcaatatatggaagacaaaaaatccactaataatgtctcatcatataaatgacagtacatatttcagaaaagattaaatatgcataaccatttattgtgaacaccttttaacaacacgggcaccacacacacattcacatgcgcatatgctccccccgaccccccctggacacacacacaaacattaccatgagattacagagacattatgagcattattactgtgattatttctatctaaaatattcatgtgtcacccgtagaacaataagaaagaataaaaatagtcatatgaacaagtgttatycaagctgtgttttttttcaataatctatacaattattaagatctttaacattaacttcttat

SEQ ID NO: 909367 - DNA, 671 bp, Homo sapiens
ctgcctgaacagatttttaacacagacaaaagtgccctattctggaaaaaaaaaaaaaaaaaaagccacaaaggccatttattaataaggagcagaagtgagcaccaagattaggcaggaaagaataagctaactactgttttgtgcaaatgcagtcagatttatgatcaggatggcccctacctatgaagctaccccctcaaaccttgaagggaaaagatgaatatcagcttcctatcttttggttatacaagaccctttttctggattagctctgtcaatgctttgtccctgaagtcagaaagtccttgccaataagagactgccttttaaagtttttttgatatagacaatgcccctgaccacccagaaccccatgagttcaacatggaaggcatcgaagtagtctaatttcccccaaacacaacattctaattcagcctttatatcagggagtcataaggacctttaaggctcatcacataccatactctatggaaaagatagtcaatgctgtggaagataacccaatagagagaacatcatgaaagtctggaaggattataccattgaagatgccctaattgttayagaaaaagccatgaaagccatcaatcctaaaacaacatatttctcctggagaaaactatgtccagatgttatatatgact

SEQ ID NO: 909368 - DNA, 540 bp, Homo sapiens
aatgtgtcgacttcagatacattcttgtgaaggacagcaaagaataggtggccttttcacctcctagagagataaaacatcggaggccaaggtagaattgggtgtgtcctgccaatctttaaatgaataaggctataggagtagtattgcttcctgaagtagtcacaatcttttctttgcattattttaattctatttatgtagcattaaaaactgaaaagaagttctatgtaaaatgagagcagagaaaatcatgttgtctgaattgcagccctagaaaatttcatgaacctatgacttgtttttaatttttatctacaagtcacatttgctcatttttaactacatgccacattttatatgtacctatgtatacatgtatttatgtgtacataccctttaatcctctaatccttgttaaaaaaaaaatagccagacaggaattaatagtgtagttatccctattttattaatgagtaaatcaasgattggaaaggttaagtgatttgcccaaggccacagagctatagaagtgatttg

SEQ ID NO: 909369 - DNA, 579 bp, Homo sapiens
agttttaaggagaaaagagaagaaataattttaattttatttttcattatgtcaagtccttttctatgtcccagactgagccccacctaaaatgagtatttaatttggatacttgatactatacctcattaatttagaaagaaaatgattaaggagtgtgtgtgtgtgtgtgtgtgtgtgtgtgtgtgtgtgtagtgtgtaggacaggtctgtgtgcagctacaaagaaaatgtgtcccatataattatacatgtgtctccacaactattttgctgctagtaaagttcagtgcaagccctgtgttttgactcttgtgtatctctctaaacgatttctcctcctgatagccttactctagacatactaaaaagcttgcattaccaaatgagtagaacaatgtatagtttccttctcactcctctttcttctcaatttataagaaatatatttcgcttcatcatcacttttacaacgaagatttacttgaaattatttgccccattcagaaactttgagaatacttaatcagtttcamctttgtgccttcattcttccttttgcaaatatctcaaatgttt

SEQ ID NO: 909370 - DNA, 622 bp, Homo sapiens
attttttttctaaaagttttacagtttttgttttacatttaggyctgtgatccattttgagttaatttttttgaagggtgtacattgtgtgtcaagattttttgtttttgactgtagatgtccagttgttccagtaccatgttgaaaagactctttgcttcattcagctttcactcctctatcaaagatcagttgactgtatttatgtgggtctatttctaggctctttattcagttctgttgatctatttgtctattcttttagtaatacaacattgtcttgtttatgctagctttatggtaagtcttgaagtcaggtagttttagtcctccaactttatttttctcttttaatattgacttggctttctgggatcttttgtctcccatataaactttagaataggtttgtaaatagccacaaaataacttgctaggatttcagttgggattgtgttgaatctatggaagaagttaagaaaaacagatatcttgacaatagtgagtattcctatccatgaacatagaatacaactccatttatttgtgtagttttatttttatatcattcataaaagttttttagctttccttatttagaccttgtacatattttattaga

SEQ ID NO: 909371 - DNA, 717 bp, Homo sapiens
atttggtcaaagtaatttcctacctctataacttctctgaaagcctcccaaaagtataaaattatatgcaatctcgttgttaaaatgtcgtgtcctattaaagatctatttccttgtcctatgccattgtccagaagttttaaatattttttgccatgttgaaatggctacagtatattagttataattctatggcctggaatataaataattactatgtgttaaataaaaattataggaggctattgttttggactcagcttctgcatagaccctagcagatcaaaatcaaaatcaaaatggagtcactcatgctaaataaagttccatatcaccaaacctaaactaagtttttatctgaacttccaagaaattagaaaagagagataaccgccagttttccaaaaaggccagtttaaatctttaatccacattataatgaagttttttctgctttaatctttacacaaaaaaggtagcctgaagtaatctgatattaactaatcagttatttttctattgttgtctaaaagtaactaatacactctttgttctttgcttctgctttcttcagccctcgtctgtctataaagctaaactcttctctcttctgcccaattcatttgaacatttactatattttacagagaaaactgttgcctgattctagaattgcaaataaaggtawttgagatctttaaactaaatttgttgtag

SEQ ID NO: 909372 - DNA, 622 bp, Homo sapiens; identical to SEQ ID NO: 909370

SEQ ID NO: 909373 - DNA, 589 bp, Homo sapiens
aattatttgccccattcagaaactttgagaatacttaatcagtttcamctttgtgccttcattcttccttttgcaaatatctcaaatgttttgcagcatctcaaatttctagtgtgctaatgtgttagttggcatgatatttcctgttctgtgaaagcataaactgtgaaagtaggagtatacctgattccttctcatattcccatcatctgaccaagtatctggacctggaagttttatacacctataatatataaataacatatttattattatagtcatattccaatatcactacatatacagtattgtgacaaatctcaattttatataaggctcagagcatctagttacttgatgattatttgggttctgcctctgatatgctggattttaggactggctggcttttgagggcactgctgggaggatatagcagggaggggagaggaccttctgggaagccagaacttgtggcagggccacggagtcaagatatgaaggacgggcaggaaagactgctgtacctcctgcctttgcggagctggtgttaggaatgaggccaacctgaatttcgagaagggagctg

SEQ ID NO: 909374 - DNA, 624 bp, Homo sapiens
aggctgaggcaggagaatcccttgaaccagggatgtggaggttgcagtgagccgagatcgtgccactgcactctagcctggtgacagagtgagactccatctgaaagaaaagaaagaaagaaagaaggaaagaaggaaagaaggaaagaaagaaagaaaaaaagaaagaaaaagagagagagaaggaaggaaggaaagaaaaaacaaaaaaagctagagcttcttggagaaatggctgattccaggtttgaggcagcaaatgtacagatgtgcctggaacatcttgtcatatcagatagcaaggaagctatcaaagacttctagggtctttgaagctctttgcacactagtgagagagagagagagaaaaaaaaaaaaagactactagaatcttatcaaaaggagccaggagccatattgaagaagctcctactggccaaagatgggacaatttgagctctaatatcgtagatggaaacctatcaaatatatttaaattcatgaatttataatgatattaaagaaatctaagaatgacagagaatcaattccttaacttgaaaactgggtaatttttttwtaaaaaagcaggtattcatcgtgcctttcctatctcagggtaat

SEQ ID NO: 909375 - DNA, 624 bp, Homo sapiens
aggctgaggcaggagaatcccttgaaccagggatgtggaggttgcagtgagccgagatcgtgccactgcactctagcctggtgacagagtgagactccatctgaaagaaaagaaagaaagaaagaaggaaagaaggaaagaaggaaagaaagaaagaaaaaaagaaagaaaaagagagagagaaggaaggaaggaaagaaaaaacaaaaaaagctagagcttcttggagaaatggctgattccaggtttgaggcagcaaatgtacagatgtgcctggaacatcttgtcatatcagatagcaaggaagctatcaaagacttctagggtctttgaagctctttgcacactagtgagagagagagagagaaaaaaaaaaaaagactactagaatcttatcaaaaggagccaggagccatattgaagaagctcctactggccaaagatgggacaatttgagctctaatatcgtagatggaaacctatcaaatatatttaaattcatgaatttataatgatattaaagaaatctaagaatgacagagaatcaattccttaacttgaaaactgggtaattttttttwaaaaaagcaggtattcatcgtgcctttcctatctcagggtaat

SEQ ID NO: 909376 - DNA, 570 bp, Homo sapiens
ctgaaactgggtatttataaacactagacatttgtttctcacagttcttgagactgaaaatctaagatcaagatgcagrcattttgtgtgtagtaggagctgcatcctccaaaaaaggagaaacactgtatcttcacagtgtagaaaatgggaagacaagaggggatcaactctttcaaacccctttatggggacacctaattccattcaccaggtgagaatgccttagacctaatctcttcttaaaggccccacatcttaatgccatcaaactggccattgagttcaaacacctaaattttggaagagacacattcaagcaatagctatcaaacatattctgagctataaaataaagatcaataaatttaaatactttaagtcacataaagtgttctctttgatcatacggaaatcagttataaatcaataacagaaggaactttggaaaacaccaaaatatatgaaaactaaataacacacttctaaataacccatgggttaaagaagaaatcaaaagaaaaattacaagatattttgactgaataaaatggaattacgacatatcaa

SEQ ID NO: 909377 - DNA, 570 bp, Homo sapiens
ctgaaactgggtatttataaacactagacatttgtttctcacagttcttgagactgaaaatctaagatcaagatgcagacattttgtgtgtagtaggagctgcatcctccaaaaaaggagaaacactgtatcttcacagtgtagaaaatgggaagacaagaggggatcaactctttcaaacccctttatggggacacctaattccattcaccaggtgagaatgccttagacctaatctcttcttaaaggccccacatcttaatgccatcaaactggccattgagttcaaacacctaaattttggaagagacacattcaagcaatagctatcaaacatattctgagctataaaataaagatcaataaatttaaatactttaagtcacataaagtgttctctttgatcatacggaaatcagttataaatcaataacagaaggaaytttggaaaacaccaaaatatatgaaaactaaataacacacttctaaataacccatgggttaaagaagaaatcaaaagaaaaattacaagatattttgactgaataaaatggaattacgacatatcaa

SEQ ID NO: 909378 - DNA, 577 bp, Homo sapiens
ttcaatctttctgaatgagaatactctatctaactctggtaggaatctgcactgggactcaaagatgtcatacttattcctctttcctggtcttgtccatttccgctgcctgtaatgccctcatatttccaaatctcatccatgctttagagatagatagaccaggtaccattggctccacaaagctttttggaatcactcttgttcacattggttgttccctactcttcccctttatagaacttactttcctgttagttgtgggccagaaaatattttaggcattatagtctctagaaactactgaactctgtggctatagtgaaagtagtcatggataatataaacaaataggtgcagctgtgttccaatacaacttaatttttaaaaataagctggatttagcccacaggccatagtttgttgacctaagcttttgctgaccaaatgtataaactcgggaaaaaatataaaaagcaactgtttgaaggtttyagatagcaagcaaaggcacacagacatgatcctgaaataaaatgtactgactgaaatctaaatttatcttgtgtgattgtca

SEQ ID NO: 909379 - DNA, 579 bp, Homo sapiens
tattcgatatttgatctagaacactacatatatacatacatatatatacacatatatacatatatacacatatacatacatatatacacatatatacgtatatacacatatatatacrtatatatgtgtgtgtgtgtgtgtgtatatatgtaatgttctagatcaaagagctaggtaattacctaagagtcatcctagtcatataataatgttgtaaatactattggacaaatcaagtcattatgagaatttcaccagggaagtatgatgtaggagaaaggaggaactggaaataatttttggtacagcaaggattggtggaatataactttttaattataagattaattatatgatatgcattaaaattgaggtttgggggcaataaaatatggtggtagcattatagtataatgaaatatgactggctgagactaaaattaaggcgccataaatatccagcctggagattctatgtacaccaagtaattcgcaatttctttaatctctcaataattaataattcctttcaacactatatttttatttacagcaaacatagtttagtcagacaaatta

SEQ ID NO: 909380 - DNA, 613 bp, Homo sapiens
gggaatttagaagaagaaccaaagtaaagtggaagatgatgagtttcagctcaggacatgttgaatttgaggtaccctcaaatatctacatggagcagctgagtataccatttcagatttcaattatattaaatgtaaataaaaccaacactgtattaggagtgctctgtgagatcaggagaaaagtacaatcctggagaaaaacaatgtataaaagtgtgcatggagaaagaggagacaattatggaaattgagaaattgtgagagagttaggaagagaaacaagaaaatgaaaactgggtggtgactggcgctgaaagctttgaagaggttacataggacaaatacttcagataaattcattggatgtgacaatcagtggaccatcaccatcattctaagagtgccatgatagagccagacagaggtgacttatccttgagggagactggacattattaattagtcaatataattcctgctggtagtcaggtcagtttcctgcagaatattaagayttcaacaaaatttctggtgctgtgtcaggaagtcgtgactaaatggcgataattaacccaggaaaaataaaggaacaatttcaaaacaacacttt

SEQ ID NO: 909381 - DNA, 605 bp, Homo sapiens
ggggtgtgtgtgtatacttctgttagtttgtgtgtgtgaatagaaacaggagtggaagaaaactttttttttaaaagaaagtattcagttccctgattttaaaaagattaggaaaaaaagcagctaggcacaatggctcatgtctgtaatcctaccactttgggaggctgaggtgggtggatcatgaagtcaagatattgagaccatcctggccaacatggtgaaaccccatctctactaaaaatacaaaaaaaaattagctgggcgtggtggcgggcacctgtagtcccagctactcaggagtctgaggcaggagaatggcttgaacacgggaggcggagattgcagtgagccaagatcacaccactgcactccagtctggcgacagagatgatgtcttttgctttgcaaaagctttttagtttcagtaggtcccatttatccattttggtttttgttgcctttgtttttgggttctttttcatgaattttttgcctaagccaatgtccagaagagtttgtaacgttatcttctagaatttttatggtttcrggtcctagatttaaatctttggtctatcttgagttaatttttgtataagatg

SEQ ID NO: 909382 - DNA, 681 bp, Homo sapiens
catgtacccagggatgactatgtgaagagacagggggagatgacggccatctacaagccaagcagaaaggcctggaacaaatcctacccccacagccctcaaaaggaacccaccctgctgacacgttgctttcaagcttctagcctccaaaacccagacaataaatttgttttttttaaagtcactcagtttgtggtattttcttaaggcagccctagtgaactaatacaggtgtccttgtgtatacttatgagagctaacttcactctagccacaggagacccacttaataaaaaggaactagttgtacatttgaaaactgcatttgcctataaacaaagtcaccatctctataattagagaagtgcatctgtttctatgatactgcaatttcgatggtacttgagcaatgacaaaaatatgactgtggttttgtgattgccatttctcaaaggaaaaggatagatgtctatttaataaactacttttgaggaataagaattttcagatcaccttagaatgataattccaaactcacaaggaatcaaaaccataaaatcactttrgaatttcttttcataactgtgtattcattcaatttgtaattctggaactgtggcatatgtgctggggaagtgaatttgttaatatgaaaatagcagtttctgttcttagttatag

SEQ ID NO: 909383 - DNA, 635 bp, Homo sapiens
cttagggttagtcaaaggattaaatgagataatatggttccaaagtggcagcaaggaagcaakctggcttcacaccccccaatggaaaacccaaaactaatattcaacactgaaattatcaccagcaatatccgagaactcaaatatgaggatgagacatttgctggggccacagagaagtttaaaaaactctgagcagatggtaagagaatcagacttccatatctgtaatcccctccccacaatctgccaggcaccaactgcatgaaaatttcccccaactcacagtctgtacactgtaaaaagtgagatcaaggcatagacaaccagcttctccacaatcttgggttcccttgcaggagacttgtcccagcctcaaccactagaagcatcagcagtccctagaggagaaatatccctgagaacagccagagacaaaggggagaggtgagactaccatcccagctctggaaactctgctgtgtaacttgacaaaaagagatggagacaccaaatcatagtggctgttcagcagcaccacactgtaggaggttgggtccataggtcccttggacactgaacccctagctagccttcccaaactactgggatatcccccattaaggatgaggggc

SEQ ID NO: 909384 - DNA, 589 bp, Homo sapiens
gtgctcagcagtcacatgtggctagtgactgctatattggtcagcacagatayagatcatttccctcattgctgaaaatcccattcctgccacctagataaaaatgtagaaaatgtgaaaatttctgaatatttaaaatggaaaataatatgatgaaaatggatattggcataggctaggcattaaaagcattaactattttattattttgtataatgcctagttcaatgttttacaagggaagcctattgaataagactttagctttgtagacaggccacctgagttcaggttctgccttcaccattttctgcgtgatcttaacctaggctttgtttccttaactataaaatagttttaatgaatttcttaagatgatcattaagctcgaatgaaataatgcttgtaaaagtatttagcacaatgtctgacacatataagttgttaatataaacataaggcattattgcaattatttggagaaatgtaattattagctccaaagtactaattgcagaatacgtgcataaacaccaacacaatataacactttattaaataaattggacttgttaaaaagcaaacagaa

SEQ ID NO: 909385 - DNA, 680 bp, Homo sapiens
taatccaagcactttgggaggccaaggtgggaggatcatttgggacyaggagttcgagaccagcctgggcaacataacaagactccatcttgacagaaaatttacaaattagccaggtgtggtggcatgcacctgtagtcccagctactcaagaagcggaggcagaaggattacttgtcccaaggagttcgaggatgcagtgagctatgatcacatcactgcactccagcctgggtaacagagtgacaccctgtctctttaaaaaaagatctttaggaagagaaatttgagagaaatcaattattaacaaaaatagaagtgaaagtaaacacataaaacaattatgtgccaagcaccattctgatatgtattagctcagttcatcttcacaagtataaggaatgcatattgttactgtccctatttttatagatggggaaactaaggcatagagaaggtaaagcaaacatacaatagacaagatcaacaatgccaaaagctggttcttggaaaagactaaataaagagaaggtccacacatgactgaaatgagaaaagaaaaacataaacagcaagagaaggcacaaagagacagcattaataataggaaacagatcatatcatagaagctacagagattaaataaataaatagaaacatatccagaacaactttataac

SEQ ID NO: 909386 - DNA, 661 bp, Homo sapiens
agctggtacaagcgtatctcccacactgaactgcaactcctgagggcagaggtctttctgagccaccagcctagcataagggaggtgctagcaatggctggtagttgaacaacttaatgcacatcttcccccaacttttcccagggctaactagtagaaatgggctgagaaactaccaaaactaccagtcaacctggatcagtcaatccaaccaccagtaagtacaagacggaagaggcagggtatcaaatggtgtgtggggctggcccaataggtggcccacagggttgttctgacaattctttccaaagagccacacagccaagaaatcttacccagagttggcagtgtcaccaagagctgtccaagaacatggacacggagagttgaccattagggaaaggccagatcctcagccatctcgcctcatgctgcctgcagcaaacagcaacctggaactcacaacccagatcttccccagactcctcctgttgatggcagcaacagtccatctagagcagccactgctattacactggctgcagcagtgaggcacaactgggactgcacactccatggtgccagcaggaaatggggacaagtgggagcctcaccccttccaagttggtgggkcaggagctccccagatgcagccacagca

SEQ ID NO: 909387 - DNA, 616 bp, Homo sapiens
  misc_feature 129, 150, 153, 171: n = A,T,C or G
cattcttccattcatacacgatctctrtagtaaacacagtacttcccaggtagagtaccatcctggccggttgaggtataaaaagatagccattcacttctctctcaaatacaaaagtttaaaaagttntccctctgcatgtccattggntgnttgtctctactgataagngtccatactacttcagtatctcacagtatcttcatgttttaggttactggttcacctcttttctttcatgcttcagctttcaagcaaatgactttggtggcacaccaccaacctattagggtgtaccttatttctctgtctctaggggaatctcctgaacacagaatataaggtgcagcctgtgtgctttcagccctatttttcctcaagggctgacttgtttggatgcctgggctttctttgtcaccaatcttaggtacagagtgagtttctttatctgcagctcctcagagatcaggaatgcttctggtggtcagacactagtcaattgctgaagttcaggtcaaaattaaacttagacataggcaaaagatcatttttaagtaatgataccttttcagcaatctattaaatataagtgtttgtcccctccaaatctcatgtt

SEQ ID NO: 909388 - DNA, 595 bp, Homo sapiens
agtatgtcctggcttttgatgggagaatggataggccggcarcaatataactcttgaatttggttcatcctaccttccatttgatctgatgctcatactttctgagccattctgggggtctgtgggaaaatctgtttgcattactctgtctccctctgcaggcttctgtgggtccatcttcctttactactctgctacatgtgtatcattctttcatctgccttccacactcatatattgtgttcatggaagatagaatttgagttaagattttttgttcttgctgtcctgtgggcaatttcttagtaaatacagggcagaaaactattttatcatctagaatacagaagtcttgtaagtaatctgtctttactttcttgactctaaacttgactctaaactccatagctgcactcaagttcaagtttagtaacaggagcatggctgtcattttcatgttccctacatgaaaataaactttcacctaaaaatcttaataaagccttcttagcttcagatattattgctttttgcccaacccttacctgattcctggcctcttcctttagtgtttccatgtgccccttccccatgt

SEQ ID NO: 909389 - DNA, 557 bp, Homo sapiens
ccaaagtcttagtattttaaagactacagacaattcaacaaagcctgtaaatgcctctcatttggaatcccactgggcctaatctgttttccattgccaacacactgctgctaaagctatcccacatcaagcactctccctaaaggctcagcaaccattgtggaagagaggtgcatgtgagattctaaaagctggattagggaggtggagtatggaagccaaagcaactccatcttggatgctagtcagccatgttgacttctgaataaccccagttccaggaagtcctttcagatttccagtttatctattattccttgggtaagagaggtgcttaccgtaaatcctgcccttaagtcaaacaaccttgatgttgtcgtacttcaattgtcctacacaccccttctgaatcacatataccatttccctatggtatamaagccctgactctggaggggtaatcgcatgggtatccaccatttagtctagcctctgccctagacacagacatggcttccatttataagtccttattaactgtttttttctaaataact

SEQ ID NO: 909390 - DNA, 557 bp, Homo sapiens
ccaaagtcttagtattttaaagactacagacaattcaacaaagcctgtaaatgcctctcatttggaatcccactgggcctaatctgttttccattgccaacacactgctgctaaagctatcccacatcaagcactctccctaaaggctcagcaaccattgtggaagagaggtgcatgtgagattctaaaagctggattagggaggtggagtatggaagccaaagcaactccatcttggatgctagtcagccatgttgacttctgaataaccccagttccaggaagtcctttcagatttccagtttatctattattccttgggtaagagaggtgcttaccgtaaatcctgcccttaagtcaaacaaccttgatgttgtcgtacttcaattgtcctacacaccccttctgaatcacatataccatttccctatggtatacaagccctgactctggaggggtaatcgcrtgggtatccaccatttagtctagcctctgccctagacacagacatggcttccatttataagtccttattaactgtttttttctaaataact

SEQ ID NO: 909391 - DNA, 615 bp, Homo sapiens
ctaaaactcttcatctgttttgaggtgtttgaagatctaaatccgttcaaagtcaatcagagactgatggtagattctaggagtgagaatcaagaagtctgatttagctccctaaattgttggcagacttccaccatatgtctttgttatctgcaggaaagaacttccataatttctcttaaatctacccagctaataggctgggcatagtggctcatgcctgtaatctcagcactttgggaggcctaggtgggtggatcacctgaggtcaggattttgagaccagccggcccaacatggtgaaaccccatctctactaaaaatacaaaaattagccaggcatggtggcgcatgcctgtaatcccagctactcaggaggctgaggcaggagaatcacttgaacccaggaggctgaaagtggcagtgagccaagatcacaccattgcactccagcctgggcaacaagagtgaaactccgttaaaaaaaaaaaaaaaaaatctacccagctaacatacgctctctctacttgattcttaggcatgtcctttttattccaacctgctaaatttttcatgcaaaattgagctcataayttttctgagtcctgtatgttt

SEQ ID NO: 909392 - DNA, 645 bp, Homo sapiens
ttgcttggtttgtaatcgttagttgtagtgaaatgagaatgcacccctggagcagaattcctcaatgactagcaaagcagcccagccatttctctggttaatggatttaacaccatcaattactgktgtcatatttgctttctaccagactattgagtgtcgtggttctatggagattagagtcactttcataggtcaagaaacaaacaacatcccctagaagtggtcctggtccatttgacattgatagaacgctgtagatcaggggtgtccaatctattggcttttctaggccacattggaataagaagaattgtcttggactacatataaaatacatcaacactaacaatagccgatgaaccaaaaaaaattgtaaaaccatatcctaatgttttaagaaagtttacaaatttctgttggcccacgtccaaagttgtcctgggccacatgcagcccatgagctgcgagttggacaagctcgccacagattcaaaagagttcttagtaaaagaacattgccagggaagaaactctagaagaactcaaaaagaaaacaaagttgatcaattctccaatggttagtggcaagaatggtttcatggttgtgagaatgaaggcaggcaaataataaagtgcattcat

SEQ ID NO: 909393 - DNA, 560 bp, Homo sapiens
gatcagaggggcttcaaatggatctgaaatctggggaccccttgctgctggtttagctgcttggtctgccaacctattttccttggctattcatccatccctttttggtggcctttacaatgtattattgccacttcgtgtgggaggaaaactgaggataatagtctattaatttcctgatggtatttaatgggagacccattagctatgaggaagttcttctcttccagatagtggcatggacatggagaactaggaaagcatacttagaatcagtataaatgttaaatgctttccctttgcttaattcaagtactctcatgagggcaattagcttggctagttgagtacttgtacccaaggagagagacgtgctctcaacaatatcattccgggtaactatacctctttatggatcccttgttctacaaaagaacttttacttgtaaagagaayccagtctgggttccctaagggggtttccttgaggtcctttctggctgcataggtttgtactactatctgtttgcagtcatgttcaaggtccccccccgctctcc

SEQ ID NO: 909394 - DNA, 578 bp, Homo sapiens
taacagaatatcacatatacccatacartgcacaaatattaggcattaataaacattaaaaataaacactgtaggcaagtaaattttgggccaacattttgatggagaatggtgagcgtggctgaagaccatagttatttcaaaccagagagagttaattattctaaaatatataatgaatttaatcaagtttgaacatgcagaagtgggtgttagacttgttctgcttttccaaaggtttgaattccaattcttcacttctttgttttcctctttggctttgaatcatgggtcgttctgagaatctgataaaagagataaaatcctttctcagaaaatgcacatagacgcaagcttctgactacaattccatgggcctttgaggtttcccaaaatgatggctcctggcccttctgcaggctgctaagctagtcctttgcgcaggggcgccttcggattcagtttctgggctccatttcaagtttctcgacgttccctggcctctggccaacagcattcacatggctctgcccatttccttatctaaaaaagcagcacacaaaggctgaaatgctcag

SEQ ID NO: 909395 - DNA, 578 bp, Homo sapiens
taacagaatatcacatatacccatacaatgcacaaatattaggcattaataaacattaaaaatwaacactgtaggcaagtaaattttgggccaacattttgatggagaatggtgagcgtggctgaagaccatagttatttcaaaccagagagagttaattattctaaaatatataatgaatttaatcaagtttgaacatgcagaagtgggtgttagacttgttctgcttttccaaaggtttgaattccaattcttcacttctttgttttcctctttggctttgaatcatgggtcgttctgagaatctgataaaagagataaaatcctttctcagaaaatgcacatagacgcaagcttctgactacaattccatgggcctttgaggtttcccaaaatgatggctcctggcccttctgcaggctgctaagctagtcctttgcgcaggggcgccttcggattcagtttctgggctccatttcaagtttctcgacgttccctggcctctggccaacagcattcacatggctctgcccatttccttatctaaaaaagcagcacacaaaggctgaaatgctcag

SEQ ID NO: 909396 - DNA, 624 bp, Homo sapiens
tcattgagtgtttgccactcaccaggtgatgttctaagtgcattttatatattattttatttccagcacattttgaggaaactggggaagaggggttaagcagctggacccatgccttgccactggtaaatggtgggcctggaatttgagaccagggaccttgacttcagaccccgtgatcccaacagctccaccatagttcactctgtttctagcttgaaatgtagctgctgattaattctttatgcctttttccatagctggtgattagaataattgcttttcagttaatcttctcatgatatcaaaccttttttgcattccatgatgttgtgtgtgtgtatgtgtgtgtgtgcaagtgtgtgtgtaagtgtgtgtgtgtgcatgtgtgtgtgtgtgtgattctcttgtttttagtaaaaataaacaggagggttttcgtacccacagatttgagttttgaaagctcttgtgtagcactgggtggggtgtgaaaaagagaggagagggaattgtcattttcttttcctgtagagatctttaaattgagatgggttatctractgaaagactaagaggggtgctaggattaagattctaggacggtctctgagacccaggctg

SEQ ID NO: 909397 - DNA, 682 bp, Homo sapiens
ggaatagatgcttattaaacatgtgctcattaaattaccttgggcagtatagccatttttgtgatatttattcttcctatccgtgagcatggaatgccttccatttgtttgtgtcctcttttatctcactgggcagtggtttgtagttctccttgaagaggtccttcacatcccttgtaaattggattcctaggtattttattttctttgaagcagttgtgaatgggaattcactcatgatttggctctctgtttgtctgttattgatgtataggaatgcttgtgatttttgtacattgattttgtatcctgagactttgctgaagttgcttatcagcttaaggagatgttgagctgagacaatggggttttctaaatatacagtcatcttatctgcaaacagggacaatttgacttccttaggctcctgcccctcactggaggctggaggaggaatcactgaggacatccttccctgttgctactcagttcttggtgctttccactctgaatcctacccctgactataggtccataaaactgttggagyctttgtttgaagctccctaaacagacagacaacccctgtcttcagtgactcacttggcccttgactggtgtaccactccatagaggaagatggcacaggagaattggtcttgtctccagttttatctgacta

SEQ ID NO: 909398 - DNA, 605 bp, Homo sapiens
tactcgttgattgctttcttcctaacatttaaaaaataggctttttttctggaaattaaaagtacttcgtgaatataaaggttctacagtttacattttctccatatctgaaaattaggttcacttttattactctgtggcaggtgcagtcagaacccccacccatatcacctcagccttccctgaaggtcactgcctagtccctgcacacgcttctgtcatatctgccagagggcattctctgacacaagggagcctgctagacacgtcagcaggccaggatttttcccagggcatcctaatgaggaattcagtttggtcaataggcacccctgctgactctccctctgtgagacaattttgagacatattctatagtctctcagaaggaccttagatgaaatgagccaaacttccaataggaataattcactaattgatgcagcttcatttgctttcctcccttccaggctcatttcttcattcccaccttgtgctttctgggatcacttcccaaaaacctacttgcacccaaattttgatctstgaatctgctttgggaagaatcaaagctgacccaatctacaatctcctgtactgctcca

SEQ ID NO: 909399 - DNA, 567 bp, Homo sapiens
aaaacaaggtattatatatgtatgcatccataatatatagtatatgtaatacatagttttttcttgcttatttgatattaacaaaggcctttttcccctaaatgtgaccaaagggcatcatactttagtggaatattgaaaatagaaccttcttttggatatgaggttagatcgtcattttaatttttgatggtattttcaatgaaacactaaaaatcatcatttaattggtccctctgtgaagcacatgtcctgtcttctgggtcttgaagtgctcttaattagtcaggtaaccatacaaaagggaaatggaaatgtccagtgattgtgcatcagaccgaatgaggcaacaaagatatatttctgaatgaaaaaagaacagtaactctttgtaaaacattaatttcttaaaggtattgaaaaacataggcacagaagagtacaaagaatatgagattcaaagaagtcaaggaacattacagccgtcacctggagtacytggctttgcttttctctgtgtcttcaaattagatgagtaaatgtgaggaatgactaagtgggatattt

SEQ ID NO: 909400 - DNA, 655 bp, Homo sapiens
gtgccagatgaagctaatttattttttctaatacttgcagctaatttttttcatagacagaatttaatattcwccttcaaataaagatttaaaagactaacaattaaaacaacaataaatttttaaaaaacttgccaagttcaaaaatctaattattcaaagccaaagtataaaaccagttctgtgtggctcagggaatgagtttctatctaccactccggaatcttccaacactaacatggcatctgtataacttaagattttttatttgcaaatcttaagagtttacttagcggaagactgaaacaaactcaagatgttgggaaaagttgtgttcatttaaggaatgaatacaattaataagaaacaatgactgacatgatgcctaagtcattcaaagggaaaacacaaacaaacccaaaaatatgaatgttgacgcactcactgagccagaatgtgaatgcagtattgcagaaagttctgactctatttaattaatatgtgcttttggcaaaataagtgaggatttggcccaagataatagcttagacatctgtgtactaggacctctgagcaagtgctccgtgtcatctatattcagcatcagacaattttgttataatcaagttttcttgtcagtcatgcaatttaaaat

SEQ ID NO: 909401 - DNA, 598 bp, Homo sapiens
ctatttccttcctaaatccacattttgacactccctttagataacctttgaattagaaaaagttatttyttctcaataaaagacatttttttctcttattaaacacaccttactttggcatactttatatacagaattatatatcaattggaatttttagcttctggtaaccttaaattttattaaaaacataggaaacacaaaatcttgatttgcctgttacatatcattatttaacagataacaaccattttatttttattatttttcatttttttactttttagagacagggtcttgcccttttgcccaggctagagtgcagtggcatgatcatggctcactgcagcctcaaactcctgggctcaagcaatcctctcacctcagccccccaagtagctgaaactccaagtgtatgtcaccatacctggctaattattttatttttttgtagagatgtcttgccttgttacccagggtggtctcaaacttctggcctcaaacaatcctcccaccttagcttcccaaagtgctgagagtataggcttgagtcaccatgcttggccaagagccattttataattgtcagaaaaacgtg

SEQ ID NO: 909402 - DNA, 593 bp, Homo sapiens
tttagccttacacataggctgaaagtgaagggatgaacatgaatttctataaaaatggaagctaaaatagagcagaggtagcttaattatatcagaagagaacagactttaagttaaaaactgtcataagacaaagaggatcattaaataacaataaagaagtcaatccatcaagaagatataacaactatgaatacatatgtgcccaatatcagaatacctaaatatgtaaagcaaatattaacacaactgaagggagatacaaatggcaattcaataaaagtagggcatttcaacactctcactttcaacaatagatacattatctagacaaaaaatcagtaaagaaaattggacctgaactatatgttagtgcagatggatctaacggacacatacagaatattccattcaacagcagaagaatacacattcttctccagcacatgtgagacattcttcagaamagataacatgttagaccaaatcttagctgattgaaatcatatcaagtacctttcctgatcacaatagtataaaactagaaatcaatcacaggaagaaaattttaaaatggacaaatatctcctgtt

SEQ ID NO: 909403 - DNA, 598 bp, Homo sapiens
gtgggaggatcacttgagcccagttcaaggaggcagtgtgccatgatcacatctgtaaatagccaccaaactctagcctgggtaacatgagactttgtctctaagaaaaatttaaaaactaaaaattgagcttctgagactcagtataggttcttgtcctctgaaaacactaaatttacacatttgtgggtgtatgcctgcagaatgtaacatcactgattaagtcattggacaatgaggacaaaagatggtatgagttcttacaattgtatgaattgtgatctaagttgagaggtatgaaagcaagagaattgcatgtttagataggtagggggtagggctgagaagtttcaggagggaaataaatatagccatagtgcttaaattctttttggattttccttggatagaaaacttggctgtataatcagcagaaagttcacttaactcttaagtcaacatttcttcatttttaagatgggattactactagtgcttatttcacttgragttgtcaggataaaataagagcatactagtaaagggcttagccataagagatgtgagatagtagaagctatttgaggatagaaagctt

SEQ ID NO: 909404 - DNA, 676 bp, Homo sapiens
ctgggtgcagtgttccaaacccatccctactctcctgacaattatttggaatccaggtcatctcctaagcacaggccaggagtggctgcgggaagktattgctttgcttcatgaggacaacctcccgggtagaggttttggcatagggaagggaaggggtgggggctctttaaatcttgtttcccttagtacccacctgagtctgcacaatcctcactgtggcaaatgccccatattaaacctaattctacttaaccactatcgcctttagtattattgggctctttttgttgttacagtaggtcccttttgatcatcacgaatttcgggatttctgagcaaatccaattcactctccccaccacttgctgatactgaaggttttgttactaccctgtccccagcctttacccttccaaagctctctgtcagccaaagctcaccacctttcttggccttctccgatgtcccacacctccctccaccacagggttctatgcaccagcagccagaaccacatagagcataacataagaaccaggctgtgtgaggcgctcaatgagggtgtgcgactccaccccagacccgtcagggatccttcggggggcacttctgaaagcatcagctgtgactactcgcactttcaaaccacctctcatgggaggagagcacctcc

SEQ ID NO: 909405 - DNA, 676 bp, Homo sapiens
ctgggtgcagtgttccaaacccatccctactctcctgacaattatttggaatccaggtcatctcctaagcacaggccaggagtggctgcgggaaggyattgctttgcttcatgaggacaacctcccgggtagaggttttggcatagggaagggaaggggtgggggctctttaaatcttgtttcccttagtacccacctgagtctgcacaatcctcactgtggcaaatgccccatattaaacctaattctacttaaccactatcgcctttagtattattgggctctttttgttgttacagtaggtcccttttgatcatcacgaatttcgggatttctgagcaaatccaattcactctccccaccacttgctgatactgaaggttttgttactaccctgtccccagcctttacccttccaaagctctctgtcagccaaagctcaccacctttcttggccttctccgatgtcccacacctccctccaccacagggttctatgcaccagcagccagaaccacatagagcataacataagaaccaggctgtgtgaggcgctcaatgagggtgtgcgactccaccccagacccgtcagggatccttcggggggcacttctgaaagcatcagctgtgactactcgcactttcaaaccacctctcatgggaggagagcacctcc

SEQ ID NO: 909406 - DNA, 458 bp, Homo sapiens
ctggaagcattccccttgaaaaccagcacaagacaaggacgccctttctcaccactcctattcaacatagtgttggaagttctggccagggcaatcagggaagagaaataaagagtattcaaataggaagaraagtcaaactgtctctgtttgcagatgacatgatcctatatctagaaaaccccatcatctcagcccaaaagctccttaaactgataaaaaacttcagcatagtctcaggataaaaattcaatgcgcaaaaatcacaagcattcctatacaccaacaacagacaatcagagagccaaatcatgaatgaactcccattcacagttgctacaaagaataaaatacctaggaacacagctaacaatggaagtgaaggacctctttaaggagaactataaaccactgctcaaggaaattggagaggacacaaacaaatggaaaaacattcc

SEQ ID NO: 909407 - DNA, 612 bp, Homo sapiens
tctttaagggaccctcttttgctgctgctgatcatttaatgaggattcctcagtgttctataattaatctgcttctcttcttactctacatattattcagggtgattttagattttctctacttaagcgcctttaattaatgcctgcacaatgccgacttccaaatttatttcttcaggatagtcacctctcctaagcaccagctgcagtctaagtatctctaactcaatggctcctaagcactttaaacacagcatggatgaaacagaactcatcagcttcctactcttacctcctcaaaatatctcaaattagcaaacttctctttcattgtatttcctgtactggtgaatggcaccactgtccatagggttgctcaagccaaaaactggacatcaactgtcaatctcttttttgcttagtcagtcttcaagccctgctgtttctacttccaagctattaatatgtctcagttttcctgtactgtcttagttttagataccgtcatctccagtctagtttactgccacagcctgccaaccagtttctattccctcaatcttgcctccctctagttaatwcttcacactgaagacagactaatacatccag

SEQ ID NO: 909408 - DNA, 636 bp, Homo sapiens
aattgagtggacagtacagggagctctcaaatacccatttccctgacacatgcacaatctcctccactatcccataccagctgcactgtgtctgcacttctgacctacagaaaactgtgagatagtaaataggtgtttctttcatgctacaacgtggatgaacctggaggacattaaactaagtgaaataagccaatcacaaaaaaaggcaaatactgtactatctcacttacatgaagtatctagagtagtcaaatttataagagtcagaatgtagaagggtggttgccccagactctggtaactaccattttattgtcacttctatgagttcagttgttttagatgccacgtaaagtaagaacatgagatagttatctttctgtgcctggcttatctcacttagcataatgttctctaattccagccaaatgaataatgctacaatgaacatgagagtgcagatatttctttgacaaactgactttaaatttggggggtaaatactcggaagtgaggttgctggatcatatgrtaattccgttttgagtgtttcaagtagcctccattcagttttttataatggctgtactaatttacattctcaccaacagagtacaggggttcccttttctc

SEQ ID NO: 909409 - DNA, 619 bp, Homo sapiens
acaaatatcacatattttacttacatgttgaaggmaaaaggttgatctcatggaggtagagagtggtaatacagataacagagactgggaagggccagcagaggggcaggggaaaggagagcacaggagaagtgaagtcggttaaaggatatgaatatatagtaacataaaaggaatcaattcaatatttgatggcagagtaggatgactatacttcacaaaattatattgcactacagtgaggaacaccctgaacactctgatgtgatctctatgcattatatgcatgtaacacattttctcatatactccataaattctcacaaataaaaaaagaaagaaaagggtgagctgaaaataaaaaataaaatatagttgaagagtatgtgtttcggagcagtcactgccacttactggctatgtgaccctcagcaattgtcctcacccggaatgtcaggtgcacacttggtggggtgtggtgaagcttcaccatgacagtgccacaggagcaattcactagcatgcattaagcactccataaatgtactagaattatgggacaacagtgaggagaaactcagaaatcaaagaaagcctgggaaataatgaaggataaggg

SEQ ID NO: 909410 - DNA, 538 bp, Homo sapiens
ggtctctgcgctctgcccaaaggctcctagatctgataaaagatttcrgcaaagtttcaggatacaaaatcaacacataaaaatcggtagcacttctatacatcaataatatccaagctgagagctaaatcaaaaaatgcaatcctattcaaaatagccacaaagagaataacatatctagttcttattctttttataatgataaaagacatgatgcataccaaaacaataagctttttaaaaaaaagtaatataaaaaaggcaagtaaaagagaagaatctgaagcccaaattataatgataaaatgagtattcatagtggttgactgtaactattattttattattgatatagcatgtgtattgtgaaaagtgatatgataaatacagtgtaccacatgctattcatgaagcagagatttaataatattactataacatattgtttatcaattgaactatgagtatcttgcatccaattcatttggaacacagataagactgagaaatgctagaggcttcagcttagccaaaacag

SEQ ID NO: 909411 - DNA, 629 bp, Homo sapiens
ttctgtttatatggacatattttatcygttcctgatataaaatagatgctgtaatgtgtttgactaagggaaaaataaataaatatatgtatttgaaaaaatgtaaatgtgatatctggaaagcactacctgattttggtgctaatcttggtattatgctttttttcagagaaataatttttgtatccctatttcctattatatttcttttaacaatttattccaagtacctgctaaggtgggataattttttattcattataatataacacatgttttgcatatagtcccttatgagacattctgttacactgctacttttttctttaacacatatctaaagtagtgtgtcctccacttctgatacttgatgaaaaaaaattatgcttcttgagaaaagatgcaaacaaaaaatatttcatttaggtgttattatgtggattgattgttgttttgtttttcaaaatctctcttattctagcttcagtgaatgttatatgactcatttaacagctcacatgagtattgtcaaagagcaccgtgaagaggattaagcattggattcagaggaccttttgtgaaccacctctttcctctctcctaaccataggagggtaaattaaagttca

SEQ ID NO: 909412 - DNA, 587 bp, Homo sapiens
gaaattctgacaagtaattttataacaaggtcacttcattgattataaagcttcaaaaatacttagtgaaaaaaactaacagatcaggttaattacatgagacttttcaggaaaaaaagccatacaraagcaaaaaaaaaaaaaaatgagaggagagacaaaaactatctttgactaacattttaaaggtaaaattatttactaacattatttttcaaaattacattgtcaaattagcattcacttccttctaatctgaagccatctcactaaaaattatgcttttgaaacaaattaatgagcttaattcattttctatgagtgtatgttttgacttacttagttaattttttagacatggaactgttagctttcaatgctgctgcaaaggcttccttatattcttctaactcagttgtaacctcttcataagcagttttcattttgtagaatttacattccacatctttaagtgtgagttccttcttatttagtgaagctgtattatatccttgtttaactgctctaattgttttttatattgtgcttgttcctaaaacagaggaaaagaatacacttttaaaaca

SEQ ID NO: 909413 - DNA, 641 bp, Homo sapiens
gtgtcatccattcaacatttcctttatgcccarttggtgttagatgttgtccttggaattatgaaaatgagattggattaaacggtttttcttcgtgagtagttcacattctaatgaaggagatatacatgtactaattaaaacataataataaaaacacctagctaaaatcaggggttctataaaagaagagtagaatgggaagaatggatacttgcgggcaactagcagtctctgatacagtttgcatattaatgcatgcactcaacaaatgtttattaagtgtctgctgtgcattatccctgcctaggtagtgatctgtctgtctattgtttatatagagaagtctgggatttaaacatgtaaagtatataagaatggttacctctagggatggatacactcaggtatagtacaaatgttttatagaatgcatgttttatccctgttatttaaacaattggtttaaaaatggtagcagcaaacaaattagaacattgaatctgaaaagataaactcaatcttttcagactcaatgaaatagaaaaaaagaccatatagaaagtccacacagccaagaaatcgtagaccatgtgtagaatcagggctgtgaaggaaagcagctttaattgtttgcacaa

SEQ ID NO: 909414 - DNA, 658 bp, Homo sapiens
atgtgtagcacctgccgcgtctctctctctcttccttctgctccggccatgtgaagtgctagctctcccttcgccttcttccatgattgtaagtttcctgaggcctccccagaagcagaagctgctatgctttctgtacatcctgcataaccataagccagttaaacctcttttctttataaattactcagtctcaggtatttctttatagcaatgcaagaatggactaatacaccatatcatgaaacataagtcttcagaagttaaaaaaaaaatctaaaacctgccagatataaaaagaatcagcactgtggtatatgaactatatattaatggaagcaatgcataatcataagattgtcgtcaacagacacttgttgtgcaacaattatgtaaatgtactggggcagaatcgatggataagtccaaagccctggcctgaaaaacaaatacacattccattttaaaagatgctgggtatattttcttctgaaaaggattggtactttgactaatagctctcaggtcttacttttgcaatcacacagtaatagcatttaaatttgccaaaagaataactgatgaacctgtatcttaaaacagcacrtatctccaccagatcacatgctgatgaagacagatgtccttcaagaatctt

SEQ ID NO: 909415 - DNA, 637 bp, Homo sapiens
aatggaaatgatacattttgaggatggtcagggctggatgccattatttatttaaagcatacaagccaaactccaayccttgttccacagttctatgttcccctgataatgttctgtttgctgtccctggttctacagggagagaatttgctggtcaaactgataagtgactggtcactagacacacatccacttctctttgtgaatggattctcattctggtatacaaccttatgtctagggtggctttatggcagccatctggatcttgttgaagtctgggatgctgaagaagtctcactgtgtgagtttctgaccctgtaaggttgaggcaagatggaatgatggtgactttaccagaaaaaaatgctatcttgtgaagtctccctcttctgataacaagtgaccctgctccctctttggtaagtgaggaaactgtggctcatggaagtggcatggctaatgcatggcaagcgaggtctgcctgactaggaagcctatgttctctctagtttatcactccttgcctgaagaaagagaagcagatctagcaaagggtggtagacaaaaacaaaaagttcatatattcaatgtgttgtttttagcttccagtgatttccacagtacacaattctac

SEQ ID NO: 909416 - DNA, 588 bp, Homo sapiens
cattctgaggtctggaggatggtggccctcttctcgcagctccactaggtggtgccccagtagggatctgtgtggggcctctgaccccacatttcccttccctgctgccctaccagaggttctccatgagagccctgcccctgcagcaaacttctgcctggacatccaggtgtttcaatacatcttctgaaatctagggggaggttcccaaacctcaatttttgacttctgtgtacttgcagactcaacaccacatggaagctgccaaggcttggggcttgcaacatctgaagccatgtcctgagttctatgttggcccctttcagccatgcctggagcagctgggacgcagagcaccaaatctctaggctacaccagcacggggatcctgggcctggcccatgaaaccacttttttcctcctaggcctccaggcctgtgatggtaggggctggcgtgaagacctctgacaagccttggagacattttccccattgtcttggggattaacatttggctccttgttacttaagcaaatttctgcagccagcttgaatttstcctcagaaaataagactttgttttctat

SEQ ID NO: 909417 - DNA, 668 bp, Homo sapiens
tttatgtttttattactgccaatcacagccaagtgatctgaggaaacatcggagaaaggtacagtaaataacttttacatcattacgaattgaatactgttttattctatgaaagctttaaaataatattccctctagtcgaatgttgataaaacattaaaaagttgagagtatttaaagtgtattgaattgtttaaatttgattataatagaaaatacttcaaagataaaattgtttatgatttctggagcaataattagattataagaaccataatatcctgttttccattgaatatttaaaccaaggatggtgtaattttatattttaatataagtatttatatttattaatataatatagtacaaatgttttaatatttaatatataataaataatgctcgttgttttcaaatattttattattattattttgatagggtgaggacaacagattgggagaaagctgtcaaaaaaagatagcttgttactcacagttcccaagaggagagagtactctgtgcctcaggacagcaccagcgtcagtcaggaggcagaaggagcagggcagaaggttttctgaggtatcttagggaaaggcaagacaaggcaggataagcaggttaggatggmtagcctgattaattttgtctggcctcaggatgta

SEQ ID NO: 909418 - DNA, 606 bp, Homo sapiens
aaaaacgatatatattagttttrtaaagttttagtgtcagatattttgtctgaaagttgagcatagtgttagcctttaaaaagttatttattatgccacatattttatgaataatgtaaacattcacttttgcaacaaaatgccaaatacttgaatatttgaaagttattcataaagtagtttaaagcacatttagttacatgatgaaattcatactttttctagtttttcttttctaatattttattgtgtatgttgatgtatataatattgatgtgtataaaatacatatagcatatgtcagtcctttcatatttttaacatattaaaataagaaaaaataatgggaatgtgattcttacgaaaataatattttcttgaatctgtctcttcttcgtaatctctccctcagactctggcttattttgtcttttttttttttttaactcctcttactatcattcccaataatattcccttttgagagactgcgaaaagagttatctgtctggtcccctgcctctgatggccatttcttctggtccctgaaacagattctgtacttcccattatccttatttttgtatacgttctccatgcctgaaa

SEQ ID NO: 909419 - DNA, 666 bp, Homo sapiens
ctcccattcttctgccatccaggctttcaaaatcagaatggaggagaaaagcagtagcttttattgctctacaattgattctaaggcagaagctgtacatggatgtatatacagacttgggaatttgcatactgaatgcctcttctcagttttcatatgcctacctctgtccctgtcatttaatttgcgtttgttcaccaatcaagtttgtttcctggatgcctcacttgcatgaatgggtagcagagtaattagagctaagttaaatggttttatgaatgaaggcacaatttacaatgatgtgtgtgggtatcatctccccttcacttgtttaatattcagacctgtcaccttgcatgcaatctgttggaaaaggctccagaagccagttatacctcttacaaatcacaccggattgtactgctctggagggactttcttggagttgagctaaaaggagtcttaataaaaagtctaggatacaaaagcttgattcattattgcacataaagaacaaagagtttgggaactgacaggtaaaatggaagatggttaaacggggaaaattgcattctatttttggagaacatttaattttattctaagtatttgctataggcttctctctttaraaaacccatggttcagctcttgagcatagaagag

SEQ ID NO: 909420 - DNA, 601 bp, Homo sapiens
ctgtattatcatggccttagccatgatcttagcatatgtactcctttgttagcttatttgcagctgcttaatagctcattgtacatactgtatacactgattgcagacaggaaaggaatgatatgccttcagacaaactttaaccctataactatacccattgattctggctgtagaggcccttgctctaccctactgttaaggactaaattgtgttctctaaattcatatattaaagttctatacccggtacctaagaatgtggctgtatttagagataggactgtaaagaaatgattaagtttaaatgaggtcataagggtgtggcccgaatccaaaatgactagtgtctttataaggagcggaaggcacaccaggggtgtgcacacagagaaaaagcagtgttatagactggatgtgtgttttcccccaaaattgatatgtcgggcccctacctacattgtgatagtattagaaggtagacctctgggatataattaggattaggtaagttcatttaaaaggagccctcataagtggcgttagtgccctcatgagtcacgagaatgcttgcwttccttctccactttctgccatgtgg

SEQ ID NO: 909421 - DNA, 686 bp, Homo sapiens
aagcagtgacaatgttcaataaaagctagtagaatttagtagtgatatcaccygactgcctgacagggtgacttgctttgcctttgaaaacatgggagaactggctacagtgtctctgtcaatagatagaattactgaaacctcaagaaaataccagcccctcataccttccaaaagtgtggccagacatacttttcgaagtaatagatgcttttctcctcccatagtttattcttattaatctctagcaaagaatagccaattcttgtaacattttagatggcatggaggagcactgctgagaaggggctgctgtggggagcattgctgactgacagcctgggagctgaggctatgcttcccccaagctgctaccagccgatgactgagcatagcagtgactgggctggtatggggccaattctcttgaatgcaacactcttctaataggcaggaactgccctccggcctggctgagactttctcagtactgtgctgtggtatgcagctatccctactcaattctctctgctgcctctcctttcacaggtgtcagatctatatcgctacctgaaagctcttcccacctatttctgctctttgctcctctggacttcatgggtgatagatttactggttctcgtgagcatgtctaatgccgtctttgtgtcaatgtctcagaggac

SEQ ID NO: 909422 - DNA, 624 bp, Homo sapiens
aaaccctcccccgcttctccagcactgtgtaagacaccctaaagcaaaagcaagcttaaattggtgacagtttcaacattgtctcctcctcttcagctgccatatgaaagccactcagccacacttctcacaatttgcaaaattgtgcagatgaggacacctttgaaaccgtcatattgaagggagattgggatgcaggagcatgcaacacccttccagggctactgcagggcagccccacctgtcatttcagcaggtttccagtgcaagagaaagacacactacctgtgcatgattgatgtgggagcctcctgggtggccttatatgtctccaaagttacactgaggatattcctaaggtatcaacctttattcttaatttgcagctagatctaaagatccataaaactgtttagttgcacgtacctgtttggatttgtagaaaattaagaaacactaactagaacaaaaagaatgccttaaattcagtgtgcaatttgctatggggcaggaagtccttaatacaaaaaaaaatttttttttctttgtatcctctgtatttcctttaagtctagcagtcagtaaaaccaaawacaagaagtgttaagtatactacacaaacaa

SEQ ID NO: 909423 - DNA, 653 bp, Homo sapiens
gaagtagagacacaaaaaacccttcaaaaaatcattgaatccaggagctggttttttgaaaagatcaacaaaattgatagatcgctagcaagactaataaagaagaaaagagagaagaatcaaatagaygcaataaaaaatgataaaggggatatcaccaccgatcccctgactttttctttgttaagccaaaactttctggaatttctataccacctgctatgactctttgtttatttctcaagtttctctctacttaaaacctgattaaggcccttatttattttaagtgattttgaattacttgtgtttggaaaacatctcaatgccccttgagagtatttgagacaccctgaggtgctaaacataacattgcccttccctttccttgaacagatgcttttaaaatgctttttcaaagggactcaggcaaacaaaaagaaaccaaagcttttgctgattttgtaacatcatttagggtaatatacagtatagcttctggatttttctgttctgttctccattcctaaaaaaaaacacaaagaaatcaaaattaagaacataagttttctttgggaaatggtttcttccattctgttctccactctcaaaacacagagagaattcaattaaaagcttaagttttctttgag

SEQ ID NO: 909424 - DNA, 544 bp, Homo sapiens
tggctagcagggcctggagaagctggagctcctggggtgactgtccctggcagaagcagcctcattctttttcctagggtaccaagttctttgacctgaaatagtagtgctgtgcagagcaggcctgtgggccaaatttgccatgtagctggtctttgcatgctctctccccaccagctaagaatagtttacacttttaaatggttgtgaaggagaaaaggaagagaaaggagaaggatcagaagaaacagaaggaggaggagaagaaaatgatgaaggaggaggagaaaggaaaggagaagagggggaggaggagcagcaggatgagggtggtataatggtatgtggcttccaaagcctaaaatatttactatctgaccctttacagaaaaattttgctgacctctgatgtagacaaggagaaattgtttttaagaagaggagcaatatktccaaagaattcattagggagatttagcataacaactgtatacagaaaagactaagtaaaaagagctggaaagagaagccaaatgttcaacac

SEQ ID NO: 909425 - DNA, 712 bp, Homo sapiens
ctggatggatttgggagatatttggggataaactttatagactatcttgataggttaattaagaatggaaaggtgatagaaatcacctatcaagataattcatcayacagcagttcactcgactgattgatggacagcgccattgcatgttttgtcatgagttaagcataatcttatatatatcaaaatcatcttaagcaagtaatacttttccatagcacacttctttaaggaagctttctatgaaatatccattcagtctcaaggaacatatgtgagctgaggagaataagaattaatgtaggccgagtgcattggctcttgcactttgggaggctgaggagagaggatcacttgagtccaggagttcaagaccagcctgtggaacatagtgagaccacatctctacaaaagtgaaaatttagccaggcatggtagtgtgtgtctgtagtcctagctattcaggagactgaggcaggaggatttcttgagcccaggagtttgaggctgcagtgagctatgattatgccattgcacttcaggctgggtgacacagagaaaccctgtctcaaattaaaaaaaagaattattgtagaaaatgccaagttctaaacactttatatacattgactcatttaatcctcctaacagctcttgagacagaaactatttttgtgatcctcactttataaatgagcaaactgaaacacaa

SEQ ID NO: 909426 - DNA, 568 bp, Homo sapiens
ttaaccctctgctttgtcattattgcaaaaacaccctggtcactttaggaaagattgctgaaaactaaaatggaggcaacaacaacaggcaaaggaaaaaaagaaaagggggggtgctccaaggaacttaaagagaccttgcctttcctccatatttatattttgggagaaatagaaagtatctgaaatggagaacaaacataagctcttattgacactgagctgcattatctgtagtaaatcccaccttattacaaggtcccattccttaaagtaaaccatttaaatggtgggtgtcactgatattcctgtattggcacataaatcttagcctatagcttttcaagtaggtcctttacaagagacttgtatttttctcttcgttctctaagccactatccatttgataggaagaaatttcttagaactatataayacccatatttgtttttcccaaaagggtaaaatatttttagaattagaagacaaagttgaattactagacaccatgaatttttcagaatctgatccttttaaattcacaagctgcaatttatattgccataga

SEQ ID NO: 909427 - DNA, 568 bp, Homo sapiens
ttaaccctctgctttgtcattattgcaaaaacaccctggtcactttaggaaagattgctgaaaactaaaatggaggcaacaacaacaggcaaaggaaaaaaagaaaagggggggtgctccaaggaacttaaagagaccttgcctttcctccatatttatattttgggagaaatagaaagtatctgaaatggagaacaaacataagctcttattgacactgagctgcattatctgtagtaaatcccaccttattacaaggtcccattccttaaagtaaaccatttaaatggtgggtgtcactgatattcctgtattggcacataaatcttagcctatagcttttcaagtaggtcctttacaagagacttgtatttttctcttcgttctctaagccactatccatttgataggaagaaatttcttagaactatataacacccatatttgtttttccsaaaagggtaaaatatttttagaattagaagacaaagttgaattactagacaccatgaatttttcagaatctgatccttttaaattcacaagctgcaatttatattgccataga

SEQ ID NO: 909428 - DNA, 651 bp, Homo sapiens
acatccaccaagtatcagctgagatttgaacttcaaccctgggctgaactcagtggcaggactctccattcccaacaagggacaaatggagaaataaatggtgagagggaggagcttgattctgcccatgctaattggacacctgttgtgtgctaggaagacacacagaggtcaatccaaattccagctccagccacagcaggacagccatggtgtagaaggcctagcccagaggagggagccttagcaagcggaacacccctccatggagtattgacattctgttacttcagttatactgaaaactagtagaaggtaagagatgttgtactcaaccattatgagcaagaaaatccattcaatcttctttaatttggttaaaattagcctttattaaaatgcagcacagagtaatgcttgcctgtgagaatttaaaaacatcatagcaaaccactccgttctcagtttaagagggaaggcgaaaggcttgtgtgggagaataagaaaaaaacatatttatgtaatactttgagtttctattgctcctaaccaccattgctacataattattccaaaatatagctcttctttatccatcctactgttcaaaagtacctcactgwttctgtaacccccaactaatccacccta

SEQ ID NO: 909429 - DNA, 637 bp, Homo sapiens
acaacaatcacagaacactataaacatatgtatgcacataaaccagaaaatctagaagaaatagacaatttccttgcaaaataaaccctccacaagactgaaccctgaatagatcaataatgtgttctgaaactgaggcagtaaaaactagcctaccaagcaagctgaatttgagcagaggtacaaagaggagatggtaccttttctcctaaaaccatccaaaaaaaattgaagacaaagaagttctctctaactcattctatcaggccagcatcatccagataccaaaacctaacatagatactacaacaacaacaacaacaacaacacatcatgccaatgtctttggtaaacactgtgcaaaaatcctcaataaaatactggcaaaccaaatccagcagcacattaaaaagttcatccgcaacaatggagttggctttgtccccaggatgcaaggttgattcaacatatgcaaatcaataaatgtgactcatcacataaagagaactaaatacaaaaaccacatgattatctcaataaatgcagaaaaagcatccaataaaattcagcattctttcaggtttaaaattctcaataaactaggaagtgaagaarcatacctgaaaataataagagc

SEQ ID NO: 909430 - DNA, 656 bp, Homo sapiens
gaggcttgcctttcagcctctgaataataattgatactaaaattgagaagttttccagacaccagcttcctgaaaggagcatccagtcagaagacaagatgaggtcagtagcgaaggtgactcaggctgartggggaagtccaccagtgtatctgaagactgagctaggggagggtttccctaatgttcactccttctgccctccatatattcctctacttttcccaaacttccctctgacatcctccaaactttctatcttcccagggctttcttgccagggagtctaatgaagtaaaagctttaaaattgctttgattttaaaaataattttattgattcttaaaatgtaccgacacaaaattagaataccaattcttaaaatgcttaaaaagtaaattaagtgtaagtttacatttaattatcttatttgattcctaattaaaatacaaaaaaattttttttgaaacaaggtcttgctctgtcacccagactggagtgcagtggtgagatcttgggttattgcaacctccaccccctaggttcaagcgattctcatgcgtcagcctcccaagtagctgggactacaagcacacaccaccaattggctaatttttgtgtttttagtagatatgaggttttgccatggtgcccac

SEQ ID NO: 909431 - DNA, 577 bp, Homo sapiens
aaacctattatcattcttcgtcagttcatttagtcctgttttaytcatacttgttttactctatcttgtaagcacatatgcttctctgctagaattagagaaataacttagtccactgatagtgtttcaaagttatgtaagtcattctatcagaagcctgtttataggagtacttggtacagttatttctgtgggtctctgagacattcttattttgttgaagacaaagccctgtggcctggaactgatttgcaagcacttttagaaaaatagccgagtacaaccaaaagtatatactaatgaaaaagtaagccatgctttcaggtatgtagttagttgatacactaaaatattcttttatataatgcaaacagcactaacactttaaaaaatagaattatattatgcacagtgagggcactggaaatttttttaaaaactttaatttctggattatttacgttaataacaattatgtaaaaaatttaacctaggggaagctaagcatatgtcttattatttaatatgacaatatgcaaaataggcacgtttccatatatgatactaggacataaag

SEQ ID NO: 909432 - DNA, 577 bp, Homo sapiens
aaacctattatcattcttcgtcagttcatttagtcctgttttattcatacttgttttactctatcttgtaagcacatatgcttctctgctagaattagagaaataamttagtccactgatagtgtttcaaagttatgtaagtcattctatcagaagcctgtttataggagtacttggtacagttatttctgtgggtctctgagacattcttattttgttgaagacaaagccctgtggcctggaactgatttgcaagcacttttagaaaaatagccgagtacaaccaaaagtatatactaatgaaaaagtaagccatgctttcaggtatgtagttagttgatacactaaaatattcttttatataatgcaaacagcactaacactttaaaaaatagaattatattatgcacagtgagggcactggaaatttttttaaaaactttaatttctggattatttacgttaataacaattatgtaaaaaatttaacctaggggaagctaagcatatgtcttattatttaatatgacaatatgcaaaataggcacgtttccatatatgatactaggacataaag

SEQ ID NO: 909433 - DNA, 690 bp, Homo sapiens
ctggcaggatagggggaatagggcattactgttyagtggatataaagtttcattttggaaagattaaacagttctggagatgggtgatggtaattacagtacaaaatgtaaatgtacttaatgtaaagtggtaaattttgttatgtatattttgccacacttgaaaaaaaattgtgagctggccacagtggctcatgcctgtaatcccagcactttgagaggccaaggcagatggattgcttgagctcaggacttcaagaccagcctgggcaacatggcaaggctctgtctctataaaaaatataaaacttagctgggcatcgtgatgcatgcctgtagccctaacgacaggggagactgaggtgggaggatcgcttgggccgtagtgagctgtgatggcaccactacactctagcctgggtgacagagcaagacttgtctaaaaaaaaaaaaaaagggaaaagaaaatggtgatacatactagtaggaaaaccgttaagacagaaatactcaaataaatttatttttgaaaataaattttagaagaaaattacatgaatggaagaaaataattgaagaaataagaaataaaattttccagaactgaggaaagactacttgctaataataatgaatttaaagaaacacgtccaaatgtgtcatgaaaaatttacaaagaaacaggatcag

SEQ ID NO: 909434 - DNA, 655 bp, Homo sapiens
ggcttaatcatctttgtaggtgactcagggctaaacactatggtttgcccatagtggatactcaactatttatttaatttattcatttatgcaaagtaatatcaaacacctatactgttacagttcttaacactagggatttatcagtgaaaaccaaaaagctcctattctcatggaacttgaaacctagtaagacaatatacaataaataaataaatcaggtgataagtacattattaaacctattgattcaaaaaatattactcaattcagagaaatgagcaatcagtggtaggttttctagtgtcctcctaagccagatatgagttgaacacctctcttgttctagggccacagctgatatataggagaccaccaagaaacacagaaaaagatactatggaaccatgttcaaatcaccacacttctggtttcatgatcttattacttagacctatttggccatcacctacacttgtgaattcagagtcctgatggctttgtattttgtaattcctccttgataacctgttgttctctaagcstttccttgtctgtggggactcctcatccaatgctggctcaactgactgataactggggaccactttctagttctcccagaactgatgttatgaccatactaggtgatctg

SEQ ID NO: 909435 - DNA, 567 bp, Homo sapiens
ggaacagatgtaattacttactattcttcacagtcccaaacatcttgaatttgctgtggcttggaaggcaaacaaatcttcacagcctctcttactgtgattccrctgcaaaggtgagacaacttccatggcaaacttaatggtaatattttctaattgagttacccctactcttcttcttccaagacattttctccccaacataatcctcgcagtctttatttaatcagagtctgtgtctaatacattacagatgctcaaagaaacatttcatataagagtgaaataattaatggtgtgggaaacagatcaaaaagctcagccagacccaggttagatgggactcatgaagacttccttgacagtcaggtgaatgagaaagccagcagccaggaaaccgggctgtccctctgacatgaacatcttggaaattccagataagcattactgagatgctgaagaggaatagttagctggccagggcagagggaacagcaaaaagcagagtttacagggcctggagagcaactgagttacctgatttacgttggttggtgctagactccc

SEQ ID NO: 909436 - DNA, 571 bp, Homo sapiens
aaagtgggcaaataacttgaatagagaattctccaaagaakatatacaaatggtcaaccagcatatggaaaggtgcttaatattactaatcataagataaatgcatgtcaaaactacaatgagattttacttcatgtcccttaggatggctactatcaagagaagagaaaacaacaaatgttggtgaggatgtggagaaactggaacccttgtgccctgttggtaggactgtaaaatggcgtggccattatggaaaatggtatggaggttcctcaaaaaattgaaaataggattatcagatgatctggcaatcccacttctgggtatatagccacaagaattcaaagcagggttttgaagagatatttgcatgccatgtttattgcagccttattcacaatagccaagaggtggaaacaactcagatgagtggacatataagtcagagatatatgcaatagaatattacccagccttaaaaaaaggaggggccaggtgctgtggctcacctgtaatcccagcactttgggaggctaacgtgggtggatcacttgaggtcaggagtttgaga

SEQ ID NO: 909437 - DNA, 653 bp, Homo sapiens
gcattactccaacgatttctttggaccattctaacagaacttaaaagcaagcttagaaagtatcrcattagtgccaagtaacttagccactgcacaccaaacataaaatagaggctatttaaagtaatacaatgaaattaagcattgggaatataaaattcaaaatgtccagaatacaaccaatactgaccaggcatgcaatgaagcagagaaatatgatccagaatcagtgaaaaaaaattcaatacaagtagaccttcaaatgatagagatgatggaaagaacagataaggaagttaaattaatacagctattattattttccatatgttccagaaggttccagaaagcatgagcatgattagaagagaaattacaaatgttaaagaaatacacaaatttatatagaggaaaaatatatctgcaatcagaaatgaaaaatagatgagtctgaaagcagagtagatacttaaacagaaaatatcagagaatttgaagacaaagcaatagaaactattcggagtgagtgaggcatggaaagggaaataaataataataagtaaaagaaaacaacagcaactcctgggataattcaagtggtctgatattgttgaaactggagtgctactagggcagaataggtagtgaaaggg

SEQ ID NO: 909438 - DNA, 658 bp, Homo sapiens
tctttctgcacatgacaacatttctttctttttaaaagctgagtagcattctgttgagtatatgtaccacattttccttatccatctatctgttggtggactcttatgttgattcgatatctttattattgtgaatagtgctgcaataaacatgcaagtgcaggtatccctttgatatgctgacttctttttctttgaataaatacccagtagtggatttgctggattatatggtagttctatttttagttttctgagaaaactccacgatgttttccacaatggctgtactatcagctagcacattgataaagaacatatattttgtagcaggaatgtgtttattttagcgtcaatgtctatcataaattgtttaggccgaaagaggaatgaagtgaaatatatatatcttgcttccattcttccatagtgaaaaatattcatttcaggagaatgaagcaaagagaaacaaaactactccatatttattcacagacagcccatggtatataattttgtccatagttatagaaaacttcagaatggacagtgagatgccacttagccagcaagcaaccttcccttacagttgtccaacctagggtctgccactcyccaccaggatatgaagacagaggtcttgcttgattgccgttaa

SEQ ID NO: 909439 - DNA, 612 bp, Homo sapiens
actgaaaaccacctgaatgtccatcaaaaggagaakagataaataaattgtggtatatctatacaatagaatattaatcatcaataaaggaatgaacagctgatacacttacatggatgaatctcaaaagtagtatgctgatcaaaatagtacattttgtatgatttcatttatacaaatttttaaaaagacaaaactaatctatggtgatataaatcagaagaataggtgcctattggggctgggaattgactggaaggtagcatgaaaaagctttctgaggtaatggaaatttttattttattgaggtgtcactttatcagtgggaccacttcacaaaagttaacagattgagcatttaatatctttactaacttatacacctgccacagtataagttactgtcacacccagtaagaaagcgtggaaaatatattagatggcagaatctgaatattatacaaagtatcttgacagattgaagttctcaactaaatatgacaggttgaaatgttatgtaagaacaaactcttcctcctctcccaaataagtctgtttcatcttatataaaattttacctcaattaagaaataaaaacaatatcatttttaa

SEQ ID NO: 909440 - DNA, 652 bp, Homo sapiens
gacaaaaagaaaaatgtgatttcttgctttgtaggtcaaaatactttatttgctacttaaattttcaattccattcaacaactatttactgacttgttcttatatgccagaccctgtgttagaactgtgtacacaaattaatgtgatattgtccatgttcatatccatagtccaacccatcttagggagtttaagaagcacttcatcttaagactaaagctattattttaggtgtgtttataatatctaaatcaaaattctgaaatacaattattttgcaaaagacgacaaaagcatcattttactcaactgatcctgaagttttaaggcatatttgatttaaaaaatttaaaaaagaaagaattggggttgggaaaggggagtataaactgatgatataaaaatcactcaatttagactctagtaaggacacaagaattaccaaaacagttacttctcatttaatcattttggtttgtttaaactctttagttatttgggaaagaaatgtattgagtacctgctgtgtgttagatatggtgctaggtcctatatgtggatgtgtgatatgactgatccagttcttatcctaccgtaacttacattctagtaggcaattgcatgasagttccttaagagctataatagcaga

SEQ ID NO: 909441 - DNA, 540 bp, Homo sapiens
ctttatgagaaactaatgcctgatgatctgaggtggaacggtttcatctcgaaaccatacccycgcccctgcctcccagtctgtggaaaaattgtcttccagaaaactcatgcctggtgccaaaaaggctggggaccactgtcttaatagatcttgaaaaaagttggagtaaggtaagtggtaaatcctaagacatacattgaggcagagctgcagtggtatccagtagggaagaaaagacttcaagtttagaattcagttatactcaaccagtttttgcctttctctgttaaatattagatatcattaccagacacatacaaaagattttaattgcatgaatgcccgatgttgatacaagagagccgatttttttttcacacatagttttttggggtttttttggtagggagaaacatcatctcatgatatcgttttaaaggtgctttattatcaaggaccttagagctttttctctcactcatatttcatatactcttagtcctcaagccatttctttttactgaaagcactatagag

SEQ ID NO: 909442 - DNA, 651 bp, Homo sapiens; identical to SEQ ID NO: 905255

SEQ ID NO: 909443 - DNA, 676 bp, Homo sapiens
tgtagtctctggatattctcaggtagcctttgtagggagagaatacaattcttaatactaagacctgaccgtayatttttgctaatttctcttctttcctcattgaacaccaggatggcttttctatgcagataacttgacacacagagcccaactttggtcctgaattctgagaaccacagttcagaatagacgctaaaacgtctcaatgttagcagccttcccctatgactttatgaagtgcagccctacaggagaactcaggaagccacatcttccatctgtcaccttctgactgttgatcctgtgagttcacaggccagggtgatgctggtgaggacccttttcactgggacccccaggagttcctgacagagacagacttggagacaccagtagtctggtgagaaaggggcttaatgtcatgaagtattaaaaaatcgaatatattcaaaaatttacgagagaatattttggaaggaaacttcaagaaatgtagaagagagggagaagaaagaatctctgaaagtcacctctttgggtggaattttctcatttctatatttgtggtcaccattgtatactggtaacaagatttcttgccataaaaatttctcagatggtgaaattatttacaatatggatacatttatttcttcctgtgtgcctttgtttg

SEQ ID NO: 909444 - DNA, 592 bp, Homo sapiens
tagataccagtattgtggagttgatcaagacagagaggactctcatcccctattacttaatttttcaataggatcaacataaaatacttttaaatagatgtttataataaatataatgacataaacacatagtctggagatttaaaaaatataatagactatctgcccataaaaaatatagctgatttctctactgcctaaaatcaacaataaagcatatccaaaatgtcccaagactctaaaaagagttatatttttgtgaaaggaaacaggcagtagatatatagacgatgatataattttaggtagtgataactgctataaaaataaaactggatgatataatagaagataattagggaattagggctagcttagataaggctctaaggaaaattcatgcacttcatttattaaacacagatatagtccaattttctccttcttgtatcagattcattatatattctcagtagttttctaggaatttggctattacctgaatttttttctttaaaaataatattgwttatattataaatttcttattttaaatgtgcataggatctttaatgatgccctatcttcattg

SEQ ID NO: 909445 - DNA, 705 bp, Homo sapiens
atttccagggttctttctctgcgcagatctctcttctctgatattttgccctgtgaactctactcagccttgaattctgagaaaacccacgtccatctcatcaactcaaggagacaggctctgcttgagtttcctctcactttgcttgttgcttcctaaacatctcctccaagcagtaagctaaggcaatagtacagctcaccttattggtttttctcttttgttgcctgaggttcagtatcactaaaaccatttatttcatacatttttatagttttttagttgttcccattaaaataataaatctggtgcctgttacttcatctcgtctgaaaataaaacgtggaatttttaactgtatttaatttcaattaattaaaatttaaatagtcacatctggctatattgaatagcactaaatagaaggtactgattacagagatattcacatagtgaaatttcactgaactgtgtacttatgatttgcacacttttatgtatgtgtaacacttcaacaaaaaatggctgaagaattaaaatgctattcttaaacttgttcatcagaaacatcctttttttctgaatcgctgctcaggaaagctgactctctctctctctctctctctctctstgtgtgtgtgtgtgtgtgtgtatgtgtgtgtgtgagagagagaaagagaatcatgaaagttttagcaaggaaga

SEQ ID NO: 909446 - DNA, 622 bp, Homo sapiens
tgggagcccaggctgtttccagctttgcattccaccacccttaaagtgagctatcaggggccttagagttccagatagagcttcagcaatctcatatgcatccaagaagcaaaaataagaaggaaatacacttcccctttaaggacacatttcagaaatttccacaccactttcctacacttattatcagaacttagtcattttaccacaactagtagcagaaaaaattgagatgtatagtctgtattcaggtaatctacttaactaaaattgagaattttattatatagaagaggagagactgagggcatcaaacagcctttgccagagctgactttgatgttctttatgtgtactcgtgtattatcctcataactctaccgtgataaacacgtttgtatgaaataattttgttttgcttgttggtaactcatgaagtcaaaactggattttcatgtgtctttccatatctctgcacttaatttcaagctaacatatttgtccattatttcctgctaaaatgagtttctttcattgcacaaccatttcccaggctaccagtccaatttctagatctgaagcartatttatgaggtatttactcctagcctgaagtccccca

SEQ ID NO: 909447 - DNA, 602 bp, Homo sapiens
accaataagtggataaagaaaatatggtatatatatatatatatatrtgtgtgtgtgtgtgtgtgtgtgtgtgtctgtgtgtatatatgccatgaaatactgcttagtcataaaaaagaataaaaaatgtcttttgcagcaacttggatggactcggaggccattattctaagtgaagtagctcaggaatggaaaaccaaatatcacaagttctcaatcataagtgggagatgagccatgggtacgcaaaggcatacagagtggtataaaagacattgaagactcagaagctgggagggttggaggagggtaggggataaaaaactacatattcagtacaatgtacactacttgggtgacaagtgcactgaaattccagatttcaccactatacaattcatctatgtaaccaaaaaccacttgtaccactaacgctactgaaatttaaaaaacaaaaaaatagaaaaagagaaattaccattgggaagaagaagtagatgtgtttcaaaatgataccttcatttccactctcaagcccttaccttctgcatgaagtccaagtctcagcaaggcatgggaggctcattattatttgatctctg

SEQ ID NO: 909448 - DNA, 616 bp, Homo sapiens
ccatggtgtatatgtgtcacattttctttatctagtctatcattgatgggcatttgggttggttccaagtctttgctattgaaaacagtgctgcaataaacatatatrtgcatgtgtctttaaagtagaatgattaataatcctttgggtatatacccagtaatgggattgctgggtcaaatgctagctctgttttaagttctttgagaaatctccaaactgttttccagagtggctgaactaatttacattcccgccaacagtgtaaaagctatttctccacttcctcgctagcatctgttgtttcctgacttctttttttttttttttttttgagacggtgtcttgttctgtcgcccaggctggagggcagtggcatgatctcagctcactgcaagctccacctcccaggttcacaccattctcctgcctcaacctccctcctgagtagctgggactataggcacctaccaccacacctggctaattttttgaatttttagtagagacaaggtttcactgtgttagccaggatagtctcgatctcctgacctcgtgatctgcctgcctcggcctcccaaagtgctgggattacaggcgtgagccaccgcgcctg

SEQ ID NO: 909449 - DNA, 682 bp, Homo sapiens
actgaaagaaggagcatgctgtataattccgcttatatggagtccaagatcagttaaaactaatttatggtgatagggtttgatatagtggttattttgggaagaatagtgcttgggaggagaatgtgagaaccctctcagatactaggaatgttttatatattgatttaaacgtttgtacacttacgatgtgtcccctttactggatatgtcttaacctcaactttaaaaagaaatctatgtagctgaaaatatcataaacaaaattaaatacatattataaggagctaattttgaatacataaaatcataacagcactctctctgtctccagtactactctagtgctttatatacataaactcacttaatcctcaatataatcctataagtaccactactatccccatttaatgagtaaagaaactgaggcataaataacctaaatataatttgtttgtggtcgcacagttagaaagtgccaggaccagaattcaaattcaggcagtctgtagagtacttacatttaattacaccaaaagcaaaaagaccaacagtccattagagaaatggtcaatagacatgaacagaaaacagaaaaatmatgtataaaactatgttactcttcattcactagaaatgacatttttcaaaattttaaatgtggatgctctttgaccag

SEQ ID NO: 909450 - DNA, 586 bp, Homo sapiens
tgtgacacttgggaactacaatttgagatgagatttgggtggggacacagagccaaatcatatcactctcccaactagaaacaactgaaatactcrtcagtaggagaatggatacataaactgtgaaaattcatacaatggaatacagatggttcctgacttaacaatggtttggctgacttatgatttttgaactttaaggtggtatggaaaccatactttaagtacccatacaaccattctgcttttcactttcagtacagtgtccaataaattacatgagatagtcaacactttattatcaagtagtgttagatttttgagcccaagtataggctaatgtaagttctctgaacacgtctaaggaagtgagcctaagctatgatgttcagtaggttacgtatattaaatgcattttgactaactatattgtcaacttacaacaggtttatcaggacataccccatcataagtcaaggagcatctatactacatcagaggaaaaaaagaacaaatggatactacctgcaatcatatggctcaaactttcagactttatgttaagtaaatgaagccaggttaaaaa

SEQ ID NO: 909451 - DNA, 658 bp, Homo sapiens
agcacacctgtgcccatatacttgggggactgaggtgggaagattgcttgagcctgggaggatcacttgagcgtgggaggttgaggctgcagtgagctgtatcccaccactgcactccagcctgggcaacaaagtgagactctgtctcaaaaaaaaaaaaaagtatcgtcattaataagtttggaaaacactgcttaacatctaccacatcccaacttggagagtcagaatttatatatggatgtgatttgagtggtcctgctgtattaagaacataaataactatacttaacccactgtttgctgaatttattttttacagaatcctttcttagaatttatcttttaataatctctggaaatagtgttctgagacagtgcttaacaagtttaatctgcaaaaaaaattacctgggtatattactgcaatcataatctgacccagtaggtcaaggatgagagctaagagtctgcatttctaacaatctgcacagtgaagacagtattgcaggtctgctgatcacattttgagtttcagtgctagagagaacatactttaggaaccaaacaaaagtccccccacacaytagtttatcattcatcagatatttattgaacatacagatactgtgtgggcatggcatcagacaaataccaa

SEQ ID NO: 909452 - DNA, 696 bp, Homo sapiens
aagaaaggagattgagaaacccaaaatggactcacacctgaagtgtgttcctactgggaactggggttttctttgatcactatcaagcccttggtgccacacagaaaattacccttctgtggaacaggaggcagacaccaattaatgcataaagtgaatgtctttctccttaaaataaatagctaaaccagaaaatctgcatctctgcatgtggctgtcagcaagaccaaggccacataggataagaaaggaaagaaaatagaaaatgtcaaggagggaaaactagaggaaggggaacaaagcacaaacagacacattcctgaaagactgctgggactctagggagaagccaggtgaatttcctgcttctgatataggactcagcctgtccctgtagcaccataattatagcacatagtgcaaaaccagggatggtggtgccctgggagaagcgaagctgcgtgctccgagtatttgtgaatgactggcaagcatacatctgcctccatcccaaagcaagttttgtgagctcggctgggccaccaagaagccatgctgggccctcctggtagggaccctgacagtaaagggaactcaktatgtctgagtctttgctcagggtgagcatctgtatttctgtttcaatagtgtttagcctctctgatagaaattccactgtatcaatttcacactaca

SEQ ID NO: 909453 - DNA, 676 bp, Homo sapiens
caactgtaagatctttgctagtttgagaacctactgagccacgggaaagaaacaggaagaaaaaccaaatgattaccattttgaaaacatgtttcatctggacaggggagatgaactgtaacttcctatcttgtaaaaagatggaatacctcgcaaaactatgaaggtggttagaatctggcattccattctgttttaaccaagcactcccaaactagtcctttagcatgagtgataacttgttttggtctcttcattgtgctcttgctccctgtacaggtggatctgatcactccctcagctcttggatgatagccagcagtttagcacatttgctttggggtcacttggctgtttccagttccctgggtgtagcctagggatggtggcctatagtcactcagcagctggtggtactgtgagaataataccatatgggtagaaggtgacatggaaggtgacaagctctcagctgagttgagggaggtggtaggcattttcaaggtcaagtttagtttgtatgacattctttcatctccattcccagtagcagatttttatacacacacacacacrcacacacacacacacacacagacacacacacacacacacacagactggtgctgaaaactgtggctgtcttccagaagcccagagaattttgggctttggg

SEQ ID NO: 909454 - DNA, 433 bp, Homo sapiens
gcctccaattagaaaactatagcccataagaaatatcattgaaagatcaatgataaatcaaackcctgtcagttgctacctctttctgaggggagaaggcaaagtctgctatagcagagccaaaccagtaattttataaagagatcagtcattttcagaaatctttaacccttattctttattgagttcatcacttcacaaacctcagtttgcacacacaaaatgagggtgcacatccttatcattttgagtccatttccctttctgtagatcattcacaggagcactttttaatatacagagagaattctatgatgtaaatttaagtttcttgtgactctaaaatggatcttctggctttaaaagcatagcatttgaagtagtcactaacattatcatatgaattgccttgtaaacacataacacataaata

SEQ ID NO: 909455 - DNA, 590 bp, Homo sapiens
tcacttctatgttttgtgtgaatgcatgacatcaccttccaagttactgtaactatgtaggtaacaataattcaggggaggtctttatgcaagtttcacaggtcgcactgcaattgcaaagtggatagtcacactgtctgtaaaagtatgaaagtacttccaattggaatgaaaatctggtcattcagtgaacatcattaattttggtgagttggacttgtttaattaaactctcttgattaatcttatgtgattggaaggaatatggcaaatgctggtttggcagttggcaatttaaaaacaaaaagaagtgtccatgcataatgtccatattcttcagtaatactttctactaggctaatcataggataatagaacatagcacatttgccataattttgtccacatggtagataaaatacattaaaattaaataaaaaaatttgaggttttaggaaatgctaagaaaacttgctcagagaggaaaacttaaatayatatttcattgaagatattagtggttatgtctgaatgatgttacatttgatatattgtgtatcactgccttgaattgctaaacgtgttttaca

SEQ ID NO: 909456 - DNA, 658 bp, Homo sapiens
cagtggatcacttctcattctcttgctctcacaagctcgcactctctctctttctctctcattmcctttatgctctccctgtttcagttttttctgtccaccattcccaattatttatactagaatatcactgtgaccatgccagtgtcctactttacaagcctttaatagacctcttgtgttcacagaataaagtggactactcagcccattattcaaggaccccgtttcgcattccacactcaacccatctttccagcattgtttcctattacaattccaactaacttgtttatttgctgctcccaaatacatatctcaattttctgcttccatgctttctctcatgcccttcacacaacttgaaatgtcttatcacctcccaaatcttacatgtttttcaaagtataactagatttgttcatcatactgaagctttcctttgtcagcctacatatcagtgatgattttctctctaaacccctattctgaatatctgaattttattgcataataattccttctgggcattatcccaacaaatagatattaaatatgtcaggcacaggtcagtgtctccatacacatcattatttacccaatagcatctatcaaagaaaatcaaacatagatatacaattagtatatgccaaatgaa

SEQ ID NO: 909457 - DNA, 565 bp, Homo sapiens
ccattaagacggctgaaataaaaaaagaaagaaaaattacaagtgttagtgacgatgtggaaaaactggactccccttacgttgctggtgggaatgtaaartggtgcagctgctttagaaaacagcctgccaattatccaaaaagttgagcatagggttactatatgagtctgcaattacactcctaggtatatgcccaagagatatgacaacttatgtcacacaaatacttgtacataaatgttcatagcagcattatttgtagtgggcaaaaaagtggaaccaccccaaatgtccatcaatagatcaatgaattaacggaaatgtgtatattcctataacagaatactatttagccataaaaaggactgagtactaatatatgctacaatgcaatctcaataacattatgataaattatagaagctgaacacaaaaagccacacattgtataattccatttatataaaatgtccagaataagcaaatttatagagacagaaagctgattcatggtttccaggggctggaggtggggagagtgactgctaatgggtacagggtt

SEQ ID NO: 909458 - DNA, 647 bp, Homo sapiens
tgacaacatttctttctttttaaaagctgagtagcattctgttgagtatatgtaccacattttccttatccatctatctgttggtggactcttatgttgattcgatatctttattattgtgaatagtgctgcaataaacatgcaagtgcaggtatccctttgatatgctgacttctttttctttgaataaatacccagtagtggatttgctggattatatggtagttctatttttagttttctgagaaaactccacgatgttttccacaatggctgtactatcagctagcacattgataaagaacatatattttgtagcaggaatgtgtttattttagcgtcaatgtctatcataaattgtttaggccgaaagaggaatgaagtgaaatatatatatcttgcttccattcttccatagtgaaaaatattcatttcaggagaatgaagcaaagagaaacaaaactactccatatttattcacagacagcccatggtatataattttgtccatagttatagaaaacttcagaatggacagtgagatgccacttagccagcaagcaaccttcccttacagttgtccaacctagggtctggccactcyccaccaggatatgaagacagaggtcttgcttgattgccgttaa

SEQ ID NO: 909459 - DNA, 709 bp, Homo sapiens
ggtaaacttgtgttgtggggatttgttgtgcaggttatttcatcacccaggtatttagattctactgtcaattattgactggcttttgagctatctttagtggctgcaatagggcatacacacattcttagcttttcatagcctaaagttaatattgtaccaccacacaaaaaatgcagaaaactcacaactattcaggttcatttactaactcccccccagcttactgtacattacacaggcttttacatttacctaggtatttaccacttctgatattattcattcttcctgaagatctaagttttacctttaattcttaggttttcttatcattcaattttacaagtgatgcatttatagttttcttttccctgaaagtatcttttgttaccttcagtcttaaacaatacttttgcttgatataaaattcaacaatttttcaccaacgcttcgaaaatatggctccatagtctttttgtctccatatttgtgaagaagactgggcgattatccgaactttaagtaatgcatcattttcctctggcagccttcaagattttcttcttatcattgtcttccagcagtttgactccactgtgtcaaaataaacaaagtgtttattttgctgatgygtattaaacttttgcatgtgtgaatgtatgtctaccaccgcattggggaaattttattcaattatatttagtgt

SEQ ID NO: 909460 - DNA, 641 bp, Homo sapiens
tttccaccaagtggtttcagacctgggttccgcagattataagaaatggaagcagtagcatacatttcaatatatgtaatagatgttgtaaattatttcatccataagactcttcataaatacatgtaatgaagcttttaaccaaaccatggcatgtcttaccttatttcctgcaactacatcaattagcgtgtggtgctaaagcataataaaccacgacaaaagtaatccttattaaaacacaattcttttactctgggtaccaggccaacaattcaagaggtcaattaagattcttcctaaagagattctttaacttgggagtttacgaagccagtaaaatcatttgtacagaatgctgagaccacatgctagaatgagaaatagatcttggttattttacacagctgtatccaaaaaaaaaaaaagaaactttaatagtaatatctcaacaacacaaaacgaaaacccctttgtagtatttacaaatctccttcttcttgaagatataatgcctaaaatggctaaatgatcatataaaagataaccaatgaaaatgaaatcaatactttattggacatgaartgattaaatcatgatcttgagtgactgttagtagagggatatttaagggatttaga

SEQ ID NO: 909461 - DNA, 543 bp, Homo sapiens
tttttagatcttatttataggagagtagccaatcactccctcaaaacaaattttcttttaatctagacacaattctaaaaagtcatgatagctaatatctttctattcaaggtgtgttgcaaagaccagcagcaaaggcatcacctggttgctgatagaaacacaaatttttagttcccattccagagctaccaaagcagaatctgaattttaagaagatccccagattaattgtagtacactaaagtacgagaagcatcggcctaaaatgctagtacaaggtaatttgcctgagctttggcacactgggaatgtcttgctttgtttggctaggagttgatggaagcaggaagactgactacaacgacagtagtaaaaaaggcaacccacatacagcatgccagtgagaaargacagagaaaaatttatgaacagctggctcaaaatgaaaaaacaaaaagcacctacactacttcgtgtaggcaagaagctccatacaccacagcaatccctaagggtctctgtgtatcgcagcgacgtaga

SEQ ID NO: 909462 - DNA, 719 bp, Homo sapiens
ggggagtctgtcttcctctttgttaggtctgccgggtgaagagaaggcagctgctgcttcaacaggtacctctgaycaggaagcagcagtttcttccagctccttatgtggacctggattctgccaggacacgaacaaacaaacaacaacaaaaccccatcatttatacggggtcaaaacagggttcacatggtgaactcatctgcagagtctaaattctgagatgcttaccaactttggaaccacccagaagatcaagggggagatgagcagttttgaatttatgactgtcctgacacatccaggacagtttcaagccagcattaccctaaggtgacccagcttgcagtaatgaaagagactagactccacgagcacttggcattaggaatgatgattgactccattttagtaacctgatgttttgttggtattgatagctctggatttttttttaagcatatttatcgtctaccttagtttattcactaagggcactgaatttaggttagaacagcatcccaggtttgaattgcatgcctactccatatttgctctgtgactttaagccagttacttagcctctttgagtatagttttcctcatttctaacatgagaatacgacctgccttccagggttcactctaaggattaaatgtctatgcatagtatgaatgcaataaatactatttattgtcatttcccaattttagaaaac

SEQ ID NO: 909463 - DNA, 586 bp, Homo sapiens
gtatgtatatatggagaacctatatcgctcctattgtttctgttctgtggaaagccctgaataatacagatgcatctataaatttatagcaaagctgtgtaaaggataaagatatgctaaatcatcttagtcattttcctctcccctagagccctgtgtcctgctctcatcctgctaggagtaactcaaagaataatttggggtagaagtcatcctcagactggaaagcaatgaggcacagcaccactaccatgctcagaattaacacctaaatttactacctttatatatggccttctggaagcaaatggttttaaacaactttatttctaaggagagaccaaaaggagaagtgaggagtgtggctgtgggcccactgtttggtaaatactgtaacagtaactgtatacctctcctcatagtgaccttactaatttaatgaaagtgtgaaggcagatggatctggtttgcagggtcttagatgactttattgaacacatcatatcaaagtgagaacaarcaatatgtctcaagccaagatcaaagagttttaaataagcaaaatattcctactaatacgaaaatt

SEQ ID NO: 909464 - DNA, 606 bp, Homo sapiens
actcacagaattgaacatttcttttcattgagcagtttggaaacaccttttggtagtatctgcaaatggatattttgagcrctttgaggtcaatagttgaaaagaaaatacattcacataaaaattagacagaagtattccgagaaacttgtttgtgatgtgtgcattcatctcacagagttcaacctttcatttgattaagcagtttggaaaaactctttttgtagtatctgcaagtggatatttggagggctttgagtcctatggtggaaaatgaaatatcttcacagaaaaactaggcagaagcattctgagaaacttctttgtgatgtgtgcattgaactcaaagagttgaaactttcttttgattgaacagttcagaaacagtctttttgtaatatctgcaaatggatatttggagccctttgtggcctatacttgaaaaggaaatatcttcaactacaaactctacagaagcattctcagaaacttcgttgtgttgtgagcattcaactcacagagttgaacgtttcttttgattgaacagtttggaaacagtctcattgtagtatctgcaaatggatatttggagcgctttttggccta

SEQ ID NO: 909465 - DNA, 663 bp, Homo sapiens
aggtgtgactcagttcctgaattaaaatatacaacaaaagctcagggctgaggagccagcctttcaccaagcctgatgagtctactgtaactggcatgccctgagcagtctggagtctcygtgtgctactaggtctgaaatgttttgtttgttcgagcatctgacctgttagcctcacccccatgtaggctgctgtcaccactgggcagaagctttcccggagctagttggaggttatcctacagatatactttggcatctcctgacttttgtcgtcgagagggggagatttttgttgatttcacttatttgttcatttggatgaactcacagtatccacggtagtcaaagcttgatcctttttgcagatgaagtgtattccagaggtgtctgggcatgtgaaggtggagtcctgaatatttgtgatcttactttgccaaaccatcagttagctatgggatttgtcctatggagagccagagcaggctgatgccttcagatgaaggctcccaccccaatatacctcccatgacctttctgtacatctgaattcttgtgtaaagatgacaaagtgttcagacttcaggtagaacagggtttttcaatcttttaagtcataggacccctttacacttacaaattgttgaagatcgcgaaatgctt

SEQ ID NO: 909466 - DNA, 619 bp, Homo sapiens
tgtagcagttgagcatccattcctttgaattaaagaatttagcaggtccatttagcaacatcactatagagagaagcataaccatacattttaaaaacgcattgggttggcatcaacaactaaggatatcaataaaaagtaaaagatgaggttgatggattacagaaactcagttgggagagaaaatggagaagcaaactaacatataataaagttagttgttgaaggtcaaatacattttgcagtttttattttatgtttgctgtgcatatgtaggtttgtctttaaagttttataaaaggaatttttagtaaaggttttcatgctttaatatggaaagtctgtggcctaagatatgccatatattaatgatgaaatagtgggttaatttccaaatgaacctcatcttgtgtatgagataatatggcttgctgcctgcagaggcaattacaggttcaaaacatttggtgttggacatcaatcttgctaaatcaatcgttataaattatcttacaaaggtacctgcaattcaatggcaaaacctcaagtagaaaatcagcaaagtttacccaacaaaagtaacatagaratttattttactgtagctcaagaacaattc

SEQ ID NO: 909467 - DNA, 546 bp, Homo sapiens
tcaggatatatttggctattctggrtattttggggttccatataaattttaggattgttttttctatttttttgaagaatgccattggtattttgatagggattgcactgaatctgtagattgctttgggtagtagacatgtttacaatactgattcttccagtagatgaacatagaatagctttccttttgtgtgtgtatcctcttcaattctttcatcaaagttatatagatttcattgtagcaaacttttacttctttggctaattcctaggtatttaactttatttgtatctattgtaagataaattattttttaatttctttttcaggttgttcactgttcccatatagaaatgctactgatttttgtatgtcgattttgtattctgaaactttactgaatttgtttataattctaataattttttggtggagcatttaggattttgcaagtataagattatattatctgtaaacaagaataacttgacttcttccttttcaatgtggatgccctttattactttctcttgtctgattgct

SEQ ID NO: 909468 - DNA, 591 bp, Homo sapiens
ctcttaagcctgcagaactgtgagtcaattaaacatcttttcttcataaattacctagtctcaggtagttctttatagcagtgcgaaaacagactaatacaatcttccaaggattcctgctatgtagttccatttttctattgtatgagagcaagagtcagagtgacatcccaaaatagcaggcagaatatcgattcatcattagaaaacaaaaagtccctaatatatgtgattttgaaataaagaacttactgggaaagccatgtcccttcactttagcacaggacgttgtttatgctgttccacatgtagtgacgcttaccgttgacttccagctgtctgtccaaaggatgatatcgtattcatctgagctttctatccccaggacacctattcctccaagagacacactaacacctgtcgaatatgcaattactattctatttagtacattgggtcaatttgcttcaaagtccctcagagccctgaaaggagtaagaaagtgttaaaaaaaaaaatttctcttgggaargaaaaatcatgttgtttctatttaatgctttgttttttcctacccttttctcactgtcc

SEQ ID NO: 909469 - DNA, 513 bp, Homo sapiens
aaatttcctaaatagtctcaattttagtacttatatcatagaagagcagcaccaatctgtggtccatactttcagtaatactgagctatatgatgaatgagaataagccaataatgttaacgtatattarcttgtatattaaaagtatattatgcatctagcttttattgaaataaaaagtgattcctatcccccaaacaattgttgcaaattcttcttacttcattaagctgctgttcatgctaatttagtatgaaaaaacacaaaggtctgtttaagaaagttgaatatagaataaaatgtatactgtcttaataaaccaggtagagagaaaaaatggagacctgtcaattctgatgatgttcatttttgttttgattttatatatattattgttaataagcattaacattgctaattaattttgaatatggtttattattattctgtagttaaaatcatttcatctttctgacaggctcgggggtgtgaattattcttactgaatatatt

SEQ ID NO: 909470 - DNA, 650 bp, Homo sapiens
tagagccagatttaaccacattctagagctggccataactacaatgctggtctcttaaccagctctggtcactgaggtgtccgaagtttgtcaaggtcaagtgaaatgcctgagatctagatrtgagtacctatggccttagaacgtgatggctcaaatcagaagtgaatgcaattgaatcagcccatcctaactgaggaatttagtagaatataaatctactaaagcagtgctagtcctgcaggttggcttagtacaatagttaggaagctggtggtgtttacgcagagctatataatgctactagctctctaaacactggtatcacttacagctttgttttaatcttagaatatgttccaaattcacaaacgcttgcagaccaggacacatgaacggtatttgccaagtacttcagtttctgtggaattttatggttggttggatttttaacccaagtactgctgataggttggtccagcagtaggactggaagcaggtaaagtgagaccagatttttaccttctgtgtctctgtcattaagtctaagatgagtcatcacagaaagcctacaaagcagcctggtttctggctttcttggggagattctagaacattagtgatgcttaataatttaagtgcagatgttg

SEQ ID NO: 909471 - DNA, 593 bp, Homo sapiens
gggaaatggaggccacatcttagttgttattgtattttcagtgcttcgtgcagcacttggctcaaggaaagtttgatgagcgaatgaatgaacagcaatttgaatgcttttagtaagccctaaaatcaamccattttaatcaaaagacagccagtaatttaaagtaattaaccaaattcctttgaaaaaatatacaaatatacaaaataaatttattagaatttttacaatttcattcttactgatattcaagttaaattcagattctaccccaattcatcaggttcctaatgcaactatcataaacatgccagttactatacctctctaggtatttgtgggccttatgttttatgattgagtcacttagaagaaatagttagttgacctacagtgaatttaacaagagcatgatacacatcagcaatatcacacaagaatgaaattggtgctgactgggtgacagcctttactgtggggcagtgaggggcttgagggcctgtattgtgaatgagaatgacagcacttcagaaagacctgatgtaaattctttgacaggtcatatagtcacattcaaaagtactcttgctgct

SEQ ID NO: 909472 - DNA, 576 bp, Homo sapiens
gtataagcacaatgttgcttctccttgactctgattgccattttcttttccctttagacttctaggcatttctttgcaaatgtttcatcascattttaaatacagtccttgtaatcttactatgttgctttttcttaggcacaaaggttttatcagtaaagcacattaattggttagaatgcctcatccattaagagatacctgttatatatagactacatagtattgatttcagagacaaactttctagaaaggacttgcaattatcaaaacaaaactaagtaacttccatcaaatgtccctccctgtcaattttctgtcactggtttatctaccttccaaatcacctgggctactcattgtaaagttcattgacttttctctgtcctaatcctctatttttaattcacaacgaatgtgtgagcccatggaattaactttatcctcctcttctgtcattgaaatagccaatagcctattttattttattttttatagcttatgttattttattgtaaattcttggtaaacgacttgaaagtgtctttttttttttttcctttaaaaatccacttg

SEQ ID NO: 909473 - DNA, 681 bp, Homo sapiens
actgccttacctcttaattggtttgcttgcatctccagtctttcccwttcaaatcaattttccattctgtagaatgatctttctaaaatgcatattggtcatgcatcaaagaaaactatttaaaaaaagagaaaagacaacctacaaagtgggagaacgtttttgcaaatcaggtatctgataaaggtctaatatctagaaaatagaaaggcatgtgtggtggcacatgctgtaagcccagcactttgggaggccacagcaggagaggatcatcacttgagcccaggagttcaaggcctgggcaacatagagagaccctgtctctacacaaacacacacagaattagctgggtgtggtggcatgcacccgtggtcccagctactcaggatgttgaggtgggaggatcaccgaggcccaggaggtcaaggctgcaatgaaccgtgatcataccactgtacttcagcctgggcaacagagcaaggctcttgctcttaaacaatacaaaacaaagcataaatggagagaaggtatacaagagttgaaaacaggaaaaaaaagaagatactataaagaactcttgcgatgcagcagcaaggaggcaatccggtgcaggattaggcaaggacttggatagaaatttcccagagaagatatgcaagtggttacgaacacatggaata

SEQ ID NO: 909474 - DNA, 619 bp, Homo sapiens
gaaagggaagatgaatactgggataggcatctgaggtctcttgccatagtcatcaaaggacttttgcctcaccagtagtgttttgctgttttacaaggggaataaatttatatattatttgtgtaactgaaaaatcattttaaaataaaaaagggagtaattaccttgtttttaagattcactaatctgaaagtgtttataatactttcttttattttccataagttattggtgtatagatggtatgtggttacatgagtaagttctttattggttatttgtgagattttggtgcacccatcacccaaacagtatacactgcaccctatttgtagtcgtttatccattagacccttccactcctccccaaagtgcccaaagtccatggtatcattcttatgcatttgcgtccacatggtttagctcccacatatcagtgagaaaatacaatgtctggttttctactcctgagttacttcacttagaataacagtctccaatctcatccgggtcgctgcaaatgctgttaattcattcctttttatggctgcatagtattatttcatttatatatatatgtctgtctctctctctmtatatatctcatatatatatctct

SEQ ID NO: 909475 - DNA, 666 bp, Homo sapiens
catcatagtcatctaccaagtccttgaacatgtcrgatttcaattgtgaactacgttcacattagttttgataagagtttgtattcaggtttcccctcaaatatattttggcactgttttctttgcagatgacatgtgaatgcattctgaatgtataacttccttctacctgactgaaaagtatttggtgacaattttaactccttgaagacctgagttgctgtataaagtggatttgttaaattttgatctaccttttcttaagagggagaaagataagaaaattttccagtgataggaatttgtttagtccattagtgcccaggatttctttttgactgagggatttaataaattttagtagctggaagttgagcatattgttcaccgaaaataaccgccattgggacctatcctttgtgattttgaagtgctaataggcgaattattctgaaatattttctcctttttctttttaccaatatctaagggccagtagctttccgtaataaaataagaagccaaaaaactattgaaagacactttttaactttaattttaggtttcggggtattatgtgaaggtctgttacataggtaaactcacgtcacgggggtttgttgtacagattatttcatcactcaggtattaacccatttatgccta

SEQ ID NO: 909476 - DNA, 575 bp, Homo sapiens
caacaggactttaaaattactctcattaaacccttcaatggtcatacattgctaaattcaatgtttatttcttgcttcttttcttgacctattagcagcatttgaaaaacttaataactcccttgaaattctttctgtacttggcttctagaattctatgtacatctggtttcccccttacataactggttggttgttttcaatctcctttttttgacctttattcttctcttcagcctcatgttaactgtcagtttcctttgagcactgtccttgatcacctttctcagtctgcacactctcactgtacacatcccatatccgactgaagtctcttttataagttaacaactctgaaatgcatatccttatgttattctggaatgcagaagtatatttactaccttcttgacatctacccttgataatctaacaggcaaatcaaatttgacctgtctataattgaactcttcaccacaattctaccccaaattgacctttctrgaatctactttatctaaattaatggaaattctgtctccagtggttcaaactaaacactttaaagtcatcct

SEQ ID NO: 909477 - DNA, 593 bp, Homo sapiens
aacaaaaatattttaatatcacccaatacccagtccatattcttttttcctgattgcctcaawgatttttcccaatatttaatttattttaaaccaatttaaatatggctgcccattggtttcattgttctacttgtgaagaggcttttaagaaaccctaccttttattttttaaagaatccaggttatgtgtcctgtagaatgtgccacattctcaatttggctgattgcttccttgtggtgaagtttaacccaaccttctatcattggtgtttcctgtaagctagtattagagctaaaggtatgattcaactcggaggcaatgcgctccatcgttgaagcaagaacacttcatcagtgatgctatttcctattatgttgtatgaaatttttacattgttagttgctgagaatagagaaacagcatgaagtctagtttctggagaagtatgtcaaggtattatgagtgttatctgatgaagtgtttaatgacgtaaaataaatttctcaacccaagttggtttaaattcctgaaaaaatgatggatactctctcttctatcgcagtcaacattatcaatgcaaatgtgacaa

SEQ ID NO: 909478 - DNA, 607 bp, Homo sapiens
ttttcggaactatagatgaggtaaaaggcatatggtgatttgttgcctcaaacactggattgtgggatgagatttggcttctggttttctgagatctccacatccttttggctctgaggttctgatctatctgccatgtctaaaatgtactccaacaatcaggctggcatgtgacaacttttctcaaggtcatgtcttgcctaaaaaaaatcactttattgattcctctttgcttacacttctatgtgcaagcagaaaataaaatgatgcagagagaaaaacatttgtcacttttgattttgaattgtatgaaatgccttggaactttctgccatagataaatccataaattgggtttaaaaaatcctgacttggaacattttgcttccagatctttctctcatttgtctgtacagtcttccttttctctaacccactaaccttatagaccaatgtcagctgccctggcctccagttctgtaatgttcagatcaagatttctagatttcctctagtttcctggtcattmttcatcaatatctatagcatagctttaggcatctgtttaagtaatttttcatcctgactcacacaaagtattgtccct

SEQ ID NO: 909479 - DNA, 617 bp, Homo sapiens
atggaggtagagaatagaatgatagttttgaggctgggaagggtgtgtgtgtggagagggaagaatgaagagagtctagctgatgggcgtgaacatacagttagataaaatggaaaaagtttaacgtttgatagcagagtagggtgattatagctaacaacattgtgtattatgtatttcaaaatagctagaagagaggacttggaatggtcccaaaaggtagaaatgataaatgtcctatgtgatgggtggtgaatatccttaaataccctgagttgatcactgcatattctatgcatgtaacaaaatatcacatgtatcccataaatatgtacacatattatgtatcaataaaaatttaaaaaagaagttctgacattaagacagagtagggtaaggggagaacaatttttttttttttgagactcgctctgtcacccaggctggagtgcaggggctccatctcaactcactgccctccttggttcaagcgattctcctttctcagcctcccaggtagctgggattacaggaacctgccaccamgcccagctaatttttgtatttttttttttagtactgacggggtttcaccatgttggccgggctggtcccaa

SEQ ID NO: 909480 - DNA, 568 bp, Homo sapiens
taagaaacactggggatggtcatacttcaaatccccacttttagctccaaatatgcaagtaattgacttttcaatattgtgatttctaccagctatctatagaaagcacrtgtgactcaagggatggaaggaaggctcagtggtttttaggttgcgtaagttaaatgagcctgctgaagtgaacagcttctgtaaaccaccatttgaacagaattgggttgtcctcttccatctccattgggtttcagttctaccgctcactacttgcaatcactaggctttgctggggaaggtgtttacatggctttaaagatgacgaagtggaaaccgtaaggcttttataatcttaacagaaaatcttatccataatgaacaagacaggggatcagaatacacagtaaatgtagacccagaaatagaaagaggctttggggggttttaaatgccattttggtgatgatcacattgtaaagtcagcaagaagacaacttgaaggtgactgtgtgtgtgtgtgtggtgtgtgcgtgtgtgtgtgtgtctgagtgctgacaccactggggaaatttcc

SEQ ID NO: 909481 - DNA, 613 bp, Homo sapiens
ctcattcttcagttctttcctgagcaaagtcaagaaccctcctgggctgagccaagttttgggatttgcctgccatcaattgcaaagtggcaaaatgttcacaagttagaaatctgggtggagtgtcagttattttattttcagtattcagcatgttttgaaatatttcataattattttaataaaaagaaaaacaaaagcagtaacaaaaaaaaggacacaaagaatttttgtaagaaagggcctcttttgtcatgtcactttccatgcatggagtggcatctccttcctcagacctctaaaatgctgtgcagtgtcatggtgggttctcctccctttcctccattcctactccacagatgaccatgtccggccctgtgctttcacccatatcactctgtggaggcctccccagtgtctctctctaggcctgcacccttccctagctccagggcctgcatcacatttccacacagacaccaaaagcatatagaaaactcaattcatrtagcatgtggcaaactcaatccaaaatagaatgctgactttccttcaaaaaccatttctcccccagtattctcccattgcagtaactagcatcatctttagagta

SEQ ID NO: 909482 - DNA, 652 bp, Homo sapiens
actgccacattatattaattttgctaaytagaattatatttgtatgtagtttctatttaatgtatacatttagttgggttctacagatgtttaagaatagttacaaaaatgtataaaagaagcttataactaatttcatggtagtacaatttaagtcacataatttaagccatggttcaggaaaataaacacttttaaaaagggtttactgaattctcaaatttgaaaacctctattttgatgtcattgattaaattgccttctctttatgtagcattaggatttggtttgcttgatttgagaaggggttgcattccatgcatttgggtctctaccctgaagcccagcccaggagataggcaccagctgcagaacaggcctgagttaacaaagacagacatgagaagagtatggatgaaggccaaatcttgggagttgggaggaagccacagaagtaatgatcaaaactaggctgcagagttgaatttaggatttaggtcatatgaaaggcaatcagtgagagcagggctgtggcatcctgggcagctgtttggtactctagctggtcccacctttatgggtgtgagaagaatgccatgtcactggagtagcctggctaaaaaacaatggagatccgcagatagacacaatg

SEQ ID NO: 909483 - DNA, 660 bp, Homo sapiens
aaacatcaggcgagaatcacactacctatatctttcttcatatggttggaagaggcattgaagagactaggagagtcagtcttgaatcattggcactacccctttctaccccctggcagtggctgtgtggcaccaagagagaatctgtatacctcagggagacagagcgcagcaactggtggactttgcattgaactcagtgctgccttgtcatagcaaagagcaaagccatcttcgactcagccagcactcatccagggcccacagaaggagcatttggaccaggcctagccagaggagaattactcagccctgaggctgcaacttgagtttcttagaagcctcacctttgtggactgaaatgctctatggtcctaggtgaatctgaaaggcaaactaggacacaggaatggcatttcttaggcacgtcctgatgctgtgctggtcttagagccaatggactggggtggtgcatgacctagtgaaacaccagacatgactgctaagagagtgcttgcaccacccctccttcaacaccaggtagcacaactcacggcagtgaaagtgactccttccttctgcttgaggagaagagagagaaaagtaaggagkactttgtcttacattttgaataacagcccagccacagtaggatacaac

SEQ ID NO: 909484 - DNA, 281 bp, Homo sapiens
aacaacgtgggagtcaaagagacttaagtccaaggtggaaggcaaagatcaatagcactagtttttagatggcgttacgtttccattgcagttaattactgagagttagcagagcacggtaggaacacgtggcatgccatggttctactgtccaaattcagatcccagctctgctccttgctaagctgtgttacyttgggcaagtcacctaacctattcctgccttacttttttcatggtcatttggttctaaattaccatgtagtaagtacccaggaaat

SEQ ID NO: 909485 - DNA, 281 bp, Homo sapiens
aacaacgtgggagtcaaagagacttaagtccaaggtggaaggcaaagatcaatagcactagtttttagatggcgttacgtttccattgcagttaattactgagagttagcagagcacggtaggaacacgtggcatgccatggttctactgtccaaattcagatcccagctctgctccttgctaagctgtgttaccttgggcaagtcacytaacctattcctgccttacttttttcatggtcatttggttctaaattaccatgtagtaagtacccaggaaat

SEQ ID NO: 909486 - DNA, 653 bp, Homo sapiens
aaaaaatgaagaaattgattaatgtcaaaagcattcaaaatgactcttctaaattgtccatacaatgcaaaattacatctttagctcccaaactgaaacatcaagttttttcaagatattaatgcccacaaagaatgtcagtaaaatgacaactttgaaataatgtaaagaaaaaaatagatttttatttgttaaatccataatgtctaagttcttgttgaagggcatgtaattttgtagtgtatgaatgcaacaaaactatttcagacctgactaatttctacaaaagtagttaatgaaaatgcttgctttaatattagtagttaataaccttgatgttgtgtttttggtttgtgtttttttgagacagagtctccctctgtcacccaagctggagtgcagtggtgcaatcatagctcactgtaacctagaactccttggctcaaggtgatcctctgcctcagcctccctcttgagtagctgggagcaccaccacacccagctaatggaagtttttcattttaaatttcatttctgccccctaaataatggcatcattactagtacacatgtaattcacagcgtgatcacaagtactgtcrtcattgaattgcttggtagtcaacagttgtcatcgttggaagaatgtcaga

SEQ ID NO: 909487 - DNA, 587 bp, Homo sapiens
ctgtttgctttttaacaagtccaatttatttaataaagtgttatattgtgttggtgtttatgcacgtattctgcaattagtactttggagctaataattacatttctccaaataattgcaataatgccttatgtttatattaacaacttatatgtgtcagacattgtgctaaatacttttacaagcattatttcattcgagcttaatgatcatcttaagaaattcattaaaactattttatagttaaggaaacaaagcctaggttaagatcacgcagaaaatggtgaaggcagaacctgaactcaggtggcctgtctacaaagctaaagtcttattcaataggcttcccttgtaaaacattgaactaggcattatacaaaataataaaatagttaatgcttttaatgcctagcctatgccaatatccattttcatcatattattttcgattttaaatattcagaaattttcacattttctacatttttatctaggtggcaggaatgggattttcagcaatgagggaaatgatctrtatctgtgctgaccaatatagcagtcactagccacatgtgactgctgagcac

SEQ ID NO: 909488 - DNA, 630 bp, Homo sapiens
tatactttttttcccacttacaatgaatttacatgattgtggacttaaaaaaaagcatagcgataaaatgaattttgaaatgcattccttgtttgagtagatttcaggatgccagtagataaactagtaccttcaacacaataattcaccccaatgtgagaagatcctttgctttgaagggaaaactttcctcctgaaaaccagaagtgtactaagcagattgatggtctgttttattgttactgggtccagacccttgggtcggagcaagaattccagatcaatccaagctctaaaagctagttttcatctgagtacctaaaaagtagtcaacaatcatctccattttgcatttcctgtagtttatgagataagaaaattccctgaaggtcttagcagacctgactaaagatccaaagaaggtttgctccaactgattaaaggagaaacatattggtgaattcattgacatttttattttatgcatttagcatgcaatatcctctccaaatagataagatagaagctaccgtttttacaataygtaatgttaggcagcataattttttttctaatgcaagggaatgtgaaaaataactgtgccaagaatgaattatttgaatttaacac

SEQ ID NO: 909489 - DNA, 458 bp, Homo sapiens
aatcgtgggcaaaaggaaagataggaggaaggaaagcaagcccttgatgctaagatgttctcctccattatkgtggctttacataaccaccagtcagagaggcctagagtgcccctcttcttccctcatgaagtcctcataaggcgcctctcttgtgccttatttccagggggctctgctcatagctggcgatgacaaacgtcatttcctcctccccactgaagtgatctatgatttaaaattttaggcctcccaaagccacgtgactttcattagggcactcttgggatgcaaaaattcttttattattattattattattattattattattattattatactttaagttctagggtacatgtgcacaacgtgcaggtttattacatatgtatacatgcgccatgatggtgtgctgcacccattaactcgtcatttacattaggtatatctcctaa

SEQ ID NO: 909490 - DNA, 301 bp, Homo sapiens
gctataattatccaatagctcacacaattgatcattggtaccttcaaaataggaggggctcattaattgtgaatcgttgatcatgagttgtcctcacaaggcagggagtgttgagagtctaggctctgtaacttcatataagccgggcaacaaaatgtcaggaaatgtcggaaaatgtcaggtttgagtggcacyggaacaagtggctgaacataattcagtcaaagtgattatttagtatctgatagagaataaagccctggttatttcaataaattaaactgtctgttctttcaaattg

SEQ ID NO: 909491 - DNA, 595 bp, Homo sapiens
aaaaatggattgatcctttccatgtcccaaaatatgtattggggtgagcaagtaaaaccttttcttcaaatgcagggacttttcttaacttggggattgggttaacagagtcctccctgctgggaagtacttcccctcaatggataaaaaatagcttttaagaaagtctaatatgttaaagtcaaacttacaaaaaagctctcttaagggatttcagcatcctggcatgcttccacaaaccaaactactaccttctattaaacggaaatgcccctttaggggcaaggggtttggattcacttcttttatttctctccacagcacctggtgcattgctgtgtctggaagttgttaaccacctggctgactgtggatcccatgggtaaggggatggtaggggttggtaaggattggtaagagactcagttttctctcagttatcttccaaaactctgcattgctaaatactttaaatcttcctcactgcctgattgaggacatatacatgcactcttttgatttctatatgctaaatcatcaaaataaaacacagaagctacctatyatatttgatttaggtttatttcttccataa

SEQ ID NO: 909492 - DNA, 619 bp, Homo sapiens
agtctccctctgttgcccaggctggagtgcaatggcatgatctcggctcattgaaatctctgcctcccggatgaagcgattctcctgcctcagcctcccgagtagcaagattacaggcatgcaccaccacgcccagctaatttttgtatttttagtagagacaaggtttcaccgtgttggccaggctggtctcgaactcctaacctcaggtgatccacctgcctctgcctcccaaagtgctgggattgcaggcacaagccaccacatccggcctagtttttctttgctagaagggatgcatgttgtttgatgttagagtagctgcctgaccacaaagaggagtcacatgtgaggatagcagcacaataaaataggctcctgcaactgctatatattctttggaaaaactgcctgagctattgtttaacagaaaagtaaatgtttcttgtttaagctactgttattttggatttattggttatctacagctaaacytaagtttaccttttagattacctgcacctctttggattttgctgagagaaggtagaaagcagcgctaactcctctctctagaaactgtgtttaattcctcagtctttggaaatttatttgttct

SEQ ID NO: 909493 - DNA, 573 bp, Homo sapiens
taatccatcctgtgttaatttttgtatatggtgtaaggaagaggttcagtttcaatcttctrcatatggctagccagttatcccaacacaatttattgaatagggagttctttcctcattgcttgtttttgtcagctttcttgaagatcagagggttgtaagtgtatggccttatttctgggctctcttttctgtttcatttgtctatgggtttgtttttgcacgagtaccatgctggtttggttactgtagccctgtagtatagtttgaagttgggcaatataatgcctccagccttgttttggttttgcttaggatttccttgactatttgggctgttttttggttccctatgaattttaaaatagtttttttttctcattatgagaagaatgtaattggtagtttaagaagaagagcattaaatctataaattgctttgggaagtgtggccattttcatgacaccgattcttcctatacatgagcatggaatgcttttccttttgtttgtgtcatctgtactagataattgaggcagaaaattaacaaggatattcagaacctgtatcaa

SEQ ID NO: 909494 - DNA, 683 bp, Homo sapiens
ttttataaaggagagctcctctgcacatgctctcttccctgctgccatgtaagatgtgcctttgcttctccattgccttccaccatgattgtgaggcctccccagccatgtgtaactgtgagtccattaaacctctttcctttataaattaccagtctcaggtgtgtccttattagcagtgtgagaacagactaatacactatgcaagcttctcttttaaccagccactcttaacatgtgtctcctaggcaattagcatatagtagctgatggaggccatctgcacatctggtcaccaaaggagatctcatttgtacatggtttgtgttccccatctagatattccagtaattttcatttactcacgtttccatctattcaacaaaaaaacccaaaagtgatcacatcttatgcctgcttgtaatatcaaggtagtacaagaaatcagtcacctgaaataactgttagcatggagcttatgcccccaattacaactaaagagattaggattaaagacacaagtgttattctgtccttctatacctcccagctttgtttatggccttccctctacctaggctttcttttctctctctgaaataagaaagtcataaaaaaaataaaaaasaatgaaaaggaacaagcaaaacctttgagaaatatgagattatataaaaaagcca

SEQ ID NO: 909495 - DNA, 618 bp, Homo sapiens
tctaagcaataagagtttacaatctctcttastcacccatgccaggtcattgccaaagttcacctttaatgctctctcgcactactgatgggactacaggtcaatgaaacctctctgaaaagcaatttagaaaaaacctaacccctttgaccctataaatccacttttataagctgtatcctaagaaaatataaaaaacacaaacaatactgaataaaaatgtaaattttcatatacgttttaataaaaatagaactacagtaaatataagatgttggttcatagattatataaaacaaaatgatagaatattatgtagtcatacacatacatacaacaatgttagcatgatgcattttgtgtctccgttttggctgaggccctaaaaaagcagagaataatacatcagggaccaagtattcctacctatcaaaggtgctaggcagcccaggaagggggcagttaacattcctagaggaaaccttcaactagtagaggatggaaatccattacatgtcccagcctcccagcatcgggagagataattccaaggtgcattccacagtttcttagagggtctccagcaggattgaacccccgttgctgatgacaatactc

SEQ ID NO: 909496 - DNA, 560 bp, Homo sapiens
aaagaaaaaaaatgtgagaaaggaccttatgtttgggggttggtgygaaattgtaggtggaactgaatggggatgacctcattgaaatgttttgagaaaagactcaaaggaagtgtaggaaacagccatctggacaccttcgggaagagcaaatgcagaccccagaagcagcagcaactcgggcaggttggaggaacaggaaagaggccagagaggctggaagagcagagctggggaggggtagtaggagaggaggatacagagagggctctgccaggcccagtggagacgtgggtctgaactctgtttaaatgggtggccactggagagtgctgagaagggtgccacctgctctgatgtttttacaggatcgtgccaacgctgtgtggagactgggctgtggggtgcaagggaaaacccacaggccagctaaaaacccagtgcaggaatccaggtaagagacaatggcggcagattggtagcagtagtaggaatggttaaaaatgaccaaattccagatatattctcaagtcaaacccaatgatactatccaacacact

SEQ ID NO: 909497 - DNA, 675 bp, Homo sapiens
tctgaggatggggtttggaaagagggatggatagcaaagaggcagaaagaaacttctgggagtgatagaaaaatactgcagcttgatgggcagtggtggtttcatagggtggatgcatmggcaaaacttttttaattccatgctttaagtggatgcaatttatggaacatagattatacctcaagaaatatactttttagattccctaatgatatggtttgactttgtgtccccacctaaatctcatcttgaattgtaatcacataatccccatatgtcatgggagggacccagtgggaggtaattgaatcatgggggtggtttcccacatgctattctcatgatactgagtgagttctcatgagatctgatggttttacaaggggcttcccccttcgctcagcactcattctctctcctgctgccctgtgaagaggtgccttccaccatgattgtaagtttcctgaggcctccccagccatgcagaattgtgagtcaattaagcctcttttctttataaattacccagtctcaggtgattcttcatggcagtatgagaacagactaatacacttaacaaataatctctgaacattccctcaaaggctttgtaatatagaacaacaaatcaccacatattatttctgtgctatataataaagttctggacaaagg

SEQ ID NO: 909498 - DNA, 613 bp, Homo sapiens
agaaggagcatgctttcaaaaagagttttcccagcctggacagtcacatatctaaccaagatgattaaacccacattcagtactttccccaaaggtctgtaaatgtcggtataagttccataaactgaaatacattgctgtaaggttaagagaatagcattgttaacgatgccccttagtgcacttacaatttccttctaagagttattggctgagggacattcccaagccatatggacatatattccctagtcattacggaaattccaatgtgagcactggtattctcaaatcttactgtgggctgcatgaggggcatagaatgtcctcagtttgcctttttttaaaaaaaaaatcatcttcaaagaggaccaatgtggcatacaaaatgaacttcttttaatgccaaaatttcttgggaatggttctgtactacgtttacatttattttccatttaggctggattattaggtcttttaagttgccgtcattcaagacatttttataactttgtgccaggtggctgctcctggaaaactcttggtcccactttacaccttaatatgcaaattccaatcatcaagatcytcaagcagtaagaagaatcagctc

SEQ ID NO: 909499 - DNA, 548 bp, Homo sapiens
attcttatgagaaagtgaaagacttgcccaaagccaaaaactatccagcaagaacttatatccatagctttctttcttttttttaacttttaatttcaggcgcacacaygtgggtttgttgtatagataaattgcgtgttaccagggttttgtgtacacattattttgtcatgcaggtaatacacatagtacccaacagatgacagtttttcaatcctctccttcctcccatcctccatcctgtagtaggccctggtgtctactgttcccttttttgtgcccatgtgtactcactatttagctcccacttataaatgagaacatgcggtatttggttttctattccgagattagtttacttgggataatggcctccagctccatccatgtggctacaaaggatattatctcattcttttcttatggctgtgtaatagtccgtggtgtatatgtactacattttctttatccagtctaccattgttgagcatttaggtagattccatgtctttgctactggggatagtgctggaatgaacatacgtatg

SEQ ID NO: 909500 - DNA, 613 bp, Homo sapiens
  misc_feature 107, 122: n = A,T,C or G
tcaggccgaccgcctggaaaaccaactgagccagtgtgaagctstgtaattccagtcaaggcattttgcatctctgagctagagtcccttcatgcagaatgtggcanaattaacatccacangataaggtaaggtttccatgccaagttaggtatttaacaatagtgaccattaatacaacagcctcacgtaaaacacttcattaaacacagtcttaaggaatctataaattcgaaagcaagatcctttctgtgttgtctttgatagaagttgaaacacttaagagaacattggacagccacacccacagttaaattactaaaaccaatgccgctaatttttctagggtactgggtgacatcttaactgcttccttcactcaagatggctccattctctgctggaaccactgtcaatcttctatatataataaaattttactgccttaaagtcttaaagtttttttaaggcagctgctttccttgacatgtctttttaacaaatgattatgatcagagcccatgtaattctgtcactgttttcaaagaagaaagtttaatctaataacttcctattaaatttttagttcttgcaggagcacgtttgaaggata

SEQ ID NO: 909501 - DNA, 601 bp, Homo sapiens
aaaatcagtgagaacagtatgtctggatcctaccagacatttctaaacaatatcattattcagaaaaaaatcatatgcaagaaagtatttctggataaaagaacacattaaaaatgaacaagacaatttggaaaaaattagattgaattaaacatgtaaatgtgatactttgttatactgtccttacacatgcagaatcacctagaccaggctaagaaagtgattgtttgcaataatgatgattacagatactactaattcctgtaaataaccctttatgtgtccagcagtctaatccactgtacccaaaaagatgtagcagtatcatagaactattcaaatttacagctttgcattttctctacagaagttataaaatgactaaagcaaaatgaatcttcaacatttcgatggaataaatggcaacatataaaacgtaatcatctgctcaactacctattttaaggtagtttaacacattaactaaagattcacctgtgtttctcatgttaygtggaatgcagaataaaggaagaagtaaagatactgtgaactacggcctcctgcaggacctcccagtggcttctttctacatgttagc

SEQ ID NO: 909502 - DNA, 635 bp, Homo sapiens
accctgaacactttactatattcagcccaagagaatactacccactgatgaactaatagaagaagyagaaaaccaaattaacagaaaaatgctttagggagctgggacagagtagtatcataatgtgctatcaatataacttcaagccattttaccaaaaattgaaaaaaaaaaaacactggagacattgtaatacccaaaattctatacagcactacagtgtgaaccagccagtaacatttaatctaaattcttcaatagctctgccctggacctgtgtgctgttctttaactaaatagcaaaataggtggctcaagtggtaagatgcacgacccatctgtgtttgagtcagggagagcagttcccagctggatggctctagaagtgtgagaatggcagagagcatgatctactcacagatgctatactaacagccaaagaggggcctgttgtttagagaaagaagctatttttaaagtttaacacaactggaaaattttgactctgcaagatcaggaagtcatatttcattttgatgagaccctagcagaattctctgtgcacactcagaattatgttttagaaactagaaatatccacaagggaagctatcaaattataaatatcttataaa

SEQ ID NO: 909503 - DNA, 622 bp, Homo sapiens
aacaccacatggagctgtaataatgtgactccctgtttacattagttctagcacttggagtaaactctccttgagttaggtgctaaccaatttcaaccagggtaggcatataaactaatgaaggattgtattaaatgcagagtgtagataatgctgagaataggcagataaaaggctgtagactatcattttgaatctgcagccaggtgtcaattctctgggtttaatcccatcgattgctatctgtgtgaccttgagtgagtcctcaaattcagtgaaatggagataatcactgtgcatttctcataagactatagtaaggctttaatataataatatacataaaggttttctctacctcctcttccactgcttttttttcctttctctttactttttaaaataaatatctattgccatttttttccttcctttatcaaaaagctactagaaaagaccaagtgaaataagtggcccagggttgtcagacttcattgatggttggggctagtgtacaaagggggtggcaactagttggtgtcaggaaattggctacatttcggggttgkagatgagagccggcttcctcagtgtcagagaagggaaggggaagctagaatga

SEQ ID NO: 909504 - DNA, 585 bp, Homo sapiens
taatattgaagacaagaggagttcaataatgttcaagattattatcatcactttacgtctctttattgaaagataccctatgcataattgmtgtttatttataacagctttgttttttgaacggctctgaagtaaggataagatcatctgtaaatccaacgttctaggcaggccaggtgcagtggctcactcctgtaatcctagcagtttgggaggctaagacatgaggattacttgagcctagaagtttgagaagagcctaatcaacaaagtgaagtctcttctataaagaaaaaaaaaaaaggaaaacaaaatgtgcaccaagagttctagctactcaggaggctgtggtgggaggattgcttgagcctgggagttcaaggttgcagtgagctatgattgggccactgcactgcaacctgggcagcagaatgagaccttgtctcaaaattaattaattaaaggaggtggggggttccaggaaaaataagtaaacatgtaaacaaacaaactctgaagcttggcagcaaatttcatcaatattacttattgtgattctgcagaaagaatggagaatatattgac

SEQ ID NO: 909505 - DNA, 676 bp, Homo sapiens
taatcctctcacttcaaacataatacaacatttgaactcatgtgtttttgtttgtttgtttgtttgtttttaacaagccacctttattttttaggagacaattctccatggttctcttgcattttacatgactttcaaatgagacaaggactacccctttttttttccttagatttttttcaagttcgttttcatagcaaacaactgaaaacaactcagggtctagacctgtaacaaactgcactgtgtgcaagtgccatctggccctcttcatgttaactggggctaggagaatcacacaaaaattctgatgctgtgactcctgctgtactaagaaataaactgccctttgtctctgacccaggaatcctgcatctgttgccagtattcatgaaactgtggccaactaatttgtcagtctgaaagtagagcaacctctcatacccttcggagttcttggcacttcttctcacttctgtaaattaatccagtcttaaaagcctaaaacaaaagtcatctgtaatagtatgttgaagtggaattatttctgtttcaatactcaacacaatgtcaatagaatagatattaagaataaaaaaaaccataagacacayataaattgcattactagaagggaagtaaaagaaactctactactcttgaacccccagccaaa

SEQ ID NO: 909506 - DNA, 564 bp, Homo sapiens
cagattcaccaaggttgaaatgaagggaaaaatgttaaggggcagccagagagaaaggtcggattacccacaaagggaagcccatcagactaacagtggatctctctgcagaaactctacaaaacagaagagagtgggagccaatattcaacattctcaaagaaaagaattttcaacccagaatttcatatccagccaaactaagcttcataagcaaaagagaaataaaatcctatacagacaagcaaatgctgagagattttgtcaccaccaggcctgccttacaagagctcctgaaagaagcactaaacatggaaaggaatgaccagtaccagccatggcaaaaacatgccaaattgtaaagaccattgacactatgaagaaattgcatcaactaacaggcaaaataacaaggtagcatcagaaagacaggatcaaattcacacataaaaatatttacrtttaatgtaaacgggttaaatgccccaattaaaagacacagactggcaaattgtatagagtcaagacccatcagtgtgctgtattcaggagacccatctcacg

SEQ ID NO: 909507 - DNA, 645 bp, Homo sapiens
atagctcttattattttgagttacgtcccatcaatacctaatttattgagagtttttagcatgaagggctgttgaattttgtcaaaggccttttcttcatctattgagataattatgtggtttttgtctttggttctgtttatatgatggattacgtttactgatttgcatatgttgaaccagccttgcatcccagggatgaagcccatttgatcataatggataagctttttgacgtgctccctgattcagtttgccagtattttattgaggatttttgcatcaatgttcatcagggatattggtctaaaattctctttttttgctgtggctctgccaggctttggtatcaggatgatgctggcctcataaaatgagttagggaggatcccctctttttctatggattggaatagtttcagaaagaatggtaccagctcctccttgtacctctggtagaattcggctgtgaatccatctggtcctggactttttttggttggtaggctcttaattattgcctaaatttcagagcctgttagtggtmtattcagggattcagcttcttcctggtttagtcttgggagggtgtatgtgtccaggaatttgtccatttcttccagattttctagtttatttgtatag

SEQ ID NO: 909508 - DNA, 684 bp, Homo sapiens
gaaaatccacacataattctctaaatagcactcttgggaacactgtcaagttccacatctactgtttttctttgttagttgtaaggtaaaataaaataaaactttactgctttgaaagaatttaccattcttaactttattgtgtcacaattttttttttttttttttttgagacggggtctcactctgttgcccagactggagtgcagtggcacgatctcggctcactgtaacctctgcctcccagtttcaagtgattcttctgcctcagcctcccgagtagctgggactacaagtgcacaccaccacgcctggctaattatttgtatttttagtagagacagggtttcactgtgttagccaggatggtctcaatctcctgacctcgtgatccacccactttggacttgtgtcacaatttttaattactataaaaacaatacttccagacctcctcatgggcattctgctgaataataagatagccaaacaagatgtttcaggagaaaagcaaaggaagaatcaaaacaaaagagatacaggtagttcactgtgyaaatcatcaacgtcaggatgagcaaaaattgccagtaaaatttctcaactctgaagtgttggctaaagtagaatacattttgtgtattttattgccaggcaaaactggcagagtgccacttaaccatc

SEQ ID NO: 909509 - DNA, 238 bp, Homo sapiens
ttaattaatgagggaatcagtaagatctcatgatggtgcaaagagcatgaccgaaactaacatatacagacaatttaacaaagycatgttaagatatatttttctgaaacagtttgatgtctacaaggtcatgtatctttacagttatctcttccactgtacagaaattacttgtatctctgttagttgaatatccagaagctagctaggaacttccaaatgtctaagaactttaatg

SEQ ID NO: 909510 - DNA, 570 bp, Homo sapiens
ttgctccgtctaggcctttttctagggtggattcagaaaagaagaggtcatagaagcagaaaaactacttcctttgtaggagagctcccccgcttcctaggcaccatgggcacccctaaggtgaagtggttttgctgaaggaaccaacttctctgtcatgggaaggttggtaggccagtattagctgcaaaacctatggcccagaaaccctgtatgtagaagcaggtgtgcaccccaagccctccctaggaatatgggtgtagctgtgtccctgtgcttgtgcctgtgagggcagactggcccccagatatcttgctgtttcatgcatcagaattctataccaggcattgggaaagaggcttacccagaaggctggatctctgcttccttggctttggtgcctgtctggctaaccctgggtcttcacctgcattttccttttgagctgctgatgcttcatggcaagctgcaagggtaagggagtgagaggaataawagctatttcactctttccaccctggtcggggagcaggtggtgcttttaccccctcaaggtctggcttgaggata

SEQ ID NO: 909511 - DNA, 571 bp, Homo sapiens
cttgtgcattcatcacatagttctcgtgccatggttttcagctccttcaggtcctttaaggacttctctgcattggttattctagttagccatttgtctaattttttttcaaggtttttaacttctttgccgtgggtttgaacttcctcctttagctcagagtagtttgatcgtctgaagccttcttctctcaactcgccaaagtcattctccgtccagctttgttctgttgctggtgaggagctgtgttcctttggaagaggagaggtgctctgatttttagtttccagtttttctgctctgttttttccccatctttggggtttaatctacctttggtctttgatgatggtgacatacagatggggttttggtgtggatgtcctttctgtttgttagttttccttctaacagtcaggactctcagctgcaggtctgttggagtttgctggaggtccactccagaccttgttagcctggatatcagcagcagaggctgcagaacagcggatattggtgaacagcaaatgctrctgcctgatcgttcctctggaagttttgtctcagagga

SEQ ID NO: 909512 - DNA, 587 bp, Homo sapiens
ccttatgcccctcagtcaaattatttcttctggggagcagggaattgagttgctgcagacccagatgattcaccaccaagtaactcagataacttctaccataacaggaggactggcaggcaacaaagtgaacattgaacacacactcctttcctctctgtcctaaaataagctgtaaatcaactaaccaatagcataaagttcttgcttttaactactggctggcttcagagattcccgtgaattttcttcagattcaaattgatgtttccttgcttcttgaaagaactctaaaattgagtgaaaagaatggtggtaactgaaaacggtgactgtattagcatgctatccctacgataacttgcttttcatttccttctgaaagaaaggagcagaacccattactgtatctctggattttttgccctatttttaatgagcatctacaagaaaccctaggaagcctgttattyctaagactaaccagcactaagagcaaagaaggggaaatttctggcatctgtccaggacagctgtgaaaagtttgttcctcctgacaccacatttacaaacacactgggtaaggt

SEQ ID NO: 909513 - DNA, 414 bp, Homo sapiens
tcactgagggtcttagaacatatctcccacagataaggagagattactgaatatgcgattgtgagtttactatgaaatgcagcttaatctccagagccctgcacttttataggtcacttccaaggacctgggaggacctagagatgtgttcacatggtcataagcttaataaaatttgaaaggtaagacaacattcatatttttttttctcaaacagtttttcccaaatggtataatttttagagggaataaaatctagatttattcctggaaatgccaatgctttttgtctgcactctacataaaagtctcaagtttagatttattttagtttcacaaggccragtttgaattgttttgttcttgtaataacgggtatagtttctgtgtatttctcagacactaagatctatg

SEQ ID NO: 909514 - DNA, 566 bp, Homo sapiens
gctcaccatcggcccaaagtaccatcgagaatatgctgccatacattaaggaaggagtgagggatactgtttgaagtctggtattttatcttataacatataagatcttagcattaactcttgtaccaagtggcccttgtccaacatgtgtgtttatattggcgtctctttagaattttttttgtaaacactgccaactcatcataactttgcttttagcatcttctaaaagaggtaagcaacataataacattgcttatgatacatataaaaacactttcttgtaagtgctaagagtcctagatttacaaaaaatcttgtaaacttaagaacatggactatatacaaaatataaagtaagagttgtactagacattcaaatacttatagtattttccctatcttgtaaaaagatacactttttagtgttgttagaatgccttaagaatcatggcctcttgggtttaaatttatgtaaaaaactacacaatttccattttctgktttattttgtcctgggtgtgtcattggaaaggatagcttagaacttaatgacaatgggaatc

SEQ ID NO: 909515 - DNA, 599 bp, Homo sapiens
tgcggaactcacatatgaattcttyacataaatggaagtgttcctaaagtactctaagaggataaacataaacagcttctttatttgctttgaaaagaaccatctaatgggtacctagattggacccaactgaatcaatttctgtaattccttatttatttatttattttttaatttttgtttttttgggtcagagtctcgctttgttgcccaggctggagtgcaatggcgcaatctcggctcactgcagcctccacctcccaggctcaagcgattctcctgcctcagcctgccaactagctgagattacaggcacgtgccaccacacctggctagtttttgtgtttttagtagagacagggtttcaccatgttggccaggtttgtctcgaactcctgacctcaggtgatctggctgcctcagcctggcaaagtgctgggattaccgatgtgaggcactgcacccagccaggattattcaaaactgctatgaaatctgaagtttttacttcatctaagatgaggacaatataatatgatgacaggaggggatttatctcctcttataccatgagttttagggttggctggtttttgaga

SEQ ID NO: 909516 - DNA, 667 bp, Homo sapiens
gacaatgtctttgtttgtttgttgtttgtttgcttttgtgtcttttgttttatctctgtcctctttctgcctcccttaaggataaatgttrccagtggagagagaatactttagaaataaattttgtattggaatatttgtggtaaatatgcttttttccttttcatttaatagaaagaattaacagggagataagaaggaagagagtaagggaaagagggaagagaaaagaataaaggtaaaagtgagaaataaatatgtaaggaaatcagatatatccctcagaagctggttgtacctgaggactttcttcattgtggaaagcagggatcaatagtgattaaaaaaaaaaaaacaaaccctggatttctattattttattcagagcatctttaatatctccttcaatattctttataactctggagttagcagagctggtaagggaaactagaaaattaaattggttttccagagtcaaatatattcattatctctggtacaattctctcttctccagactacaaagtttttacttttatggccattgttttaacaggcctatgtaccacttgacagtttgcaaatatttccctttctgatctgtatgactttactgtgcaagggttagaattattacttcagcttacaaatcacagaactagca

SEQ ID NO: 909517 - DNA, 641 bp, Homo sapiens
ttgctctctcagcagggagtcttgtagcctgggsgaggatctcagccctgtgcaccagaggcctgggtataaattgggcactgttggctgctgcggggagtatggcaggaatgagactggccttgctggtttcatgggagctgggtaaggcctgtcactgatggctttccaccacttacctggcaacctgtaggaagcagcagaggcagccataatctcccatggaacataactccattggcctgagacacaccccatatccctcaaagtggccactgcaagcccaaggagagtctaggctgagacctgcctaaccctgcccccacctgatggttttctctacccttcctggtaaccagagacaaaagatataaacttgtgggagctctatggcctcacctattacctgagacgactgaatatttaccctggccaacttagggcaagcctgtatcccccttctactaccgcagctgatgctctcttaaaagtgccacctcctggctggaagtcaaccaactcaagccattacagcaacttagaacaatcctactccaagaaaggagaaaacaccacctgtaacaccctggctaaccagaggtcctgagtctgtccacatgacagcttcactgctagcaaac

SEQ ID NO: 909518 - DNA, 641 bp, Homo sapiens
ttgctctctcagcagggagtcttgtagcctgggcsaggatctcagccctgtgcaccagaggcctgggtataaattgggcactgttggctgctgcggggagtatggcaggaatgagactggccttgctggtttcatgggagctgggtaaggcctgtcactgatggctttccaccacttacctggcaacctgtaggaagcagcagaggcagccataatctcccatggaacataactccattggcctgagacacaccccatatccctcaaagtggccactgcaagcccaaggagagtctaggctgagacctgcctaaccctgcccccacctgatggttttctctacccttcctggtaaccagagacaaaagatataaacttgtgggagctctatggcctcacctattacctgagacgactgaatatttaccctggccaacttagggcaagcctgtatcccccttctactaccgcagctgatgctctcttaaaagtgccacctcctggctggaagtcaaccaactcaagccattacagcaacttagaacaatcctactccaagaaaggagaaaacaccacctgtaacaccctggctaaccagaggtcctgagtctgtccacatgacagcttcactgctagcaaac

SEQ ID NO: 909519 - DNA, 570 bp, Homo sapiens
gttgtgttgcaggaactattattcactgaaatctatattctctttaactttgtggacacacagcttgactgcacactcggtctcccttgcagtagccatttaattgagcaatagataatacgctgggatgaaagtaaagcatttcgcttacaagctcgcttcataagaatctcctaagcatatttctttttgctttagtcaacttctgattggctggaatgtaaatgagtggagtgattttataagccacctattgtaactgtgatgtaagcaagaaataaactttttttgcaagcttgtccaaccaaccttatttttttgttgttctattttgttttgttttaggcttttagcagcctgaagccttggtttttagtttctgtctctagtggtaagcagaaaagaggcatgaggaagaggctttactggcccaaacagaaacagaaactaagaaccaatgactgtattcccacctctggacacccttagaaggcaytgtagatatctgggattatttgttagagaagctaattttacattaatatagtgaggctgtaaagtctgtggagg

SEQ ID NO: 909520 - DNA, 623 bp, Homo sapiens
cacttatttataaattttatktatgcactgaatgaatactcattaagaaattgctacatgcaaggaacaaaaataaatgaacattgtaaagactatcagacctatctgatcatattgatctatgagtgagttaattttcccaaagacagaaggttaactataagataaagtttcttaatctgaagaactaatgagatatatatcataaattgaaacatcttaacaatgtttatgagggactagaactcaattagttttaacagatgaaaacaggttagagaagtaactcatcttcagatttcacctcttcatgaaattggccctgtgaatctattttctcaagtagctcaaagtggcaatttctcatctaatgtgtcatatctgcatattaaaatattaatgttcacatttttatcttattcactttttatggcatttttcctcaagaatctactgatgaggggaggggaagtcttacagcctctattctagctattggctttactcagccttattacaatatggccagaaccattgatgagtttaagcagcttttctagacttgtaggaagacttgccaatagttggttgtccttcatagaatcccatgggatgtgagctat

SEQ ID NO: 909521 - DNA, 577 bp, Homo sapiens
ccaagatctgcagagtgagtgcacaagctgtggacccaagagagctgatggtatggttccattgtgagtctgaatacaggagaagaccaatgtcccaactcaaagacagagagagaacaaattttcctcactcaggatttttcttctattcaggccttcaacaaattaggtgaggcttacccacactgggagtgcaatctgccttactgagtctcctgattcaaatggtacccacatccagatacattctcacagacacacccaaaatgatatataactaaatatatgtctactgtgtggcccagtcaagtttacacataaaattatcacaaaagttaaggagttttctacatatcaaatagtcagaccccagcccacttctcctattcagttcacagaattttgtcacctctgttaaaccctccaggcagaaaacagagaaatyttcctctggtgaatctgcatagcttaagaagtgaagacctagaagtactgaaagtaggattccctcaattgaactgtcatgccagatgatcctacagagaatgtcagtgtccaaaagttcttcccacccaca

SEQ ID NO: 909522 - DNA, 660 bp, Homo sapiens
aaacaacctagtacactgttggtaagattgtaaattggcattgccattatggaaaataatattgaagttcctcaaattattaaaactagagctacatattatctaacagtcccttttctggacatatatatctaaaggaaataaaattagtatctcaaagagatatctgtctctggcctgggaggcagaggttgcagtgagccaagatcacaccactgcactccagcctaggtgacagagtgagactctgtctcaaaataaaacaaagcaaaaaatctcctccacaatattattccaaacccaaatgatttcataggtgaattgtgttctaccaaatattaaaataattgcttaaaaatcaacattatgttaacaaaagcatgatccataaaagaacaaatttgtaaactgtaattagtcaaaattaaaatggtttgctttcttaaagacactgttaagaaaatgaaaatgacaggtcatagactgagagaaaatattaataaattatataccccataaagcattttatccagaacatacgaagaactttcaaaatcaattatgagaaaataacccaactcaaaaacaatatataagactaacagatttaagcagacatttcatcagagaggatactcatrtggcaaataagcaactaaa

SEQ ID NO: 909523 - DNA, 494 bp, Homo sapiens
gacacatcctaaccatatcacccaccctcaatgtgggtgggcaccctccaatttgctgccagtttgactaaaacaaaggaggctgaagaagagggataagcaggttgctgagtcctctatttttctgtcttcccatggcttcctctcctcctgcccttggacatcatactctgggttcttaagctttagtactctggcacttgtaccagcagcctccggggggctcttgagcctctagcctcagactgagggctgcactgtcaacttccctggttttcaggctttgggacttggactgagccatgctgctggtttctctctttcccaatttgaagatggactatcctgggacatagccttgtaactgtgagtcaattctctctaataaaatctcatatatatatacacacatatctacacataaatacacatatatatatacatatatctacacatatatatayacacacacacatacatatatatacatacat

SEQ ID NO: 909524 - DNA, 660 bp, Homo sapiens
catgagaactcactcactatcacgagaacagtgtgaragaaactgcccccatggtccaattatctccacctggtctctcccttgacacatgggggttgtggagattacaattcaagatgagatttgggtagggacacaaagcctaaccatatcacttgtgtaaaagtttctttctttaaattccatttgttttcaatacacagaaaagtttctcagattattatttaaccagtgcaggctagattccaattaatgtaactaaactagagtttggatttcctatagacaaaaaaagtgccctttaggattatagaaggaagatttttataccttaattatcaaaaattttctaaaacaatcctttacagggtaacatttttagaaacagtgtagttgtacaatttacatgatttaaaattcaccagttttaagtgtaacaagtcaataattttaagtgaattctcacttagcataaaatattgaaagttcaatcatgttgcaacaggtatctgcacttcatttcattgccaaataatatattgtatggatatagcacattacttattccattcaatagttggttgacttttggattatttccatattttgactattaggaatactgctatgataaaaatttgcccaaaagtctttgtgtgg

SEQ ID NO: 909525 - DNA, 617 bp, Homo sapiens
ataatcacagctcactgatagaggacaaatataagttcatcaaaactttacaaggctggatataaatcctattgtttagaaatatacactagcattggttacctacattagtacaaatagtatataatgtatcataaataaattatgttccatctgggtagtgatgagagatttatgttatgtaatatatattctgtcactgacaacactgctatgagtatttaaatgtgatgtttagtgggtatatatttacaggtaactaatatggtctatcctctcaacccagacagtgtctcatatctttaattgtgtatgggccacttctgcttggaggtacggctctcgtacaaaacttcccaccttcaatgataaactcttgatctttatcccggaccaatattcccttcagttagtgtttcacctttttctgagtcacttgacctgaggtccacgaattcatctgtgattcactatttctcattttcctttgtttcatatttgtaccctcaacacccaaattcatgtaatcatgacccattcatggaacattgtgatgctcttytaattgatgataacacatggtgctgtaaaaataattctcctaaagtatgtttttt

SEQ ID NO: 909526 - DNA, 667 bp, Homo sapiens
accagtacctggaaaccaggctatgagatgtcagagaataaacatcacatctyactctcatatatatattaagtacctggaacacagcaatttaaaatgtttgacagaaaaaaaataatgaagccaagaaagaaattaagtgtggaccaggcttatatgtgaatgattacaatttaaaaaaatgaagattaatatatatgcttacagtttatgcttacccgtgcacagtgtgatttgcaaattagccttagtagctgaagacaacaggataaatttcagaatccactcaattgagagactgagcttccttgcatatcttctgctttagtcaaatgcagagtagaagtcttcagttggaaacagaaaagctagttggagaatcctggactgacatatcaaatcttaggactttcttgattcactctggtacatacttacctttattttctggatccacgtggctatccatcaatgtacatccatcaaaatctgccaaaaataactacatttgtagaaataattagaaaaagatttttcttgtatccaaaattatcctttagaaaaaaagaagattgccttacagagctcctcatgaaatagaaagttttatcaattggtttattttcaacaacactctagtgcttgagttagaccttacaggacactc

SEQ ID NO: 909527 - DNA, 544 bp, Homo sapiens
atatatattaagtacctggaacacagcaatttaaaatgtttgacagaaaaaaaataatgaagccaagaaagaaattaagtgtggaccaggcttatatgtgaatgattacaatttaaaaaaatgaagattaatatatatgcttacagtttatgcttacccgtgcacagtgtgatttgcaaattagccttagtagctgaagacaacaggataaatttcagaatccactcaattgagagactgagcttccttgcatatcttctgctttagtcaaatgcagagtagaagtcttcagttggaaacagaaaagctagttggagaatcctggactgacatatcaaatcttaggactttcttgattcactctggtacatacttacctttattttctggatccacgtggctatccatcaatgtacatccatcaaaatctgccaaaaataactacatttgtagaaataattagaaaaagatttttcttgtatccaaaattatcctttagaaaaaaagaagattgccttayagagctcctcatgaaatagaaagt

SEQ ID NO: 909528 - DNA, 599 bp, Homo sapiens
tttacatcaaaaacagtaaaattaaacaaagacagtcattactcatgatatagggatcaatttagcaagaatatataacaattctaagcctatatgcacctcacactggagcacctagatatattaagcatataatattagatgtcaaacatatgtactccaatataataagagtggtgtactttagcatcccattcacatgttagatagataatcaaggcaaaaaatcaaacaaggaacaaaggacttaaattggactttagatcaaatggactgaacaaatatttacaaaacattctacccaacaactgtatcatgtacattattctcttcatacatggaacattctccatgatagacaataggttaggttacaaacctaagtctcaatgaaatttcaataatcaaaattatgtgaaatatctttcagaccacaatggagtaaaactagatataaataccaagaggaacttcagaaactatacatakatatgaaaattaaacaacatactcctgaagaattgggtcaacaaagaaattaccacaaattttaaaaattgtgaaacaagtgtaaatggaaacataaactacaaaaacct

SEQ ID NO: 909529 - DNA, 621 bp, Homo sapiens
gaggtttctttgcttcattgttctkcagactagacaggaaacatagtgccagcatagtgccacatcacattttatcacatagatatgtacaattatttttccattatgaagaacaattatttttaattagaaagtaaaaagaaaaaaaattctagttgtcatctcctacttcaggcttttccagaatcatcatggatgctccaccttactagtagatttatgtacttaaaaatgaataaaacacatttgttccaaactcaacagtcaaaaatatttctatttctgccagtctaaacactgtagtcgggtgtttatctcataaaaagaaatggctattttataataagacatcaattatcatacttaaatgtgaggaatgaaaatctaaattcataatttggattcttatcacatgaattcacattgagctatgactttaacattaattttatcttatttaggtacatttttatatatcaacatatgtggatctgtatttattcacaaactatagaatttctggaaattctggttgactcaatcaggcacactataaaatatattaattaaaggacacttaaaatagtcattttaaaagtgtcctatagagtaaccatagta

SEQ ID NO: 909530 - DNA, 608 bp, Homo sapiens
gcactttgtatctctcaatccctaaagcctacttgaagagaggcttgcagacactgtgagggaaagacaccaggaaaagctggaggcattttccagacctgggactgaaatcaggatgccatttttaatctgggcacatacaaagtcagtcattctttgatgatccagtagcttggctgctcagatattttatttttagtctagagattggcatgcctgctgtggaacagagtaggggcttccatgtccaaaactgtgaaaagtgcctcaacaataggcactataattgtactctcctccatcacaatcccgaggtgagagaggagctactacagctgcagtcttggtgacctggaactgacctgcatgcgccattgctgaatgccccaccctgctcccttgagactatggtgtgatgaggtcctgtctgcttcacctccaggcagaaatggaggtttttggaaccctggtttacctggttcagcagcctgagctgtcccacactttctcaacacagattgtagtgcagcatattcctctccamtctgtgcccaggtagatctccaggcattcagagaacctgcttgcttggtccagcagaaagagtc

SEQ ID NO: 909531 - DNA, 622 bp, Homo sapiens
tcttattgttataaactatatgacttgataactgtaaaaggcactaaaartaaatcttacatagatttcatctatccccataattagcagtactttctccctccagtgaattcagttttgaggggaaattgttttcttaactttaatagacactaactagcaggtcagaccttgcgtgggttatcctcaatctttttttttttttttttttgagacagagtcttgctctgttgcccaggctggagtgcagtggcgtgatcttggctcactgcaagctccgcctcccgggttcatgccattctcctgcctcagcctcctgagtagctgggaccacacgcgcccgccaccacgcccggctaattttttgtgtttttagtagagatggggtttcaccgtgttagccaggatggtctcaatctcctgacctcgtgatccacccacctcggcctcccaaagtgctgggattacaggcgtgagccaccgtgcctggccggcttatcttgattctgtccctagctcttgtcactgcccagttgggtgactatagatatgtcacttcaccttgtgggcctttgttttcccataagtaaagtgagtagccagctgaattatttcatccaag

SEQ ID NO: 909532 - DNA, 646 bp, Homo sapiens
aggaaagaaccatagacgacctggatcctagtagagagagggagaatgtaaagcatatgcttggagaatagagagagggaaggaacggggaagggaaaraaaagcagagactgtctgtgggctgcctctatgggtttctgttctagtacacacatttcttcacaataaatctgttttttgttaaatatggtagagtgaaattctgaatctctgatccttgtcattaggtaagcctaattaggcttttctattaggccacaatctcctatatttcatctttgaatttggaaagcccagcattgcattgtacccactactaatcaggcattcactggcaaaattttgaatacaaatatcatctttctgttccaccttcctcataaatgagtcttctaatagtttatgaggagattatagggaaaaaaattcaatgtggttgatatcggatagattttttccttgagatagaaatacagtatgcccccttatctgccagggatttgttccgttactcccagtgaattactgaaatcatggatagtactgaatcctatagatactatggtttttcctgtacacacatacctatgataaagtttaacttataaattaggtatgaaaccacctttgcaaaattatgactaag

SEQ ID NO: 909533 - DNA, 606 bp, Homo sapiens
aagtttttgtttctccaacaggaaggaaagagtcattgacattttcgtaataaattcgttcaattaaattractaatattgtttacaatataatgtctatcccagtataatcatagggctcttactaaaccctacaagaaaacaatataaatttattatttatatgaatcatgaattttaacaagcaacatttcttttttttctacattcaagtaatcattttcctaattcagataaatgacaagccctcctatagattttaaatagaaaaggtcatggaatcatccttgacaagaaattttccaaactgctttcttaagatatttcatacatcttgtctttgagatcctagtctcagttcaaacaaatattttacttttaaaaatgatttcttagaaatttggggaattattaggagagagataccattgatgtagaaaaaactataagcaaatttatataatataaaacatgaatgttccattagactttaacattatgcacaaactggccttggctttaaaaaatatataaataatcggaagcagttgagtgaaaacagtcaaattgagcatgtagagcagctctaacccaaggggatattaa

SEQ ID NO: 909534 - DNA, 649 bp, Homo sapiens
gcaatcaggcaagagaaagaaataaaaggtattcaaataggaagagagggagtcaaattgwccctgtttgcagacaacatgattgtatatttagaaaacccccctgtctgagcccaaaaactccttacgctgataaacaatttcagtaaagtctcaggatacaaaaatcaatgtgcaaaaatcacaaacatccctatacaccagtaacagacaaacagagagccaaatcatgagagaattcccattcacaattgctacaaggaaaataaaatacctaggaatacaacttacaaggaacatgaaggacctcttcaaggagaactataaaccactgctcaaggaaataagagaggacacaaacaaatggataaactttccatattcatggataggaagaatcaatattgtagaaatggccatactgcccaaagtaatttatagatttaatgctattcccatcaagctaccattgactttattcacagcactagaaaaaaaaaactttaaatttcatatggaaccaaaaacgagtctgtatagccaagacaatcctaagctaaaggaacaaagctggaggcatcatgctacctgacttccaactatactacaagcctacagtaaccacaccaaaagagatatatagaccaat

SEQ ID NO: 909535 - DNA, 618 bp, Homo sapiens
attagcctcagtccctctttatttcatcacccatgtctatgaccacaatctggaatttactagtacctggaaatattttggttctgaaatgcttaaaccaagcacacaggtaatgacaaaacacactcaaatcttatctccttaaaataattgtgcctcaatcccatctcctctattggctattgcttcctctgacttcctgcataaccaagctcttaaaatagttctctacagtcactgaatacagttgttagtcttccatttaatctctcaggcccctggaaacttgattttacctaaattactctactacaattactctcaccaagataatttcttcttgttaaatacaatgaacatagtttgtgaactctcaacatcatgaaactgctaataaccctcttgccatcctctctttaacttggcattaatgattctcacatttctggtatcccatccttggacccatctctgttttgtcttttttgaggcacattcttcctctgacctttacttaagtgcttttctttctcaggctttattctgaactctctyatcttataactctatatacatgttttttgggaggatgatgtcatcaactccaatagctttaat

SEQ ID NO: 909536 - DNA, 556 bp, Homo sapiens
agatcaccagatgactactaatgactrcaacaaagtcaaaaggacaagtgtgtgcacaaaacctgcctccacacatacctagcctaaccctgaaataactcatcctgtgtaaatgaggtggctaagggcatgagctctggggccatatttccttggttcacatcctgagtccaccacttactggctgtgtgaacttggcaaatcatccagcttctctgggactcagtttgccatccatggaatgggaacaataacagtatctacttcatagagttatttagaggactagacacggttgatatatgtaaagtgcttagaacagtaccaggtatacagaaagccctacataaatgtttgctctttaatcgtatgaaaactgaatgttgcattctaagttagacagagctagacacttctaccatctgttaaaaaattgcctattaataagcttggacaacgtcatgagcatgccaattgtgatccctattaccgtatgtttgtttcaatttatagttctgttgttctctaaaaatttatttcactgtttccctggaga

SEQ ID NO: 909537 - DNA, 666 bp, Homo sapiens
tagaaacatgttgtaagagagtgggaaaaacttattttytactcaaagcagtataagcaaacaaataagaacagacattcatcatgagtccaaggaatccacattctagataggcattagaattagtgagcaaacaatgatggcacagtgtttatcctgtggtagagctatatatgggttgctagaggaataaagtaggcaagtacttaagtccgaaagagaggggtagtaatgagaagagtttcctatgggggagaaactttcattctgaaggacagggaagaggtagccaggagtgaaaaagagaacaggtatgtctcttggcagactgattaacatataaaacataaggtttcaacctataaaatattttagtataacttgaatatatgcatatttggcaattacaggggtcagaaatgtagacagcagcagggtcaaaagatgtgtatgtcctctcaagaggtttcagttgcatcctgcagatgatgaaagacaaaacatttgttaattattggtattatcagatttgtattttacaaagatctttctggaaacaaactgggaaattggtaggagagtggtagagatggggctggtaaaacagcttggtaaaatagagtaaaacaagctaaatatctatatatctatacatatttatatatg

SEQ ID NO: 909538 - DNA, 649 bp, Homo sapiens
cttgcaccctgcacctgaaaaagccacaggcactcaatgccagcccgagaaagaggctgggagagggtctgtaccctgcaaagccacagaggcagagctgcctaagaccttggaaacccacctcttgcatcagtgtgacctggatgtgagacatggagctaaaggagaatattttggaatttaaatgtttaattactgccctatgggatttcagacttggatgggtcgtgtggcccctttatttttgccagtttctcccatttggaatgggtgtatttacccaatgcatgtacccccattttgtctaggatatagctaacttgctttcaattttacaggctcacaggcaaaagggacttaccttgtctcagatgagactttggactcagacttttggattaatgctgaaacgagttaagactttgggggaccatttgaagggcatgattgtgttttgaaatgtgaggacatggctgggcatggtggctcacgcctgtaatcccagcactttgggaggctgaggtgggtggatcacgaggtcaggagaacaagaccatcctggctaacatggtgaaaccccatctctactaaaaatacaaaaaaaktagccaggcattgtggcaggcacctgtagtcccagctactcagg

SEQ ID NO: 909539 - DNA, 672 bp, Homo sapiens
tacccagctgtcttgtatttacaatgcataacatttttaaaaaattgggaatcaataggaacacactgctttgtaacctgccttttaaattttaaataatatcatggtatctggcaatatcattaaatattcttttaaaacatgattcttaacggatgcatggaatgctatatcatatggacaccctctaatttatgtaactattcccactcatatttggaatgattttgacttatgcaatttttgtgatacatattctcatgtataagactttgacaaatctttttttaaattgttattctagataacttcctagagttgaaactgggtaaatggctatgcacatttttcaggcatttggaagctgatgtcaaatttttcttcagaaaagtctgctgattagtatttcaccagcagtgtgtgagacttcctattctcccatatcctcgataacattaaatatcactctaaaaagaatctattggagtgataattattatagtatattgtagttttcattgaaattttgaaaattattgctaaagtttcccttacatttattcatgttttatgttttaacacrcaagagaaaatcaaaattcaattttctattgctcacatctttctacatgaaaatagatggggcacacagacttatctccactcctttcc

SEQ ID NO: 909540 - DNA, 636 bp, Homo sapiens
ggagccaatacacatgggaatcacccttgaccaaggtggttcaggagccaatgggtaaatgctccccttttgcctcctayggggacaattccaagagacagttgatggggccctagtcagaggctcaaatgatagttcccaagattccagtccctctttctgaactttttgccctgctttcccaggttttatttttatttggcagaaagccccacagtgttgagcaccaggtgcccttcatggtggccgactcagtgacacattcttgtgttgacctcttttccttccctttctcactctgctttgcttcttgccctgccctctgcatttacacttgctaataaattttacactcacaatgtttggaagtctctgcttttgagggacccaggcagctctatcgcaagagagaaattttaatatgatgatatgtgctgtgattctcctagaagaagtagtatgcaaaacttcccaaaagtgtctgactgggccactcctttttgttcttcccagaacctacagaactaaaataaactgcccctctattgattttgcttcttgattgtagggtgtctgattctctaactttttagcatctccaaccagttcacagcattgagggagcagacattgacc

SEQ ID NO: 909541 - DNA, 628 bp, Homo sapiens
acaacaatgtatggagcagggtgctgtgcaaattggttttctttttttcttttttgtacttttagcagagacggggtttccctgtgttagccaggatggtctccgtctcctgacctcgtgatccgcccgcctcggcctcccaaagtgctgggattacaggcgtgagccactgcacccagccgcaaattggttttcttatagaacttatataattttatctgcaatactaactctcgtatgcaactggaagctgtagaaaacaattatgctcaatcttaagagtaaacaaataatacatagtgtaggtatagctatggaggaaaaggaatgctttatacactgttggtgggaatccaaattagctcaaccattgtggaagacagtgtggcaattcctcaaagacctaaagactaaaataccatttgacccagcaatcccattattgggtatatgcccaaaggaatatacattattctgttaaaaagacacatgaatgcatgcatatgttcattgcagcactaaccacaatagcaaagacatggaatcaacttaaatsctcatcaatgatagactggataaagaaaatgtggtacatacataccatgcaatactatacagccacaaaaaa

SEQ ID NO: 909542 - DNA, 640 bp, Homo sapiens
tttatccacatttaaggtgttaacagttcaaaatctgagaattacaaggaatatgaagaacagaagayggcagagaaattgacctaacaattgtataatagggcactctctctctctatatatatatatctctatagatacatagatatatatatggatatatatatgtcagattatatatatatacatatatatacagatatataattgtcagattatatatatttccaaatacaacataataagatgcattgtcagataataataagatgtaattgtcagatatatatctataataatatataataatataacaataataagatgtaattgtcagatatatatatatatatccatatatatatatatatagagagagagagagagagagagagagagagataggtataaagatatggatagataaatatagaaatctaactccctatataaccaattctaagtaggtgagaaaaaaattgaatttacttttcaatgacttttaattatctgataatctgtgtgcttcatgttgacaaatccaaaacttgccctttgatcctcatgctacttgatactttacaaatattttataattttggcttactttgcttcttcaaatgtttctttttccttttga

SEQ ID NO: 909543 - DNA, 619 bp, Homo sapiens
aggatgcagggggaggtacactgtatctataaattcaacaagtggtgaaaaataatcatgatgttgcccatttcaaacataaaagaactaaagctcagagagatctagtttcttgcccaagstcacacagctgtcatgtggcacaacctgtctgcatcagaaggtaccttcctttccaatgatgatatgtcatgcctattatttatttttccatgtgttttattcagacatttacatgcaaccctgtctctgaattttcagtgaacactcttgtcagtcctttggggataaactaggagacagtagtttccatgtctcttacagtaagtgcatgacctacacatatatgggtttctctgtgcgcatgtgtgccaagcaataagcaggggttctcaacagaaggaaaatttggaaattcctggtgacttttcaattattgttatcactgaggtgcctatggtaatagcatctagtggtcagggacactgcacaaaaaaagggattaccaatccaaagtatcaagagggccaaagttgaaaacccttaaatatatacacacgcatatgcagatatacatatttaggtatatatgcactcatgtaattatgtatacacaaat

SEQ ID NO: 909544 - DNA, 505 bp, Homo sapiens
aaaacctggtcaaatccaacgtgcatttagaaaccataatttgaagaaactaatagctggagctcagtgccaccatccacaacagatgtccttccaaactccattcactgtcatgctataaaacagaattcagaaacaacagggtatacgtatatatctgtgcattcagtgactctgaaagggaggcactggtttcgaatgttttgtgtgaacacgagttccatttgacacttttttttttctctcagaagtcattttgtctcattccttgcttacttcattgtatttcagcatttgtcatctcaattacagtagtgcatactacttttacacttcaactgcaatattcagaaacaccagggaaagagcagtaaagatattaggaggtggtaattaagactgagaayggctccagaagggtggaaacacatttaggatgttttttattttaatcatctgtaaagaaactaattccataggcccatctacagttaagttccacttg

SEQ ID NO: 909545 - DNA, 626 bp, Homo sapiens
cagttcaagcttcccgaggttacctcttccagccacgcagtagttggtattatttctttcatttttttgataaaatgtcttcctctctccttctcagagtaaagcaagtctctgcacatgtttctcagctgggttgcagtaatctaggaaaaggtcactctttagaggagttgaaaggactccaggttcttatattagccctctgagcatataaaggcccaaagaaacagacaccaattcctctgctgcacagacttttaaacctggaaagctgtaaatgcagaaacttaagtatctgggaggtgcgtgcttagcagccatccgatgtgagtgtcagttcattttgacatgtaaccaagatggacctcagccaatagcagtctccactcacagaccgctggtgtggttaggagcatgtacttttaatcaaattttttttattggaatcccggtgctacatgctaggtgtgtgattttggacaggctccttaactgtgttagctttggttaatgaaactgtaaaatgagattaataataatwcttggttcttaaaatcatggataggattacatgagataatgcatgtaagtgcttagcaccattttgcatttctttagcttttatc

SEQ ID NO: 909546 - DNA, 557 bp, Homo sapiens
cggggcgtggcggctcacacctgtaatcccagtgcttagggaggctgaggcaggcagatcacttgatgtcaggagttcaagaccagtctggccaacatggtgaaacctcatttctactaaaaatacaaaaattagctgggtgtggtggtgctctcctgtaatcccagctactcgggaggctaaggcaggagaatggcttgaacccaggaggtggaggttgaagtgagatcatgccattgcactccagcctgggtgatagagtgagactctgtctcaggaaaaaaaaaaaaagaaaaagaaaaaaaagaaaacttacggaaataaacatgaacctttcagtagaatgttcctatccaccctgttttcacttctacaatctgtgtttacaaaatacgatacattttagaaaccaaaattccatgccttcytggtcattaataacattgacgtaaacttggtccaccatctgcagtctttggtgatgggcagaaagaaaacgaagtccctgagtctttgaaaagggcaaaagtgagtgcagggactgcagtgattatctg

SEQ ID NO: 909547 - DNA, 619 bp, Homo sapiens
accactggctgtctcactcctggatttatgtgactcccttagctatactttcccagccccctgggatgttccccactcatcctattcacycacaaagaaatattgtcaaaatcaattgggtgatgattaggagccattatctgcctgctgtgctgaaaaggatacagggctatctgcagaaacctttcatgacgggctaaaaaaatattccagtatatctaggagtggtgtcacttctaagtgggaaaatcaaagtcaatccatagtcttttcatactattggcttgttacgtttacaaggtgttatatttctaaagcaaacactatacgaaatatgaaaaattcatgcttgacttaaagggaagaaaaaagtaaagggaaccattttgatagtggaacagatatactcagattcaaggactgaataaatagatttgtaacattttcttgctttgccctctggagctctgccttctgtaatcttcccagtgtcagtcctccaggttctctgtcctcgcaactcggatttagaattacggataaaagatgcctaaaatccaatttcttgattgaggaaactgaggcctggaaagtgaattaagtctcccaaagttggcca

SEQ ID NO: 909548 - DNA, 601 bp, Homo sapiens
gttaccaggaaccgacccccagtgggacccaaatgaaagagaggatatgcaaaggctaaaccgatayagggaagctctcttgtaaaaggattaaactcaaaatcccatattcggttgattttatgttgatggtctacaggctttagctatgtagggggctctctggagaccaaagaaaatctagtctatagtgctcatgtttaaggtgatggagactcccaaagacagttgtctcaaggacttttgtcaagacaaatgtggaagccagactgacaaccgtcgttttctttgggctatgtaaatgtctgtggtttctagacagcttgtgaggctgaaaacgtgacacttcaaaaagatatttcagatacagtgggtgagctaagtaaatgttttgcaatgaaaggtttggctctcttttgtccggcttgagagtggctaatgtatatgccatctctgtttggacaactctggttatcgcctaatgtgtgtgagatgacagatgggtttctagaagagaggataatggattctttgatcgatttcatttgaaatgatcaatgtttgtccaaagatggagcacttctgggttagtgccaaggca

SEQ ID NO: 909549 - DNA, 528 bp, Homo sapiens
gcaaaggctaaaccgatatagggaagctctcttgtaaaaggattaaactcaaaatcccatattcggttgattttatgttgatggtctacaggctttagctatgtagggggctctctggagaccaaagaaaatctagtctatagtgctcatgtttaaggtgatggagactcccaaagacagttgtctcaaggacttttgtcaagacaaatgtggaagccagactgacaaccgtcgttttctttgggctatgtaaatgtctgtggtttctagacagcttgtgaggctgaaaacgtgacacttcaaaaagatatttcagatacagtgggtgagctaagtaaatgttttgcaatgaaaggtttggctctcttttgtccggcttgagagtggctaatgtatatgccatctctgtttggacaactctggttatcgcctaatgtgtgtgagatgacagatgggtttctagaagagaggataatggattytttgatcgatttcatttgaaatgatcaatgtttgtccaaagatgga

SEQ ID NO: 909550 - DNA, 586 bp, Homo sapiens
gtttagacttgggtcccatccccgcaatatctcattatatatatgcaaatattccaaaataaaaaaaaaatctgaaacccttctrgtcccaagcatttccaattagaaatactccacctgtacctctttaactgtgggcatattagaacagggcaccttgttcatctccacatcttctatccaacccttctcaaatggtattagtgagagaataaacccctataccccttataagagttagagaaagaggaaagaaacacgaaaagcggcttaacagttaaaaacaggtttattctccaagataaacagggcttctgtccaattttggtcaggaacattcccttttacagactaaggatatttaagggtttaggaagtggggagcttatcgtaggttcagaatgtttctatgtgagggaaagtttattacagcgttggaatgtcactggtcagaggggaggctgtcttggggttggcatatttctggttggaggagggtttatcttagggctggaatgtttctggttatgctgacattagccattaggctgatgttttggggctagatttaggctttttttttttt

SEQ ID NO: 909551 - DNA, 601 bp, Homo sapiens; identical to SEQ ID NO: 899245

SEQ ID NO: 909552 - DNA, 620 bp, Homo sapiens; identical to SEQ ID NO: 899246

SEQ ID NO: 909553 - DNA, 490 bp, Homo sapiens
attcaatgccacttttgccttaccagctaatcagtcagtagactaagggtggtgcatttttgatcttcccccttaaagaaggtcagtggctgaawatgagatccagagtgattacattagaaggattttcatgtgtactccatcagggagattaaatgtccaggtgcctcccacgtttccttttaggacttgttcttagtcttcatacttcaagggctcaagagcagcactgacacgcaacatattcattgtccatccccaattacgttctcaaaaggtaactgttacatattgtattagagttctccagctaaacagaaccagtaggatggagagaaagggggctcgagaggaggagggagatgggggagagagagaaggaagggaagggggaaagggaagctggtaaatctaaaatttgtagggcagcctggcaggctggagacccagagaagagttgatgttgcagctgaagtgggaaggaagatag

SEQ ID NO: 909554 - DNA, 565 bp, Homo sapiens
cagatatcatagtcagattgacctcacattatctccctaamgtgcaaatctgataatgtcactatgattctttgttgtcttataaacaacagttaaaatgattttatactgaatatacatttcctttatactctggtcctaacacaaccttaaagcatgaatattccttatactccagacagtccaggccattcaccattcctctaataatgctgcactccatctcatgttcctggttttgtggacattaatatttccattggggatttccaccaacccttgtttccatcagctaagctattgcttatacatctatggcagtagctctcaaaattagctagatattacgatcacctgggagatttttaaaaattatctatgcctgggatccatagagtttctgatttaattgatctggggaagggcaaagacactattttttgtttgttttgttgtgttttgagtttttaaattttggtttttgatttaaacctctcaaggtgattctaatgttcagccaggattgaggactactgctccagaacaatgactcatcctttcaccc

SEQ ID NO: 909555 - DNA, 608 bp, Homo sapiens
ttaaaagagaggtgtttttccaccagtattatggcaggttactcttctaaaaaatatttttcctttataaactatttagaaatataacaatctttcagatacacagttgagttcataggaaaataagagaaaaaatgcccagggggcaaaatcaaagaagagtcaggaaaccagagtggtcattttgaactgaacctgcatctgccccatgggtcattacaaatctcagaaatctagaaccttggcctctaaagttcactcagagtcaaaataaaaacaaaaactaaacaaaaaaaaagcactgcacctatgcaaggagaataaagcactgaggtccctggggctcttgaaagaccagagtcacagtgcaatggaggattgagaaacaaatctatttattgccttaaataagctgacaaggaaaaagtctgtgtaatctgcaacatgaaaaaaaaattatctgaattaaaacccatagtactactctkctgcaagcttgaagtttgcatttatattacctactaagtacataaaattagaaaaataaataaattatagtggttacaatttagtagcccccagagatgtggcagaagttaaaggaaatc

SEQ ID NO: 909556 - DNA, 622 bp, Homo sapiens
aaaagataaggactctctattttttataagatctcatcatgtctcaaataaattaataatttattaatatcatcaaatatccatttagttcagattttcccaattatctctaaataagcatatgtgttttctaaaccactagcttgtttgaatcaggatcctaatgatttttacattttatgtgttatgtcttttaagtactttttaatttgtaagtttcttctttccctcctttacatcctcctcgctgttgaagaaactgggcttgtagagctgtgcttctcaaatgttaatgtaactgtataacctaaggagatggttaaaatgcagattatgactcagtaggtctggattgaggccagaaagtctgcatttctaacaagctctcacgtaatgccaaagctgctagttcataggccgaactttgagaaacaagacgtagaatatttcacaatgtgtattttgcttattccatcttcttaatgtaatttgccatgttaactctgtactttgtgacaccctgtaaaacaataaacctagagtaatggttcttgacattggactcacaatagaatcctctggggtacttaaaaaatsatcatgtccaggtcaaactttagac

SEQ ID NO: 909557 - DNA, 570 bp, Homo sapiens
caaattctaggtgttccatgattggtcccagctttgctccccgccccacgcttacacccactgtgtccctttctttgcataaccagtgcaacaacccaacttcttcaatgtttattgagcaccaatggcagctgcttaggcagagccagaccctagctaggaggtgggggaaaaggtgatgattaagatgcagccttcacttttatcaagctctcagcttctaagtaaaacatggaagcagccacataactctactgtagtgtgtaaaaagtaattccagaaaactatagaaatccataggattggtatctaacacaacgtcagaagtaggtgaagcttgatttagagatggatctgaaggggaattcatgccattatataaaacgaaacctctccagagtcttctgccacaatctggaataagtatatacttttgctggaccccyatcgtacttcatagcacatcttttattatttatacttcattcatccattctcttagactattgactctttgagaacattgatcatttatctttgcacccaccacagcagtagcaggtcatgaag

SEQ ID NO: 909558 - DNA, 604 bp, Homo sapiens
atacgcaagtcccctgcccctgaaacatatctcaaatgtcctcacctcatacccctttcatttatcctacactgcccgacaccccaggttccctgagatttgaaagcactttccttttctatttctaccacaactgtaaaactagaaggcttcaaggagaccaagagagagaacaaaagagccagagttactgtctgcccccaaatcatttgaggagaaattcagacagtagcttggaaagatgaaaaggatccactggcttttggtgagacagaacaaaagaaatcaatttccaaggatagttacagtctcttctgagagcccccacattcttgatatctgctcacccttgatatctgactgagttcctcatcctcttccatcccccagagaatgcctcatcaccctggcctgccttcatcaagaatcttgttaggttggtttagccagaatcccatttacctctgatgtgtcatcttagtaattttccatccaccaacctctacattactctttgkctatacaatcccacttgcccatgttgtattcagagttgagcccaatcccactccccagctgcagtacccctatcatggtggtccta

SEQ ID NO: 909559 - DNA, 604 bp, Homo sapiens
atacgcaagtcccctgcccctgaaacatatctcaaatgtcctcacctcatacccctttcatttatcctacactgcccgacaccccaggttccctgagatttgaaagcactttccttttctatttctaccacaactgtaaaactagaaggcttcaaggagaccaagagagagaacaaaagagccagagttactgtctgcccccaaatcatttgaggagaaattcagacagtagcttggaaagatgaaaaggatccactggcttttggtgagacagaacaaaagaaatcaatttccaaggatagttacagtctcttctgagagcccccacattcttgatatctgctcacccttgatatctgactgagttcctcatcctcttccatcccccagagaatgcctcatcaccctggcctgccttcatcaagaatcttgttaggttggtttagccagaatcccatttacctctgatgtgtcatcttagtaattttccatccaccaacctctacattactctttgtctatacaatcccacttgcmcatgttgtattcagagttgagcccaatcccactccccagctgcagtacccctatcatggtggtccta

SEQ ID NO: 909560 - DNA, 533 bp, Homo sapiens
aacttttcatcttttctttttaagctaacctcctccatttgcrtgttaattgaaatcactgatatttcacagtactaggtgtttggaaaaacatctgattgcagtttctggttgctattagttatcattaagtatttacttaacaggatatttaaccttatacttctttaaagaaacagcagtattttttcagattctgaacattttaaataggcatttagttcaggtgtaacagtgtggccagaacacagctgtctcttggctgttttctcacatcactggctatcccttcttcgtctctgccgattcttcagcccctccccatccgccatgttgggatgtcctaaagccctgtccttccacctcttctcacccagtgccagggctgtaaaaaaccatccaaacactgacctctaagtccatactgccagcccaggccataattccagactcatattcagctgcctcttcatcttttcttcagtgtttaataggtatttaaaactaaacatgataaaatcaaactctggact

SEQ ID NO: 909561 - DNA, 588 bp, Homo sapiens
tctagagatatgaaggaagtgtttttttgatgtgtcctcattgcagtagcttaattcaagagacaggaatttagccacataagcattctttatcagttaaggtatcattgaaaaaggtatcattgaaaaagagttcattggcctctggttccctgcagtagagtctgttgaagtcaaaaggcccagtccccacctggagagagattgcggggccctgacgccagggagggaacttgcctgctggtgttccatgggtttggtaagcagagaattattctgccttgtctccctccaggttgcaaggctggtctgacttttatttccttcatccctgtcttctccatcaaatattcacccacccatctgtttgtgctgctgccttcttagtttctaacttttgctgccattcttcttttgttcctttgataccttttgcttctctactgcattctcacctttaagaaaaaaaagcctagcttttatagataacatcagtcwccgttaatattcctgtcgtgtgtcctgcactaaccagtcaggataccattgagtaaaactgttggctcctccaaggtggtgtgttttagc

SEQ ID NO: 909562 - DNA, 647 bp, Homo sapiens
aatactgatatgtgtgtgtgtgtgtgtgtgtgtktgtgtgtgtataaaatatggcaactaggagattcatgtgtgtcttatacacaacccaattgtaagtttctaactgaattggtaaacattttattttatgtctcttaatgtgttttcattatatcttgtgcatttaactgtcattgcaattatcagccacattgtgttataatcatccactgtatatccatcttctctactcaattatgcatgttgggcaaatagtacagagactgacacagcggcatgcattgggtgagtatttggccaataaacaaatataccagtgaacaaagctctctgatacccatagcacctaatcccatggacaacaactattttcaatttattgtcagtcttcaaagcatgaacctgtttgttcaaggtacagttattcctttgaaataagaaatgtgtgcttggatctgagcaacttttaaagagaaaatcagtccaagtaatgagttaaagatcaatattaccaaggttaatttttttattttaaatctactcttatcctgaggatatagtctcaagctggatgaaatgaaaacaccagaacactgagttcacatcagctaatatctagtacgtgccttcgctatgacacttgc

SEQ ID NO: 909563 - DNA, 647 bp, Homo sapiens
aatactgatatgtgtgtgtgtgtgtgtgtgtgtgtgtgtgtgtataaaatatggcaactaggagattcatgtgtgtcttatacacaacccaattgtaagtttctaamtgaattggtaaacattttattttatgtctcttaatgtgttttcattatatcttgtgcatttaactgtcattgcaattatcagccacattgtgttataatcatccactgtatatccatcttctctactcaattatgcatgttgggcaaatagtacagagactgacacagcggcatgcattgggtgagtatttggccaataaacaaatataccagtgaacaaagctctctgatacccatagcacctaatcccatggacaacaactattttcaatttattgtcagtcttcaaagcatgaacctgtttgttcaaggtacagttattcctttgaaataagaaatgtgtgcttggatctgagcaacttttaaagagaaaatcagtccaagtaatgagttaaagatcaatattaccaaggttaatttttttattttaaatctactcttatcctgaggatatagtctcaagctggatgaaatgaaaacaccagaacactgagttcacatcagctaatatctagtacgtgccttcgctatgacacttgc

SEQ ID NO: 909564 - DNA, 674 bp, Homo sapiens
ccaaagtttactggggcacacatcaaattcattcaagtttttaggaaaaaagagaacmatacaaaataaagaaaaataaagcactcagcctagtccccaagggctaacgtcctttagaataaaaaacctaggtacccaagataacaatgtgtcgtcccctttgcacccactgcattccctacctaactccctgtatcccacacaatgggacacagaaatgcttcatgttttctgatgtgaggcccatttaacttttttagcatactagatgaagcaaagaataagataacttttccacttagaaagttgagaaacaaaaattccaatgccaaattccatgtgacctgagctatatccctaacttccatgcatgttaccttccaggtaattcatagatccgtgctttttaaatcaaagggcccacacactaccaacactggtgctaagaaaagcctttgacagaaagataactgcttcactttacctcttaaattgccctgcaaaaaatatatatatatacaaacaaaaagctgacataattcaatctctccttggggaaatttaacatttgctaagacaaggataaaaatatttgcttcatttttctatcaatttacctagattaagcatttaaccacgccattgattacagctgtatcactcaaaatgggacc

SEQ ID NO: 909565 - DNA, 589 bp, Homo sapiens
ggagcaggaagaagcgccttgagacttccattagtgaagtcacttraggcttttggcaatcacaagactagcaacagggattttggacgtgaaataattcattactttttttcacatgaaaaatgctgcattaggaatttagttgtacttcatgtgattcaagctgtgtaactttctcgtagcaaagaaatatgaattggacttataaattgctgagtactttctccaatccaaaaatccagacaattctgacatgcatagatggacaaagttgattaatgaccaaatagagtgaagggaaacactttgagtattagaaacagaaatgggaaaaagaaacaaaatatagagaaagttttgtgatctgaggaaatacagcagaaacctgctcagatttctttttcctgctgaaatatagttattctctcaacaaatactaagggagcagatcagaataaacaatgtatctttgaacttactagtaaactttgatactggttaagagcactgacaagtgtgtctgtaatttgacaattcattgttttgtttgttctcatccacgtattggtgtcactgtctgtgtccctta

SEQ ID NO: 909566 - DNA, 600 bp, Homo sapiens
ggtggaacgaaagcaaaaatccagaatttgaaggaggggtaacattaccctggaaggtatggggacgaaaggagtattcaygatcttttgtcttttagaacagtccctggagtcttcctccagaatgcaaacaacctggtgctgctgtttatcttttcaatgatgtctgaaaacaagggaaccaatgtgagcctgcatctcatactgcctgcggtactatgagtcataaagtactctatctttgacccaagtgtatcatatcttcttccaagatctaggaaactctggcaggcaaggaagttagcttgcaaataggataaaatctccaagttttcccagtgtttgatataaacacaaaataactaaagagacttcagtttaattatattctggctttccaaattggaaattgaaaatataggaataaaaacaataatattggcatctagatgttttgtaaacagtgctttcatagatagtttatcagtgaagttcacaaaatatattaacaatgtatataatatccctccatgcatcctcttggcacttaattcatgtagaatctgtggtggacagttaaatatgggttttgattttcca

SEQ ID NO: 909567 - DNA, 689 bp, Homo sapiens
aaagaagtataccatgttatggagaaaattatacccatatgttgaaggatattaatcgaggctggagtaagtagaaattcatagtgtgccaaaggtaagaaaactcgamttcaaagaccctgtgcttgtgattagttgcacagcaatagtaactcatgcagctccccacagactgctgggactcagctcccgcgacagttggctggggttccctgtttcttgccatgtggaccttctcaatatggcagtttgctttattaaagatagcaaaggagaaaatctctagcaagatggaagtcactctcctatgaaacctggtcacagaagtgacatctctccacctttccacactgtattggttagaagcaagtcacaggtttcacacacatttgtggggagaggattgcacaatgcacgggggtgaggaccattgccagccatctccaaagaagctgtgaaccacatgccttacatgctttgtctcacacacacacataatttttatcagttcaacattaagtaaaaagtattcttaaaatttactttgagaaattgccacactgccttccacaatggttgaactatactggataaagaaaatgtggacatatacaccatggaatactatgcagccatgaaaaagaatgagttcatgtcctttgcaggaacatggatgaagctggaaacca

SEQ ID NO: 909568 - DNA, 635 bp, Homo sapiens
gggggagaacccagctctttggccatgtgctacatctgcacctggcccaggtcttggagaagtgaaggaagacatctaagggaaccagagacatgtaggtctgggtgctgccctgtgctgccaggcgagcccccaggttgatgaaagcatgtgtgagctgccacagggctgcacacctgcccttgtcttcagagcataaaaatatggttgtaaaacatcccttgagccaacctaagtagaaaccctacagggaatggaatccgaggaatgtgttcccacccagccacaagccccaggcctgccttgtgccttttcacctccacgccttcttttatgcctggaatgtgcacctatcctcattaaagaggtaggaattgaggaaaagtcctccaccagtccatattctctgcagcatgagattcactctgactggccacgtgttccctctgctgggcaacatggtccagggttttgcttctgaaccacagccctgctcttccccagctccctgtagccacctggcaggaaaacagaggtaccctacaaacctagagattaacgtggtcagggcccaaatgggaggagaaaccaccctgagttctyaaactcctgcaactcgggaggcaagacaatta

SEQ ID NO: 909569 - DNA, 565 bp, Homo sapiens
aatgtctttgctattgtgaacagtgcagtgatgaacatacaaatgaatgtgtctttttgttacaatcatctattttgctttgtgtattccagtaatggaattgctgagtcaaatggtagctgtcttttaagttctttgagaaatctccaaactgctttccacagtggctgaactaatttacattctcaccaccatctcactggtgtgagatgtatctcattgtagttttaatttgcatttctctgaagattagtgatgatgagcatttttcatatataatattgattggctggctgcttgtatttcttctgagaagtgtctgttcatatcctttatctatttttaaatagagttttttgttttttgcttgttgatttgtttaaatactttatagatgctcgatattagaccattgttggatgcaaagtttgcaaatattttctcccattttgtargttgtctgtttactctattaatggtttatttcactatgcaaaagctctttagtttaattaggtctcacttgccaatttttggttattttgcagttgctttggggattttt

SEQ ID NO: 909570 - DNA, 565 bp, Homo sapiens
aatgtctttgctattgtgaacagtgcagtgatgaacatacaaatgaatgtgtctttttgttacaatcatctattttgctttgtgtattccagtaatggaattgctgagtcaaatggtagctgtcttttaagttctttgagaaatctccaaactgctttccacagtggctgaactaatttacattctcaccaccatctcactggtgtgagatgtatctcattgtagttttaatttgcatttctctgaagattagtgatgatgagcatttttcatatataatattgattggctggctgcttgtatttcttctgagaagtgtctgttcatatcctttatctatttttaaatagagttttttgttttttgcttgttgatttgtttaaatactttatagatgctcgatattagaccattgttggatgcaaagtttgcaaatattttctcccattttgtaggttgtctgtttactctattaatggtttatttcactatgcaaaagctctttagtttaattaggtctcacttgycaatttttggttattttgcagttgctttggggattttt

SEQ ID NO: 909571 - DNA, 644 bp, Homo sapiens
tatctgaaggttatgcacaagaggtgcaggagcttgagccatctctcattgtttctaatagrcttatgaaggttaaggagaataatggctaattcacagttggtgctagttagtgggggatgacagacttggtagtaagttgaatttaaggttctgtcaaggctatgggagagccacaccagggcatttacatttggaagaaagattccaaggtggttttgaaagatgaagattcattaatgtcccttcctctcccacatctcccaaaatgtaaagtgttcctttccaccttcacaaatcagtagccataatgttatatttctccccagtcatctcctgtttacatccacatcttacatatggaagagtcaggtgcaacaagcacaaaatcatttttataaaacttaaccagaactatatatttggattctctagtctcccttttggtcaggctgtcaccttgagagtgtatcgaccacatcagcctagggctaccatttgggggaaaatgacatatcatgcccaggaatggtcgggcagaatcctgaatattcagtatagggccttataaccagccccactccttttgtcctgattattattcagaaagctgctgagaggaaatgatcccattctgaagaaag

SEQ ID NO: 909572 - DNA, 674 bp, Homo sapiens
tccaaggttaagaagcccactctggcaagggctttcttgctgtgtcrtctcatggcagagggtgaaagggcaagacaacatgcacatgtgagagtggatgtaagaggggtctgaacttgctttataacaagcccactctcacaataacaaacactcctgcaataatgacactcattcatgagagcagagtcctatggtattgtgaaatatatatttgatctttggccctgcttcctggaatataagttttaaaatccttagaaactccaaaatgatgtctttttgtatgctaaagagttgactggtggctgggagcccctaggtaactttaggatggaggctggtcattgaaaagaccaagcaggactagaaggctgggactttcagctcaccctcagcctccaggaagaagagaggggctgaaagttatcgccaatagccagtgatttaataatcatgcttatgtagtgaaactttcataaaaaccccaaaagactgggttcagagaggttctagatagctgaacatgtacattcctacaggaaggtaaataagaactcatctacatgctgggaaggtggtgcgccccaacaccaccaggatagaagcttctgtgcttgtgactcttccagatcttaccctatgtataacttcatctggctgtttacttgtat

SEQ ID NO: 909573 - DNA, 598 bp, Homo sapiens
tcctccccttgtttagcatataatcaagaaatgaccaccagcagccgtcgaggctgctctatggaatagccattttcttttcttttttttttttttttgagacagagtctcactctgtcgcccaggctggagtgcagtggcatgatctcggctcactgcaacctctgcctcccaggttcaagctattctgcctcagcctccctaatagctgggactacaggtgtatgccacaatgcctggctaatttttgtatttttattagagacggggtttcaccttattggccaggctggtctcgaactcctgacctcgtgatccacccgcctcggcctcccaaagtgctgagattacaggcatgagccaccacgcccggccggaatagccattcttttattcctttactttcctttactaataaacttcctttcactttactccatggactcgccctgaattctttcttgggcaagattcaaggactccctcttggggtctgaatccagacccctttctggtaacatygggagtggatttttttttttttttttttttgggtgggggcagtctttgggtttgcttcttctatgccctctccagg

SEQ ID NO: 909574 - DNA, 606 bp, Homo sapiens
cacatagaaggtgttaagaaatgttcttaattaaaaataaagattcactgcatattatattrtgtgcatgtgggcaaagacaaaagtaatgatacaggattgtaaatttatattattcctgaaacaacttggtgctttcatcttcatctttagcaaagacctatacatgaatcagctaactggtattttgacttgcagtacaattcagaatcatgacactcattggcaggtgcagaaagtatggtaaggactatgtatattggaaatcaatgccccttaagaaaataatacagtaagatataaatccagatattctgccagctgactcaagttcacttaaactgaacactcgaatgaggaaggcctgattgaacaatcaggaggaggctgtgaattctgtcccctgccaccaagttgtaaaggtatcccactttacatgttttcagagggtcacctttgatgtgagagggagagaaggagaaagaggagagaggatgatagtatgatgacttgctttggcaagaaaaataacttcctataaacattggaggtagaaaattctccctgtataacaggcatagtttcataacattcctgaaacagaca

SEQ ID NO: 909575 - DNA, 590 bp, Homo sapiens
agaaacaaaaatcataaaataatctgtaatatatttaaaaataaattttctcctgtttgcataacattgtagtattctcctgcacacttgacttataartgaaaatcaacataagtaagtagagccttatcatatctcaaaatgaaagatttagaatttaaaagataatcattcactccgtattattttaaaaaataacgcaattccaattaaatgtatcaaagacactttattagggtactgacataataattctaaagttcatctcaatatcctaaacatctcacttgtctaccactagagaatcattttaataaattaagaacaaagaggtagatctttatttactgtaatgagaaaatgtccaagatatattgagtgaaacaaataattccagaagcatacaaacaaaatttagaccagtatagctagtataatattttttgagaagaaaatattcattcataaaagtacagaaaatatccagaagaaaacagaacagagagttaacaatgatttatttctagaatatggttccggagaggataaaaggcaatagaaaacaagatagtgggaaagaaccacactta

SEQ ID NO: 909576 - DNA, 646 bp, Homo sapiens
cattaggattttgttgatgacatggatgatatacttcccatgttgagcctgaaggackgacaggttagcagacaaaacaataatagtcctgttacaggatgggaaaaatagttagttgccacaatagtagtactataggcttaaagaattttggatatggtgaggcaatgttaggagtaagtaagtacatgctagagaaaatacactatctcacagggtctctgagtaattgggtttgggaaacacatatagcacccaccaggcccaagaatatttaatgtttagttaggcatcagtgaacttaggactattactgtgcttgtttgcctattatgtgtatgggaagggaagagatcttaataagagagtgtctgaactcagtttaacgatgggatccctgcaaagaaagattcaagggagaaactgaaaagcaaataaatggttttgaacacaccaaatgaaaatgtgcaggaggaaactagcctcagggaaaaaatttggagtctggcagaggcacttctgtaattttctacaatcgctaaaaagacagttttttagatgacatgctctactagaggaagcaattttcacggatggtagaattttcctctattatatgggagagatatggttaaactcttgatga

SEQ ID NO: 909577 - DNA, 656 bp, Homo sapiens
ctaaatggtcacaaagagatttgattaataggtttaagttcacttttgtgtagagctttaaaaaataacaaagcttaatcaccttaattaacatatatctttcttatacttttataacaaataaagcatacttgctttttactgcctaaaatataaaaatacatctccatcatcgactaatggttttgttgatttctcttaaattctaccctaatcaaacacttaaaattgcatctggaatttaaattaatctctaatcctttaatatttccccaaactaagaagcatgaagaaggtcctataatagttcaatggatgtctgtctttctatttataacttttaaatgtgccaacccgcgctgaaaaagatgtgcagaaaaattaaaatgtgtttattataaactcagattctgatctgaaacatgtgtcacttctctatttcttgttagttcattttctaggatttcttttgagatccattatagaattctaagtgttgtgtctactgggatttacaccacttgttcagtctatttataccaagttaattaagtgataatcccagagtatcagaggacatatgtagyaataaatgcctgcttcactctcaggcatactgagatcacatggtgaggagtcacagaatggaagactgt

SEQ ID NO: 909578 - DNA, 622 bp, Homo sapiens
gcactgtaaaggagtagtaggcaagagcataattcctaatatcagacagatataacttgctggctttaatgcttgctctggtacttactggccatatgactttggaaatataattcagcttcatgaaggctgaactctcacatctctaagaaggacatcactcttgtccttcctcatgtggcagataagatgaattagccagatgatatatttctagcacttgtcaaagcacttgatatataatttttgctcaataaatggtattcattattatcaatataactattaataagaagaaggtattttcaatatcaggggttctcaatcagaggtgattttgctcccaccctaccccccgaccagaagacgtttgacaaggtatggaaaaatattttgtcacaaccagggagatgggtgaggagtttctattgacatctagtgggtagaagatagaaaggatggaaaatatcttacaatacccaggacaatcctccgcaacagagtcatccatccccaaatgtcaatagtgctaaggttgagaaatcctgccataattctctatgcttaacaacctcccttctccagcaytgatagcattttcatttgaaacagcacactgtca

SEQ ID NO: 909579 - DNA, 665 bp, Homo sapiens
ttggacagctaacaggcagctcaaactcctcatcatgtcactcagttgaggatgtctccatagttttcacccagagataaaatgtatcacttgatatatatctgtctccttattctctcccccgccaattacaatatcaactattacatgatagttctagttttagtttcttgagaaattttcatatagttttcacagtggctgtaccaatttacattcccaccaacagtgttgaagggttccattttcttcacacctttgccaacattagttatctattgttttgtttgtttgtttgtttgtttcataaaagccattataaccggtgtgaagtgatattgcattgtggttttgatttgcatttccctgatggttaatgatgttgagcaacttttcttaccatctatatatcttctttggataaatatctcttcaagtcacttgtccattttttagtcagcatattatgattatgattatgacaatcattgcttttgagctgtaggagttccttacatattttcaatattaaccctttatcagatatatggcttgcaaatattttctcccattctgtaggttgcattyggttaattatattctttgatgtgccaaggctttttagttttatgtaatcccacttgtctatttttgcttttttatgc

SEQ ID NO: 909580 - DNA, 623 bp, Homo sapiens
taatcatctttgcaaaatggggcttttttttttcctggaatggctagaataaaattttatttcatttattttatttttattttattaaaataattttctgggtatacaataggtatatatacttatgggggtacatgagatgttttgatgcaggcatgcaatgtgaaataagcacatcatggagaatggggaatccatcccctcaagtatttatcctttgtgttacaaacaatccaatcacactctttcagttatcttaaaatgtacaattcagtcattattgactatagtcactctgttgtgctatcaaatagtaggtcttattcattctttctatttttttctactcattaaccatgccctcctccccctagaatgaaattttaagttcaccattgaggatacttagaatttaaaataattctaatgtgttctgaataagccatgaccaaatctgcatatacatggctttgaaaagaattaatttttaaggtatttttttctcctctttctagattgtgaggtaaatttwaaaaaaattctgtacagaaatggaatttaacttggttattggtaattaggccaatagagaccatgtttcctttggaagcctaaattatcta

SEQ ID NO: 909581 - DNA, 657 bp, Homo sapiens
ccttccgtctgagcccttccatcccccacagaagaaggtaagaaatcaacagagcttgcatgcccctggtgggaccatcattctgtttttcacaataaactgctgaaaccagaccttaagaggaagctacaattagatctcatcacctacccacctgctttcaaaagagaccaatcaggttaattccctcaagctatgtatgcctgtttattccagtgttcacaacatctttgaaccttcagatcacccttatggactcttatctccataaagcttggtactttctgtagtctaacttttatccttttctgaccctgcacacactcttcattatgtactctggctagcattttgcaagcagaatcccttatgacctccactgttttttttttttttgcacattacctttatattactgcagtcctgttaagcagtgcagggtttttctgctatgctgggtctcaagttttggtaagtgccatttttgttttttcaaaaccatgctgattcagataatttctctttcttcctttgtagaaatttctatgcttsgaagaaaattttaacagactgttccaactgcaaccctttcttgttttatcttcaatgatcctctcagccactcaccctccctcctcaaatattttgccaattata

SEQ ID NO: 909582 - DNA, 635 bp, Homo sapiens
ataaagaaaatatagtatatagacacaatggaatactattcagccatacaaagaatgaaatcatgtcttttgcagcaacatagatagaactggaagccattatcttaagtgaaacaactcagaaacagaaaatactgtatgttcttacttataagtgggaactaaataacgtttacacatggacacagagagtgcataatagacactggagagtctgaagggtgggagagtgggaggggggtaagagatgagaaattacttaataggtacaatgtacattattcaggtgatggctatactaaaagcctagactttatattcatgtataagaaatgcacttgtagctcctaaatttatacaagttaaaaaaaataaaactatcccttggttgattcttgagctgtgcaggcataagacaagactctaagaaagtaagtagaaaacagcagccagatggctgagagaaaagattttagcagttaccctcaactagggcaatagaattttaaatgcaagtgctgccaagtgaaagaggttyggtaaaaacttaggctttctaatgaaaacccagaaggaccacgccctagaaataagaacaatactctgggactaaagggtataccctacaaataggt

SEQ ID NO: 909583 - DNA, 668 bp, Homo sapiens
aagattttaaattccaagtcatttttcattcatctaactctgttaattatccttatttttgatttctttaaaatggagggaaaagaccatgataactttaaaacaatctgaagacagaatacttctaacacccagaaagtttttgtgtgtgcctttccagtcaacccaccttctggaggcaacagatgttcatatttctagtattacagagactttaaccgttttaaaacttcgaatcaatgggattattcagtaggaactctcttctgcctggtttctttcactcgtcatgttctggaggttaatccgtgttcattaccgtaattgttgagaagtttcctattatatgaataaagcacaatttatttattcatttggctgtgcacaccattggctgattacagaatcttttagggattaaagctttggtagcattcttttttttttaattagattcaggggttacatgagcaagtttgttacatgggttcactgcgtgatgttgaggtttgggcttctaatgatcttgtagtgaaygtagtaacctatagatagttttgcaacactttaccctccccccatctcctcccttttggaatccccagtgcttattgttctcatctttgtgtccttgtgtactcaatgtttaactcccacttataagtgag

SEQ ID NO: 909584 - DNA, 630 bp, Homo sapiens
cctcctctttccttttttccttcctctcagtctcaccctagcaactttgacctctttttgtgttctctctgcttcattatgtggggcagctcagttctttctcacccttgctcccagactcaaaacccagcctttctgtgctcagtgaactctggtcaaatagttagatccattcagggtctcagcctttcctcactaaagtgacctcactttatcagatgtgatctgaagcacttagtcaactctaaaggctagtaacacatgatgaaatatctaaatgaagaaaaaaacacttaaaacattttagaaagtataaaagtaacttctcaagtccaataattatgagctgaagtcaaagttataattcaaattactgtaagagtaaatgcccctcaggaaacaaattcaaataaatagccttggtagacgtgttgtagatcagatttttaaaagatctggtttaaagatatttacgttcaaaggactggttcataattaccctgcttttgaccatctgtgtagtggctattaggcttctcaaaagattaatagtcrtttgagttggtaacactaatttcccagaaggagtctttatttcattaaagtatattataaaattgctcaagcatt

SEQ ID NO: 909585 - DNA, 616 bp, Homo sapiens
ctttgaagctgaatttaagaggagtcaatcttccttcaacctgaggagaccctctgtgcattggagtgatgctgctgagtacttctgtgctgcaggtrccacagtgcctgggtctgcaggggagctgaacacaaactgcctatgctagagaagttttcagagactcaatgtatcttcctgtggcattttcaaagatctcttatttttatgatggtgagtgaggcaaagagagctgagcacatccagccatttctatataattctgcaattcctgctatgtcccatgtcagataaactttgttttagaagctttttgttaattgaagaaactgcataataggaaatagtattctagaatgatggaggagacatacttcttatcacctaacaatcaggttctcaaggacctttccttgactgtgactgcattaagtggttgactatgggaattttgatatggtctaggagaaccttggttttcatttatcatttaatctctcaactaacccagaaaacaaaacataagtttctcatgttcttaccttgcaagttgcatccttgagctggtcattcacaggatattttcttagaatttatttttctggctctaactgcg

SEQ ID NO: 909586 - DNA, 537 bp, Homo sapiens
ggtattttatctctgacagttttcctttytttccccattctgttttctgtctgcatgttactttttttttacctctgtcttatcgtttgtctaatattagattctacctgtgcagaagccaatttagctaacttgctgtttttctcctgcactcctcctttaccacctcatcagcagaactgacatttaaaaaagaaaaaagaattgaaattcttttgaagttgtttagggcaagtgaagcgggttaagtggatgaggaaggtggctacagtccttaaacacaggggcagcaggaagaattccatcctatatgctcagctttcttgaggattgttttctgtttttttttcaagtagtatgtatcaatattttaaattttgattcaaccagataatcttttttaaaaaatatatgctttggttgctgacatgcttggattcattttaaatatatttgttttatgcagcattctcttgatttttttcttatttctttttagcctggcttctcttgcattgataaagtttgatttttctt

SEQ ID NO: 909587 - DNA, 554 bp, Homo sapiens
tcaaccaattttgacaaggctaagataagctattttaagacaagagcgataagctatggctactatattaataaataaattatggtaggcaaggcaatgaccttwgttgtttgcagtgttgttgagtagtatcactagggcatggtctttaatgtttacacagaaagaaaatttgtcacaatcggtgatcctgtaatcagttgtcctgtatatgggatcgtccagaacacattctcttcagagcggggcatacagaacggcgtggcttgctggggcttatttggggtctgaattgaagtcatggaaaaaatataaattcgaaggtttgataacctaataaccaaactctgtaatctaatatgatctgtatgaacagagctggctgttgaaactgaatagaaaagagaatgggacctttaaaacacaacttgatatctgaggggttaattctaaactcttcgtcaaagagagattcgtttttctgctgtttggccccaagattggcaactggataggcattggaattgaggaggaatactgttatatcaatagat

SEQ ID NO: 909588 - DNA, 658 bp, Homo sapiens
aagtgtcccatgccaatataaaacacattataataagcatgtatacatcttattaaatcagaatgaatatccatatattcatattcatataacttgatawaaaatagcagttggatacatagtattaatttaaaaattctagttttaaaatttataattttagatttttaatttaaattttaaatttcaaatttttaaaatacctcattttatttctgatgtctggaatcttatttagttgaaaatgtctctttgaattctctgagtaccatgagcttgtatagcttatgctgctgcctctaatgtagctgctattgttttcaatatggaatgaacaaggtgattggatttcttgaaccacttactataatagaacctctagatatttctaccaaataaagagtagagaacaaattaaaatacgccaaatgtatttttacagctactttcacatctattagatggagtctttcatagacattttatgaaagagtttcataatcctcacacttgttacaacatacagtctaaacaggcaagatctattcactctaacataatatctaagggatggtgtgaaggatattgcaagcatatacacacacacgcacacacactcacatctcaccacaagttagagtttacagatagcggttta

SEQ ID NO: 909589 - DNA, 623 bp, Homo sapiens
tcaaagggaatgcttccagcttttgcttgctcactataatattggctgtggatttgtcatagacggctcttattattttgagttatgtttcctcaatgcctactttgttgaggagttttaacctgaaaggattttgaatttcatcaaatgttttttatgtctattgaggtgataatgtagtttttttttttttagttcagttcatgtaatgaatcacatttattgatttgtatatttaaacaaccttgcatttcagaaataaagactacttgattgtgctggattagctgcaggatttggtttggcagtattttgtttaggatttttgcatgtgtattcatcagggatattggcctaaagttttcttcttttgttgtgtctcttctaggctttggtatcagaataatgctggcctcatagaatgaggtaaggaggagctcctattcctcaatattttggaatagtttcaaaaagtaccagctcttctttatatgtctggtagattttggctatgaatctttctagtcyggggcttttttcttgttgtaggtttttattactaactcaatttcagaactccttattggtcagttcagaatattgatttcttcctgagtcaatct

SEQ ID NO: 909590 - DNA, 623 bp, Homo sapiens
tcaaagggaatgcttccagcttttgcttgctcactataatattggctgtggatttgtcatagacggctcttattattttgagttatgtttcctcaatgcctactttgttgaggagttttaacctgaaaggattttgaatttcatcaaatgttttttatgtctattgaggtgataatgtagtttttttttttttagttcagttcatgtaatgaatcacatttattgatttgtatatttaaacaaccttgcatttcagaaataaagactacttgattgtgctggattagctgcaggatttggtttggcagtattttgtttaggatttttgcatgtgtattcatcagggatattggcctaaagttttcttcttttgttgtgtctcttctaggctttggtatcagaataatgctggcctcatagaatgaggtaaggaggagctcctattcctcaatattttggaatagtttcaaaaagtaccagctcttctttatatgtctggtagattttggctatgaatctttctagtctrgggcttttttcttgttgtaggtttttattactaactcaatttcagaactccttattggtcagttcagaatattgatttcttcctgagtcaatct

SEQ ID NO: 909591 - DNA, 602 bp, Homo sapiens
cttgagtgtggcctggagatgggaaggagcattggctgtagttrtagagtgcctcatctccccagcagggcatgacagcacagaaggacttaaaatttttttgagaagggtctctaagtatcttaaagagatccagacaccaaggtcctttgttatgatgagtaaagacctgtatgaataagataccaaagaccgtatggaattgagaatgcttcaggaaatgtttgtctggagagttggaaacactaaacatcatatgaatatctccatcccctgactacaaggcaccacagatttgccctgcagtgtatgtcaagtatggggaaagcatttgtggcctgacgaaataaggccttttagtagacattactttgaattacaggcaaaatatttgagaatcatatttactgtaaaaatgaagttgtggtctgataggcataacattatttatgtagcccagaaggtgggaaaagcttggaaatgaagaataaatgtttctgtccagttttattgacagtcactgatgaaaatgatgaagccaagtcagaatttgctgcaacttcttactctgcagaagtgaagactctgaacaaatatttccc

SEQ ID NO: 909592 - DNA, 613 bp, Homo sapiens
tgtatggattttcaagtctcaattttgttcagttcttttctgattttgtttatttattttcttctgctagcttttggctttgtttgttcttctttttctagtccttctaattgtgatgctagaatgytcacttgagatctttctaatttcttgatataagtatttagcagtataaactttcctattaacacctttagctgcaaaccaaagactctggaattttgtctttctgttttcattaatttttgctctactttgttgtttacccaaaagtcattgaggagcaagttgtttaatttccgtgtaactgtgtggttttgagagatctccttggtaatgatttccatttttattacactgtggtccaagattatgcttggtatgatttcggtatttttgaatttattgcaatttgctttatggcttcaatttctcaataattttgagattaatatcatgtactatacagaaggtaacatcatcacagattcaggaggaaagaaacgctttctgttgaagttttgatatcatgtctgaaatgagaaggaaacagcttgctcccttggatccgtggttccgcctgttgcctctagagggcgatgttgcatcaagt

SEQ ID NO: 909593 - DNA, 582 bp, Homo sapiens
aaaataactattggtcaatagtattggtggatggacatatgtaggggktatataatcaaggctaaatttccattaaaaggttagtatcacaacactttgcctcatgcacataggccagtcacattatctgggaatcatttcttctcctacaggagaagaaagtgatgccagataattttgtagggatttaatgactttagttactatattttttcattataagagttatatattctttactttttaatcaatatatacacaagatataatttccttttttctttgaaaagaatttattaattggaaattacaattaatttatttctgtaattgatgccttaaatgtgaagcaatatgatatttcaagtagtaacaattcctcaaccaaagaccattcatttattcatgcatttgtgtatttaagaagtgtttcctaaccacctgctgagtgtttgacattgtactaggtatgggaatacagcagtgaaaaaaagcttaagtctctctcatctcaaataatctactaatgtttaaacatgtgctactgacattcctctggttttatcctaaaaaagtgctaat

SEQ ID NO: 909594 - DNA, 581 bp, Homo sapiens
cctaggcagagacacaatgtggccaagctctttgctaaagcaaaacaaaagtgacctttgctccagttctcaataagttcttcacttccatctgacatctcttctgcctggactttgcagtccatgtaactatcagcattttggttacaaccattagacaagtatctaggaagttccaaactttcccccatcttcctgtcttcttctgacccctccaaactgttccaacctccaactgttacacagttccaaagtcgcttccacatttttggttatcctttcagcaacacctcactcctggtaccaatttactgtattagtctgttttcatgctgctgataaagacatacccaagactgggaaatttacaaaagaaagaggtttaattggacttacagttccatgtggctggaaaagcctcacaatcatggcagaaggcaaggaagggcaagttatgtcttacatggacggcagcacgcaaagagaacttgtgcaggaaaactcccccttataayagccatcagatctcttgagacttactatcatgagaacagcatgggaaagacttgcccccataattc

SEQ ID NO: 909595 - DNA, 587 bp, Homo sapiens
taaattagtgtgaccagtactggactcctgatcctctccttctcactgccaacatgctgcttctattaccttttgtttttcaatcgacagcatctcattctttcagaatctctgcccgtagcctcagagttatttttgactcttattttttctttcactattcacattgaatccatcaagaaattcagttggccctaactaaaagatcgacccatagtttgaccactgctatctctttggtcaagccaccctcatctcaatgaattaccgtagtagccttccaaatggtttccctgcttgtcctcctacagaacattcttaatacagcagccaatgagatctttcaaatatagataggtcactcatctactccaatccttgcaatagcttcccatttctcttagagtaacatcaaagtacttacagtgacctataggaatgcatgatctatctctcgttacatttttaaaacaccaacagaaaaataactttggcaaccctgaattctataccartaaaaatatcacaaagaaattatagtaaagacattctcgaaaggaaaactgagagaattcgttgtgagcaga

SEQ ID NO: 909596 - DNA, 536 bp, Homo sapiens
tactttctattcctggagacaacatggttggataccactatcagagccatattaggctgactgaaccaccattgtgacttgcattatattatcttctctcaattctttatytccgtggagttttaccttaaaagatgttcattcatatacttttattcactaggtataactatgaggaagctgataaaaagggatgtttctcattagtcttttgtttatctaagatttgttgtaggttctgatacattagcagaataatataatcaatactttgatttgtttatcagatctatctaggttcatatgctacctctttgtgttcttgaacttcttcgagtctttgaggattaaatgaaagaattgatatcaaattaaaagcacagtggttggcatgtggtaggcaccaataagccactaataacagctcttgaaatacgtcatatcctttcattgctcctttacaacattgagtttataacagggaaaaaaaataaatattattgcacagactccaagagactatggactgggactcg

SEQ ID NO: 909597 - DNA, 584 bp, Homo sapiens
ttgtaggaccctcaatcttgtctccagggatgacccctttgttagaggcccagctacactgacaggtcaagcaacacggctgcacccagtgtgggaagaacttcctgtccactagtcttttcagattcacagacagactcacactggagagaagccttttgtatgcaacatttgtgggacagcttttaccaccaaaggcaacttgagggtctactatatgacacatggggtgaacaataactcagcacaccatgggaggaagctggtcctggagaacaccatgtctctgttaggtacaaaaggaaaaagagtctcagaaatgtttcctaaggaaatcccagcccctttagtgaatgtggacactgttgtaaggaatcagtatacccccacacttgactgtggtctggcagtgaaaaccagtgagctctctctgatccagtgtagctgtattcctaccctcctggtttccttggaggctgtctccatcatgaataacaccaccatctccaagatgatggctmccaatcaggtgtcattgcggatgtggaaaaaccaggtgctattgacagcattcccaaacatca

SEQ ID NO: 909598 - DNA, 593 bp, Homo sapiens
catgacttttgattctttaacctgttgatgtctcagtttcctcatccattaaatggtgataatagaatttacctcgcgaagtcgagttgagaattaaaattatacatatttacatacacctatatgtwtaaattaaactatacatgattttatacagacagttttcgcacggtacatagcatggcatgtcgacgcagtagagactcaatctgtgacagccaatgttaatggaaagggtggaatttgttcagggcctaaatcagattttcaatcatgtgctagtttcataacaccacactgctccttgacacgtttttcaaaggaaagagccaaaactcattgataaggaaaggacatcttggcactgcttgaaaatcaccccaacaggtccctaaatccccatttgcagctccagtaaatatccccatttgcagctgctcccccaccagtacctaccctgctgctaaggcccaggccctgtcagagaagcagcacatgacggatgtttaacataaaagtgttttcagggggcaggcagggctgctttaattcccctaactaggtaatttaaggtatattttctcatatttgcc

SEQ ID NO: 909599 - DNA, 517 bp, Homo sapiens
ttcactatctgagaatcttctatatactcctactggtaaaataacaacaacaataacaataataataataataaccctaaaaacatacatgcaagacctagatagagaaggcttctttgcccagggatcaatggtcattgtgccaggattttaaaagtgtatgctcagcaaatccaacaatcagaggacaaaaggaccccgagacactagctcctgagttcatagaccagggcagttgggcatttatcgtgatctgaacaagaacaggagagagttcctcacaagactaaagagaagagaaagacatttagcattaggtgggtggtgggagagaagagagaaattcttgggaagactacagccatgttctggtgtcagatctgacctccctagatggagaagagaggcyaagtgaggcagtgggtcctcagcccacctggtagaggaagagggcacctgccacttcctgcactggttcaaactacactcctaacagaatcctatcatttaatctgga

SEQ ID NO: 909600 - DNA, 517 bp, Homo sapiens
ttcactatctgagaatcttctatatactcctactggtaaaataacaacaacaataacaataataataataataaccctaaaaacatacatgcaagacctagatagagaaggcttctttgcccagggatcaatggtcattgtgccaggattttaaaagtgtatgctcagcaaatccaacaatcagaggacaaaaggaccccgagacactagctcctgagttcatagaccagggcagttgggcatttatcgtgatctgaacaagaacaggagagagttcctcacaagactaaagagaagagaaagacatttagcattaggtgggtggtgggagagaagagagaaattcttgggaagactacagccatgttctggtgtcagatctgacctccctagatggagaagagaggccaagtgaggcagtgggtcctcarcccacctggtagaggaagagggcacctgccacttcctgcactggttcaaactacactcctaacagaatcctatcatttaatctgga

SEQ ID NO: 909601 - DNA, 667 bp, Homo sapiens
attaaacaaaactttgcataaaactcacaattctaaatcaccttctgtggctctgttacccatctatcacacattcagyctaggttctcttagttcctgcactaataaatataaatataaattgtccctgcattataaataaccctgccccaatcttgcgtttatctttcgtctttttcgccttttttcttaggtacatatattcagaaacagagaaaaactgcctattgaaaatgatttgtaagagtcagagtttgctaatgtgggtaaaataaatcaaatcagtcaatgataaattatatgcaagctagtgtaatgatttgtagataactgagaaattatcttattctcaaaaaaagtcaatgaacaacgtgtttatactgttagtacagtatatgctcggtaacttttttttctgctgaatggaagaagggttggaggagcatcaaagttaatggggactaggagcagactcctattggcacaaatccaaagagaattcgtataagtgatagataattcaacgagatgagcacatatttaatggcaaaatttacctacaaaattattggcatatgataaacacatctcaattataaagtccagtggtgtgtcatagaatcaaactaattaggcaatactagttttgccatgatatcttagccta

SEQ ID NO: 909602 - DNA, 591 bp, Homo sapiens
gtctccaaaatgaacacttaaacataattttcaatagactattcaaagagagacatacaaatggattttaaaattattttttcaacccaggcttcagtaataatagagaaaattttgaaatggtattctgaattagcatttttcacctattaacttcagaaagataaaaatgtttaataatacattgtgttggcaaggaagtgaagcaatatttattaaatgaaaaatgcatgggttctctgttatcatttacatatttccaataatttttataaatatatttgtccatgttggcaaacatctttttatggggataaccatttcagcataatctttggtagtaaaagactggaaatgaaaatacaaaaatgcaaaactgtttaaatataatatagtacagccaaacaatggaatactacgtggccattttgcatggacaaaaaacaaggcacagaatgataygtatgtttgtctgaaaataatgagtatgtacgtgtatgagagtgtttgaaagaacagatgcatagatgcctctataatgagaactgtgatactgaaggacagatgaggaggaaagacttacttttgctg

SEQ ID NO: 909603 - DNA, 571 bp, Homo sapiens
gtatggtttactgggaatttctgtggaaattgaaaaaataaatttaaaggtaatttctaaggaatcattagccactaaccagtctattgctstttttctgaacaggggtgagcagcaaacaggaggtgacgcagattcctgcagctctgagtgtcccagaaggagaaaacttggttctcaactgcagtttcactgatagcgctatttacaacctccagtggtttaggcaggaccctgggaaaggtctcacatctctgttgcttattcagtcaagtcagagagagcaaacaagtggaagacttaatgcctcgctggataaatcatcaggacgtagtactttatacattgcagcttctcagcctggtgactcagccacctacctctgtgctgtgaggcacagtgcacaacaggcacctgcaaccaatacccaaactctatagctggggctctaactgcatgttttatcttgagactgagcaatgtttttgcattaagaggacttctaaattgacactgtctccacacagaagcaatcaaatacacaaaacttgatgtaataatctgaaattaa

SEQ ID NO: 909604 - DNA, 571 bp, Homo sapiens
gtatggtttactgggaatttctgtggaaattgaaaaaataaatttaaaggtaatttctaaggaatcattagccactaaccagtctattgctctttttctgaacaggggtgagcagcaaacaggaggtgacrcagattcctgcagctctgagtgtcccagaaggagaaaacttggttctcaactgcagtttcactgatagcgctatttacaacctccagtggtttaggcaggaccctgggaaaggtctcacatctctgttgcttattcagtcaagtcagagagagcaaacaagtggaagacttaatgcctcgctggataaatcatcaggacgtagtactttatacattgcagcttctcagcctggtgactcagccacctacctctgtgctgtgaggcacagtgcacaacaggcacctgcaaccaatacccaaactctatagctggggctctaactgcatgttttatcttgagactgagcaatgtttttgcattaagaggacttctaaattgacactgtctccacacagaagcaatcaaatacacaaaacttgatgtaataatctgaaattaa

SEQ ID NO: 909605 - DNA, 545 bp, Homo sapiens
ttgtcctccattcagataggtcattgaagcctacatcaatcagatagtacttcttagataagtcagagagatgcattgatgtaaagcccagttctcaatatttatgtgtcaaactctgtcctcaataaaagctcgaaactccaaacagatatcttggccttcctggaagattttcttatcaacaagtccttgttctcatttatttcttttactaaatattcaggctccatattgtgtgatgaggagtttgcattcacaacctctgccatatctgggctacaaagctgctttctttcttgacattacaaaccaactcgtgggtaagtaatacattcagatatatgagctataaaggagcttaaatagtgggggacttcaccaccccactgactatgttaggaagatcatcagggcagaaaactaacaaagaaattctggacttagggccragcgtggtggctcaagcctgtaatctcagcactttgggaggccaaggcgggcggatcatgagatcaggagattgagaccatccttgcaaacatggt

SEQ ID NO: 909606 - DNA, 584 bp, Homo sapiens
aaaagtgcaaggcgaagcaggaagtgctgatgtagaagctgcagcgagtttccagaagatctaactaagaccaytgatgaaggtggctacactaaacaacagattttcattgtagacaaaacagctttctattggaagaagatgccacgtaggactttcatagctagagagaggaagtcaatgcctgacttcaaaacttcaaaggacaggctgattctcttgttaggtgctaatgcagctgatgactttaagttaaagccaatgctcatttaccattctgaaaattctagggcccttaagaattatgctaagtgtactctgcctgtgctctataaatggaacaacaaaacctggatgacagcacatctgtttatagcatgttttactgaatattttaagcccaatgttgagatctactgctcaggaaaaaaaaggttcctttcaaaatagtactgctgattaacaatgcacttggtcacccaagagttctgatggagatgtacaaggggattaatgttttcttgcctgtgaatgtaacatccattctgcagcccatggatcaaggaataattttggctttcaag

SEQ ID NO: 909607 - DNA, 612 bp, Homo sapiens
acaactaaggatctcagcctcagttattttcaggaagttgacgtgttctgtgaaagcaaacagtacaaagaaagtagaatcctgtctagcatttagttcctatggacatcttagatttctttaatttattttcttatttgccattttgcaaaggaaagagcttgtacctgattctagaagaaattagactataggatttgtaacaagcaggaggaggtgatttgcaccaaggtatttcagatagtgatggactgggatgacttaaggttggccatgtggattggtataaggcaaatcaatttgcttttagttattaatctcatctctcaaacaatcagaaacccagaatgagtgtttatttcaagctgcattatctacagattattttacccagtatcctgacttcagtgagctacagtcctttgaggaaagaagcctcttcaaaggacttcagctcactgatgaaagtatttgagactgggagacttaattaaagctsacatttaaggatgtgtgcaaggcaatctttccaaagacaatataaaagggaaaaaaaaggctttatttttttaatctggtggtccccagcgaaaggcagtctaaattaaacac

SEQ ID NO: 909608 - DNA, 456 bp, Homo sapiens
tgtatttctgtgggatgagctgtaatgtcatctttgtcatttctgattgcacttatttggatcttcacccttttacaaatttcttaatctacctagaagtttatcaatctttgtttattctttcagaaaatcaactctcagtttcattgttcttttgtatagattgtatgtctcaatttccttatgttcttctcagattttagttatttctattcttctgctagctttactgttggtttgttcttatttttccagttcctctaggtgcaatgttagattgtaaatttgggatatttctagcttcttgatgaagacgtttagcactagaaactttcctcttaacacygctttagccgcatcccaaagattttggtaagttgtatctcttattttcactaatttcaaagattttttaaatttctgtcttaatttcatttttcacccaagagttattca

SEQ ID NO: 909609 - DNA, 555 bp, Homo sapiens
acatctcagtgtgcttccgggctggaggctctgctaaacaacagaagcagagaccggactaattgtcccccatgtctctttgactgaactcacacaaaatagaatctaccatttttactcagtgcggggtacccagactcaagtttactgcaatgttgttaccaatattctaatggaaaattatatattcagagctatgttaaatttgaccatttattaaacatgaaatttctactttttctgtaagtgccttgtcttacttgtatttcccggtatttcccttctaaagctaactccccaaagggctttcctgtatgttctcacttccattacaaagtcaatgtacaagttaatttttttaatttctttagaaacctttataaagagatttcctccttcatttctctgttatcccaggcagctgtcaggagcaaagagctcaagcctgcactgccttggaacaggacatcagyaaaagacactctcaatctactcagaaggctgaggtgggaggattgcttgagccaggggttcaagaccagcctggacaactaa

SEQ ID NO: 909610 - DNA, 610 bp, Homo sapiens
gtgaaaaaaacaaaatgaaaatgctagtcttgtgttcagacaatgattatgaccatagaacactacctatawgttctgtagagctaatttctttcccagtgggttgatattctatgatagattgcatcagcggtgtgattgttttggaccatagaatacgtatacagaattggcttgttgagccttctggtgtcttgaagtgaaaatcatatctctggacatatctgtcaggcctgaagccctaggctactggaaagaaagataccatgacttatccttcctctaaagcttagaagttggagaaaaattctagttcttgggaagctctgcaaagcagggttcgttaagctgatgccacaggtttttgcaaagcccctcagcacagtgtttaagaaaccagtggctctaggttgacctttggggaaggaacacagctcacagtgaatcctggtaagtggaggggagcattgaatcctctgcctgaatgtatccattttatgccaatgaattgagatatggcttcttgccccatctctgccacattcaagtcctgcttggctaaacaatgctcacggatgtgcacgtgtgcagtgggatgcagctttttcta

SEQ ID NO: 909611 - DNA, 605 bp, Homo sapiens
tttcagatttattcggtgttttctcaacttcacgagaaattgaaaatccataaaggagggaaatatgtcttgtttcattttcaatagttatatcaagaatacttttcaaaagtatttcatatttaccatgttttcagcaagtaactcttaacaatactctgagagtatgatcgtgatgataggtaaaaatcaggatcactcccttttcatctttacctgtgtagagcaatgtaatgtgcccttttcccaaaccctctgactccatgagggatgagacacagagggtgtggctgagggctcctaggaccgggactccttggctgatgtcctgtggcctgcagtccagggcttgcaggtgatcaaacaggaaaggagaaatgagggaggcacagtgctacgagcaggcctgtgttttcactgggaatggtggttagcagatgctcagatgtgtctcttctccctcacactcacctttggcttggctcttaactcctgcccacccctccctaaactctctgtggaggtccggaactragcgagtcacagacacccagcaagcagtctccagagaggcctctgtgcatgaagacttccccagaaggatg

SEQ ID NO: 909612 - DNA, 615 bp, Homo sapiens
caactcccgacctcaagtgattcacccacctttgcctcccaaagtgctaggattataggcgtgagccacctcgcctgacctgtttttaaatttcaaagtgcattaatgaatgcagttgtatctaaattaaagtggctcatgcaaaacttgatgaagaaccttaccattttctcacagtattcataatcatgtttggatatgtcactctctctgggctaaaaacaatgtttaaaaaaagctaaataatgctgccctccaggctgcttctactgctcttcacctagaagccagaaaaaggaacaaacagtgacctttggagctcattattattgtgaagaaactgtagatgaaagctttgtactttttctgagtgggtaaataatttatcttggaataaaaacttagacaaaaagagataagaggaatatacagttacaggcttcaaaaatagatatttctcacatcagtttagtggacaattatctaaatatattaaagattgtgtaacaatatggggatatatttatgatggattaargagtggaaaagatgtaatgtaaaattatatgtatttgatgaaaacaatgtaaaaaatacaccacaggagaacatatg

SEQ ID NO: 909613 - DNA, 600 bp, Homo sapiens
tttgtttcattttttttctttcatagcaaagataaaaccytttttggtttacaggatgacagtaagaaactaaagatgaatgaaaggtagcttgtcatgcagagtgacaaacaagcctctgaaagagagagtgtaccacatacccagccaagagttgtgaaggaccaagaatgccagaaaaatagtgagatatttagtatatcttgcctgttgcatgcacagaaaaaacgtggacccagatgaattgtgcaaggtgaactggggtcaaataatgacagtctttgaatgtgcaggagactgacttcatcttgcaggacacatggaaccgagcaggtgtttttcagaaaagaaaatgatatgattagtgtattagtctgttttgtattgctataaaggaatacctgaggctgggcaatttataaagaaaagagatttatttggctcatggttctgcaggctatataagacacatagtgctggaatctgcttctggtgaaggcatcaggaaacttacacttatggaagaaggcgaagagggagcagacatatatggcaagggaaggagcaagaaagagtagaacaggtccaagattttttaaa

SEQ ID NO: 909614 - DNA, 600 bp, Homo sapiens
tttgtttcattttttttctttcatagcaaagataaaaccctttttggtttacaggatgacagtaagaaactaaagatgaatgaaaggtagcttgtcatgcagagtgacaaacaagcctctgaaagagagagtgtaccacatacccagccaagagttgtgaaggaccaagaatgccagaaaaatagtgagatatttagtatatcttgcctgttgcatgcacagaaaaaacgtggacccagatgaattgtgcaaggtgaactggggtcaaataatgacagtctttgaatgtgcaggagactgacttcatcttgcaggacacatggaaccgagcaggtgtttttcagaaaagaaaatgatatgattagtgtattagtctgttttgtattgctataaaggaatacctgaggctgggcaatttataaagaaaagagatttatttggctcatggttctgcaggctatataagacacatagtgctggaatctgcttctggtgaaggcatcaggaaacwtacacttatggaagaaggcgaagagggagcagacatatatggcaagggaaggagcaagaaagagtagaacaggtccaagattttttaaa

SEQ ID NO: 909615 - DNA, 681 bp, Homo sapiens
aaaattgcaaactaaaataatgagattccactacagtcatattagaatggcagaaatcaaaatcactgacaaaccaaatgctggtgggggtgtggagcaacagcaactctttctcatggctgatggcagtgcaagatggtacagccacttcagccacttgggcggtttatcagtttcttacaaaattaaccatattcttactatacaatccagcaatcacgctccttggtatttacccacataagttgaaaactcatgcatatacaaaaagctgcacacaaatgtttctagcagaatcactcgtaataaacaaaacttgagaacaatcaagacgcccttcagtacatgaatagctaaataaacagtggcaaattcagacaatgaaatattattcatcactaaataataagctatcacaccatgaaaagacttagaggaaacttaaatgcatattactaggtgaaagaggcaatctgaaaagaacacatactgcatgatatcaactgtatagcattttggaaaatgcaaaactatggaaatagtaaaaaagagaatccatagatatcctatttttggggcatagatggatgaataggcagagaacagaggattttttaagcagtgacaatactytgcatgatactttaatggtggatgtgtgccattatacaatgtgtctat

SEQ ID NO: 909616 - DNA, 690 bp, Homo sapiens
ttattagaattcttttgcttgtttgttttttatgcacacagagttaagctgttatcaggttaaaataatggactataagagtatttgcaagcctcatggtaacctgaaacaaaaaaaaaatacaatgaatacacaaagaaaagcaagaaaagaaattttgtcatgagagaaaatcactttcaaagaataaagaaaaaaagaaaattaagatggaagagaggaccaaaaaacaataaaaaaatggcaagagtaagaccgcacttatcaataataacattgcatgtaaatggactaaactcttttatcaaaagacatagagttactgaatggataaaaaaaaaaagaagacctagtgatctgttacaagaaacatgattcacctataaagacacacataggctaaaaaaaggggggatggaaaaacatattctatgccaatggaaaccaaaaagagcaggaatacatatacttacatcagaaaaggtagatttcagtacaaattctgtaagaagagacaaagaaggttactatataatgataaaggtttccagcaagaggatataacaattgtaagtatatatgctcccaaaactgaagcatgcagatatgtaaagcaaatattattaaagctaaagactaaagatagagatagacccaaatacrataatagctggagacttcagtactcca

SEQ ID NO: 909617 - DNA, 536 bp, Homo sapiens
actgtgttcaacgtttccctggtctacaaggatagtaaagaacccaatcaaaaatttaaaggaaagaaagagaggatgaaaattaaattgtttggagtgatctgtactccatwaccccatgctatctcctgctgatggtcacctcactccacgagtgcccacaaaacttgtatttccatttggacagtttgccagtaatggacttcaaactcgctggtgggtactttctaaaaatgactcttgtctcatatttttttcttttttttattatactttaagttttagggtacatgtgcacaacctgcagctttgttacatatgtatacatcacacaccggggcctcttgtcttatttttaaaataaaacaactttttcccagttgtcacttctcccgcctcaaaacagttccttgcaaatcctaaagaggagttcacaccttaaaagagagactaatgtggaggaagtaacctatggatgcaaatccctattcaccccttacctgccatcagagcaccttcagttcttcccacggagt

SEQ ID NO: 909618 - DNA, 596 bp, Homo sapiens
acttaaagtaaaattttaagaaaggccatcaaaatcagatacaactaacagttgtgaaagaaatcatttatccgctagtcacattggaataggaaaaaagaaagtcactmtggttatctggtcctaaagcaagaaaaagtcatgctgcatatatattctgattacattttagtcctccttactgctgtttccatgtttaggtggggaggacagaaaggtgtgtgtgtgtggtgatggtaatgagagagggaagaataaaaaagaataaaatgaagtcccggatacatccagaaaaacaataatcttataggcatcttgcttaccaacaaaactccctctactttgtgcacaacaatccaataaggttcttgtgattcactgtctgccactggtgacttagcattcactttagtggatgcttcctttgcctacgttgtagctaattagtacagaagcacaaatcgacacatttataaaaaggtagcagcctgaattttaaacctttttctaatataaataaaaagcctaacactttgaaagcattgttccctcaattctaacaaagagagaattagtaaaactaaaactattgttta

SEQ ID NO: 909619 - DNA, 671 bp, Homo sapiens
agtttccttggtgaggatctataagtcataaactcagttctttgcctaaacacatctttatttcacttagtggtttcagtggatataaatgtycatttaacagttattattgaagatggctgactagatgacgccaggtgaaacagctcccactgagggactgagacgactcgtgtgcttttaacagatcttcagagtgaaggtgctgagagtggacagagggaagacacaactcattggtgtccctgaaagagatggggagaatagaaccaacttggaaaacatatttcaggatatcatccatgagaatttccccaacctaactagagaagccaatattcaaataaaggaaatgcagagaaccccaagaagatactctttgagaaggtcgaccccaagacacataatcatcagattttccaaggttgaaatgaaagaaaaaatgttaaatgcagctagagagaaggtcaggtcacctacacagggaagcccatcatcagattaccagtgaacatctcagaaaccctataagccagaagagattggaagccaatattcaacactcttaaagaaaataaattccaacccataatttcatatcccgccaaactaagcttcataagcaaaggagaaataaggtcattttcagacaagcaaatgctgagggaatt

SEQ ID NO: 909620 - DNA, 606 bp, Homo sapiens
gagcaacatgatccccagtgaaattctttccaaatgatgtatcgtgtgcacaagttataagtgattatcttcaattttcttagaaatgagtaataagataactcttaagacccatgcttttgtatatgcatcaaacactgaagttggcgtggtcattgatagctgtcatttagggagaaaacatattttctgtcttgtctcataccagacaaatccaggactcttttcccccagatcagtaataagccgcctttttctaggctacagtgaacagcaaacattgcaactctaaagatggaagtagcagaatgctcaaaaatattgcatcaaaatattggatacaacctaccagcccataagaaaaaaacacattgcaaaactgacgccatctgcgtcatttagcaaccattaaaattcttcttatgtctgtatttcctaatgcttccaaaatggaatttgctccaagaattaagaaactctttttaagatggcggccctattaakagacttctccctatctcccacttcatctcttcagttcttttcccttgcccaggctggctattgtgaccatttcagccaatttcctggaggtattttctagcc

SEQ ID NO: 909621 - DNA, 606 bp, Homo sapiens
caaaatctggcagagacaagattaagaaagaaaacttcaagccactacctctgattaacatagatgcaaaaatttycaacaaaataccggtaagctgaattcacaagaacatcaaaaagttaattcatcatgatcaagtatgctttattccaaagatgcaagacttgttcaacatacacaaaataacaattgtgattcaccacatagacagaattaaaagcaaaatgatatcatcatcctaatacatgaagaaaaagctttcaatgaaatccaacatccttttatgatttaaaaaaaaaccctcaacatactaggcattgaaagaacatagctcaaaataataacagccttcgatgacagccccacagcaaacatcatactaaattgataaaactggaaccatttcccttgagaacagaaacaggtcaaggatgcccactctcaccactcttattcaaaatattactggaagtcctagccagagcaatcaggcaagagaaagaaataaaaggcagctgaatagaaaaagaagaaatcaaaatatctctcttcactgacaatatgattctatacttagaaaaccctaagaacttcgtcaaaagtcta

SEQ ID NO: 909622 - DNA, 671 bp, Homo sapiens
taccagccactgcaaaaacatgccaaaktgtaaagagcatccaggctaggaagaaactgcatcaactaacgagcaaaataaccagctaacatcataatgacaggatcactttcacacagaacaatactaaccttaaatgtaaatgggctaaatgctccaattaaaaggcacagactggcaaattggataaagagtcaagacccatcagtgtgttgtattcaggaaacccatctcatgtacagagacatacataggctcaaaataaagggatggaggaagatctaccaagcaaatggaaaacaaaaaaaggcaggggttgcaatcctagtctctgatacaacagactttaaaccaacaaagatcaaaagagacaaagaaggccattacattatggcaaagggaccaattcaacaagaagaactaactatcttaaatatatatgcacgcaatacaggagcacccagatgcaaaaagcaagtcctgagtgacatacaaagagacttagactcccacacattaataatgggagactctaacaccccactgtcaacattagacagatcaatgagacagaaaattaacaaggatatctagaaattgaactcagttctgcaccgagcagacctaatagacatctacagaactctccaccccaaatcagtggaatatac

SEQ ID NO: 909623 - DNA, 607 bp, Homo sapiens
gaaggccatgggtaaggcagatcagagcaaaaggttaataaattagttgtagacttgtttagtttgagacatctacttgatctccaaatggcgatatcaagttagcagttagataagtcggagaatggaaaataaatcttggctagaggtgattgagaattagtagtgggtaggtagtatttaaacccatgagacaggatgagattacaaatgtagtgaaagtagagaagaggttcaaagactttttcctggggcaccaaaagataagaagatgaagataaactgaacagtcctatatttattaaaggcattttcatattggaaagaagaaaaactgtcactattcacagatgacatcattatctacacagagagcccttaaaaaatctattaaaaaacctactagatcaaatggtatttctgtctttaggtctttgaggaatcgccacactgtcttccacaatggctgaactaatttacactcccaccaacagcgtataagcattcctttttctctgtaacctagccagcatgtaattttttgactttgtaacartagccattctgactggtgttagatggtatctcattgtaccattagacccag

SEQ ID NO: 909624 - DNA, 632 bp, Homo sapiens
atgaaggagtgatccagtttctctgcatcctcaccaacatttggtgttgttactactttttattttagccattcttataggcatgcaatgatatctcatcaargttagaatttgcattatctcatggctaatgatgttgagcatttttgcatgtgctttctgccttctgtatatcctttttggtgaaatgtcttttgttgtctttttctaactggattattatgttttattgttgagttttgagagctcttcatatatgccagatacaagtcctttgtcagatatgtggttttgaaaatatttttttccagcctgcagcttatcttttaatcttcttcatatgggcttttgcaaagcaaaagttttaaactttgatcaggttcaatttattgactttcttttccatttatagatatgcttctggtgtcaaatctatgaaatttttgcctagtccaaaatcccaagagttttctcttattttttcctaaagttttatgttttacatttaacgtcgtgatctattttgagttgatttttatatatggtatgaagtgttggtgtatgttcatttttttgcctatagatgtccaattgctccagcaccatttgttgaaaaagctgtccttactcca

SEQ ID NO: 909625 - DNA, 632 bp, Homo sapiens
atgaaggagtgatccagtttctctgcatcctcaccaacatttggtgttgttactactttttattttagccattcttataggcatgcaatgatatctcatcaaggttagaatttgcattatctcatggctaatgatgttgagcatttttgcatgtgctttctgccttctgtatatcctttttggtgaaatgtcttttgttgtctttttctaactggattattatgttttattgttgagttttgagagctcttcatatatgccagatacaagtcctttgtcagatatgtggttttgaaaatatttttttccagcctgcagcttatcttttaatcttcttcatatgggcttttgcaaagcaaaagttttaaactttgatcaggttcaatttattgactttcttttccatttatagatatgcttctggtgtcaaatctatgaaatttttgcctagtccaaaatcccaagagttttctcttattttttcctaaagttttatgttttacatttaacgtcrtgatctattttgagttgatttttatatatggtatgaagtgttggtgtatgttcatttttttgcctatagatgtccaattgctccagcaccatttgttgaaaaagctgtccttactcca

SEQ ID NO: 909626 - DNA, 649 bp, Homo sapiens
ttgccttgtgtcgcatacttcgcttgagtcatatcaaaagttagtaggcaaacccataaatatatatacctactatgtacccacacaaattaaaaatttaaaaagttagtaggcagtatttgggctttcgtgggaacccacaatgagtttaattcatgctaaaatgacaaacttgttttaaggaagtaatacctgaggctttgagacatcttaaactacctgcttgcagctaaccatcagcctttctgttaaatatttttagggtgctccaggtcctgatggaaacaatggtgctcagggacctcctggaccacaggtgagtatttctcccactcttgtgctcttctgcactagaatgtatatagtcctcaaactggccatctccattttcagtccaaaagttatacagctagacaacagtggtgacatacgttgctatttatgctctctttcctgtcactttcagggtgttcaaggtggaaaaggtgaacagggtcccgctggtcctccaggcttccaggtaagtcaactcaarcatatacaatactgcctttggtcagcctattgagctgtaaatcaccataccgtacctctcttctccaccacaataacatgatttcaggactgaagcaaagaaaggtgcattttt

SEQ ID NO: 909627 - DNA, 676 bp, Homo sapiens
gttttctcaagtgtataacccataccacttaacccccaaaatgaatatagcattaagtaaaaatccacttcattttactctgtgagatgtgcgtcagttatctcttccaaggcaactaagactctgtctgtccaccactgttctctctccctcccagttctttgagcatctatgtcaggcacattaacagattcatctttggtcccattatagggcgaagctggggctgctggtcctgctggtcctgctggtcctcggggaagccctgtaagtaagaacctgggtcattttgtatactcacacctcacaatgtttagacattgatgaacctaggattgataacacatttttaaatcccttctcccacctagggtgaacgtggcgaggtcggtcctgctggccccaacggatttgctggtccggctgtgagtatcacataatgaagattaatctgaaaacatcctaagttggggagtagagtgggtcggaataccagagctgtaactgtttatttccaacagggtgctgctggtcaaccgggtgctaaaggagaaagaggagscaaagggcctaagggtgaaaacggtgttgttggtcccacaggccccgttggagctgctggcccagctgtaagttgaattcactggtggtccacacagcagctacccattagatc

SEQ ID NO: 909628 - DNA, 543 bp, Homo sapiens
taaaggaagacaggagttgcttctttctgcaagaaagaaggttaaaaactataaatatttcccccaaatggccagggtattattttattgcatcacattgtttgcatcttaagatctagaatctttgctgctctcttccaggcccttggtgattaacagaaaggaaatgaccttgtacatttgctcatagggtatttctggccctcctggtccccctggtcctgctgggaaagaagggcttcgtggtcctcgtggtgaccaaggtccagttggccgaactggagaagtaggtgcagttggtccccctggcttcgctggtgagaagggtccctctggagaggctggtactgctgtaagtgatttccaactcctctttcttaataccttatgctgaattaaaataaagcccctacacaratcttcaagtggcatctatttgttgatgagtattgcaggctctcaagtagagctcagttgagccaggaaatctgtccagcacacactgaggggctgtggcttccaagatgctcagaaagcacaaat

SEQ ID NO: 909629 - DNA, 599 bp, Homo sapiens
cacatgccgtgacttgagactcagccacccagagtggagcagtggtaggtcaagatgtccagaccagactgacccttctcacaagttgagcttttcaaaattagtttccattgacatttagagtgaaaatgcatttgggtaaagattacattatgtgaaatcacacccaattaatggagcgtcatcttctcccaaccagcacccaacctcatttcccttaaaatgtatttttgcacttttcatagtaataagtaccctgatttgatttttcatggaggaggggagggaaggaactgtctaatcttaaaaatagccaccctcttcctcttaaatatggggtagacaatcaaaaatgttacttatgagagtcagtatctttcattagttattattagaatctgtgttctgctcaatgagaagtttcatgatctgaatgttattttcttaaaaggttactactggattgaccccaaccaaggatgcactatggawgccatcaaagtatactgtgatttccctaccggcgaaacctgtatccgggcccaacctgaaaacatcccagccaagaactggtataggagctccaaggacaagaaaca

SEQ ID NO: 909630 - DNA, 727 bp, Homo sapiens
ctcaggtctttggaagggccgtttyaaatgtgagactctgaagctcaaacttctttatctttgtggaaaaccctcctctgcctgttgtgcttattccactctaataatgtatagtaggtataataaaagtggaggtctggcaaggtatggtctttactccttgacagagctgctgttccagctttcttcctttcccaatattagtggtggaagagatccaagttactccaagttatcagcagcctatccataaggtcagcagcaacttcagtccttgcctcttcagaagaaagaattcaactgggggcaaaagcagaaaaagagaccaaggcaagtttcagagcaggaatggaagtttattttaaaaggccttataacaggaaagaaaggaaggtgtgcttggaagagagccaagcaggcacatgaaggtgagagaaggccaagtgccccacttaactgtgatcgtaggacttctttacgcttgcctctttcccatgattcttctcttagggtgggctgcccagccctcctaacccttgggaaaagagcacccgcaatgtgtttagggaagtatacacaggcccatctgagtctctcttcctttttctggtggagtgtacctggaagattatactataccatttttgtctctaacacgcatgcccaggaagttgcttctccctggagtctgcattcagttaacattttggtgttaacaggtgtggac

SEQ ID NO: 909631 - DNA, 624 bp, Homo sapiens
ttttgacctatgtaagaagatattttaaataatataaaagccaaagaaaattaaatccagtgatataaccctgagtgggtttgcagarttctgtgggaaaaaaatattataggtgaaatccaaactgaaacatgttatgtacctgaaccataagattgcaagaccatttagtgagttgatatggtgactacagataagactgaatatgttctatcacagtaacagatatcagagtccctggtcaatatcttaggcgaatatgcatattccaaccatctaggggagtatcctcaaagactttgtggtaacactgttgtttcctttgtgggaaagcctacttttacccttaaaatatttaaagtaaacatagaaatatttaggtaattaaacccattagttaaaataagtttaagcatatttagtatttcaaaattgtgatgcgtactgttcagaagaatattgactattcaatgaaacttttttttaatgtaagctgtataaattgagtagttgagttcaccttttgagttttaaattcaaagtacttacggtatttatatgcactgtgactggaatatggaaaagaagttaaaatcgggccaggcacactggctcactcctacg

SEQ ID NO: 909632 - DNA, 624 bp, Homo sapiens
ttttgacctatgtaagaagatattttaaataatataaaagccaaagaaaattaaatccagtgatataaccctgagtgggtttgcagaattctgtgggaaaaaaatattataggtgaaatccaaactgaarcatgttatgtacctgaaccataagattgcaagaccatttagtgagttgatatggtgactacagataagactgaatatgttctatcacagtaacagatatcagagtccctggtcaatatcttaggcgaatatgcatattccaaccatctaggggagtatcctcaaagactttgtggtaacactgttgtttcctttgtgggaaagcctacttttacccttaaaatatttaaagtaaacatagaaatatttaggtaattaaacccattagttaaaataagtttaagcatatttagtatttcaaaattgtgatgcgtactgttcagaagaatattgactattcaatgaaacttttttttaatgtaagctgtataaattgagtagttgagttcaccttttgagttttaaattcaaagtacttacggtatttatatgcactgtgactggaatatggaaaagaagttaaaatcgggccaggcacactggctcactcctacg

SEQ ID NO: 909633 - DNA, 721 bp, Homo sapiens
agccaagtttatggctgaaaaatgacttagctctctaagctggtgcacctcaccaggctccttacacacttggaaaaaaacaaaaagagcctattcatgttttaccaatttctcaagacccatctgctcccactttttcctgacctgctcttgttccaatacccttgtgactcttgccttccttgtgactataaccttgggcctgtctctggaccttcgactggggtctggattttgcctcaagctttctgtaaaacactaagacttgcctccccatcatgacccaccactttggctccactgactccaccccacaatcccagcaatctcatctgaaccatggcccagccagttcaagccatggctgaacaaactccaacaaggaggagattcagatagaggcaaaaccaagtcaaagcccaggtcttctgaccctgaaaccaatgaactttctactactttctactgcctactccttgcctctgctttactgttagttttacattctgtattagccagtaaatctagcccctctccattatatgaagacagttttcacgtccctgtaccaccccaaccaattttccygagccttctctcctctacatgaatcatccacagcttcttaaaactgacctcataattcatggtttccagaccttcagagggctcataaactcaatcatcatcctctttgaaagaaaaagtgataatactttgg

SEQ ID NO: 909634 - DNA, 667 bp, Homo sapiens
gtatgcgtacatatatgtgtatatacacatatatgtacacatttagcacagtaattgattactaatcttttggaggaaatgcaaactgtccagatggcaataawctgaaggagtgagagctactaaatggctttcgattaagctgctaagtaagaatgaagagggacttacaaacacatttgggtatacacctagagtgaaagaaagaatttctcagtagatttttggccactaccttccccctaaataacctttgatgaagcagcctgctcacctagttacagatcatcttagagcccattcttagccccttgaagctattttaaaaagcacagaaaataaatgggtagtgcttattaaattagcattgattttggaatgaggcattttataactccttcaaaaatggtgtcccaagaaaagtgtgagacagtcacagatagggactgggactttgacaagtgttctaagcattgtccttcatatcattggtgctgtacaaccaaagccacttaaaaaatggatttgaaactgcttgagcaaataagttgcaggaatagattaacactgaggtcttctgatgctagattgtgtagtttgcttcacatccaaaagacaaattgtagatctctgctttcaaggcagataacaactacccttaataaat

SEQ ID NO: 909635 - DNA, 658 bp, Homo sapiens
taaaaatggctaacttttttggggtgctgtttagaggtgtttaatttttctaagttatctaaagtttctattctggtgcttctgttgctataaacttctcaaggacaagtgttctcttccttcytcaagtttaatttgaaaaatgtgcagtcaccagcaaatggaattacagggaaatcttttagtgtacagatgggaaagcacacccttttggaattcagattgaatctgtgctttcccaggtttggttttctcagacaaatgccacctatttttacacaggaaaaattctaccagcagttataagtacctctcaaattttgggcacagcaaagaaattatagttgatccttgaacaatgtggtgattagggatgctgacccccctcctccaccaatgcagttgaaaatccatgtataacttcaccaatagcctgctcctcaaaaacttaaccaatagcctactgttggctggaagccttgctgataacacagacagtcaattagcacatattttgtatgttatatatatatattatgtactgcattctcacaataaagtaagctagagaagagaaaatgttattaagaaaaaggtggatgaaatacatttactattcattgagtggaagtggatcatcataaaggtcttcatcttc

SEQ ID NO: 909636 - DNA, 627 bp, Homo sapiens
ccgcagtaaggagaagagtgagaaccaggtgactggggaagccccttataaaaccatcactcactatcatgagaacaasatgggagtaactgcccccatgattcaattacctcccactgggtccctcccatgacgtggggattatgggaactacatttcaagatgagatttgggtggggacacagtcaaaccatatcacacactcttagaggcatgtggctgtatgtgtatgtcactccttggcatgttttccttttggccaatagactcctggaatcttttctattttctcaaaacatgtctttctcttctgagcattaacttaatagttttgtgatgcaataaaactcaaaacaactttaacctgtatctttgctataaatcaataaatgtattacacaaatatttttggtgtaatatttgtgtaaacacatatttttggtgtaatatttgtgtaaacacaaatattagtgttttagaaatgaatacatgttactcatttatgccaatgtgagggtacaagtaatctaattaataacatgcatttatctaaacttgccagctgataggaaatgatctattttacaaaataagttagtctcagtgttctgaacattgagtctcatg

SEQ ID NO: 909637 - DNA, 627 bp, Homo sapiens
ccgcagtaaggagaagagtgagaaccaggtgactggggaagccccttataaaaccatcactcactatcatgagaacaacatgggartaactgcccccatgattcaattacctcccactgggtccctcccatgacgtggggattatgggaactacatttcaagatgagatttgggtggggacacagtcaaaccatatcacacactcttagaggcatgtggctgtatgtgtatgtcactccttggcatgttttccttttggccaatagactcctggaatcttttctattttctcaaaacatgtctttctcttctgagcattaacttaatagttttgtgatgcaataaaactcaaaacaactttaacctgtatctttgctataaatcaataaatgtattacacaaatatttttggtgtaatatttgtgtaaacacatatttttggtgtaatatttgtgtaaacacaaatattagtgttttagaaatgaatacatgttactcatttatgccaatgtgagggtacaagtaatctaattaataacatgcatttatctaaacttgccagctgataggaaatgatctattttacaaaataagttagtctcagtgttctgaacattgagtctcatg

SEQ ID NO: 909638 - DNA, 663 bp, Homo sapiens
gatctggggaggaatactagaaataatacatacggagcacctggcacagtgtctggtacgtagcaaggggcttacraaatggtacatatgattactctcgaaaagcgcagacaggcttaaaccacggcttatgtcattgagtcacattgcacatttctttgttgttccctttaagaacttagagaagtatgattttgaaatgcctactttctaagaggggtagatgagattcaggtaaggcatttagagtgttcagcatacttctagccaatagttggtgctcagtgaattcttagatcccagttggaaatgatgtgagttcttttcctgacattcacctgagcttgaaaacaatgctgagaaattctcctctccctactgctgaacccagctcactctgcccttaactcctatttgctgctctgtgtcttcagagaattgtccaggtctgacctcgataaacggggtctatgaggggaagagtaaaccagggggacagcaagcagtgaattaaccctgacatcccctaaagccccaagatgtttgcttcgtaagattttgagccttgcttttggcttttcctttttttgaataatttggtctctgatgtttctaagcaggcaaatcctcagaccataatgtacaaggactctggcttttatg

SEQ ID NO: 909639 - DNA, 663 bp, Homo sapiens
gatctggggaggaatactagaaataatacatacggagcacctggcacagtgtctggtacgtagcaaggggcttacaaaatggtacatatgattactctcgaaaagcgcaracaggcttaaaccacggcttatgtcattgagtcacattgcacatttctttgttgttccctttaagaacttagagaagtatgattttgaaatgcctactttctaagaggggtagatgagattcaggtaaggcatttagagtgttcagcatacttctagccaatagttggtgctcagtgaattcttagatcccagttggaaatgatgtgagttcttttcctgacattcacctgagcttgaaaacaatgctgagaaattctcctctccctactgctgaacccagctcactctgcccttaactcctatttgctgctctgtgtcttcagagaattgtccaggtctgacctcgataaacggggtctatgaggggaagagtaaaccagggggacagcaagcagtgaattaaccctgacatcccctaaagccccaagatgtttgcttcgtaagattttgagccttgcttttggcttttcctttttttgaataatttggtctctgatgtttctaagcaggcaaatcctcagaccataatgtacaaggactctggcttttatg

SEQ ID NO: 909640 - DNA, 570 bp, Homo sapiens
aaataatttatagagccagaatgtaaactgagggtttctgactccaataatacatttatttcaatgatactgagctcatgattgctaacctttgtgaagctacgacaatcattaaacgatttcctggcaaccacagcttctcctaaaagcattatgtgatttggccttttaaaataaagagaaacagagtgtaatcatatcttgagactctgaaaaatccttagatgtctgaaaatattcacaggtgctggacaaccaagtatatgaatcaataagagaatccctaacttaaagtcttttccactgatattacactggacatatctatccaacatcaagctcagagacagaatgtttagcagtgaagggtagaaactgaagacaaacgcctgagttaaaaaaaaaaaaaagtctctatcatggattagctatgtgaaagtgggtaaatgatttgatttctctgagcctcactttcctcatctataaaataataataattactttgggatttttatataagatattattatrtaatactattatatattataattacatacaatataatta

SEQ ID NO: 909641 - DNA, 643 bp, Homo sapiens
acctttaagaatgaggtacagtgatcactccccttttacagaggagccactgaggcacagagttggcaaggttgctaagtggccaagtttggtttgaagccaacggtatggcttgagtgcccatggctcaaccactcaaccctacctcctctcccaaacactgtaagaacccaaatgtcaaatgcacctagggcaagtcctcgacagaaaggcatggggtgtgaaaagaatgtataattagaggatctgaccaaggcagggagaataccactgaggaattaatgcaggagctgagagcggaaagcagggtagtgaagagaggagagaagagcatcgaggtaggagcaaaagcaagagatccgccaggataaagggcttggagagcaggaggactagaattcagcccatcaggacagagaacataggagggtggcaaacaggaggttatggccccaggcggacaagggaaagacaggaaggtgccaaccatgctggaccgggctaagacagctggggagccactgagggcatgctgcaggggagatcactgggctaatacttgtgagtccaaaagacttttctggctgtatctacacartcatggcacagtcctcccaataggcaggccgacacaaaaccaacc

SEQ ID NO: 909642 - DNA, 640 bp, Homo sapiens
cttggataccctttatatctttctcttgtctgatttctctagctatgacttccagtactatgttgaataacagtggtgaaagtgagcatgtttgtctcatttcagattgtagggagaaaaccttcaggtgtttccccttcactatattagctgtgggtctgtcatatatggcttttattgtgtcaaggtatattcccttgtatacacagtttctgtgggtttttaatcatgaaaggatgttgaattttatgaaatgctttttcagcaaaaattgaaataatcatatcgtttttgtccttgtgttcatatgatgtatcattgattgatttgcatatgttgaaccatccttgcgtaactggaataaatcccgcttggtcatgataaatgctttttttaatgtgttgctgaattcagtttgttagtattttgttgaggatttttgcatctatattcatcagggttacttgcctgcagttttttttttttttttaatgtgcctttgtctggttttkgtatcagggtgatactagcctcctagaatgaatctgcaagtattccttcctcatcagttttatgaaacagtttgagtagcattggtattagtggttctttacgcatttgctaaaattcagcagttaag

SEQ ID NO: 909643 - DNA, 642 bp, Homo sapiens
catcacaattaaaagagctagagaggcagagaaaaaaatccaaaagccagcagaagacaagaaaataactaagatcagagcagaactgaaggagatagagacacaaaaaaaccctccaaaaataaaataaatgaagacaagagctggttttcttgaaaaaaataaaaaatagacagcaagctagattaataaagaagaaaagagagaagaatcaaatacacacaataaaaaaatgataatagggatatcaccactgacaccacagaaatacaaactaccataagtgagtactataaacacctctatgcaaacaaactagaaaatctagaagaaatggataaattctgggacacataccccctcccaagactaaaccaggaaggagttgaatccttgtaatagcaccaataataagttctgaaattgaggcagtaattaacagtctactgaccaaaaaaagcccaaggccacatggattcacagccaaattctaccagaggtacaaagaggaactggtgtcattccttctgaaactattccaaacagttgaaaagcaggggactcctccctaagtcattttatgaagccagcatcaccctgatgccaaaaccaggaggagacacartgaaaaaagaaactgta

SEQ ID NO: 909644 - DNA, 548 bp, Homo sapiens
cttttcttgcctctcttccctcttcagcccacaaactccttgaggtctgagcatcattttgtccatggctttgggcagggtggctggcacagggtaggggtaccacaaataactgttggagtgtagccagccccttgtttagggaagagatgggtctaacagctgggcatgctggtcttgtgatctggatctgagatgccgccttgggtggtgggtagagggatgaccctgagccagccctgttgcaacagatcctcctgaagatcccagatgctccaggtgccatctctaggttagctgtgctgtaggatcacagcagggggacaaattttcacgtgaaaagaacaatcacatcaagcaaaatgctcactcactgacagagatcaatgaagcagacagcaactcattgcaactgctcctgtcctgtcggtcgagaggagagtgcagcrtgacccaacagccctgctgctcccagccgcagacaagccatccttcttggctgctgttttcatcattttttaaaggactgttgagggtgggaggaagta

SEQ ID NO: 909645 - DNA, 606 bp, Homo sapiens
ttcctgccattctcctgcctcagcctcccgagtagctgygactacaggtgcccagcaccatgcctggctaattttttttgtatttttgtagagacggggtttcactgtgttagctaggatggtctctatctcctgacctcgtgatccttggcctcccaaagtgctgggcttacaggcgtgagccactgcacccggccccatatgccatcttttaaggacagtaaaagcgtatataatgtgttttgaaaaagatgtatattttcccgaatatgtaaaagtaacttaaataattataaataaatatatttatgtcgaaacaaaatatggaaaaagcgacttacacattttgagaccttgaaactttggaaaaaactctgcttgatgaaagaacaaggaaacaggccatttgttaaagaaacaatattgaaagctctttaagcagcacctctttgaccttgttaggtttgaaccatccacctcaatctaacattggtatttggctgctggaaatgcttggcaggtagagtgttttggtttcatttgatattctagaatactatgcggctttttcccctgaactatagagctttagatttggtgggcccc

SEQ ID NO: 909646 - DNA, 615 bp, Homo sapiens
taagtaaaaggatcaagtcaaggttcatgatagatttgctttttcagaaggtcattctggctgctgagcagagaagagctcagcaggaagagagagtggatgcaaaattaggagaatgcttcaatagagcaggtgggagatgctgattgtctggactggatgtggcagcacagatgaagaggggatagtttggggtttacccagagtaactatcagggcttgctattgcttaaatatggaggtaagggagagggaaagaaagcattaagaatgacttccaggtttcttagtgggataaccagagggattgggagtgatatgatcagagccaagtggctgtagaaggaacaaaggcaattaatatagaaaaaaaaagttcctcttgatgataggaggccagagttgagtggggacaaccagggaacaattgaacacaatcaatcatgtggattatttttatgtatttatttaattttaaatgttatttttacatttaaacaatttttaaattatcttaatcatttcgattmttttaatggaatatttacagagactatattgctttaagagggcccaaatgcaccaagttgaaatgtttttgggaaaattatgcag

SEQ ID NO: 909647 - DNA, 609 bp, Homo sapiens
aaaggatcaagtcaaggttcatgatagatttgctttttcagaaggtcattctggctgctgagcagagaagagctcagcaggaagagagagtggatgcaaaattaggagaatgcttcaatagagcaggtgggagatgctgattgtctggactggatgtggcagcacaggtgaagaggggatagtttggggtttacccagagtaactatcagggcttgctattgcttaaatatggaggtaagggagagggaaagaaagcattaagaatgacttccaggtttcttagtgggataaccagagggattgggagtgatatgatcagagccaagtggctgtagaaggaacaaaggcaattaatatagaaaaaaaaagttcctcttgatgataggaggccagagttgagtggggacaaccagggaacaattgaacacaatcaatcatgtggattatttttatgtatttatttaattttaaatgttatttttacatttaaacaatttttaaattatcttaatcatttcgattmttttaatggaatatttacagagactatattgctttaagagggcccaaatgcaccaagttgaaatgtttttgggaaaattatgcag

SEQ ID NO: 909648 - DNA, 673 bp, Homo sapiens
agatgtaatatttgctttatatatctgggagttgtgcagttgggtgcatatatatttacaattgctaattctcttgttgaattgacccctttattattatacagtgcccttctttgcctctttttacagcttttaacttaaagacgtttgttttgtctgacataagcatagctatttctgctcacttttggtttccattcgcatgaaataacttttcccatccttgcactttcagtctatgtgtgtctttgcaggtgaggtgagtttcttgcaggcagtatataattgggtctttctttatccattcagccagtctatatttttcaagtggggaatttaatccatttacattcaaggttaataccggtaagtgaggacttttgtcattttattgactgctttctggttgtttggcattcctttgttccttacatcttctcttattgtttatttttgtggttgggtggttttctgcagtgataagttttgattcttttctctttctcctttgtgtattagctctacctgtgagtttttatagtttcacatatttttatgatggtggttattgtcttttcacttccagatgtaagaytgccttaagcatctcttgtaaggccagtctagtgatgataaattccctcagtttttacttgtctgtgaagaggtttag

SEQ ID NO: 909649 - DNA, 645 bp, Homo sapiens
gagacatgacacattcctggataggatgccttagtataataaagatgtctattttccacaaatgcacacaaaaattttacatggtttcagtcaaaayccaaattgggatttttgaaaaacttaatgaaatggttctaaaatttatctgaaagagacaaaatgtctgaaaggcaaaggaagttacataaaagcatatacaaggaacatacgccatctgatcacaaaatttatgatgaagttacaatattttgtgttgtaattctactactgcagacatcctaaagtactgaatatatagttcataaatagactctcatttttaatgtagccacccctgctgtcttttgattattatctgcatagaatatcttttcccactcttttgcttttaacctatgtgtgtcttagtttgaaagtgagtctctgtagacgcatatagttggatcttgatgttgcttttttaaaagatccattctgccaatctgtttttggacggaggagtttaatccatttacatttaaagtaattcctgatagggaagggcttacgattttcattctgttgtttgttttctgttatactttttaccccttgttgcttccattatcccctttgtgtttagttgtgtttttttggtgacacttt

SEQ ID NO: 909650 - DNA, 597 bp, Homo sapiens
tgggtaaaattgatatgtccctgaatttaaaaaaaactgaaagtaaactgaccctgtaaaactcaagaaaactagaagacaacaaatataaatcaatttaaataagaagaaaaatgtgacaaatgtaaacaatcaggaaattagttaacaacaagaaaaatagaattgttgaatcaaaccaagaactggtatttcagaagacaaatctttcagaaatctcaccaagaaaaatagagaaaccataaacatcaagaatgagatgagagattgcacacagatatgaatggaatgaaagaaattataagtttgggggcagaaaagtggtaagtcaagaggaaataggtgattatctaggaaaaaaataagttatcaaaattgatttaagaagaggtaaacacatgagtaaacttctaatgactaaagttattcaaacagccattactaaaaaggaacaaaggaaacrtggttttaaaagacaaatcttttgtagtcttcaagtaatacttagttcttatacattgtactatggtttgaatgtgttccctccaaaattcaggtattgatgcttgacggccaaagtaaagatattaagaggtg

SEQ ID NO: 909651 - DNA, 554 bp, Homo sapiens
ccccagtgtggtggtattgacaggttgggcctagtggaaggtttctgggtcatggaggtggacmcctcatgaatggcttggtgcaattcttgttcttgagatgctggtttggttcttagtgtaattacttcccttgagagttcttataaagccaggcagtccctcaggtttggtgcctgcagaacttaaattaaataaaccccttttctttataaattgcccagcttcaggtgtttccttatagcaacacaaaatggacatgccctctgctagtctcaatttatgccaattactggaataaacaaatagcaagggagattaatcattgaacagtgcttagcctattttctgctgctataacagaataccacagactgggtaatttatacagaaaagagatttatttcttacagttctggaggtggggaagtccaaaatcattgtgccggcatgtagcaaacgtcatctcatggggcaagggtagaagcagaagtgaatgcatgagacagagagaggaaattgggctgaacttttccttttattgggattccact

SEQ ID NO: 909652 - DNA, 554 bp, Homo sapiens
ccccagtgtggtggtattgacaggttgggcctagtggaaggtttctgggtcatggaggtggacacctcatgaatggcttggtgcaattcttgttcttgagatgctggtttggttcttagtgtaattacttcccttgagagttcttataaagccaggcagtccctcaggtttggtgcctgcagaacttaaattaaataaaccccttttctttataaattgcccagcttcaggtgtttccttatagcaacacaaaatggacatgccctctgctagtctcaatttatgccaattactggaataaacaaatagcaagggagattaatcattgaacagtgcttagcctattttctgctgctataacagaataccacagactgggtaatttatacagaaaagagatttatttcttacagttctggaggtggggaagtccaaaatcattgtgcyggcatgtagcaaacgtcatctcatggggcaagggtagaagcagaagtgaatgcatgagacagagagaggaaattgggctgaacttttccttttattgggattccact

SEQ ID NO: 909653 - DNA, 526 bp, Homo sapiens
ccttgggttcataatgtcacagttcagatgcccttgccatccacattgcagcaaaatttcaggacctggaaccttgggttcataatctaacagttcagaaggccccctccacattcttggaactgttcacctcttggaaaccttaaggtaaatctaaccagggaagtttatccccagaagcagatagcatccttgatgcagacagctttttcacaacatcatggatcaagacttctctgctatcatcagactcttaactttccatttttttctttcttattcccccgtgaacaataaaagtgaaaaaggtgtcattggtgtgcactcagctggtatagttttttttgtgaatgattttgcatccagccatatacatgaacaatcttatgccttttagaagaaagatgaagggtcaacctaggtgagaaattttaattgtacatttgttgcctcataatcagtcagaaagagaacattggttcactcattttaacctrcatcataggttaaagagaacattgccagg

SEQ ID NO: 909654 - DNA, 602 bp, Homo sapiens
tgatgaacttactcatgaaagactttaaaccagatattcccaatctactcaaagaaattttaaaaaattsttaaagaactgaaggaaagcatgagaataatgtcataccaaatagaaaatataacacaattgaaattattaagaaacagaaattctggagtggaaaagtacaataactaacttgagaagtacaagagaagtataaacatcttgcctaaaacctttcctcaagctttgtcgctttgcctcaagctccaccaatcattgtattcttcttgaagcaaagcaacaataggttggaagggttttaggcaggatgtttatcaggcaggagctcatttattgtgacatattccctctttaaaaatgtaaatattcttgggaaagtttagcttctcataatccatccaatcttcttgtgcattagttccatgtgactaacagactgactacccttagaatgcagggtcttggttgagtggcagctgtggaggagagtcaagggaaggttcacagccactcttggcatttactcagcatggatacatgagctgcactaaggattcttcgttttgacattttagccagagctgactctgccc

SEQ ID NO: 909655 - DNA, 618 bp, Homo sapiens
tctcctgaagaatgttcttataattagggcacttgagctgtgttaaagtgtttcgctcctccagcggtcatattctactttaatttccttcttgcagtatactctccctccagaccgtaaaagatgttgtggtaaggaagtgacaaagaatgtgaggaaaatgaagaggatactcaaaagcaagatgcagaaacgacgattagatttaccctgtgttgatttccctactccatcgtatggagccgagtgtgctgggaaaggtgctttgtttgttgcccgggtggtgtgtgcgggttatgtgaggttggtccatgtcgtgacttgttccctggaacctggtggcagcagtgttttcataagcaccaccggcatgttgacagttgcgtggagttcagagtccatggaccctggggaccatgacgcccccgtgtgcaggtgacaacacgcctgctgaaggccacgcagtcaactggagaagccagggccggctgctgtgtctatgcaggatgcttctgctcctctgtcccagtgtgaggtgccatgacaacgrtcaggcctctctcagtgcctcagcagccagcccagggcttggaatgctttgttggatagatctgtagg

SEQ ID NO: 909656 - DNA, 551 bp, Homo sapiens
tctgaggaattactatctatggcagttayggatgtatgaaatatatttcttaaatgagactcaaaagtttagatgactccatgggctgaagaatggttgttgtttcagccggcatgagaacaacattcattctccatcagagctcttgggtgaccaggtgcattgtcgatgagcagtaatattttgaaaggaatattttttgggcagtaggtctcaacagtgggcttaaaatattcagtaaaccatgctgtaaacagatgtgttgtcatccaggctttgttgttccgtttatagagcacaggtagagtagatttagtataattcttaaaggccctagtatttttggaatagtaaatgagcattaacttcaacttcaagtcaccagtggcattagcccctcacaagagactcagcctgtccttcgaagctttgaagccaggcattggcttctcctctctagctatgaaggtcttaggtggcatcttcttccaaaagctggctgcttcacctacactgaaaatctgttgtctagtgtagcctccttcatcact

SEQ ID NO: 909657 - DNA, 579 bp, Homo sapiens
ccttcctcctcctgtacctgctggctaggagaggctatgacccatgttccccttcagctgccctagagggcaggtatgtggcatcacagatggagtcttaggctgtcaattctgaggtgtccatggctgtggctttggtgcagttgtgtggttacagaagtggagtcaaagattggggcatgaggccaggcatggtggcttatgcctgtaataccagcactttgggaggccaaggcaagtggatcacttgaggtcaggagttcaagaccagcctggtcaacatggtgaaaccctgtctctactaaaaatacaaaaattggtcagatgtggtcatgggtgcctgcaatcccaactattcgggaagctgagactggagaatcacttgaactcaggaggcagaggttacagtgagccgagatcgtgccattgcactctagtctgggtgaaagagcgagtctctctctctctcacacacacacacacacacacacacactyatgcgcatacacacacacacacacacacacacatatcggggcgtgacttctggatcatgagaaagaagggactggggacctt

SEQ ID NO: 909658 - DNA, 577 bp, Homo sapiens
tttaactatagtattaggagtaaaatatctgtggaaattactgtacagaaatcaattgtaaatcatggcaatttagaattactgtaacaaaagtccatwggacaaagaagatgagagataagggatagagggatgcctatacaggaatcaaatagattctttaatggtgataaatcaattaatcaagatataaatactggaaaaaccaataaaaatataaccaagttaatttggggagtggcatacttagaatactttataatttcatctctggccatagtgggaagttgacactgtatttggaaaaagaagaaggctggctgcgcatggtagctcacacctgtaacctcagcacttcggaaagccaaggcgggaggattgcttgagcctaggagttcgagaccagcctgggcagtatggtgaaactccatctctaccaaaatatacaaagttagtcaggtgtggtggcacatgcctgtggtcccagctactcaggaggctgaagcgggaggattgcttgagcccgggagtttgaggctgtagtgagccacagttgcaccacggcaccccagcctgg

SEQ ID NO: 909659 - DNA, 581 bp, Homo sapiens
ggacctagctctgccaacaccttaattttagaccactgagagcatttaacgcyctggacttctgacatccacaatagtatgacaataactttgtcttaagccacttaggtgtgtgctaatttgttaaagcagcagcagcaggaaatgaatatggcagaaaagaatagaaaaatgaccacaggaagataaggaggcagtagggagcagatgggatttttaacccacgtctttcctcttggaactccttcctgcaagttcagataagaaaatttcatgcagggaatataggagatcccagccataccacccacaaacaggaacccaagagtacttctattagagcctggtacagaggctctcatgatgtggcaccaagaccagtagcagaagtgtcacctgagaatgggttagcaaatcaaattcttggacccatcttctggcagctggaataaaaatcttagagccatggctaacactctggtttgacaagtcctccaagtaagcctgatgtgatgcatgcctgagaaccgctggcttaatgtagctcttggtttagactgagcaaggcatccaaaatgtta

SEQ ID NO: 909660 - DNA, 580 bp, Homo sapiens
tacatatcctcgtctggcatccaacacacatcttaaatctcatattcaaatattgggtaaatgagaggaattccttwattttaatcctcagtacttcctgaacatgcaaacctattagtactataaaaattaatgcctataagtgatatttatgtacaggtattaagaataataatcatgtattattctagtgtgggttaaagataaacagtgtttgataaatatttggaaaaatctaagagcaataaaacaagcctcaaatagtcagatcagaggttcatctataggccacactcttcctaaaatgatatgtattttttaaatagttataggatgagagtggattagaaaatggtactcctgtaaagcatatattttcaacgatttcctaagaaactaaccaacacgacgtagaaagtaataatcacatgaatttattgtaagtatccttcgaggtcagaaagaagggtagaacacaagttcttgtaacactggaattggaattccaggatggggaatgtgttatgtatctcagacgcagaagggaaagaagccaccacgtacagaacggtgaagcctc

SEQ ID NO: 909661 - DNA, 494 bp, Homo sapiens
attggcattcatgtggcgagcagtaggacctagactgaacccctagtgttttggcaacactaccaatactactgttaccactgctgctaccactattactattggcggtactactactaccactattaccactactgctactatcactaatactaccaccactactatgctactactattaccaatactgctaccacccctactatcatcactactaccactaatactaccaccaccactactaccactaccagtacttctactgccactacttttactattattgctataccattattaccaccaccattactactgcaacaattaccaccaccaccactactgccactagttctaccactactctaagagcacccggagcattactccttgtcaacttacacttttgagagtaagcttgtagtttaggaggctgtgytgcacacagtacctcattaaggatgtttggattctgctggctattgctgaaaaaa

SEQ ID NO: 909662 - DNA, 606 bp, Homo sapiens
gcaagatgctgaggagtgagaccaaatgttttcaaggagcacagttgcttaggagacattgtgataatactggaagagaaatctagaatcctgaaaggacaaaagaactggcctaggcctggacagggaagttgccctggccctggagaaatctgatctgcagaactgcacaaatgcctctatccctctaagggagatctcacaccctggcaaggtaattgctgtgaggcaccatttgcacaggctccccagggggccggtgggaccctcttcgagggtcttctcatccttatacactgcttcccctctctaaactctcccaacccctgccgcaatccctatacacaccttcccccaactctcaggacggcaccatcatgtcatgcatcgctgtcatcattatccatttttattaatgacacataggttttatagctcagattttctatttttaggcagaaaaaaaggttgggaactacaggcacacaggattacttcaaacttccaaaataggcaaaagaggytatttgcaatctagacttcatcagtttttctgtgcaaatatatttttttcaataaaatgacctgcacacttggacatgatgt

SEQ ID NO: 909663 - DNA, 588 bp, Homo sapiens
ggtactgagcttaatacctgggtgataaaataatctgtacaacaaaccccagtgatatgtgtttacctatggaagaaacctgcatgtgtacccctgaacctaaaagtttttttttttttttwaaaagaaagaaaatgactttgttagatggactcctgaaggaatgaatgaacaaatggatgaacggtcaaaataatcaagtaaataaagtaatgttttaggctctgtggtgatcgtgagtgctgtctgtcacatgtttccgctcatctaccttctgagcacctgggaaacttgttctgcctggtcccttgtggttggatggggccatatgactggctttagccaatgagctgtgagtagaagtgccatgtgtatcttccaaccaatgagctgtcagcagaagtgccatatgtgtcttctgacccaggaaatgtgagcagaagtaccatgtggtaccatgtgtgtcttccagccaatgagctgtgagcagaagtactacatgagcttccagcaaataagctgtgagcataagcaccatgtgtagccttcagtgaatgagttgtgagcagaagtgccatgtgtggcttc

SEQ ID NO: 909664 - DNA, 674 bp, Homo sapiens
agatggcttcactgttgcctcctttcatccccgtcactaatctgtgaaaaggcagccctcacattaagacactttcctgaagtggcagcgacagctcagtgagggctgctgtgctgcactgggtcggggctgacgttcccaacctcactgctaatgagaagacttgaaagattactgacatgttcatgttcatggaggtggccggaagtaattaagcactcttcaataaagggctaccttggcaagttcaagatttgaatgggaaaagggtgatggctgggctgggtgcacatgttacctgcatctccaagaccctgtccttcttggcgtctttccctgcttatcagaccagttctgggcactgataacaccacagagcatttgctcaatctctatcacctgatatcctgaaaagggagtggaggcctttttgcagacttctgggctcccacagcccttgtgctgcagcatgctgcctgccttctcttctgtcatcaatgaaatatggtggagggagctatgctgctgatgcagcttggaggctgtamgggaccagagtcaaatgggccatcgagggctggctacacagttactgggctggccatgtgatagagagtgcagaccactaaaaggcacatagcagaagaatactgagtaacacagaaaaaaatcaa

SEQ ID NO: 909665 - DNA, 674 bp, Homo sapiens
agatggcttcactgttgcctcctttcatccccgtcactaatctgtgaaaaggcagccctcacattaagacactttcctgaagtggcagcgacagctcagtgagggctgctgtgctgcactgggtcggggctgacgttcccaacctcactgctaatgagaagacttgaaagattactgacatgttcatgttcatggaggtggccggaagtaattaagcactcttcaataaagggctaccttggcaagttcaagatttgaatgggaaaagggtgatggctgggctgggtgcacatgttacctgcatctccaagaccctgtccttcttggcgtctttccctgcttatcagaccagttctgggcactgataacaccacagagcatttgctcaatctctatcacctgatatcctgaaaagggagtggaggcctttttgcagacttctgggctcccacagcccttgtgctgcagcatgctgcctgccttctcttctgtcatcaatgaaatatggtggagggagctatgctgctgatgcagcttggaggctgtaagggaccagagtcaaatgggccatcgagggctggctacacagttactgggctggccatgtgatagagagtgcagaccactaaaaggcacatagcagaagaatactgartaacacagaaaaaaatcaa

SEQ ID NO: 909666 - DNA, 579 bp, Homo sapiens
cggggagaaagtattgttcctagcagcattcagcagtaccatatacaaaaaggagaagcgatgaaaacctaaaagcaygtcttccaaaacttcttcctggagatcttcttctatgtctggcatcagctctcctgctctttccctcttgcatttcttcctgctgcaaacactggttgagaacctactacttccaaggcctagaaatgttattctcaaatgacaggaacacatgaaattgtttccaagctgaatgtccaactaagataacagttgcaaaatgatgccaaaccataaagtgaaatatgagctactcctgaaatacaataaaatggagctatgtgtatttatctgtgtaaaaagtaaagtagaggttcctcttcaaagactttcctccccatctaaataggaataaacagtaacttctcttagaagcgaaatttattcaaagacctgtgctaacattcttaaatgtctgctagccgcaatgaagaaatcaaggtactttatgttcttagctcccacaatttagcttaaatatctgccctggcatgcttatactggtccaaacaagcattaggt

SEQ ID NO: 909667 - DNA, 592 bp, Homo sapiens
tgggttttggagctgtgaaaggaaattaaattttgggaccccaaattcgtttagccaaagagaaaagtcaagctgggaactgggtcacgcaaatctgcytccaccttttggttcctaaacaagatggctacaagatgaaaagctacacgcttccctcatattttgcccacaaggaaattcctggtgagctgttaaagcttccccatggcaatgcaacttgatagcctatctttacaggtgcagtcgctctgcccaccagacacaaatgtataactgaacgttcccctctccattttgtctgtggtatgtaaaatgcacattccccacagttttcctctgccccttttgtttatgtgaaagctgtgtgcttctcaatatctcatcctttcccctttaaatttggagccctcaaaatcaccttcggagaaaggaatagacctgtctcctgggagcatcctcaactttggcaaataaatatcctaaaatgattgagacttgtctcattattttcctcgattgacagagctattttttttttttttaacataaagtcattccctgggcctcaaacagttcctggttgggggaaggg

SEQ ID NO: 909668 - DNA, 592 bp, Homo sapiens
tgggttttggagctgtgaaaggaaattaaattttgggaccccaaattcgtttagccaaagagaaaagtcaagctgggaactgggtcacgcaaatctgcctccaccttttggttcctaaacaagatggctacaagatgaaaagctacacgcttccctcatattttgcccacaaggaaattcctggtgagctgttaaagcttccccatggcaatgcaacttgatagcctatctttacaggtgcagtcgctctgcccaccagacacaaatgtataactgaacgttcccctctccattttgtctgtggtatgtaaaatgcacattccccacagttttcctctgccccttttgtttatgtgaaagctgtgtgcttctcaatatctcatcctttcccctttaaatttggagccctcaaaatcaccttcggagaaaggaatagacctgtctcctgggagcatcctcaactttggcaaataaatatyctaaaatgattgagacttgtctcattattttcctcgattgacagagctattttttttttttttaacataaagtcattccctgggcctcaaacagttcctggttgggggaaggg

SEQ ID NO: 909669 - DNA, 588 bp, Homo sapiens
agaagaaagaagaaatgccttgtgtcagatatcctagttcatcattcttaagtttggccttccataaagcccttgggcagggacaygcttcaaccaaattatttgccaatttataggaagaatggcctttactcaaaatttcaataccttgtttttcagttctatctgagatctcatcagaatggcctttactggccatatctctattagcattctggtcaccaccatttaaccaattcctaaggagttacaaacttcccttagttttcttgccttctaagccctcaccagaatccaggctttttctagcctgctccctcagcttccatcctctgcccattacccagttccaaagccacttccacattttcaggtgttcactatcatcaacaccccactcctggtaccaattttctgtcttagttcgtattgcttataacagaatgcctgaaactgggtaatttataaagaaaagtaatttatttcttacagttatggaggttgagaagtccaaggtcaaggggctgcattttgttgaaaggtccttttgctagtgagggactctgtaaagtcctgaggtggtgcagg

SEQ ID NO: 909670 - DNA, 588 bp, Homo sapiens
agaagaaagaagaaatgccttgtgtcagatatcctagttcatcattcttaagtttggccttccataaagcccttgggcagggacacgcttcaaccaaattatttgccaatttataggaagaatggcctttactcaaaatttcaataccttgtttttcagttctatctgagatctcatcagaatggcctttactggccatatctctattagcattctggtcaccaccatttaaccaattcctaaggagttacaaacttcccttagttttcttgccttctaagccctcaccagaatccaggctttttctagcctgctccctcagcttccatcctctgcccattacccagttccaaagccacttccacattttcaggtgttcactatcatcaacaccccactcctggtaccaattttctgtcttagttcgtattgcttataacagaatgcctgaaactgggtaatttataaakaaaagtaatttatttcttacagttatggaggttgagaagtccaaggtcaaggggctgcattttgttgaaaggtccttttgctagtgagggactctgtaaagtcctgaggtggtgcagg

SEQ ID NO: 909671 - DNA, 528 bp, Homo sapiens
aaaggtgaaatccagcctaaataaataggagtctggggagcttgagcatatttagttagccaaggggaatcactatagcttgtgaacagtccaggaatatgaccttggatttcgaaaaaaaaaaaattgtgggtagtatatgtaagttgttggagcctctgccattgggcacttggtggagtgagattatagggctgtgagccagagcatggtgtagtgaatgggatagatgtgtttgtgtgagaggaaaatatccagtggctgcatagctctgaagattatcagtccaggcaattgtggacaggcaataagtttatgtgatggaggaggtagtgcattcaactggggccgagagtttgcgttgtgaatagtataacaagacacagatgttggaaaaaggggttcaaataatttgcagaccagctatccaggtcaactagytgatgatccatgacacagtgcatgttaaaggcctatcaatcttattgtgtagaaggagtatagaccaagggatacgtagtcattaaa

SEQ ID NO: 909672 - DNA, 648 bp, Homo sapiens
atgaaagtatatttattctacttactaatagtttgcctgggcatgaaattctaggttggaaataattttacctatggttttgaatgacttggtcatctgttttctaacttctagtaccayttttaagaaatccaatgccatactgattctcaatcctttgtattaaatgtaacttttttttcacgaagagtttacaggatgggttgctgctgtatcctaaagtgtcacgtaagtgtgctgaggtgtaggtctatattcttctgttgtgctagatatttgatgggccccttcagtttggaaaatcatgtcctttgaatctgagaaagcttcttggattctttgagcatgctcttccctccatgtgatctcacctccatctggatatcctttaagccagatgttagactccatgggctagtcctctaaattaaaaaatgtcttatatctccaattttctttctttaattattttctgcttacaaatatgtttagtagtagcatttctttatgttaaagaaaaacaaagttcaaatgcccaaccataattatgttaaacacttggtatgcatatgaataaagacaaagggctgctgagcaaatctgaatttaaatagaggtgttgtaggtataattaaccgtaacttattt

SEQ ID NO: 909673 - DNA, 674 bp, Homo sapiens
aactgatatgcatagattaattcatagtattgggaataatacggaatgaacatagtagctgacatttaytgaatgcttacaatgttgttggagctgttctgagcacgttctatgtacaaactttcttgattttctcagccactctatgaagccaggtatcagttagggcttggtggggcttgcttaggataatgggaggtcacatattcttggagctccaaagtgcacaattctcagaaggttgcttggaaactgctgcaaatttccacatctgtctggtgctgatgctcaaacagctaccttccactgatctccaggccaactccagaaagcccatgacagcttctcattggcagaacttccctggaacccactggtatagaaagatggaatgtgagtctccaggccttaccctgtggattaggggagcattttgaaggcagataccccactgaatgtcaacacatagcatctggcacatggagaaactgctattatttccattgtacagaaagaaaattatggcacagagaggtcaattaaccattgatgtgtccaaggttttacaattagtgagtggtggattttaaatccaaacccaggtaatctgttttgtagttcatggttctaaccactttgatcatgcttgcttcctgctaggtgtggcatgggaa

SEQ ID NO: 909674 - DNA, 593 bp, Homo sapiens
gcctgcaatgccttagttttctttcactgtattcaggattaagcctatttgcatatctatttgcccttaaaatcataccatgtgttattattattgtcatcatcaccactaccgccaccatcatcatcactatrttgtaggtcctttttcctccactaatatttgtgtactttttaataatcaaattaaaacaatgctggaagtcacatgtttttgtctcatggaaaatgcctacaatccctaagcccatagccatgtcaaagttctgaaaagccttcaaattaaatgtataggaaagtataatatagtataatataaggtagcagggattagaagtctataaaaatgaagtattgaaaaatttagtaaaatagtacagtagaaaactgaatgctaactttaagataccatacaatgtctttttaaaaatctaccttatatacttgagttatgcctactaaaaagatataaaataaaagctcatgtatttgaggggaactacttagagtgaaattattaaaaattcccagtgcatcaaataaaaatgtactaatgattaattatttcataccttaggccttaaaaaaagtttt

SEQ ID NO: 909675 - DNA, 599 bp, Homo sapiens
tgcctgttcactctgatgacaagtttcttttgctgcgcagaagctctttggtttaattagatcccatttgtcaattttggcttttgttgccattgcttttggtgttttagtcatgaaatcttttttgcccatgcctatgtcctgaatggtattgcctaggtttttttctagagtttttacggttttaggttttctgtttaagtctttattcaggtaattttgtataaggtgtaaggaaggggtccagtttcagttttctgcatatggctagccagttttcccaacaccatttattaattagggaatcctttccccattgcttgtgtgtgtcaggtttgtcaaagatcagatggttgtagacatgtggtgttatttctgaagcctctcttctgttctattggtctatatatcagttttggtaccagtcccatgttcttttagttactgtagccttatagtatagtttgaagtcaggtagcatgatgcctccagctttgttctttttgctyaggattgtcttggctatatgggccctttttttggttccatatgaaatttgaagtcgttttttctaattctgtgaagaaagtcaatggtag

SEQ ID NO: 909676 - DNA, 673 bp, Homo sapiens
acgggttacctgaccgcactaaatccaaaatgagggtaaaaatccctgctgcaaattcctcctggctttgccatcttggccagtcattccaccaaaccgattgtgccttgcagataaaagtcgtaaaactgaaaggcaagtggcagatgcaaactgatttcctaattgatcccttggttcaacctgcatctacagggaagttactgtgtctggcacagtgctggacactgggatacaaacaaagggtgcatccaggaggtccttaagaagaagcagtcccagactgtagaagcctcccagaagaagaagggggagaagtgtgtgaatcatgactctgaagagcatgaagaaagatgtcaccgcagctgggggagtctcctcccaggtttcccagcccagctgcctcacctctggccagcaaggtccactgcacacagaggtaaccactggaacaagcagctggaaacctcagcttctttccctgtaggctccaggagcttctaattcatgtctgttgtccacatgctgaggcttctatccatccctcaacccctgctgcacaggaaacccttcctgcctcttctctggcrttgagcccctgactctcccatccagcttccagctcagccccacatatgtctctctgtgtctgtgtttatcactggtgaatctt

SEQ ID NO: 909677 - DNA, 590 bp, Homo sapiens
tttgcaatattgaaaaatggcaaacgacataatgcttaaccacatgggtattcttatgatgtatttaaaatgattttatgttttgtatcataaatgtagcatattattatgaagccattaaagcaatgttcatgaatggtttttaatggatatgtaacaatgtttataatgtagtgttaaattaaaaaggatataaaattatatatacaaattatattctactatataatacatgaaagtacacataggtgtccaagtaaaatgcttctaatagcgaaagtggtgcaacttagtgtttaataatagttctttaaataattggcagtacatccataaaacataatattgtttagtgacttaaaattatttcataataatacagaaacttatggaaaaacatttaggctacttggttaagtggtcatattagcctcccagggctgcctgggaagagctccacaattagaaagcttaaaacaacagaaatgcmctctgccacagtactgggggtcagaagtcttgatttcagaagtctgatattgaagtattggcagagccatgttccctttgacggctctagggatgaatct

SEQ ID NO: 909678 - DNA, 588 bp, Homo sapiens
tggggggcagggtgtttagactgataaccacttcagctctaattctggggaggggggcaattaattagtttacaggtaacgcyagtgatatgctggcattggctggtactggcttgcatctttgcatttagtaacatcttgttagatgtgtggtcatagtgggagtatttacaccaaggaatttggcaaacgctattaatcagggcttttttttttttctcccagagaataatgtcacccacataccacttgataaatatcagatgtctagtaatattcacagtggagactggctttcatcttactttgactatgtgagaaatcttccttaatggataaagtgaggacatttatttatgtacatttagtattttgcccctgagaacagcagcaaatccaatatttactctaagtgaaagcatccctgtcactataaaccttcaggggagatttgcacaaaattctggcatcatgagtgtaacttgggtaggacaattgctggtggcagctattgttttggtttcctggtaaaccaaagacttcctttagattgttcaagtgcatggttagtggaaactttttcaggca

SEQ ID NO: 909679 - DNA, 607 bp, Homo sapiens
tgtgggatggtatatattatcgtggacttctttgaaaaatacaatttgcagaagtgtggtagagttttttaaaaagtacgctaaagacattgcaagttaaaaaatataaaacagcaacccctggcggttattttaaagcagagggagtccacatgaaaagcaatgcatcaaagggagaaaatggcaatctggagatgtcaactcttacaaattaactcatttatttgtttgttaataactcgttaaacattcagtgtttgccaagttctaggggatatagaaatgggaaaatcaaggttcttgctcttaagaaactcacctaacatggcaaatagctccatcataattttagtaccattgtttaactttgggagcatgccttgtgctagcacagtaagtaattgttagaagagatggcctctgatcagtggcccttacaatatttgctatcacaatgttttcctgggtgtggcctatatggtcagtgtgtatagtctgcttgaatctggtatgcagatctgccaatcacttgcacytggcaagccccattattgctattcacactatcattgatttaaataaccgtggtgcttaacttctcaaggat

SEQ ID NO: 909680 - DNA, 614 bp, Homo sapiens
tatgttgcccaggctgatcttgaactccggtcctcaagcgatcctcccacctcggactcccaaagtgctggaattacaggcatgagccactatgcctggcatcttgactttttatatatgtcatgctaccttctgggactgtctcttctagtgcaggcccactttctttcctggtctcaaggccaactccctcctttcagctttgcctaattttatggctcacaggctttttctgtctcctgttatttgtgtgaacttaaccatgactttttacttgttttaatcgctgtcccatcatggcatttggcaaatagttatgtccatcactcccagctgtttccagtctcccacttgtttctactctcccacgtctacctcaaatcctggcttaggtccccccggatggcaccttccccaggcttctggaacattactttgcctgtgctccacttagctggtccccagtcctctctgctcccattatacgctgccatctatgaccatgccattggcaaaacactcaggaaaaaatgagcatatatgagacacaactgwtacactcctcttccaaggttatcacaatgtattgatgatagtatgaggttatcactaac

SEQ ID NO: 909681 - DNA, 625 bp, Homo sapiens
ctctctatgttgcctaggcttgtcttgaactcctaggctcaagcaatgcccccaccttggccttccaaagggctgggattacaggcatgagccatggtgcctggccttatgtatttttaattttattagacagtgccagatcacctaatgatagcctttgaaagaaacttttaaaactataaattttatgtataagactgatacgagtgattatttaagtgatttctcaaacatgaaaagaaatacaaatatattcaaagtttgccttttggttttagtcctaaaaattacaatttttcctacaggaggaagtttggattaactgtttaattatcagatctttcaaatttcttgtttgtcaaaggttttgagtgtagacaccaattaaaatgaataaactgcaaaaattaaattctatgccaagagtgttacttttttctataatcaatttaccctgtattaagtatttcaagactagaaatgaaaatggaatrggggactggattaaagttgtcttaagtgatggaataatacaaatatgccttgtgagttaccttaggattgatgggtggctgaaaccctgcaacttaacctcaccctgcaagtcggcacagtctgagtaatg

SEQ ID NO: 909682 - DNA, 646 bp, Homo sapiens
gtgacccagtagtagcaaaattgatggagaggaggattttagtttgagtctcctcccccaccaaataaggsgattccagaaagcaagagttagagagtagggagattgacagagggtttgtcatacaagggtaccctcatatgttatcagtataatacataaagccaataggggttgcttctgtagttgatgagggttcaagcccagtggagcccctgcaaggagtatgggatgcctcccagaaaggtctgcttgaaggacaggagggtgcaacatttattcatctgttcccattcccattggttggggatattaacctcctcctcccttgctcccaactactgagaagactccagagcaggcaaaagtgaaagacccaaggtggccatctgaggtgagatgctgcaaaatgcaagatgggtgatatggtttggctgtacccccctccaaatctcatcttggattgtatctcctataattcccacgtgtcatgggaaggacctggtgggtggtaattgaatcatgcgggagggtctctcccatgctgttctcgtgatagtgaataagtctcatgagatctgatggttttataaatgggaattccccctgcacaagctctcttgcctgctacctttgtcttctgcca

SEQ ID NO: 909683 - DNA, 628 bp, Homo sapiens
gggtgcacagggcacagtaatccttgcaagacttctccttccccagcctctctaccggtctgaggatatcattagggctacttatccactttctcctaaaagaccatgagaaataatctcatcactctgtacttctcagcgtctaccagaatgtcaagcctttgagaagacactttccccataccctgacttgtgccctcaggaggttcttcacattccttaagaggactcaatcttccagcccttccttaccaagcagatacttccactgtgtcctctggaatcagcactatcatcagcaaaaccccgtgtacatccagtcttttctcagaaagttctcttctttgagatctgctctcccctgaggaccctgctttctcctgtagtcctcttgaatggtggctatttcctctcccattctgcatggagtatagagttgggaagtatgggagttatcctttctgatttgcatgatctcttcttgatcattttcttccccctttcctaaaaaattctggtcctttgaggtaactgccattaccatatgagttagtctgggttctccagagaaacagaaccaataggctatctatctawctatctatctatctatctatctatctatcta

SEQ ID NO: 909684 - DNA, 615 bp, Homo sapiens
tttgggggaacaggcagtgtttggttacatgaataagttctttcatggtgagttctgagattttgatgcacacatcacccaagcagtgtacactgtgggcagtgcatagtcttttatcccttgtcatcccccattgttttccccaagtcccccaagtccaatgtatcattcttatgcacttgcatcctcataggttagctcccacatgagtcagaacatatgatgtttggttttccattcctgagtgacatcacttagaataatagtctcaaattccgtccaatttgctgcaaatgccattattttgttcacttttgcagttgagtattattccatagtgtgtgtgtgtatatatatatttatcatatatgtatgacatatatatataacattttctttatcctttttctatatatatatataagattttctttatccacttgttgattggtgggcatttgggcttgtttcatatttttgcaattgcaaattgtgatgctataaacgtgtgtgcaagtatcttttttatataatgacttcttttcctctgggtagacacctagtagtggtactgctgaatcaaatggtagatstacttttagttctttaaggaat

SEQ ID NO: 909685 - DNA, 507 bp, Homo sapiens
gacctgtcattcccaccctggtccaaggttttcagcacccgccttctcccagttctgctgagcttgaggctgtggaggtggctggctggtgggggacggaacagggycaccagcttctccaggggaaaggctatcctcttagtgcgcattgcagatgtgaaaaagaaatgccatcttcccaaataaaattaaatacaacccagaggccccaggactgaccctggaaggagaattaagctttctttccttttccagaggactccgtcttcccttgaggtctctgtctggaacccagctgcccgtgtgggcctttgggtacatcgttccctctctgccatctgtagaaaaaaatcatcctttcctgcaatctctgctgctttggcaggaaattcatgtgcaaaagacatctaaaatggctggatggcatcacaaggggaatcaacccagaaggaacaggatcctaaacatttgcatctcaagagagggctggcagcggaggctcgcagg

SEQ ID NO: 909686 - DNA, 566 bp, Homo sapiens
cacttagtgaccgctgggtatttatttattcagaagtggtttcaggtgccractcagtgctgggcatcatgccaggcatggcaatgaaaaaataagcggggtgatgtggcctggcctctccctctctcaagaggcttaaagtccagaaggtgggagacaaggcttgagtaaacaagcacacatattcatgcatccttacaacaagtacatccttccaggaggggtttaaagaattaggctgcatgtccatatctgtggatagaacctgcatagcctcccggctcggggccacatcacatccagtggttggcagcaggctagagtctgcaggaagattcaagctcagggcagcagggaaggaggtgaggagtcaaagacaggagcccctgggttcacccatcgggccagggatgctgaggctccccatgtagacacccagagtgtatagttggcattgggctgggaagcagtgaaggtagaagaagggagcctcgccatgaaggccaggctgtgcagtctccgttccaaggaggatgaccaccttcttcatctgtgctggattaaaa

SEQ ID NO: 909687 - DNA, 566 bp, Homo sapiens
cacttagtgaccgctgggtatttatttattcagaagtggtttcaggtgccgactcagtgctgggcatcatgccaggcatggcaatgaaaaaataagcggggtgatgtggcctggcctctccctctctcaagaggcttaaagtccagaaggtgggagacaaggcttgagtaaacaagcacacatattcatgcatccttacaacaagtacatccttccaggaggggtttaaagaattaggctgcatgtccatatctgtggatagaacctgcatagcctcccggctcggggccacatcacatccagtggttggcagcaggctagagtctgcaggaagattcaagctcagggcagcagggaaggaggtgaggagtcaaagacaggagcccctgggttcacccatcgggccagggatgctgaggctccccatgtagacacccagagtgtatagttggcattgggctgggaagcagtgaaggtagaagaagggagcctcgccatsaaggccaggctgtgcagtctccgttccaaggaggatgaccaccttcttcatctgtgctggattaaaa

SEQ ID NO: 909688 - DNA, 563 bp, Homo sapiens
tgcctcccatcccatggcctccttcctgcgtgtctttacatcatcttacctctgtgcctgtgtccacatttccctcttaggaggacacagcctttggatttaaagcacaccctactccagcgtgaccccatcttcttatatttacaaagaccctctttccaaataaagtcacattcccaggtaccagggattgggacggtaacgtatcttttcaagggacacaattcaagccaccacactcagcatttatgtagcagtgccgggaatgatggcagctttttgggcaggctctgctttgcagcggcaggcaggtgggtggcaggatctgcccagtggcgagtttctcagaaagcatttgttcctctgaaagcatttgttcctctgaggagggggacttcactctggagaaactggctggactctcaaagccttgagagctaatggcagcttctmaggacctacaaaatagagaaaatgaggaaatatcgtaggttgtttgaaccaactattgcctatttaacttcacagaatggaattaagaaaaaggagaagcagaagttaga

SEQ ID NO: 909689 - DNA, 618 bp, Homo sapiens
gtgacaatttccacccagaagaaacgggtgacaattttgagatcctgattcaataggttccccacagatcagtttctcctcrgagaacagaacctcctgaatcttaagaatattaatatctccagggctgaatgtcccagcactactgataaagaacagcctcttccaggaaaaggagcagttttttatctttgctaataaccagccagtctcataaaaactgggagggaaaaaaaatccttaaaaatatttacttaaaaaacaatcaatagacacactaaaaagctcatgcatactgatttctttgatgtgtttttaattgcttaagggtctttgtagaaaaatgagcaaagagcattatttatacatttacatatttagaagagagcaggttaaaaactccaacttcaccagcagcagcaaagaacctttgttgagcaatactgtccccttgtgtccaatcttcacttaatgctttcctaagttaagtacagctgcttgatgggacattctgcagtagtaaacgacttctacattttgctgccctttaagacttgcattcctgcaggaaacatgcatatgcaataccaattctaagtaaggggaaatctgatttaa

SEQ ID NO: 909690 - DNA, 594 bp, Homo sapiens
attatttgcaatattgaaaaatggcaaacgacataatgcttaascacatgggtattcttatgatgtatttaaaatgattttatgttttgtatcataaatgtagcatattattatgaagccattaaagcaatgttcatgaatggtttttaatggatatgtaacaatgtttataatgtagtgttaaattaaaaaggatataaaattatatatacaaattatattctactatataatacatgaaagtacacataggtgtccaagtaaaatgcttctaatagcgaaagtggtgcaacttagtgtttaataatagttctttaaataattggcagtacatccataaaacataatattgtttagtgacttaaaattatttcataataatacagaaacttatggaaaaacatttaggctacttggttaagtggtcatattagcctcccagggctgcctgggaagagctccacaattagaaagcttaaaacaacagaaatgcactctgccacagtactgggggtcagaagtcttgatttcagaagtctgatattgaagtattggcagagccatgttccctttgacggctctagggatgaatct

SEQ ID NO: 909691 - DNA, 576 bp, Homo sapiens
cgaggatttataccaagcaggtttctgggttctcaggcctttggccttggactgatagttacaccattggcatatctggttctgaggctcttggtcttggactgagccacactcctggcatcccagcgtctccagcttgcatggcctgtcacggtatttcccaacctccgtaatcacgctagccaattcttctaagaaatttcttctcatctatctgtctgtctatctatctatctgtctacctaccgacttacctacctacctgcctatctatcttttgattaatctacctatcaatctttctatctatccataacctgttgattcgatctctctagagaaccctgactaatacacctggagtgcagaatctgctggagaaactgccattccgttattgactggctggtcaggccatacagcctggtggtctagatgtgtttggaggtagggcttcygtagcacagatagtgcctgttcatggctctgtcccaggtaaggcagagctagcttgtgctgagggcttctgctttgcagctggcctggggtggctaggatctggggacacaggctgcc

SEQ ID NO: 909692 - DNA, 552 bp, Homo sapiens
atgatatgattatagggatttgatgccacataatgatggaagctagttaaatggtctctgcaaggctgtcgtctttgtgtctggtgctgggatttaaagtccayggggaggcagtgaggaagaggggagggacttgaagtgggagagagtgaggccacaggcaggagccagaatccaggagaacagactggaacctggcgtggggctgtgttctgaacatcatcacctcttcaccttgtaggcaaaggagggattccctgcccaggattttgagcctggtcaaacacaggacaccccaacactgaacaggtgaaattgacaggttgggaggaggacaccatataccattcagtgccacacaggggtttcacccaggagctgagtgaacaagaaaaggctaagggaggcaggctctgtggtatcaagagaatggggtgccccttggcttctgcaggaggagatggttcctgcagagaacagagtcccctaccaacaatagcaggtactgtgcctggctctggtattagggagagcggcttagccaggacacct

SEQ ID NO: 909693 - DNA, 655 bp, Homo sapiens
tcaataactagtttattgagagtttttaacatgaatggatgttggattttaccaaaagccttttctgcatctatttgagataatcacattggctcaaaataaagggatggaggaaaatccagtaagcaaatcaaaaacagaaaaaagcaggggttgcaatcctagtttctgacaaaacagactttaaaccaacaaagaacaaaaaagacaaagatctaactgtcctaaatttacatcatcctatattttacataatggtaaagggttcaattcaagaagatctaactatcctaaatatatatacatccaacacgggagcacccaggttcataaagcaagttcttagagaccatcaaagagacttagactcccacccaataacagtgggagactttaacaccccactgacaatattagacagatcattgagacaaaaaattaacaaagatattcaggacctgagctcaggtcctgaattagatggatttgataaatatctacagaactcaaatggatctgaaagatatttacagaactctccacccccaaacaacagaatatacattcttctcattgctacatgacacttactgtaaaattgatcatattaatcagaagtaaaacactcctcarcaaatgcaaaagaactgaagtc

SEQ ID NO: 909694 - DNA, 646 bp, Homo sapiens
catacaaagacaaaacgcttgaaatgtgaacgctctggcttgggtgtcacaagatttatcccatttactgtattttccactctggatacggctttggggaggcaaacatgtcagaagtcttgtaaaaccttgctataaatattttttaaaacaaatatatgaagtttccatttattttttaggcaacttataaatattcatccatgtcttcaactatgacagggttggttttagagaaaggttcaaacgagtttatatctaaattttagtaggaattggtcagacttctatggtgcctcattttaaattaatctgtttgccaagctgtggtcacttcttgctccccgggggcaggaacttgccttataatctacacactgcaactgaactcagtaaatgaccattaattgaaactcagtaattatttacaagcccttcctattatgaggcatgaagctaagaacttttgcctagattttcttcccacagcccaaaggagagaacgatagtccaacaagcttctatgtctggctcatggggtcctataactctcgccaacatcccttatccacagacctccatactttsaaggcagcagtgtctgcctggacccccccccaccacctcccacagtaaaaaccatgac

SEQ ID NO: 909695 - DNA, 593 bp, Homo sapiens
aagtcacatttggtccaggcatagcagcacttaaagattggtcaagtgcaaagtggctcttgatcagctaacttcagtgaaacacttcagttaaaccatgtatgtgaggtggcactacctgccctaaagtacacaagattttattagcttgcttgtatcaggacaagggataagctactatgttttgcttttgattatctttttttgggaaaggggaaggtatacctggaatctcttttgtttcacccagtagattgggcattaaaactgaaaatttcctttgaaaaaatttcaaaaattagaatgtaattcctttgaccatataattttataagccatttatatgcattatttaatttaacccttccagccaacataggaaaagtttcttttgtaactgagacacagagaggttacatagtttgtggaggtcaccatggttatataacacgttacaatatttgctaaatgcgyctcactagacaataatcctacatatggctatgaaaatagatagctaggcagatgccatgagtggtctatggccttccaagagctggtcactggggggcttaacaccagaggaagcctgc

SEQ ID NO: 909696 - DNA, 604 bp, Homo sapiens
gacaactagtaaattcgttatgtaaagctgkacctccacaactgcaagatatggaaaccaatggcacagatgaaagcagattaataccatgatcacagtacgcatgacatgttctgtaacctattatattatctacaaaatcctctctcatcccaaactcaggataattaaaataatctgattcaatgggcagaagcttaattagggttcaaaccccatgttgaaaggccatgagctatttatatcctgtgccctccaactcatgggctgctgagcaggcatgaagcttaatcaccgagttttatttatattagaatgctgggagcctaacaaaatactttccatgaaggagcagtaaatcccagcgtttatttgctcagtagatgagctagtaagttacacaaaaaaggcttcctgtggaatccaagtaaaaattatattttagctgctatcttagtcattatcatacagcagagttcagttcaggtacaaaacaatggctccaaaaaccaaattattaaaaaataaatgtgtcaaataccccagtattctacatactgaggcaattttgaccctaggatgcctgcctagcgcagtacagaac

SEQ ID NO: 909697 - DNA, 583 bp, Homo sapiens
gtaacattttggatgccttgctcagtctaaaccaagagctacattaagccagcggttctcaggcatgcatcacatcaggcttacttggaggacttgtcaaaccagagtgttagccatggctctaagatttttattccagctgccagaagatgggtccaagaatttgatttgctaacccattctcaggtgacacttctgctactggtcttggtgccacatcatgagagcctctgtaccaggctctaatagaagtactcttgggttcctgtttgtgggtggtatggctgggatctcctatattccctgcatgaaattttcttatctgaacttgcaggaaggagttccaagaggaaagacgtgggttaaaaatcccatctgctccctactgcctccttatcttcctgtggtcatttttctattcttttctgccatattcatttcctgctgctgctgctttaacaaattagcacacacctaagtggcttaagacaaagttattgtcatactattgtggatgtcagaagtccagrgcgttaaatgctctcagtggtctaaaattaaggtgttggcagagctaggtccc

SEQ ID NO: 909698 - DNA, 595 bp, Homo sapiens
gaagaacaggaagaaggggtgtttcggagtggacagttaaggaagtggtcagtgaagtgggagagacagggaggggtgaaaccactacaccttaaaaatgatagcgaggtctttacattttatttcaaytggagcaggaagccattgtccaaaaccaaataataacttgaccttttgcttcctatttgagtctctttaacttattaaaaataagacatacaagctcatatgagtatgtgatatttgatagatattgagttaatatagtttatcagatatttcaagtatttgaagtatccttactgttaccttgccttaggataactacctaaactccttacagactaattgcattatcagagtaatttctcacctgaaaaatttaacattttatatatgcaaaagtcagattgaaaaagaaaacaaaattgtacttagctctaaaactttaatggggtattactgccttcctggatgttgtagaccaccttcttaaatgtgacacatttagcaattctgaatgccagcaggatgttgtagactaccttcttaaatgtgacacatttagcaattctgaatgccagaaggcagctgg

SEQ ID NO: 909699 - DNA, 500 bp, Homo sapiens
caagaagaaatgcttctcagcccccttgcccccaataactggggggtatcagcctttagaaaggatcytccaggctcccaccccagccccagcccctggagcaaaaccacattctcactaggcctctcctgaaaaggggaagtgtaagacgtgacttcccttagaaagacctgagcttctctttttctatgggttttggggtgaggccagcagtgacttaatcccaataaatattaaatgagacataaatccaactttagcaaatgtcacccacagatttttgctaaatcaaacttatttgtattttatttttttaaatggatgaacttcatctcgaaggaatataaaaaaactgacaaaccaaaggccactgaggtccatgcatggactagggaggaaaaccccatgtatttactgccagatccatgccaggagctgtgcttgggcgaagccatagctggtggcataggtattgtcaccccctactcctcacatggaaa

SEQ ID NO: 909700 - DNA, 621 bp, Homo sapiens
acctcttctcttctttaaatttaaggttattaattccaggagctaccactcgttttcaccctgggtaatttgcaagttctttctgggtaaagtgttttgaataagttgaattgcttcagattgttattaattaattaattaattttgggacagggtctcactctgtcacccaggctggagtgcagtggcacaatcatggctcactgcagcctcgagctcctgggctcaagcagtcctccatcctcaggcccctgcatagcttggactgcaggtatgtgacaccatgaccagctattttttgtatttttagaaaagatgggattttgccatgttgcccaggctggactggaactcctggactcaagtcatctacctgccttggcctcacaaagtgctggtactacaggcatgagccaccgcgcccagcctgcttcagatttttaaatcacgattttgccgttgttgtttccccagatgggtttagaaagagtgaaactatgcacatcatatgaaattttcaatgccagaagaagcaattcaacaaaattgttgccataaaatttgtactggagcaagatagaacacytgtttagttatcaattaataccttttcattatgtt

SEQ ID NO: 909701 - DNA, 509 bp, Homo sapiens
ttttcactgtaatgaaccatagtcctgagtctccctgagccctgtgagcccttctagtgagtcacggaacttaagaatggttattggccgggcgcggtggctcacgcctgtaatcccagcactttgggaggccgaggcgagcggatcacgaggtcaggagatcgagacaatcccggctaaaacggtgaaacaccgactctactaaaaatacaaaaaattagccgggcgtagtggcgggcgcctgtagtcccagctacttgggaggctgaggcaggagagtggcgtgaacccgggaggcggagcttgcagtgagccgagatcccgccactgcactccagcctgggcgacagagcaagactccgtctcaaaaaaaaaaaaaaaaagaatggttaygagacaccagaaatagactctaagacagccaggcagaagccaacacccagaacaaaggccaggcacagaaccagtcttttttttttttttttttttttaagacggagtcttgctca

SEQ ID NO: 909702 - DNA, 575 bp, Homo sapiens
aggctgttgtggaacagggctgtccccttggccttctgtgagtgcccactgcacctgttccccttgcctggaatgtcctctccgcactttcatttttctttaaccaatctaaaggacaacttgtcactttccagggcataaattccctgacctctgacaggccaggtcccctgaaattccccgtacagcccccactcctgttgttcatttccagcaggtctcacaattgtaagcaggtcattatttacatgattacttgaggtcttccccaagaccataggcccatgagcacagacacagctggcactactgctcaccgttccaccctgggcaccccatctgtgccgggtctggtccatggcaatgcccaatccatccactttgaatgaatcagtgaatgaatgctcacagacagatacacccccatcttatccagaagacagaaattgtccgctgccatgacctcgggtgtgaagaytgcagaaccatggttaggcacgctgccatagcattccctgagtatctcatgccacctgttctttgggccctaaggtgacttagagtgtggaatcagc

SEQ ID NO: 909703 - DNA, 621 bp, Homo sapiens
taactggttgatcatcactcatgcatcattgaacaccaacactatttcaracaagatctggttaaattgcaaatgagaataaatctggtgataaatggatatcatatttaatatttaaatgtctctggtatttacacatctctggtagttttgttcttagtcaactgtttaagtgaatgttgagaagaaatgaaagaaagatgtttgctcctctttgaaaacaattacggtttccttgcaggaatatgcttatctttcacatttcatcagaaacataagaagtctggctagaggcaatgacactgacgggaagagctctatgatggggaaagactgcttgggaaatgcagccttctactatatacactaaaattatcaataacgttgcaaaaagagaattcaattccataaactaatattgatgcacaaatgagcaaaaatcaacaattggcaataaatgacatcttaaatctgcatttgaagattttacaatagtcaaaaataaacataaaaatttgctttcatattttctaaaatgagtatcagagacattgcatcctctcaaatgacagctattgggacaaccatctctaaggctacatcttacgtttcatatttata

SEQ ID NO: 909704 - DNA, 621 bp, Homo sapiens
taactggttgatcatcactcatgcatcattgaacaccaacactatttcagacaagatctggttaaattgcaaatgagaataaatctggtgataaatggatatcatatttaatatttaaatgtctctggtatttacacatctctggtagttttgttcttagtcaactgtttaagtgaatgttgagaagaaatgaaagaaagatgtttgctcctctttgaaaacaattacggtttccttgcaggaatatgcttatctttcacatttcatcagaaacataagaagtctggctagaggcaatgacactgacgggaagagctctatgatggggaaagactgcttgggaaatgcagccttctactatatacactaaaattatcaataacgttgcaaaaagagaattcaattccataaactaatattgatgcacaaatgagcaaaaatcaacaattggcaataaatgacatcttaaatctgcatttgaagattttacaatagtcaaaaataaacataaaaatttgctttcatattttctaaaatgagtatcagagacaytgcatcctctcaaatgacagctattgggacaaccatctctaaggctacatcttacgtttcatatttata

SEQ ID NO: 909705 - DNA, 578 bp, Homo sapiens
agaagatagacaataagtgaatataaaatatatacagtccartggtggtcagtgtggggagagaacagggtttggggcatgaggcaaaaaaacaatctattaaaaattaacatccaggataacttaacagtttgtgtacaaaatgtgaaattaggatggtgccttattttttagtatcagcctgtctgctcacagcattttcagaaaatttgaattatttggttttatttgagcctgcgcctcatgattaattttcaggataactttctgaggccagacattgaactgcaaatgtcaaaggcatgttttactcacctatggatccctgtgttgtcttcttgcagttttcagtgaagacctacactccagcctctactttgtcaatgcatctctgcaagaggtagtgtttgccagcaccacggggactctggtgccctgccccgcagcaggcatccctcctgtgactctcagatggtacctagccacgggcgaggagatctacgatgtccccgggatccgccacgtccaccccaacggcactctccaaattttccccttccctccttcaagcttcagta

SEQ ID NO: 909706 - DNA, 550 bp, Homo sapiens
ttcatttttttttttttttggcggcataaatatcttcttttgagaagtgtctgctaatatacttgacccactttttgatggagttgtttgtttttttcttgtaaatttgtttaarttccctgtagatcctggatattagccctttgtcggatgggtagattgcaaaaaatttctcccattctgtaggttgcctgttcactctgataatagtttcttttgctgagctgaagctctttagttaattagattccatttgtcaattttggcttttgttgccattgcttttggtgttttactcatgaagtctttgcccatgccaatgtcctgaatgatattgcctaggttttcttttagggtttttatggttttaggttttacatgtaagtctttaatccatcttgagttaatttttatataaggtttaaggaaggagtccagtttcagttttctgcatatggctagccagttttcccagcaccatttattaaatagggaatcctttccccattgcttgttcttgtcacgttttccaaagatcagatggttgtag

SEQ ID NO: 909707 - DNA, 580 bp, Homo sapiens
ttaaacacacaggtgacttttcttactctgtcactctgagtttgggggctgagatattgcatttctagtaatcactcaggtaaggctgatgytgttggtatggggaaccatggtttgagaactgctattcaggaagacagcagagaagataagttcctttagtgtgcataggtggaaaacagttggtagagtgattctggaagagtgcatgcatgtgcattcacatgttttattaacatgtgaatatgaaagatattaagcacccatttgtccattttaaatatataattgtatcccttctgtccaacagcatttcactgtagacatttttaagtgtcagttttttagctgaaaaactagaaaaccaaggaagtaaatcattgcccaagctagacttgatcttttcagcatgtcagagtctcatgctttagaaaaccagagaccactctcactattttgtgttcatcctctttctccatttccagtcactttttctgcactgacttcaggttaatcttccataagagggccttggtgttctcatcttattcctatgcccccactaaattctgagtaagtg

SEQ ID NO: 909708 - DNA, 637 bp, Homo sapiens
tgtgcttttctagttgtttattttttttgtctttcccatcatgttaaaaaaattttcatcactctccaaaatcccagtccatccccaaataawacaaggccctgcagagagtcagctttctggctagagtgcaaggtacatgctgtagccattggacaaaacgaagccaattgggtaacaggatagaaaccatgaccctggctctttatcgatgaaataaccaggcacagacatcacaggttttctctttgccagttcaaaatgccaaaaagggatgcaggggaagaattaatgaagattctctctgatgtagcttctgtactccctccccatagcgtgtgtttgctttttgagtaggggatttgattctgaaatacaccatacttggcaattttctttaaagcttaaactcttagaactaagtctcaggattttcgatggccatgggcaaatgctttttttgtggatactgtttgatgaatgtgcccagttgacgcctatgctcacaatttccacaaggaacatcctgaacctttctaactaaacacaaggccaatgaattatgtgtgggaaactctctctacctctctctctctcttttttaagtatgtagcagtcatggaagttgagccatctt

SEQ ID NO: 909709 - DNA, 643 bp, Homo sapiens
aaaatttaaaaagtgatgctgtttggacacgagatttgttttgtaaacatgaaatttagaatgtctggggattctattaacactttttgaaaagatattgccttgttctagagttcttgagctattatataattgaagtaaatagcctgagaacatagggatttggtgtggaatacatggaagataaagtgatcaagcaagtttaaaatatacaattagtacctaaaataaagtgagtattgttttacatcttcaatctagtagtcggcaaataataaaaaaaggtcaaaagtcccaattatatagtaactatcgaactggaaaaagaaatgaatttgactcttactacttaaaacttttagctgtttatagtaatttaaaccaattgaaaataaatgttccagccagcaaaaatcctttctaagaactatgtgtggtaagaggatacaataaactaatcaaacaaagtttctgaagtctcattaaccacggaatttttagtgaaatggcatggatatrgtatacttggatttatttggaaatgacagaaatttcctaacaatatttgaagcctgttttggtgagtgctatcaagggctgtttttctttttcttttttctagttatatattcagtactataaa

SEQ ID NO: 909710 - DNA, 580 bp, Homo sapiens
tgactgttggcagtcgatcattggatttatacggtttggcattgatcttggagaaggccagtttggtgcccacgtcaaacatgsccaatattctattgtccatgtgactccctagaattaattagaaaacatttcaaaagggccactctaggatttaatactatcaataatagttgtttaacccaaaatatgatgaatctttgctttatttatttctaattgggcagttttgcattttgccgagtaggattaataagcaggttaagtctaattggcttgctttgactgaagggctgaatcatttcaatatagaaacctgtactttttataatttgaaaaaaatccacccaaatcaatcctgaacaatttttattttactttctcaatttttctttttaggtcatttaaacatcttgggtccttttacatgaacagcaagactgatgctttttgaagaaaagtctgtcttcagatagaaaaggcttctgtttgtatagaacaattagctaaaattagcatgtaaatttgaacaatatcatattgtgaagctgattgggcctggaggttgggatgcaagtaa

SEQ ID NO: 909711 - DNA, 617 bp, Homo sapiens
gaatggttaagcatagggaatactttagtaccttgctttacatatactgatgttccagaataattctatgtaagacttcttccctggtaaaatatgaaattttgatcaagcsttcctaaatagtgggtttcatacaatttaggtaacccatgaacttggatggaaagaaaggtatatcatttcactaaattttaaaaactaatattcagttaaaatataagcaacaaatcacagtagtatctgtgactgtcatcagtagagatcataaaatatgtttatatcacattgcagttaatatagaaatactgtttatacttattcaaaattatagtaacacatcactgaatttattgaatgcaacagagaagcacatatatatatcgcgtttactttttatgactgttttaatagaattagttttcttgtaaatcctgtgtatatttaagaacagtattcagagaagaggttaagaagcgtcatcctatagtaaaagagatgtaaggcatagagaaagtttggaacttcttttgtaacagcgataatccaagcttgtctaacctctcagtgagtttagaatgagtctctaggttgtggatattaaggaaaaattgtttcat

SEQ ID NO: 909712 - DNA, 582 bp, Homo sapiens
tgcctgctttttacaaaacatgcatttccaatgacgtcaaaccaagtgagattgcacraggggctctcacttcctgtgcttgtgagcatggctttcagcgtgtgctaaccacagctcctaagtacatggcccacattgagtttcatctgtgtctagattcaagagtagattttagcaagggggcaaattgagccatcaattagcaaatccatcccattcaaatggcagtgcccattgcttccaccaatgtccaggggtcaactgtgtgtctatgctagggctgtggcacccgatgcagccacacctcaaaatgccttctccttgacagttcactgtggcacttttccagagtaatctgagatatgctaagggaggcactgacctccttttgaaatcccataaagggctaattcactttttttttctctctctctcagaccaatttctgagcagcaagcattcagtgtaaacagaagtctggaaataaagaccaatcctaattcttcatgattaaaaatttactcactcactaatttttgctgcttcttatcttcaaaatatctagtcaaattttcaagtttt

SEQ ID NO: 909713 - DNA, 562 bp, Homo sapiens
tttataggtttaattgtagggattttttttcacttctttggttaaatgtatgtccagttttttaaactttttatagctatcataaatgagattgctttctcaatttctttttcaggtcatttgctgttggtgtatagaaatgctactgattttttttaaattttttaaatttttttttttttgagacagggtctcactccaatgctcaggctggaatgcagtagtgtgatctcatctcactgcagccttgaactcccaggcttgggtcatcctcccacttcagcctttcaagtgtctggaaccacaggggtgtggcaacatgcctggctaatttttgaaattttttgtagaggtggcatttcaccatgttgcccaacctggcctccaattcctgggctcaagtgagctgcctaccttggcctctcaaagtgctgggattacaggygtgagccatcaggcccatgctgatttttgtatgttgattttgtatctcacaaatttactaaatactttatcagtgctaacagtttttgtgtgtggaatctttagggttttctaaata

SEQ ID NO: 909714 - DNA, 602 bp, Homo sapiens
ggacacctcaactgttagcttgaatgactggagtgtagttgttttttgggttttcttttttttattgggtttttrttttgttttgttttgtttttgagacagaggctcgctgtgtcatcaggctggagtgcagtggcgctatctcagctcactgcaaaatctgcctcctgggtacaagcaattctcctgcctcagcctcccaagtagctgggactacaggcgcccaccaccacgcccagctaatttttgtatttttagtagagacggagtttcaccatgttggccaggatggtctcaatctcttgacctcgtgatccgcccacctcggcctcccaaagtactgggattacaggcgtgaaccaccacgcccagccaagtttttacttttaataacaaaacattttgaagcctacattaagaccccaggaaggaccttacattaaatatccttacagcttcaggagctttctgaccttgaagaaagggaaaatgaagatagcatggtgccacttccgaagcaaagcctgaagttcttctgtgctttagaagtggtgttgccatcctgtgattgcaggagtcctggcattggcttggtggaggag

SEQ ID NO: 909715 - DNA, 548 bp, Homo sapiens
aagaaaccgcatcaactaacgtgcaaaatcaccagctaacatcataatgacaagatcaaattcacacatcacaatattaactytaaatgtaactggactaaatgctccaattaaaagacacagactggcaaattggataaagagtcaagacccatcggtgtgctgtattcaggaaacccatctcacgggcagagacacacatagactcaaaataaaaggatggaggaagatgtaccaagcaaatggaaaacaaaaaaaggcaggggttgcaatcctagtctctgataaaacagactttaaaccaacaaagatcaaaagagacaaagaaggccattacataatggtaaagggatcaattcaacaagaagagctaactatcctaaatatatatgcacccaatacaggagcacccacattcatacagcaagtcctgagtgatctacaaagagacttagactcccacacattaataataggagactttaacaccccactgtcaacatcagacagatcaacgagacagaaagtcaacaaggatacccaggaat

SEQ ID NO: 909716 - DNA, 621 bp, Homo sapiens
ttcctatcaaatagaaatgatattctttcatgaaatagaaaaaaaaaatcctgaaatttatatggaaccacgaaacaccccaaatagccaaaccaatcctgagcaaaaagaaaaaaactcactgtatcacactacgtgacttcaaactacactacacaactatagtaatcaaaacagcacggtacaggtataataacagacagaccaatggaacacaatagagaatccagaaataaatccatgtatttacagccaaccaattttcaacaaaaacaccaagaacatacactgggaaagtcagtctcttcaataaattgtgctgtgaaaactgaatatctacatgcagaagaataaaactaggcccctacctctcaccatatacaaatattaactcaaaattgattaaagacttaaatgtaatacccaacactatgcaactactagaagacaacatagggtaaatgtttcagcaacttactctgggcaaatattttatggataatacctcaaaagcacagccaacaaaagaaaaaatagacmacttggattatatcaaactaaaaagcttctgcacagcaagaaaaccatcaacaggatgaacagaaaacctgtaaaatggga

SEQ ID NO: 909717 - DNA, 644 bp, Homo sapiens
tttatggataatacctcaaaagcacagccaacaaaagaaaaaatagaccacttggattatatcaaactaaaaagcttctgcacagcaagaaaaccatcaacaggatgaacagaaaacctgtaaaatgggagaaaatctttgcaagctattcatttggtaaggttttaatatccaaaatgtacaaggaattcaactcaacagcaaataataataataataatctaagttaaaaaatgggcaaaggatctgaataaacatttctcaaaaaaagacatacaaatgaacaacgtgtgtgaaaaaatgcccaatatcactaattatcagggaaattcaaatcaaaaccaaaatgagacctcatctcaccccaattaatgtgagtattatcaagaaaactaaaaataacaaatgctggcaaagatatggagaaggataattcttatatattgttgttggtgggaatgtaaattagtacagctattatggaacatggtatggaagttctcataaaagctaaaaatagaactaccaattgatctagcaatcccattactaggtgtgtatgcaaaagaaagaamacaggtatgtccaagagacattttcactcctagcactatttatgttagccaagatatggaatcaaccta

SEQ ID NO: 909718 - DNA, 644 bp, Homo sapiens
tttatggataatacctcaaaagcacagccaacaaaagaaaaaatagaccacttggattatatcaaactaaaaagcttctgcacagcaagaaaaccatcaacaggatgaacagaaaacctgtaaaatgggagaaaatctttgcaagctattcatttggtaaggttttaatatccaaaatgtacaaggaattcaactcaacagcaaataataataataataatctaagttaaaaaatgggcaaaggatctgaataaacatttctcaaaaaaagacatacaaatgaacaacgtgtgtgaaaaaatgcccaatatcactaattatcagggaaattcaaatcaaaaccaaaatgagacctcatctcaccccaattaatgtgagtattatcaagaaaactaaaaataacaaatgctggcaaagatatggagaaggataattcttatatattgttgttggtgggaatgtaaattagtacagctattatggaacatggtatggaagttctcataaaagctaaaaatagaactaccaattgatctagcaatcccattactaggtgtgtatgcaaaagaaagaacayaggtatgtccaagagacattttcactcctagcactatttatgttagccaagatatggaatcaaccta

SEQ ID NO: 909719 - DNA, 617 bp, Homo sapiens
ttaaatttattgttctgttatgaaagttagatattaataagtatctcttctgtgatttgaacaataaaagggtcctcctccacacaaaacataatttgttgtcaaaaacataatttgaaaactgacaaataacattagttaacattaaaatattaatttcaaaaacaaaatacattaaaatgtcactatagttcaccaaaaagacatgtgtttctacttattaaatactttcataaccatttatatggtgataatgctctgaaaataacattttatttcttgaatttgacaataattaaaagtaagcaatgcaaaggctgaatctgcaaaaatgcatttttgagcctagattttattatattagtctatagtagaaattaatttattttgttgatctctttaaatatgaggctgatatttactgagtgcctaataagtacttgctctgttaggcaactcacaatgggtacattttctttcatccccaccatgcacaatagaagccaggccagtgaccataaggatacagtgttaggacacactgctkcatcatccagagggcagagaggactcaggcttactttgttaacccataggcaggacttttgtcccctgtc

SEQ ID NO: 909720 - DNA, 487 bp, Homo sapiens
ccacacacatgcatgcatgcatacatgcacatacacgcacaggcataaacctcaacttgactgaaagacatacactcatgccttttcctgggcataaatactatttgcctcagtctctactgatacactacacataaaatttggtactggataaaagattagaacacacacacacagataaaaaaaatcagactcggagatattggaactctcagatgataattttaataattgatatgctaagggatctagtagaaaaagtagacaaaatgcacagaccctggagaatttcagcacagagataacagtcacatgaaaatgctagaaacaaaatacatgatatccaagatgaatctctttgatgggttattscgccaattggatagcactgaggggggagtaagtaaatctgaaggtaggtcaatagaaattaaccaaactgaaacacacaataagaaaaagaaaaacaaacagaaagagaagacag

SEQ ID NO: 909721 - DNA, 608 bp, Homo sapiens
agaagcaaacctcaaataatgtaaaagaaaataggaaaaataaaagaggctaaaaagagaggagataaacaaaaataacttataaaatggtagacttaaagttgtttctgttaattgcattgttattactaaatrttaatatactaaacatttctattaagaggcagagattatcagacaggatataatagtaagacctaactatatactgcttacaagagaagcactttaaagacaaacagtagaaagtaaatggatgaaaaccatatgcatatagacagaaagcataaaaggttgaagttgctgtactaaaatcagatataacagaccccaaggcaaagcattatatcaaacacattaaaaaattagtgatttatcaagaagatataataattgttaatgagaatgtgtaaaacataatttcaaaatacatgaagcaaaaattgactgtaaatacaaacttataatttcattgtcaaagtagaaaattttaatatttttctctcccagcaattgataaaaacaactagatctagagaaaaatatcagtaaagacacaggacaacattgtccactctcttacctaattgtgtcttaataaaataaat

SEQ ID NO: 909722 - DNA, 610 bp, Homo sapiens
tcgatatctaatgatagaattctagttcctggcttactggtatgggagacagttttgtctggggccagccagtcccatcttggtatcacactttgtaattttctgagcatttgaccttttcttcatgtggtctttgtcaacctacttgtaaggccagcctgcctataaaatggaggactctccaggaccactttaatcggaggtcagaataatttacagttactgtgccagtggtttgtgtgcaatgagatcgtgcatagcttcattagtgagtttactgtgctgggcctttccaaagattgtgtttcttgatttggtccctggataaatttgcaagtgctaatctagttgttgctggagagcatccaaacctaaggcagaactcttgctccttggattgttaggcattagattggcagggtcttggactctggtaaattctgcaggcctaagggagactggtcatccagccaggtgtagggtaaaggaattattgggaaatatacagtaagggaggcctgtgaggtcagtaccttgagggatttgtrctgtgacttccaagtccaaattcaacagagatttagtgcgtgcctactgtgtgccagacacc

SEQ ID NO: 909723 - DNA, 589 bp, Homo sapiens
taaccaagagcaactttctgtaaattaaaaattgttagtgatcagttttgaagcgttgagagcctatcagggaccacatgcctggaatgagcatttaccatgtggtgcctttrgaagctaatattgattctcattattttaaatgattacaaacattgcaggtgttttgtaataatctccattgtctaattagaacatgcgtgaaatgagctcattgtgcctgctaacgaatattggttcgaacagcagagctctggtgcaggggcaagactggggctgtctggccaagttgccggccaatgttacccctttttctccctaaattatgaatcctggggatacaggacattttgacaggcagttattcatggggaggcctaacctgatttgggcctgctccagccttcagtgcctattcccatcaggatattagctgggaaatgtggaatgagtgtcagcaatttgggagccctttcttcctttccgagtccccatttatcttcttccacaatttctcccacatgttcattttaaagtagctctctatctaaatgctttaggataaatctggattgtgtgtcactcattt

SEQ ID NO: 909724 - DNA, 589 bp, Homo sapiens
taaccaagagcaactttctgtaaattaaaaattgttagtgatcagttttgaagcgttgagagcctatcagggaccacatgcctggaatgagcatttaccatgtggtgcctttagaagctaatattgattctcattattttaaatgattacaaacattgcaggtgttttgtaataatctccattgtctaattagaacatgcgtgaaatgagctcattgtgcctgctaacgaatattggttcgaacagcagagctctggtgcaggggcaagactggggctgtctggccaagttgccggccaatgttacccctttttctccctaaattatgaatcctggggatacaggacattttgacaggcagttattcatggggaggcctaacctgatttgggcctgctccagccttcagtgcctattcccatcaggatattagctgggaaatgtggaatgagtgtcagcaatttkggagccctttcttcctttccgagtccccatttatcttcttccacaatttctcccacatgttcattttaaagtagctctctatctaaatgctttaggataaatctggattgtgtgtcactcattt

SEQ ID NO: 909725 - DNA, 589 bp, Homo sapiens
taaccaagagcaactttctgtaaattaaaaattgttagtgatcagttttgaagcgttgagagcctatcagggaccacatgcctggaatgagcatttaccatgtggtgcctttagaagctaatattgattctcattattttaaatgattacaaacattgcaggtgttttgtaataatctccattgtctaattagaacatgcgtgaaatgagctcattgtgcctgctaacgaatattggttcgaacagcagagctctggtgcaggggcaagactggggctgtctggccaagttgccggccaatgttacccctttttctccctaaattatgaatcctggggatacaggacattttgacaggcagttattcatggggaggcctaacctgatttgggcctgctccagccttcagtgcctattcccatcaggatattagctgggaaatgtggaatgagtgtcagcaatttgggagcccttycttcctttccgagtccccatttatcttcttccacaatttctcccacatgttcattttaaagtagctctctatctaaatgctttaggataaatctggattgtgtgtcactcattt

SEQ ID NO: 909726 - DNA, 642 bp, Homo sapiens
ctgtctgggaaggaggcagagagggactcaactcaggtagtggtacagggcttggggtggggtgcttatttatgctttagctggataggagatactgaactcaccattgctctgcaaaaatagcctctctccgttctgtttctcagagaaaaagaagacttcttggatttcattcaattcaacaaatctttattgagtacctgctgggttcagacagtgtaataggtgctggagatggagtaggggtagcagttgtgggtgacagctggcagagtcaagacatattttggtgatactctctgagcagagttgatgatggattggatatgaggatgagggagagatcagtgtgaagaaggactccctgggtgttgatgtgaggagccatcagacgcttggcaccgaaattcctctcctagagagggtggtgtggctccagaatgctggggcagacttcaacgcaaaaactgcacaaagagggcaggggtaggagaggccctgggaggtgttagccamtgagcttgaaccttcgcatttttctctttcttaaaagaagttaccattaaccagtactttcaatttcttctcaacctacccaacgccttctaccttcctgataccccacctctaatggaatatggg

SEQ ID NO: 909727 - DNA, 626 bp, Homo sapiens
gggccggtgcgattacctcgtccatcttcctatctgctcatgtgctatattagtctgttctcacactgctataaagacatgtctgagaacaggtaatttataaagaaaagaattttaattgacttacagttcggcatggctgggcaggcctcagaaaacttacaatcatggcagaaggggaagaggcacattttacatggcatcaggtaagagagagctagcaagagcagggaaaactgccttataagcccatcagatctcatgagaactcactaccacgagaacagcataggggagccaccctcatgatccagtcacctcccacctggtccctccctcaacatgtggagattatggggattataatttgagatgtgatttgggtgaggacacacagccaaaccatatcatgtaccttgctgagaagtggactttccctgaaccctttgttttaaattgcagtcctctccctcagcactcttaattccttcttatctactttattattttttcctgagtacttgtcaccattgggcatactatttgttatatttatgtrtttgtttattatctgtctctctccactagaatttaagagccacaaaggcaagtattttaatctgttt

SEQ ID NO: 909728 - DNA, 651 bp, Homo sapiens
gtgaggggcaaaagtagatgctttatattattgtccacttgaagcamaaacataatgaaagagctacaattcatttattgcacaggcatttgtcaggcacctttaatatgctggctgatatgtgctgggagttgagccttgggcaaacttataactcacacaggaatcagatgagttgtgactccaggagagctgttttttgccctgacaaatactgacatctggttactgacaatgctggaccttagatagtgactgtagtcaagaagagacctgggaaaaagtcctggaaatgctgggcctccctatgtggcttctataaactaaatgtgagtgttattagtacagagtgttattagtacattgtgtgccttgagggggttctaaaggaagcagaggttttaacaattttacacaccctgattcttcatttctgcctgttttttaaacctcttcaagcttaggcctgaaatcagcttcctgctgggatctgcctccctcaatttgcacaggggtctttgtaatgattgccatgagtagtgatctgggagaatgcctgatgttgttgtgtgcatgagtgtccatgaaggatgaatctaacaataaagatgataatatttatatattattattacttattactctctgtga

SEQ ID NO: 909729 - DNA, 635 bp, Homo sapiens
tcccctatgtgaatactggccctaaaaatacaaaaatatctggatgtggtggcgtgtgcctataatcccagctactcaggaggctgaggcaggagaatcacttgaacccaggaggcagatgttgcagtgagccgagattgcgcccctacactccagcctgggcaatggagtgagactccgtctcaaaagaaaaaaaagctagaatagaaactcataatatacgacctcttcttttctcctggctctatcactcccatggcagtctatcatgggggagggagggagaccagaggctgctggagaacgttggaacccttttggtggagggaagttaagcacagtgggatgcggacagctgagcttgggggatttctatttcagaaagtgttggctgaacatggctattttttactgaggtgaaatttatgcaacataaaattaacccctttaagtgtacaattcactggcattcagtacattcaaatgttgtgcaaccaccggttytgtgtagttccaaaacactttcctcaccccaaaataaaatcctgtgtccagctacccccatccccgcaacctgctagctccggggaaatgccaatttgctttctgtccctgtgattgatccattttggata

SEQ ID NO: 909730 - DNA, 651 bp, Homo sapiens
gcaggtataaacagactgtagacctttaggcctgtgaacactgaatatctgaaacaggtctsggttaatttagaaagttcattttgccaaggttgaggatgcatacctgtgacacagcctcaagaggtcctgacaacatgttcctaaggtggtcagagcacaggttggttttatacagtttagggagacatcagacatcaatcaacatatgtaagaggaacactggtttggtctggaaaggcagaacaactcaaagcagggagggggcttacaggtcacaggtagaaaagagacaaatggttgcattcttttgagtttctttttcttcttcttcttttttttttctttgagatggagtctcactctgttgcccagactggagtgcagtggtgtgatcttgcctcactgcaacctctgcctcccaggttcaagtgattctcatgcctcagcctcccaagtagttgggattacaggcacgtgccaccacatctggctaattttggtatttttagtagagatggggtttcaccacactggccaggcttgtctcagactcctgacctcaagtgatccaccagcctcggcctcccaaagtgctgggattacagatgtgagccaccatgcccagcctcttttgagtttctgattagc

SEQ ID NO: 909731 - DNA, 612 bp, Homo sapiens
ggagttataggctgttaatgtgggcaaggtacatgtctttaatgttgttaactattctcattctttgacaaatctttcatttctcccaagcaatatcttgttcacatctgttgccagaaaaagggattccaatccagaccccaagagagagttcttggctctcatgcagaaaggaattaagggcaagtccttgagtacagtgagaagacagagtttattgaagctgctcagtaacagagtaggccatcctcagaaagcaagaggaggaatatgccatctttgttttaaactctccttatgtaggggtcttatctatgtaaaagtaagctatgtctatgtttaggtggactgagagcatgacaacatttattactttgttgacttaaagaaagttttacttggcattttagtgagtaagtacatcaaagcatgactatagctatcataaaagcacacactgttatgtgatagtgtatcacataactttatctttaaagttatgggatctttagtgtatcacttttctggccagaaacmtctgtggctggaggcacctttgcctgagttcttatcttgtgtacaggaagaatgaggtatgcttacaagtagagg

SEQ ID NO: 909732 - DNA, 592 bp, Homo sapiens
atgacttgttcaggtgtatttacctagaaaacagttgattttggaatccaaatgcctgtctcctaattccagagatgggactttgtttatttgacacccacttttgtttatcttctaagttgcagtgtgaggagtgcagtgcagtatgtgatggaagagaaccagcatgtatgtggtggggtgaaagacagacagaggtgtatgaattcacattcttctgctatgcacagtcagctatgggcacctgtaagtacagtctccaaggccactttgctcatatgtaaaaaaaaagaaaagagaaaggaaagcaccaggctttctttctcagttttctttttgctataaatatcagagccatagaaaccctttatttatcaaatatttattgaatcagctctgtgacaggcaccgtgagaggagccggagatgcagacttgagtaaagacgtctcaacccccaggagttcaaagcctagttcaccttctcctcacactcaytgaagacagacaaatcttaatttgtaaaaagcctgatttattgaacagaataatgacaattgagaggtggaaggggtcttaatatatattattta

SEQ ID NO: 909733 - DNA, 624 bp, Homo sapiens
cacttctaaagatgtctcactcattttcacatcagtagatggaaactccatcctttttcttctccagmacacacattctggttcacctttgtttggtttctcttttctcttactctctacacatcaccagtaaatctcatggccctcactttcaaaatgtgctcaaaacgctgcctagtagttctcttaatcgccaattggtcctagacaccaaaatctcttacctagattattgccatagcttcataactaaccctatcatcctcaactcttcctgtcccccagtagacactcaacagagtaactagagtgcttcttcccaaatttatcagtgtcacttttttgctaagaaccctccaaagccttgtatgtactgtggcctacaaggttctccatgactgagcccctcttatcactggcctggcttccctcttgttcatttccttcctacgaacctggcctagatgttattctataacttgccaatagaatttttgccttagggcttttgtacttactctttctgactggaatagattctctcatatatatccatgtatctttcatagacatctgcatatatatggttcataaataatctatatgtttattagagcttaactc

SEQ ID NO: 909734 - DNA, 572 bp, Homo sapiens
tatattcatcagaaatattgtcctgtaattctcttttcttrtagtatccctgtctggttttggtatcaggtaatgctggcttcataaaatgagtttaaaaggactccctcttctccaattttttggaaacatttgagaacaattagcataagttcttctttaaatgtttgatagaatctggcagtgaagccatcaggtccttggctattatttgatgggaaaaattttattactaatttaatctcctcaatcattgatctgttcagatttttttcttcatgattcagtcttagtaggttgtatgtgtctaggaatttatacatttcttctaggttctccaatttgttggtgtataattcttcatagtagtctcacaattctttgtatttctgtggtatcagttgtaatatcttctctttcatttggattttaataaaaaaagaatcaagtagtacaagttacattatctctctccagtgggattatattagaaattaatagtagaaaaatctggaaaatctccaaatacttggaaactaaatacatgtatataaactacctatgggtcaaag

SEQ ID NO: 909735 - DNA, 592 bp, Homo sapiens
ttgggtatacacctagaaatagaattgctagatcatatagcaattctgcattcaattttttgwggaactgccatactgttctccacagtggctgcatcattttacatttccctccagtgatgtacaaaagttccaatttctccacatcctcaccaacactttttacttgctgtttttttaaatataatggctattatattttaaaacattttaattatattattatttttaaaaattatatgttattatatataatatattgtataatagctattatatattacatacaatataataatatatattatatatgtaatacaatagataatatatatcatatatattatataatagtcattatatattttttatatataatggctattatatcctagaaagcataaagtgataccccatgattttaattttcatttcactaatgaggctgagcatcttttcacatacttattggactgtatatctgctttgcaaaagtgtctattaaagtttttgaccacttttgaattgctttgtgttttgttgttgagtcttaggagttcattatatattctggatattaattccttagcag

SEQ ID NO: 909736 - DNA, 614 bp, Homo sapiens
acaatttatttttgttcattactgcttacctacttattgacatttttaaaattaaagtatatatttaaatagttactaaaatgaatatgctagcaattcagaaaatttggaarcacagaaaagaacagagggaaattacccaaaaccctgccaggtaagaataaccactgttgatattttcttctagtctttctccaggtcagacatatttcaagacgatggtcgccctgttcaaaatattttgtagcacacttttctacttagaaatttatccagaacacttttcatatcaaatattattccactgagtgatttaatggccacatggcatcatcccatatgggtgtaacagtgtatattaatgtcccaccagttcacatttgtttctagtttattattgtttttattattaatattcttttaaattgataactcataattatatatatttatggggtaccatgtgatgtgttgatttatgcatataatttgaaataattaaactgagcaaattaacatatccatcacctcatttgcttatcatttttatggtgagacaatcaaaatgtacttagttattttgaaatatacaatacattatgattgactccagt

SEQ ID NO: 909737 - DNA, 583 bp, Homo sapiens
tttcatgattacaactctttaaatatggttcacggtggaggaatgtaataaactattttatgtttttgcgcagccctgtgttttttaaggcaggtaatacttttactcatttgtttagtttrgtacagatagctaccacacattcttccccttcagtcacctacagaattgcatacttcttctcaataaggccaagcacattaaataatttattagttcggttttttcccttggagtcctcatgtttacatcccttcatcctcctgttccaataggaattcgttgttgtctaggtctgccatatcgtgaaacctccctttaatcattattttggagattctctggccactctctgttatttggatcctccctcattccagtgaagtatatttaacagattttttttttttccaagacaagatgccttggaggtatattgtgaagactgtgtttgtgatcaggtcttaattttgccttcatgcttgattgataaccaggcttattagaaatgtttagttaaatatcattttctgtcaaaatttcaaagacataatttcattattttttacttttcttggccaca

SEQ ID NO: 909738 - DNA, 551 bp, Homo sapiens
ctcattatcatgagaacagcatgggaagacccacccccatcactcaattaccccycactgggtcccttccatgacacatggtgattacaggagctacaatttgagatttgggtggggatgcagccaaaccatatcaaacccaatatatttgtggccagttaggaaaggcttcagagaggagatggaaggtaccaataagattgagacgaaagtggacagcttctgaggatgagaaatgaggttagagctaaagtatgtttagggacttgtaactaactatttacataaattgaaagtcattgaggagagaatttggaagtacaggaaaaaaggaattaaagaatctttgaggtaaaaagagccttagaaatctcatagtttgtttcctgaaatggactatttggaaacccaggtttgtggagatattaaaaggcatctcatgatgtacatttcctataatgaagtcgtttaattagtttaaatagcattccaaaagcttttgcacatcaggacttctcagggattttaatatgttaaaatctcctggaacc

SEQ ID NO: 909739 - DNA, 551 bp, Homo sapiens
ctcattatcatgagaacagcatgggaagacccacccccatcactcaattaccccccactgggtcccttccatgacacatggtgattacaggagctacaatttgagatttgggtggggatgcagccaaaccatatcaaacccaatatatttgtggccagttaggaaaggcttcagagaggagatggaaggtaccaataagattgagacgaaagtggacagcttctgaggatgagaaatgaggttagagctaaagtatgtttagggacttgtaactaactatttacataaattgaaagtcattgaggagagaatttggaagtacaggaaaaaaggaattaaagaatctttgaggtaaaaagagccttagaaatctcatagtttgtttcctgaaatggactatttggaaacccaggtttgtggagatattaaaaggcatctcatgatgtacatttcctataatgaagtcgtttaattagtttaaatagcaytccaaaagcttttgcacatcaggacttctcagggattttaatatgttaaaatctcctggaacc

SEQ ID NO: 909740 - DNA, 670 bp, Homo sapiens
ttgacaggaaaggtatatttaccttttatttgtcagcataaaacttcctacactgtcattagaaaaatctttaccaactcatttcatgtttctttgaatcagaatgatttcatttttctgccaaggaaatgttgccaacttcagatgtgcattaagaaaaatggtctggcaagatagcaaattccaatttcctatgatcagagaatcttattacattcatcctctctcttccttcctgttcacataggaagttaaaagatgtttttaggtttgaatttgcttagctctacattctcataaatggaaggtaatgttctgggaactggccaaacactaactacatctaagaaatgaaattctaaagcccaagtttatttctggttgctattgaactttcccatttgttgttaaatgtgcagattgccaagtagcatattgtctgtgacaactttacacaatggtggagatctgcagatggagtgtcttttcacatatgataaatgcctaatttaatgctgatttgtggcaatcaggacaatgctgcaggctctttctgctcagggatgtcttgatagtagacccaggagcagggcatgagctcaggcccaaccatrggtttatgactacagcagtgttgcccactgtccctcttaaaacacttaagctggaa

SEQ ID NO: 909741 - DNA, 673 bp, Homo sapiens
ctcagaaagaagcaatcttagaaaaaaattatgatctatattggaagcaacctaaatgaacttttcatttttctttactttcaactaattttcttaattcttgtatggcaaaaggtayacttacttaaatgatcatttaaaaataaatgaaaacagttacttcgcttaaaaatgactaaagttcaaacttacagcttttgctgttgtattcctcggcccttttacacttcattttctttattgggtcatgcatttgtatgcttctaaataagttactttttttagcagacttttgagataagatacagacagaattgcagaacctgttttatttcctcaggaagaatctcagatgggagtggtgcataagaccagactgcagaacataaaatggttttctcaagtctacactagctagaaagcaatcacccttcttctttctttttatttgacccgaaaggacttgtgtactgatttacacaattctatgccatttgtgtgtgtttatgtgtatgtgtatgtgttatgcaaaaatgagtctttccacagggaattttgctgtatttccttttgactgagtatgaattatgctgtagatagatttatgaaatataatgctaatttggatggtctcatattgacttgtagggtgatactgtcctccttcaaaagg

SEQ ID NO: 909742 - DNA, 549 bp, Homo sapiens
ctcattatcatgagaacagcatgggaagacccacccccatcactcaattaccccycactgggtcccttccatgacacatggtgattacaggagctacaatttgagatttgggtggggatgcagccaaaccatatcaaacccaatatatttgtggccagttaggaaaggcttcagagaggagatggaaggtaccaataagattgagacgaaagtggacagcttctgaggatgagaaatgaggttagagctaaagtatgtttagggacttgtaactaactatttacataaattgaaagtcattgaggagagaatttggaagtacaggaaaaaaggaattaaagaatctttgaggtaaaaagagccttagaaatctcatagtttgtttcctgaaatggactatttggaaacccaggtttgtggagatattaaaaggcatctcatgatgtacatttcctataatgaagtcgtttaattagtttaaatagcattccaaaagcttttgcacatcaggacttctcagggattttaatatgttaaaatctcctggaa

SEQ ID NO: 909743 - DNA, 549 bp, Homo sapiens
ctcattatcatgagaacagcatgggaagacccacccccatcactcaattaccccccactgggtcccttccatgacacatggtgattacaggagctacaatttgagatttgggtggggatgcagccaaaccatatcaaacccaatatatttgtggccagttaggaaaggcttcagagaggagatggaaggtaccaataagattgagacgaaagtggacagcttctgaggatgagaaatgaggttagagctaaagtatgtttagggacttgtaactaactatttacataaattgaaagtcattgaggagagaatttggaagtacaggaaaaaaggaattaaagaatctttgaggtaaaaagagccttagaaatctcatagtttgtttcctgaaatggactatttggaaacccaggtttgtggagatattaaaaggcatctcatgatgtacatttcctataatgaagtcgtttaattagtttaaatagcaytccaaaagcttttgcacatcaggacttctcagggattttaatatgttaaaatctcctggaa

SEQ ID NO: 909744 - DNA, 662 bp, Homo sapiens
cactttttcccatggtcaagcactcctttactaccaaggccaagtaactttcaagtaaactgtttctcaaaagatgtaagattgcctgttgcagatgatatagatccttgctttagatccccatagacttgcaactgtgattcttccacaggggcttgccataatcttcatatatcttttctcaccactgatacctccaacaccataggatctgcctgatcatatggcccaagaggcagggctgcttgcatcacaacctgagcctctagaaaaaccccttcctggtctgagccctctcaaagctggtggcctcccttctgtgtcacctagcacataagctgaagtagtgtctaagtgtgtatgtgttgcttccagaaccaaagagtaggcctaccaggtgttctgcttcctttttgtagcagaggatgcaagatgcatcaatttacccttaacttggaggggttgtcaggggcagtggccttgatgcaaaacccacaggagatgtgaagttgtggcagctggagtctctttgccaagtaccctccaaactgtaggttctcttgaaggsagatctgagcagtgagcctccacagccactctttgggtgttctgatgtctctgtaagctttaaaaagtgcttgccacatgaaaatgatgtaaaa

SEQ ID NO: 909745 - DNA, 439 bp, Homo sapiens
taatattttatttatttattwtttttttgagtaagggtctcactctgtcattcaggctggagtgcagtggcatgatttcagctcactgcaacctccacctcccaggttcaagcgattctcccaccttagcctcccaagtagctgggattataggtgcacaccaccacacctggctaaattttgtattgtttggtagagatggggtatcaccatgttggccaggctggtctcgaactcctgacctcaagtgatctgcctgcctcagcctcccaaagtgctgggattacaggcatgagacaccacgcccgtccccagcctaatattttaaaaagtaaaccaacattcagaaatcgagacacctcacagaaaagtctagaggatctggcaaccatggacctgcatcctagcatggcacaatcgctgagctgagaactagccc

SEQ ID NO: 909746 - DNA, 616 bp, Homo sapiens
gaagccacccaggaaccagctggcccagtgaggtcttccatggaggagggaccttcccaaagcctcaggagtggggactcttgatagggggacggagaaggggagacagggtgtccttccccctttccctaagctccttccatgaagtcaaggccagtgctatctgctttccagcctagactgggtgcagggctctatctgggtctgttcccaggaccttcaccagccttccagaagtttgtcaagagagacctcgggtgacagtgaggtagtgtgcgcagtggtttagcgcacaggctcaggatcaagctgacctgtgttgggatcctgacccaatggtctcctttcttcccgtattacctatggaggtcctattatgtgccaggcactgtgcgtagcaccagagtcacgatgttgaacatcgcattggccagacataaatgcacatggcagctctgctcagtgacacagagcttagagccttaatcagggaggtgcacattacacaagtagcccccawacattcccactgtgacgacccccacatgtgggcgacatagtggctctgtgggctggaagcagtggctcgattatctgaatctcgttattataataa

SEQ ID NO: 909747 - DNA, 513 bp, Homo sapiens
tcaaacagcacatcaaaaagatagtacagcatcatcaagtgggttttataccacatatacaaggatcatttaccatatgtgaaccaattaatgggcttcatcacataaacataattaaggaaaaamacatgatcacctcaatagatgcagaaaaggcatttgaaaaaattcatccacacttcatgataaaaagcctcaaccaattaggcatagaaggaatatacctcaaaataataaaagccatgtatgccaaaccaacagccagtatcatactgaatgaggaaaatatgaaagcattctctttaagaactagaaacaagacagggattcccactttcgccactcatattcagcataatactgtaagtcttagccagtgcaattaagcaaggtaaagaaaataaaaggcatccaaattggaaaagagaaagtcaatatatctctgttgatgatatgacctcatatctagaaaaccctcaagattcgataaaaaaaaagcttagatttgataaa

SEQ ID NO: 909748 - DNA, 621 bp, Homo sapiens
gaatggttaagcatagggaatactttagtaccttgctttacatatactgatgttccagaataattctatgtaagacttcttccctggtaaaatatgaaattttgatcaagcsttcctaaatagtgggtttcatacaatttaggtaacccatgaacttggatggaaagaaaggtatatcatttcactaaattttaaaaactaatattcagttaaaatataagcaacaaatcacagtagtatctgtgactgtcatcagtagagatcataaaatatgtttatatcacattgcagttaatatagaaatactgtttatacttattcaaaattatagtaacacatcactgaatttattgaatgcaacagagaagcacatatatatatcgcgtttactttttatgactgttttaatagaattagttttcttgtaaatcctgtgtatatttaagaacagtattcagagaagaggttaagaagcgtcatcctatagtaaaagagatgtaaggcatagagaaagtttggaacttcttttgtaacagcgataatccaagcttgtctaacctctcagtgagtttagaatgagtctctaggttgtggatattaaggaaaaattgtttcatataa

SEQ ID NO: 909749 - DNA, 608 bp, Homo sapiens
gcaatcctagtttctactaaagtaggccttaaaccaataacggtcaaaaaagacaaagaaaggcattacataatggtaaagggtgataagaagagcyaacaagaagagctaactatcttaaatatataggcacccaatacacgagcacccagattcgtaagttctttctttaaagaacttgctttatgaatttataaagaaagacacctacaaagagacttagactcccaaagaataacagtgggagactttaacaccccactgacatattagagaaatcattaagacaaaaaatttacaaagatattgaggacctgaactcagctctggataaaatggatctgatagatatatacaggactctcaacccagattcaacagaatgtacattcttctcattcctacatgacacttactctgaaattgatcacataatcagaagtaaaacactactcagcaaatgcaaaagaactgaagtcataacagtctctcagactacagcacaatcaaattagaactcaagactaagaaatcaactcaaaaccacacaactatatggaaattaaacaacctgctcctgaatgactcttgggtatgcaactaaagca

SEQ ID NO: 909750 - DNA, 576 bp, Homo sapiens
caattagggagatataatactgcaaccatgtcttagtccaatgaggttgttattacaaaataccataaactaggtggcttatcaacaacagaaatttctttctcacagttgtggaggctgggaagtccaaaatcaaggcaaattcagtttctagaaagggtctgctttccggcttatggagagtaccttcttagtgtgtcctcacatggtagaaagggtgagtgaactaaggatactaatcccatttttaagggctctaccattgtaacttaatcacctcctaaaatcccctaacacctcctaatactatcatcttggggttaggattccaagacatgaatttggagaggaaggatataaatattcaagccacagcaaagtgtatacactgatgctgtcatggagagagccacgaagaccctagcctgattcactgggccaatggcatatctttgaaacatcaggaacattgtctatttataccctgaactaatctaccyaattaataaatcacaattaggtacagacaacctcttgaagtgtgaattccttctttcataagctaagagcaaagaa

SEQ ID NO: 909751 - DNA, 590 bp, Homo sapiens
ctgtgttccactattccttacaggcttaattcttcaaacacttctcatgtatatcctttcttacacttctcttgctttatctcacttgttaaaacaacgaccctgaataattcaactgtccaccayaccaccatgttgactcactatacattcatgaatgaaccctaagtgagactgaagttctgataggtaaccatacactcacatactctcctagatgacttatttctctctcctcatattcccaaaatttcctctcccagccccattctcggttgggaaactttgcttcactaagaaaattgaaacaattagaaaagaacttctatagacttccgttgccatctctggccaactatcagcatttataccaagatcctttgctttcatgccagttacatgaaatggattatctatactcctctaaagcaaatatttccacttgtgaccagatcctatccttcatgaccaattaagagcattgttccagcaattctcccttttctctcttacattagcaatgtttcactgtccactggatcaatcatccacattaacatataaatgttatggcattcttcccatcttaa

SEQ ID NO: 909752 - DNA, 622 bp, Homo sapiens
tatgctatgcccataagcagcttacattttactaatagagataaaacaaaatgccagtgaatataataatatagattaagggacatygtagaggtagatatatattgttatgagaccatatagagaaggcaacctaccccccgaatgtgtaaaatttagccaggcaaagaaactttgtgttcagggaattaataatgtcaactgaagaatcaggtggtttatgaatttggagtggagagttttatttcttacaagaagttgtgtcctacaagctggccaacctgcaggctgggaggcatagcctctggtagaaactgaaagcactttgaaaaagaaaagatgagacaggaatttacatagaatgtgttggctaagtgtacatattccacagcttacaggaggagctacgatattcacaaagcaggggcacacgtgcatagtaaaccaacagtgatattacatgtgtcccatattcactctgggttggagacttaacatttaaatgcattaaaattatgttttatatgtcaaaaggtgaagcagaggatacagaggcaccatgtgtgcagcccctttaaaccagccagaactagtccacagctcatggtcttttatcagaaag

SEQ ID NO: 909753 - DNA, 653 bp, Homo sapiens
cacattttgttcttatatcaaaaggacacagattataaagctgtaaattctccctaatttaatctacatgatcaatgtattctcaatgaaatactgagtaattttgtgaaatttgaccaaacgatacaaaattcacatagagaaataaatatgaaagaatacaaagaaatatgaacaaaaatgatgagaagggactactttgatcagatactgagatagaaaactacagtcactaaaatagcctgatactaatgctttgacagaacaatattctggaataaagagttcagaaacagaaacacaaacaaatacatatggtaacctagtctaagataaaggtagagaaagtggacttcagtaaatgatgagaggtaggctagaatctacctggaaatcaaaacaaaagcagattcttattgcatttcttacactaaaatgacggttagatgggttcaaaatgtaaatgtttaaaaaattattaaaagaaaacacagagtgtggaaaaacataaagcctagaaccataaaggaaacaactgataaaaataaytgcataaaaatataaaacttccttataattaaaaaaataataaagttcaaaggcatcttacaaactggaaaaaagattttcaatacatatgacaaagacctaat

SEQ ID NO: 909754 - DNA, 475 bp, Homo sapiens
cagcacccgccttctcccagttctgctgagcttgaggctgtggaggtggctggctggtgggggacggaacagggycaccagcttctccaggggaaaggctatcctcttagtgcgcattgcagatgtgaaaaagaaatgccatcttcccaaataaaattaaatacaacccagaggccccaggactgaccctggaaggagaattaagctttctttccttttccagaggactccgtcttcccttgaggtctctgtctggaacccagctgcccgtgtgggcctttgggtacatcgttccctctctgccatctgtagaaaaaaatcatcctttcctgcaatctctgctgctttggcaggaaattcatgtgcaaaagacatctaaaatggctggatggcatcacaaggggaatcaacccagaaggaacaggatcctaaacatttgcatctcaagagagggctggcagcggaggctcgcagg

SEQ ID NO: 909755 - DNA, 547 bp, Homo sapiens
gtgcagctgcagccgcctagccctggctcatgacccaagcatcccggcactctcaggtatctgggaagccccctctgccccctgaaggctcagaagtgcctgctgttgctccttggcctctctccactcctggtgcctgctccaattttagagcaaagttgtagttagttccaggctctgtcatgatccagccaggtatgagtgcatttgcatttggggctgcagtgacacaccagctctctgctgcctcggcccccttcagactttggcactgacaaggagggagaccaaggtggggctgagggtggctttgtgcgggcctgcaggtgccctttggcaggaacagcctgggtgccatggatcatatgttgttggtggcaggaggtaaacaggctcctaggtagaaaggggctggtccctggtgaagccttaccttcaagccagggagggcctgcagcctggggactgggytgccagttctgggtgtgacccactgggaagttatggtgctttttctgtgcctgcccgtggctgcccgtgaaccaat

SEQ ID NO: 909756 - DNA, 664 bp, Homo sapiens
aatgatttaatatatgcttaattgatgttctggatgaagaaaagagattaatggtrcagaggaaatatttgacaagataatggctgagaattttcctgaattgatgaaagacaccattccatacattcaagacgagatatagaagaagaaataaaaaccaagcattttatgtaagaagcccagaaagaaaaatgcaaaaagaaaatctctaaagcactctgaggaaaaagataccttcctttcaaataaatggtagtaaaagtggtagctgactttctcatggtgagggaggactgaggaggaatagaggaaattggagttcaataatttacagtttagagttcaatatgctaaaaaaaaaaaactctaccaatttagagttttatactcaacaaaattgtccctcaaaaggtgaggcaaaataaaaatgttttcagacaaacaaaaacacacattttgttaccaggagaacctcattaaaagtaattctaagaaatgtctttaggaacaaggaaagcgattcagaacagaatgcctgggctgcaagtaggaattactaggaataaagtgtaaatatgtaggcacattttaaacaacacttactatgtaaaagtaataatgtggaggaaaaatagaattaaaataatatagaacaataacacaa

SEQ ID NO: 909757 - DNA, 675 bp, Homo sapiens
gaattcaaaaagtttatggaaaatgcatgttatgaaaaactttgaatggatttttaatttyttacatattagtgatttgttataatatgtctgaataggatttagtttgaggcactaagaatgttaatacattagtttgaaaagagctcatatagcaacatgaattctgctaaaattgaagcaagaacgaacatcaagtttatggtgaagctcgggtggaagaatgttgaaatcattgatggtttacaaaaagttgagaaaataacccagagaaatcagtggtttacaaatggataacttgctttcagaagggacaagacaatgttgagaatggagcctgcagcagcagaccacaccatttgcatggaaaaaattcatcctgtttatgccataattaaagaggaccaatgactaatagcagaaacaatagccagcagcatagacatctcaattggtccagcttacccaattgtgactgaaaaagttgagcaaattttcacttgataggtgccaaaaccattgtctgcagatcggctgcaaacaagagcagagctttcaatggaaatattaaaccagtgggatcaagatcctgaagtatttcttcaaagagttgtaacaggagatgaaacacggcttgacttgtgcaatcttgaagacacaatgtaatcaaagcaa

SEQ ID NO: 909758 - DNA, 600 bp, Homo sapiens
aacaacaaaactctgaagttacacagcataatatctgcccccattcttttgttcaaagtgggtcattggagcatcacaaatttaaggggagagaaaatagacttcatgtctcgataggaaagtggcaaggtcatatcacaaggaagtagatgggatggccgatattattataatcatctttgtaaaaacaatctaccactatttatcttctggacataagaattcatattcctgacacttgaaaaatattcttagcctatctccccaaaatctcatcccattttaacattaggctcatactcaagttccaggacttttttatctaaattagatcaggttaagaatgaatcctcttgggtacaaagacctatgaactatctactactccattcctatgcccaacaaacaatggggagatgtctccccgtaatagacattcccaatcaaaaaggggggaacaattacatttaggtcaactgtttatacaaattttgatatccagccagacagatgttgstaatctgtgtgccagtttcaaaaaatttacattgattggggcccactgctggtccctatgaataattctccttagttttttgt

SEQ ID NO: 909759 - DNA, 622 bp, Homo sapiens
gaaatatgaaagactcatatataaacatggggcaaaccatgaagctaaatcttaatgtrtcccaaaccccagagggagcataaggttaactttgggtggccagggtgcttagtgataacattatgagctttctacattagcagggccccctggtgtggttttgtgcctggagatgtaaggttctgaactacaaaggaagcaaacaaaatgaagagatgatgcaaggaggcaaaaaagatggaggcattaggaaaggctttgagggcaggaggcacggggtcatcttctaaaataacctattggaatgcatgttttaataagctttgaagatcaaagagattaacaagaacaagaggaaaacaagggtaaattaggcactattgatggcctgacaaggacttttttctccctttctgcttacaataacctctcattttaccatgtggctagttggtttgtttacttgtttgtttacacttactcattactagctttccctataaagcaagggaaaacactctgtccccaggggccagctgcataacatgaatagatgaaatagaccagaccagatgcaatctgcagtcatgggaactctgaactgaagagaacatgccctcat

SEQ ID NO: 909760 - DNA, 622 bp, Homo sapiens
gaaatatgaaagactcatatataaacatggggcaaaccatgaagctaaatcttaatgtatcccaaaccccagagggagcataaggttaactttgggtggccagggtgcttagtgataacattatgagctttctacattagcagggccccctggtgtggttttgtgcctggagatgtaaggttctgaactacaaaggaagcaaacaaaatgaagagatgatgcaaggaggcaaaaaagatggaggcattaggaaaggctttgagggcaggaggcacggggtcatcttctaaaataacctattggaatgcatgttttaataagctttgaagatcaaagagattaacaagaacaagaggaaaacaagggtaaattaggcactattgatggcctgacaaggacttttttctccctttctgcttacaataacctctcattttaccatgtggctagttggtttgtttacttgtttgtttacacttactcattactagctttccctataaagcaagggaaaacactctgtccccaggggccagctgcataayatgaatagatgaaatagaccagaccagatgcaatctgcagtcatgggaactctgaactgaagagaacatgccctcat

SEQ ID NO: 909761 - DNA, 591 bp, Homo sapiens
ctttgacttgtagactcgccacatcaatctctgcctccattttcacatcactttcttcctkgtgtctttgtgtgtcttctcctctttttaaagatgttttattgaattttgggcccacctggataatccaggataatctaatttagagatgattaactaaacactatctgcaaagaccctttttccaaataaatcatatacacaagttccaagtaaaatttctctatatctatctatccagctagcaagttatattgctatctagctatctatctgatatggtatggctctgtggccccacccaaatctcatctcaaattgtaatccccatgttttgaaggagggagctggtgggaaatgactggatcatgggggcctttcctcccatgctgtactcatgatagtgagtgagttctcatgagatctgattgttttacaaggcagttttccctgctcttgcacactttctcttgcctgttctccttctgccatgattgtaagtttcctaaggcctccccaaccatgtggaattgggagtcatttaagcctctttcctttataaattacccagtctttggcagttcttgatag

SEQ ID NO: 909762 - DNA, 565 bp, Homo sapiens
ataattcagcatctcatgattttgatttccatttctccatatatacattttttggggctctgttctgggatttagggctaacctttgtcatggagacatctgtttttggcagtctttgtttccagggagtgaaaatgtgtgtagaaagaattgaatagctacatcttaggtgacacaattgaggaactggatgaaagatatttgtggaaagcaacataattattcaaactggaatatggccattgccctgggtttcatatttatcttcataagcaaagtggtttgggattctgtgcaagtataaggatttaggatttaaacactaaaccacatccctgcacggagcacatgggctttgttgttgataatcatgatagtcgcacaggaaacttgacagtgacagcaggggaacagcacagtatcctacttggccactggtaggaggatgcaatttaaatcctggcatgcrtagaatagcctcacttatctgtggattgttattgtaatctacatagtaagtttcaatcagaactcagttttgtgcagttgatttccaattcccgac

SEQ ID NO: 909763 - DNA, 563 bp, Homo sapiens
aacataacaggaaatgaaaagagaaatgtgatgctcttcaacaattggtttatggggcctttwaaaaagtgtgtatagagtcaatgatgaattaagatgcagtgtgaaagaaaatgacacaggacagatattcagagatcatttgttcagttttaaaatcagattattagtattgctgttgagtcatttcagttccttgtgtattctggttattaatcccttgttaaatgaatagtagaaaatattttctcccactttttggttgtctcttcactttgtagattgtttcctttagtgtgcagaaggtttttaacttgatgtaatcatgtgtctatttttgcttttgttgcttatgcctttaaggtcttatccccccaaaaatctttgcccataccaatgtcttatagcatttccccaatgttctcttctagtagttgcagaaagcacttgtaatttaacagctcaggaagggaatcaaatcattcagaccaactgaagctttcaaaatgttactgcttgaatgggcagaatatccaaaaacatttattgtgtgatcctaacat

SEQ ID NO: 909764 - DNA, 577 bp, Homo sapiens
ggcctcagaagtcaacctgctgacacattgatcttagattcacagcttccagaactgtgagaaaacaaatttttgttttctgagtcacctagcgtccttctggcacttttttatggcagccctagtgaactaatatagtatattaacttctccacaattttagtgcatatttaaaaatccacccttagggagttgcttactaatctgtctctcacttttaatgctttgttgacgtccacattgcatcagagccatgtcagaataactgaaataatagcacagccagtctggaggtttgggctgtcagattcgtaacccttgatccaactctgtggacatcatcgacatgtacagtttgttacgatctccgctttacagatatgaaaaatggggcttgaagaggctacaatacttgttcgagttcggcaactggagaagggaarggctaggatttgaacctagatggcttgagtcagagggtgtgctcttaacaattatgggacactgtctccctaagcagggaggagaggaactgtgatattgaaactgcctttgcaaaattatgactgagacagtg

SEQ ID NO: 909765 - DNA, 413 bp, Homo sapiens
agtagacactacactaagcagccatcccagactccctatctcagtaagattccgtgtttgtttgtttgtttgagacaaagtttcactcttgttgcccaggctggagtgcaaactcactgcaaactctgcctcccggattcaaccgattctcctgcctcagcctcccgagtagctgggattacaggtgcccaacaccacgcccggctaatttttgtatatttagtagagacagggtttcaccatgttggccaggctggtcttgaactcctgacctcaggtgatccaccygcctcagcctcccaaactgctgggattacaggcgtgagccaccgcacctggcaagattctgtttttaaggtgcattcatcaactacattttgtcacttatctcatttttgtggttatcttcatta

SEQ ID NO: 909766 - DNA, 663 bp, Homo sapiens
tcatagtgctgatctctccatgacttaygttttaggaatcaccacctctcttctaattttctgactaatgttctgttaatgagagaattgtcttaaccctaaaacctgcattccctgagcattctagacagagggtttattttatgtggtggaacgatgatttttgagattgttttgatttaaaatatatgtcaaatgaggtaatgtaccgatggccaaggtatgggtaatttgagtgcaattcgccagaatccgtgccccttggagggagtaaacatttcaggactgcagctaaaacattgacttacactctcctgaagcccaggcacctggcttacacagtgcactaacataactgaagtctgggtttgatcactgtacagttgacaaagaagcagtaagcagaatggttaaaaagtagttctggagccagactgcttaaggtcaggttctggttgtgtcacccactttaaagccttgggcaagctcttctacctggtaactagtgcctcattgtttcctctgtaaaacaggggtggtgatagtagaatctgtatcagagaggttgttgtgaggattatatgcgttaatacggggtaagtggttagaacagtgccagctttataagaaacatcaagtgttaggtgttattatctgttgttc

SEQ ID NO: 909767 - DNA, 645 bp, Homo sapiens
ctttccttgctgtactattccttgtgatttttccttcctatctggagataacccatttctttgtcaatcttgtaaaatccttctttaagactcagctgttgagtcctttcagagcagtgaatgtttccctccataatagcagctccatattatattaagttactgtgttgcactcctgctgtcccccgctgtgcctgcaaccagattggaaaagtgaagagggcaagaactgtgttcatcagaatcctcagagtgaaagtgttccagcagcctgcaaaagtagcagcaaatacgactaggggaagaaggaattgagcatctactcttgaagtgggccgggcaacacaacagagtagaaagcatttttgagcttgctgctggaggcttatgcttgggggtcatggagaatttttagaggagaagttgaaagaggcagacacatgggaacatgggaacacaatgcctatttagaagagagcaagtggcttgggtacaggagagtttccagagggtggggagatgaagctgggcatggtggaccttcaggagtagaccatggaccactagaagcaaacatcatgtcccctaagaccttataagaattgcagaatttgggctyactgaaaaagaatatgcatcgtaaca

SEQ ID NO: 909768 - DNA, 648 bp, Homo sapiens
tgtgagtactgggattacaggcacctgccaccacacctgcttaatatttgtatttttagtagagacagggtttcatgatgttggccaggctgatctcgaactcctgacctcaagtgatctgcccgcatcagcctcccaaagtactgggattactttaacatgagaggaactaggtgtgagccaccatgcccaaccttaattcagttttctgctcaaaattcccccttgagtgaagcctttctttgctatctgatctttcccttactgtgctttatttttttttcagtgatattatattatatatttggttgtttatttatctgtctgcccattagatgagcaggagggcagaatcttctatcctgttgaccatgatatctcaagtaccaaggtctctgttttgtgaatatttgttaaatgctgaatgaatgaacaagtaaatgaatggatgaacactgagtgacacatgaaagcttcctggagaatgtggcaatttaactgaataattggaggtatgaatgggagtcaccmaggcaaagacacaatgagaacaggaattctaggtagagaaagcacatcagcagaagcctgtaaagatgagagagcttggaatgttcttcaaattgcaaacagtttggtgttactgaa

SEQ ID NO: 909769 - DNA, 641 bp, Homo sapiens
gctaatgtcagaaatgtggaagggaattcaaagggagagtttgaatatccagctggacaatgagcrgaccatatattataacagaactctgacctgcaacctctgcagcaatcaaattcagtcagaatttagtcagaatttagtcaaggattgagagcttccctatttttatccctgttcccaacccagctccaatcaggtaaggctggatatactcctcacaacaaacacataagatgccccctcctagttgccatctccggcttctccatatcaacaaatttcagtcagaggatatctgaagagttctcttttttttccctcaccataaagcctccccattcctcttcctgcctttgaatctctgttctatgcaggtgatggtggctgactcctatgtgacagcatgcttgaaataaatagcattcgcttcttctcatttgggttatcttcatttatttccagaaaaggtagcagcactttaccttaaaagcaggagaaaatagctcagataaaaatccaagcctggaaccatttactcttgagtgcagcaaaacacagctcccctatataggtgagtagtgttttctctaaatagttgcaatatattaatataatgtgcgatatcactaaaccagaag

SEQ ID NO: 909770 - DNA, 655 bp, Homo sapiens
gtgcactttcatattttgactcccatagaaatagttagaacgtacacagacaacctcctgaatgttaccttctctaacactttctaaatgttttctgtttgtgattcttttgaacctttcagtctacaatcctctagctgtagaaacagatatttttacattgagtacttatttgtttataggatttatagtcaaggcagcaaatacatttcaacttaagatgcactttaatgcctgctgacaatacaattaaaacgtctcatctaagttggatgtcccaaaaaccttgacaagaaaaccaataaaagtagtcttgcatcgtgtgtcctatttctttggagaataaaaggaatgcagattaattcaatgacaaaccatgggcaaaatattttaattgatcgtcatcaaagagaacataaaatcctccgttcttcaaatacttattactgtttttttttcttttctatttttaatcttgcaagaatcagtgcctggagaactggctcggctattttatacaggcttttgctactcagacaaatgtgacagccctcaaggaaacttaaaaaygtaattaagccccagatggttcttttaacctttactatattatcaaagcactataagctttaaaatttaaaaagtcaatttatcc

SEQ ID NO: 909771 - DNA, 649 bp, Homo sapiens
gtgggaggggggattcttgaaatatgctccgcctctataccttctaatgtgctcagcccctacgcctactctawcttccctttctaacacggtgaatcaaaataattaagccaggagttgactcctatgaatacctcgtgtgatcaagtgcaagggttttgatgaaacaggatgaaaatcaaatactttgctatgtgataatggaaggggaggcacgagggcaggggagatgcaggatagttgttttttgtttttgtttgtttgttttcttaagaactgggtccaaactaaactaacaaagaaaatattctttattaaatctcgctttaggctgtttgtctcaaacaagcaaaaaaataaaaaataaaaacacttgttttgtgagatatgttcactttgccagtaactaacaaccctgagttcttacacaaaagaacccttggggacaaaaatctattcttgcaaagaggtctgagttttacccacagaaaggagtaaaatgattgacaaagagtcttgacgaggatgtcagttacgggcaagtcttcatgttggatgtgagcagggagaggaacacaggagacagcagataagggccaatgacagagaaagcaaaactgattcctgatcactcttcagttaataagac

SEQ ID NO: 909772 - DNA, 665 bp, Homo sapiens
cacattaaattaggtaaatctctcacatttaatttactatccaagcacttttacactactcaagccaatcttttgcaacttacaaatgatttaatgaaaaaaaagctatgatattataaaattcatgcttcttcattttctctccctatagagaagggcaaaacttttcttacgtaaatctatattagatccaaatcatttcaagagatgctactccacaaagaacacacagatggacatatatttaattaatatattcctaaaaaacttcaatacatgatgtcactttgtcctttgtaaatgagaaataaaatttctcaatgtcttcttataagttaagccaattcactttggattagcttagttttaaaataaatgcatacatatacataataaaatactaattcctattgttatctacatataactttcagtgaccacatcttggtattttaattttctttctataagaaacaattcagagtcagacatgaaatatatgtgtgtaactaggtaacaggcaatatttggttcctattctttgacaaggataagctattgagaccaatcagaaccttccaatgtgtttccaatgttcttggctacatttctayttaaactcaaacctcaggaagaatataatctgttaagataacttttgtttt

SEQ ID NO: 909773 - DNA, 604 bp, Homo sapiens
cggaggcagcgagaggaccgcgtccccgagagaggggctgcacggcgcgcccgggccgtcccccgggctcccagctctgtccagccgcccgcgaccgctgcaggcgcctggacagctcctcctggggaccggggaaagcgctcttgggacccaggccgaatgctcccgtttgggcacagcctgggggccggggcgccccagacgctccagggtccccgcctgccttaagcgtctacctcctccccttcaccccacaacacgcgctctctgggccccctttcacccacccacccccaatttctatctccttgtaatctgtgtgtcctgctttaatgttggggggcacgggcgcgaactctgggtcactttgaccccacgcccagcacgtagtaggcgcccagcactcgtgtggagcgactctgggaggaaaactaggaaggagacctgaggagcgccccgctcagctccctggacagamgtaggacccaggagcagggttaatcctcggctgctttgtcactgcgaagtctccagcggagtctgtcagccaatctgcatcatccccgggaaggatctgacccaacaagacaagggaaaaggagca

SEQ ID NO: 909774 - DNA, 647 bp, Homo sapiens
cccaacaagacaagggaaaaggagcagggctgctacttcttcagcagctctcctcggttcggtctccgaataagaaataacaattacatcacgaggccggggcggcagcgcggtggagcctctcggtttcctgcagcctaatctcactgaacccgcctctaaattgggggggccacagattggtgaaacgagaaagtggaaggaggagagagtcatacgaaaccataatttccccttatccttgtatttgctgtttgaaaaatcgtatcctcaacgctccccagacatctcactagaactattaacaccccctcaacacctccccagatgtcaggtttctttttgacttgagcatctagcatttagtaattcgccatgaaaaaaattaccaggggaagcgagtgttgttgctgaaattgtttttgcttgacacaaaaaagctaaagtacagcttagtctcacccgaaattctgaaacggcatgcccgtgttaaaacacttattacataagacaaatgagccgatgaggcactccattcttatatgtaggttttcatatcctgaagaatttgatagcatttggaaatgaagttgctaatgcgcttaaaaaacaaraactatccaagtcatgaaactgtattctgtgcc

SEQ ID NO: 909775 - DNA, 639 bp, Homo sapiens
gtgacagaagcctatgagtgaaatgtcttttccatattttttagctatcactctgtcaatacacgcacttgaaactggatgcacttgagaattaaaagatgttagatctataaagcattagaacagtgtctactaggtactactcaataaatactgtctactttgctgaagtaataagtatattaataacaaaatttttaaatattgaattaaatttttttattgtatatacagaagctccttcaatgctatcttttattttcaccatggcttcacattagcctatcacaaaattctactccttacctacgatctcagtgagaggttcttgcattaggatgtactaagaacaccaaagaatctaaagaactcacggttatggcaatttctacaatgaagataaacagggattatgcagtttggttgacattcaggtctccagtatgtgctctttggcctttcgtggtcacactatgtgctgctctgcttctatttatatcatcttcatcaaataacaggcctagtaggagaattgkaggcagggggtgaaggaaaaaacaaaatgtatgaaaccttcaaccaaacacagtgactttatgttaccagtactggtgggagatttgttataggactaaaaaa

SEQ ID NO: 909776 - DNA, 597 bp, Homo sapiens
cttcctctaattcctgaaatggaaagtgctatgtgcgttatgttattggggttctgtgcctcagggtcttcattgtaaaataaaatattgatagtatttatttcacagagctcttattcaggtcatgagaataaagtacttggattgaaagagcttagtaaaaagtggcacaattagacaaataagattagttgatagaaatcactacaagtacctccacttacagtttttatcccactgaggatgtcagaatcttaactttaagttagtcaagagtttaagagtcaagatatcaaatagtctgatatctgaaaagggtctgtttataaaacttgaagaaaacaacagaaggtttttttttggatatgaatgaacatgctccacaaaataaccaaatttactttactgaaattcagaataagaaatgaatgctgattatatggaataaggcaagacaatatgtaacaggtttttaagttaatttcttccttctccrttttgatgaaagcactgcatttgcatgatttgatttttatgtaacaaagcctatattcattatgttgcaaaggagcaattcactctgccgacaccctgaca

SEQ ID NO: 909777 - DNA, 566 bp, Homo sapiens
tgaaataaaaaaaaattctagctatakgcagaaccaaaagaaaatgggtaattgtttacaacgttctgaatgagctaagaacatcacatgagccaaattgatgtcatttaagcatgaagtcaacattttcagtattctaagaatagcagctagcacccactgaatagttgctctgggttaagtccttttctttggcctttacaggtattattgcactcaatcctcataataatctcacgagagaaggtacagttgttatgaacaggtaactcaatagacctctctgtgtcacctagcatttctctgcttaaacactgggaattggggcctgtggtcaagcagagcctaaatttgcagaaatggaaaaatacagaacttgcaaacaggttgtgatggttaatactgagggtcaacttgattgtattgaaagatacaaagtattgatcctgagtgtgtctgtgaaggtgttgccaaaagagattagcatttgagtcagtgggctggggaaggcagatccacccttaatctagtgggcacaatctaatcagctgccaatggtaaagcag

SEQ ID NO: 909778 - DNA, 607 bp, Homo sapiens
gtcctgaaatgtgttttccaacttttttccattctccccatctcttccaggtactccaatcagtcgtaagtttggtcttttaacatggccccacagttcttgaggttttgttcacaacttttcattcttttttctctaatcttgtctgcctgccttatttcagcaagattgtcttcaagctctgatattctctcttccacttggttgatttggctattgatagttgtgtttgcatcacgaagttatcctgctgtgtttttcagctccattaagtcatttatgttcctcttgaaactggtttttctagttaacagctcctgtaatcttttatcatgtttcttagcttccttacattgggttagaacataatactttagcttagtgaaatttattattaccccctttctgaagccacttctgtcagttcatccatctcagcttcagccctatttagtgcccttgctggagaagtgttgtgatgatttggaggaaaagaggcattctggcttttgggattttcagcatttttgtgctgtttttttcttrtctttgtggattcatctacctttgatctttgaggctggctgttgacctttggatttctgtg

SEQ ID NO: 909779 - DNA, 611 bp, Homo sapiens
gcaacccaaacccaaattgaaaccatatcacttcaataggaacatcaattattgttgacagtggagaagaaaggaaagcactgaatcaatagttcttctattcagtccttttgtaayaaaaatgcagtctctccaaacaatttttttaaaggactctaaaagaaggtatgttaaagaagagcagaaataaaatgaagattttaatggtagccaatgcctagaaaagactaagagctgttttaccagtttattttagtatctttgtgagaagtgccaatgggtggtaaaatgaatgcttcacaaatgtcatcttttataggaccatgagatttggtgaaagtaaatcccatttacaaaaaggcagtaaatttgctttggctttaatttgttatttcaaagcctttatgtcaccttatggtatttacttcatgttctcttaaagatatattgccagaaaataacttctcataaggcacaaaattatatgagctgtctctaatttttgcagactctttgttataagccagtgtattagtttgctagggttgctgtaacaatagtcatgtatcgtctccaagctctgaatgctaggagttcaaaatccagatatt

SEQ ID NO: 909780 - DNA, 648 bp, Homo sapiens
gaagggagtggtcatggggaagggcccagagggaaagagatgggatgaaaagccttcattcagatggaragaaagagccatgattctgtccagaagtgagggaagcctctgttagaacacccacggtgagagactgggcatgagaagacctgctgctcatgaagctctgggccttgggtacaattctgggatacaccatagacccgtgcatgaccttacaagtcatcgcaccattgggcactcacctggacagggagaaattgaaccacagagctccaagatcccttcctgtgataactttctatgcctactgtaaaattgtattatttaacactttttttgtcacttacattttgtagtttccccttaatttctgttgactttatggaaacagcctacatacatgtcatgataagggttttgtagagtttttaagcttctaatgtttcaaaatttaatacaatgcattagatcataagcatttgtaacacatgacgttaagtgacactgaaagaaaaactgtattcgtgtcacatccacagggtgcagtttagcactgtctgtggagtctgatagttttgaggtctccagtggggttgcagatggtgctgtaagttggaacaaccactgaagtcttaaattacctta

SEQ ID NO: 909781 - DNA, 648 bp, Homo sapiens
gaagggagtggtcatggggaagggcccagagggaaagagatgggatgaaaagccttcattcagatggagagaaagagccatgattctgtccagaagtgagggaagcctctgttagaacacccacsgtgagagactgggcatgagaagacctgctgctcatgaagctctgggccttgggtacaattctgggatacaccatagacccgtgcatgaccttacaagtcatcgcaccattgggcactcacctggacagggagaaattgaaccacagagctccaagatcccttcctgtgataactttctatgcctactgtaaaattgtattatttaacactttttttgtcacttacattttgtagtttccccttaatttctgttgactttatggaaacagcctacatacatgtcatgataagggttttgtagagtttttaagcttctaatgtttcaaaatttaatacaatgcattagatcataagcatttgtaacacatgacgttaagtgacactgaaagaaaaactgtattcgtgtcacatccacagggtgcagtttagcactgtctgtggagtctgatagttttgaggtctccagtggggttgcagatggtgctgtaagttggaacaaccactgaagtcttaaattacctta

SEQ ID NO: 909782 - DNA, 619 bp, Homo sapiens
cttgctatgttgcccaggctgatcttgaactccggtcctcaagcgatcctcccacctcggactcccaaagtgctggaattacaggcatgagccactatgcctggcatcttgactttttatatatgtcatgctaccttctgggactgtctcttctagtgcaggcccactttctttcctggtctcaaggccaactccctcctttcagctttgcctaattttatggctcacaggctttttctgtctcctgttatttgtgtgaacttaaccatgactttttacttgttttaatcgctgtcccatcatggcatttggcaaatagttatgtccatcactcccagctgtttccagtctcccacttgtttctactctcccacgtctacctcaaatcctggcttaggtccccccggatggcaccttccccaggcttctggaacattactttgcctgtgctccacttagctggtccccagtcctctctgctcccattatacgctgccatctatgaccatgccattggcaaaacactcaggaaaaaatgagcatatatgagacacaactgwtacactcctcttccaaggttatcacaatgtattgatgatagtatgaggttatcactaac

SEQ ID NO: 909783 - DNA, 655 bp, Homo sapiens
taaatgaaaccgatcactttttcagggttcccacctaaggacgtagcatgccatagtcatctctcctgtcttgttctccrctatcagccatatccaatccaacactgtctagtgcattcattgcaattttattgttaggtatagtatgaataaactaacagttagtgtattccctgattggttgggtcactgtgggagacagagcccattatcgaaggatagaaactgagcaggagcaaatattttctttcctttcttccagagccatcaagtcactggctcacaaattaggctatggaacatggattccccagctaggtctttgactcttgagatgtaaagatgcaaagatgcaaaaacagtttgtgattgtccacagttgacatggtgagattgagagtccagtgtgctgttcttaccagcctattcctctggaatgactttggctgttttcttggctacctactgttcttttgttctcatgtgttttccaacatcaattttcccatttcgcatcaattctgttagtgtcctgatatctttccaataaattccttatctgctggggttggcttctgttattctcaaccaagaatcttgatcagcacaattgctaaagactttcagttttctttcctaattatcttggagactc

SEQ ID NO: 909784 - DNA, 590 bp, Homo sapiens
tagaatgtagcacaatatctggtaaatgtgtaagtgctcattactgttgatagtagcaaagacatggaatcaagctacatgcccatccrtggtagactggatatagaaaatgtggtacatatacaccatggaatactatgcagccataaaaagaatgagaacatgttctttgcagcaacatatatggagctagagggcattatccttagtgaactaacacaggaacagaaaaccgaataccacatattctcacttacgggcacctagacattgagtacatatgggcacaaagaagggagcaacagacaccaggggtcaacttgagggtggaacgagagaagagggtgaggaccgacaaactccctgttgagtactatgctgattacctgggtggcaaaatattctatacaccaaacccccatgacacacaattcacctacatgacaaacctgcacgtgtagctgtgatcctaaaagttaaaaaatagtgtaagtgctcattaaatggttagctcatgttctctttccttcttaaagtagtaggtttttcattgattgattgcttcatttgttcagaaaatatttgaatac

SEQ ID NO: 909785 - DNA, 617 bp, Homo sapiens
aaatggttagctcatgttctctttccttcttaaagtagtaggtttttcattgattgattgcttcatttgttcagaaaatatttgaataccaagacccatatctagttctggggctatggaggttttagttagacctacagctagaactacagaggaggtagatacagacaaatatattcaatactacttgctaaagactgcaatggagagaagatcagaaatttataggagcacagaggaggagcagctgcttggctgtgagggcaatgatgtcaaatttgccagttctgcctttaagcaagtcctttaggttctatggccctcaacttattatatgtaaaataaggctaataaggattttatcctcagtttttgtcacagttaaaggtggtaataaaaaggtatagacatatatacatatatttttatatggagggaaatgattggatcatgggggaagttcccccatgctgttctcatgatagcgagttatcatgagatctaatgrttttataaatggaagtttcccctgccctcttctcttttgcctgccgccatgtacgacgtgcttgcttccccttcaacttctgccatgactgtaagtttcctgaggcctt

SEQ ID NO: 909786 - DNA, 617 bp, Homo sapiens
aaatggttagctcatgttctctttccttcttaaagtagtaggtttttcattgattgattgcttcatttgttcagaaaatatttgaataccaagacccatatctagttctggggctatggaggttttagttagacctacagctagaactacagaggaggtagatacagacaaatatattcaatactacttgctaaagactgcaatggagagaagatcagaaatttataggagcacagaggaggagcagctgcttggctgtgagggcaatgatgtcaaatttgccagttctgcctttaagcaagtcctttaggttctatggccctcaacttattatatgtaaaataaggctaataaggattttatcctcagtttttgtcacagttaaaggtggtaataaaaaggtatagacatatatacatatatttttatatggagggaaatgattggatcatgggggaagttcccccatgctgttctcatgatagcgagttatcatgagatctaatgattttataaatggaagtttcccctgccctcttctcttttgcctgccgccatgtacgacgtgcttgcttccccttcaacttctgccatgaytgtaagtttcctgaggcctt

SEQ ID NO: 909787 - DNA, 166 bp, Homo sapiens
atgcctagctaatttttaaatattttgtasaaacaggatcacactgtgctatatatcttggtctaaaactcctagccttaagcaatcctcctgtctcggcctcccaaagcattagggttacaggcatgagccactgcatttggcttctgctaggttttaattattc

SEQ ID NO: 909788 - DNA, 656 bp, Homo sapiens
tatttcttcctgtcttctctcagatcttactccattaaccacctcttctaattcgcactcccttgcagttcctctcagcctgtaactaagccaaaatattttctacattctccaactcctacctgaactttgaattttcctctggatttttccccaggtcttgtctttccttctcaaagaaatttcatgaaagattagtctaccttcacaatcttcagttaccaatattcaacttgttcagtctgtcatctcatggctaatatcaaatattatttttctatattttctaaatttttgatcataaaatatatttctttcacattagaaaaagatgataaaaatatgtgtgtacacacatttaaacaaacaaaaatctttgtgtactttgacgcaagttgtgacaaatactgctacaaaaactcttgatgtggaaggataaatgtgttcaaataaccttattcagccctctacacctgtttctctgctttccattacagaaaaattcttttgcaaagttgcctgtacttgcttttctatttcattttctctgattcatttctggacgstcgccaaataggcttttgatcccactattgcactgaaacttgactcatgaaaatcacagcaggttctttctcagtcctcactttacctga

SEQ ID NO: 909789 - DNA, 624 bp, Homo sapiens
ccgtcaaatacagcaagtgtcaactcattttaagacatcctctttactcaggtttgtaagaaactagagtatggaaatcacttttgggagaacaatttctctactacccaatgaatcatgkgagagactttttcagagaacacttttgagagaacaatttctctgctacccaaggaatcatgtcatattaacattgattgtaattctgctactactgcctgatagtatacgttaaatggtttttaaaaatatattagttgaaagtatttgaagactgttctcatcttaattctccatgcagtatctgaccggtaaatccataatgaaaatgttactttcatttggttttcctccttcaaaggaaactaactttaacacagattttttttctcaaagagtcacaaatgtaaaatgtacttattaaatgtaaaattttactgattgtgattttaaattttgagtattaaactaacttttcattattggggaaaaaccatttggccataatgtattattattattaaaattgattttgaaaaacgttaaaaatttttgcatctatgttcgtgagggatattggtctgtagttttcttgtaatatatttggtttggtatctgtaatac

SEQ ID NO: 909790 - DNA, 652 bp, Homo sapiens
ctgaacttagatatctctttttcttatagccaggtttcttcattttctgttgcatcaagttaatagattttgaggttgaaagcagtttcatggctttggttaaatagaaaaatgtaggatacctttaaaatctgcttaaattgttttaaataattttgaatatttatttatcaccatcagttgtcactcaagttatagtgagagacagcagagcaattgccttgattccaaatatattttcctaggaaatgtgagtgatttgcaatttatgtaagaagagtcgtagagctaataactattccattttccttctgaaagtttcctttctagtgttaagacgtatacatagttagatcatctctaatattcatgatatctgcatgtcacctctccttctggaatgctaatttataattgtcaaacacttgttagattaaaaaaacgctctcaaattcttacaatcttgctcctatatttattataaattactaaatagataaggagcattgaatacagcaaaggggaaataccaattggaatatctggtaaagagttcataaattggacttaacatctctgctcaacacttacaaatttacagayttaatgatgccttaatgaaaaaggtgcacgaaagaggtctaaggaagac

SEQ ID NO: 909791 - DNA, 627 bp, Homo sapiens
tttatctttttttggcttatttatttatttatatgatgtgtttaaagtctaccttcaaatgatgttataccacttaaaatatagtataagaaacattcaattggcagggtgcagtggctcatgcctgtaatccyggcactttgggaggttgaggcaggctttcatcacctgaggtcagaagtttaagaccagcctggccaacatggtgaaaccccatctctactaaaaacacaaaaattagccaggcatggtggcacacacctgtaatcccagctatttaggaggctgagactggagaattgcttgaacccaggaggcagaggttgcagtgagccgagattgtgccactgcactccagcctatgcgacgagtgaaactccatctcaaaaaaaaaaaaagggggaataaataaagaaacattcaataatgcatttcatttcttttctctttctggtgtttgtactatccttgtcatatattcatcataaactccgtaagacattagtatagtttttctttaaacaatagattatcatataaagtaatttaaaatacaagaaaaacatcttttatatatgtatttttctatttttgtgctcatttgctatatcctgatgggactatatt

SEQ ID NO: 909792 - DNA, 595 bp, Homo sapiens
tcactcagaattcagacaaaggcctcttttcaaaaaaagtaaaaaaatagaaagaaagaaggaaagaaaaagatgcaaacttcaacccagctgcccccaaagaccagccattcaaattagctagagcaagtacctgttcatttttgatcatggcccagtttgatatcactcatcattacattcataatatgggcctattcttctaggaaaatgattccgttgtgggtttggcaatgagagcttcagttcagttcagctaagcttatttcttttgttcaaaggagggaagctgtttgcaaataatctgtgtataattagttacctggttttaaaactgttttatttttattttcttttttccttgtgaagccatctgggaaatctgattactcctaagtcattataagctaatatgcagtctaggtaggctgggttttgaatctctgttaattctagttaaatacttaaaactaattagaccattttaataggagtcatttattactgartgcttcttaagaaagaatcttatagttcatgctgatctagactaccaattacatatttataaatcttagcttacatgttcaagttc

SEQ ID NO: 909793 - DNA, 744 bp, Homo sapiens
attggttttcaaaccagtaatacactaattctggtagactctatggaacaggaaatkatattttcttaatgctgtttttgcttcaaaaatagttgccattcttatctgctgacataggaataaatgtgtagaaacaaagtcaagaaaacttatgtgcaatttccattaataggctctccatagcagggaagaaaggaccaaagccaagaacagccatcaatatatttttcagtgatgctgaatcaggaattggtaatatgagaggtttacttagcttaatttttaattgaggattatgatattgtggttcatttggagaaagcttacagatttcttttttattaatcttaatatctgtttttccccatcttacactctctgcttattttctttaatgtccaaatattctttcctccaatccaaaactcaattattgattggagctggattcatctgtctgatatagtgaaggctgcttcttctgaacagaaaagaaaaatggggataaatacacatctttactacttatactgtattgaaattacaaaaccattatagatgccattagaatatacttccccaattttattaaactccagtaagtggtgggcaaactgtccagggaattggtggacagaagagcattatcataatttgattactgagcacaggatgtgtaataacaatgacagaataaaagaaattgcagctacaaggacattgttaaaaaatcaaggtgctcaa

SEQ ID NO: 909794 - DNA, 633 bp, Homo sapiens
ggaaatgggaaaacagcattccaatagcaatatatgagccctaagaggacaattcaaatataagaaatattatgtgggagaattaaatatccttttttaaaaaattaaaaactgcttgaattcagaaatggatactaaaagaaacaaggcagataaaatgttaggatttatattgaaaaaataaagccaaaaactgaaatcaagattattttactgtctaatattttgtcatggatgatattccttctaatacaaaaagtttaaaacaaattattttctgggcttgtaataaattcttctgtggtgtgtttaatatttattatagactaccttgaataaatgaatctcaccaaaatctcaagtcaggataaaaatgagctgctttacaaagattacccccggggaagtgtaagaggcaacttactttataaatactgtgaagacttgaggtttggatggtggttttcttttttgtattcactgagtaacacaactttttacaaatattyttggaaattcccacgcagctgctggggaaaatattcccctactatcgaagtaagaatatacagaaatggcatgctcctttattaaactaggcttcacacactcttttccacatttccctactca

SEQ ID NO: 909795 - DNA, 553 bp, Homo sapiens
tttaatgcccaaacagcaatgacattagttactttcaaaaaggggcaagggaggcaatgyatataatattcaaaaaaaattaagtagaaacacaagattagttaaattaaaaaattatgctcctttaatgacactagataatcaaaagagattactcaggtctatcacatataccttggtaaaccagctctagaagccacatggtctgatgctactcctcacatcctcacaatgccaggtcacaatgtccctaatgtcctgtagttggcttaaccctgaagcagtcactgctggtgctactgacagagctgttgacttagtttcactccataactgagtctcggctccttctcaggaaacttacctagactctgttgaacatgacaagtggtccaggaacactgtgctactaactgcttattttgtctaggcaataccaaatggccaatctgattatcactttagtttgcaaaaatgtaaataaacataagtaaatatttaaacatttagctttttattagtctcataaggccataattatgttatttgacac

SEQ ID NO: 909796 - DNA, 553 bp, Homo sapiens
tttaatgcccaaacagcaatgacattagttactttcaaaaaggggcaagggaggcaatgcatataatattcaaaaaaawttaagtagaaacacaagattagttaaattaaaaaattatgctcctttaatgacactagataatcaaaagagattactcaggtctatcacatataccttggtaaaccagctctagaagccacatggtctgatgctactcctcacatcctcacaatgccaggtcacaatgtccctaatgtcctgtagttggcttaaccctgaagcagtcactgctggtgctactgacagagctgttgacttagtttcactccataactgagtctcggctccttctcaggaaacttacctagactctgttgaacatgacaagtggtccaggaacactgtgctactaactgcttattttgtctaggcaataccaaatggccaatctgattatcactttagtttgcaaaaatgtaaataaacataagtaaatatttaaacatttagctttttattagtctcataaggccataattatgttatttgacac

SEQ ID NO: 909797 - DNA, 575 bp, Homo sapiens
tttttcacacgtacacataaaaagatattctgaaggatttaatttgaaaaattaaaatatacaaagaaaagagatggaaggtaaccagaaatgtatccrttgcttagactggtcccataagaaagagtattaggtgtccattgtagaggcgggaggcatcaatggcctagcttagagcaacaggaccaggtgaaaagtaatgtatgaaggaagggaaaagaggaactgagagagtcctaggattttcagcagagagggggtatagcattgggctaatgggaaggaaatcccaaggttttaactgtataagtaagaaattctctcagttgagtaatacttaagggtctcatggtagccactagcaattaagtgatacaaaataaacctttcctttatcttaaatgggaggatttgattcttcatatgtttttatgacttttgataagaaagattatgcttttatgtaagcatgtcagaaaggatttaaaatgtgcagcttttaatacaatgctcaactgaaagcttaagtttttataggtgaaatactggaaccctatctcaggcagttggaggca

SEQ ID NO: 909798 - DNA, 577 bp, Homo sapiens
aggtggaacagtcccaaaagatacagctgcaggaatggaggcractatttttacaaacgagtcaacatgtaaaaaattacaggaagatttgtatttaacaggcagcatggcttcctatattattttaaaggtttgctctgaatatgggaagtgctggtccatttaaagtttcaggatgactatatggccctttatatttgcaaaagatttcttcagagggacttcaaatcttgaaatcaaaaggtgcctagcatcctgtaatttcctcttaaagggtagtaagtggtcattttaagtgatgctttcagggttggttagagtgtttctgaaaggcagtcaccagccacctgatgccttagccagggctcctctcccttttccttcagtccttctggctgattgactcagcaccatgctgcatctttctaagcatctaaccacggactcactcaggatcatgggatctcagttcctgtgggggcctcttatcaccatccccctgcaaggaaaccagtatccgtgactgtatgtgaaatgcaagagggacacacactgcttggtcctttttctccccttt

SEQ ID NO: 909799 - DNA, 590 bp, Homo sapiens
ttcatttcaagagtatatgtaaaatagtaaaaaagaaaaaaaatccttcttgagtaggaaggtgtccctgactttatattgtttatttgaccaccttattgcttatcttgatcttaaaagttgatcttaaaaagttctaaacaataagtcactatcaaaagaaaaattttttttttaaatgggccttcctatctttcattctctgtctgtgtctctgcctctgtctctctttctctctctgttggccaaggtaataaaaggctcaaaaagtaagagaacttttttgtatatctccatgaatgatagagtgaaagggggaggggggagagagaggaaatgtgcccagagctttaaagaaacagaaatggagaatacaaaaagtacttccaccctttctgtttgtactctaaaagtttttacagtaaccatgctgcaagtcaggggatcacaggatcctttaytagcaactgccgaaaacttatcttgaaggcacaactggtgtttggttgttgtgcatggtttctaaaccactgttttatgggtgtgaaatcagatgaaatatgtttatgaggttttgacccagatattcc

SEQ ID NO: 909800 - DNA, 633 bp, Homo sapiens
cttttcagaaaggtgttctttgattagcccctgcacaataggaattcccctctcaccctcatttccttccctttatttcctttatagctctagatacagactatctgatattgacttgttacctattgctttttttggttgtttgtatatctgtcctacccaacatagtataagttccaggagatcagggactttttctgtctgactggtaatgctgtgtctctacacttaaaacaatccctagtgagagatatgttgaaggatacaaaattacacctagacaggagaacaagttctaatgttctatggcactgtaggatgacagtagttaacaataatatatagtttcaaatagctagaaggaggatttgcatgttcccaacacaaataaataataaatgtttgagatgatgaatatgctaattatccttatatcccatccaagtattaaccagtcctgaccctgcttagcttccaagatcagacgagattgggtgcgttcagggtggtacggcygtagactgattacccttatctgatcacaatacattatatatatcaaaacatcactatgtaccccataaataggaacaactattacatgtcaattaaaaaataaaataagtatataaa

SEQ ID NO: 909801 - DNA, 592 bp, Homo sapiens
atagacataggatgggggcatggctggccagggtggtcttgggaaatgcaacatttgggcgaggatgcaggagtgcctgtcctaggtccgyggattggagctctagccaggaactatgccaccacttacccagcacttccttccccacttccatatcatttaaaggggatgctcttcccttcccagtactcccatatcagtttgtttactttgatttcactccaaataaagtaagatttgtcactctgtaattaagaattattccagttcctggacgttttattcagtcatgacttttctttgtgtttctattctgattgttcaactttcttcctcagggatacttaatctttaaattgaatctcaatctccatatttgcttgccatattggtcctgttctcactcactattcttaccactttagtctctcctctgcactttgagagaaattctcacctcttctctgcatcattgattcattttctccattgtcaattatgctctttactgcaccaattaggaggtgaatagtattaccacattataaagtcttgcaaaacttcactatcttactatatctctttccttctt

SEQ ID NO: 909802 - DNA, 598 bp, Homo sapiens
tatatatatatatatatatatatatatatatatccctgatatgtaatatatatatatccctggtatgttttwtatatatatatatccctgatatataatgccataagattagagatttgataatgcagcaaaacctagaccattctgaataacatattactttttatttataccaatttggcaagaaagatgagatttagaggaaatttcccagacctatgatattcaaactatacactaagtgcttgatgattggttcttatatagaaaagaaaatcaatcttccttagaaagaggaaataaacaaagacgtaactcggtggatcaggaaacgataagttgttataggattttagagtttgaactattaatccagactatgaaaactgtgaaaatctatgcagtttttgcgtgtgggcgcacgtttctgggaataatatgtcttcaagaatgttcatagcatagtttaggtgagattcaagggtaggagatatggggaaagagaaaattagctcgaaatgaggacaaggagttggaatttaggaggactaggcacacgaggactaggcaacttaatttattaagctgaaaatagcac

SEQ ID NO: 909803 - DNA, 613 bp, Homo sapiens
tgacttttgggttattactatggaagcctcgatagcttcctgtcttcatttgtcatgggagggatgtcattgatgactttatgccagctacttttttctttctaccagatctttcaaagataaccatgtgggattgtttctgcggaaataccatttatagggaaaacatttcttgatgactttaaacaaaggaatgttcctctaatgactatataaccctttaccctgatatatttttataacacttattaccactggatttacaagcttatttgtttacttgcttaatgtctgtctttccttttgaatgaaattcataaaagtcaggcctcatacctttcttgtttcctgctctagactctatgcttatgacagagcacagtcagggaatatttgttgaataaatgatgattgaactttctaaggtcatggtgtacctttgtgtttctgaatttttggcggagacgtctcttggttctgcctaatcaactttctcccctctcacaatagatagatacaataattattgctaaatttggcttattaaataaaccgtgattgagggcctgtgatgatctcygatgaagaagtgcctgaattttgtgtatggaat

SEQ ID NO: 909804 - DNA, 280 bp, Homo sapiens
cctctgtgttggcttttatcctcagccttctctaacaccagcaaaaagaccccatggtcactgcttctttgcytcacaaactctcagttccaaatacagaggaggtgcatctcattggcggagcatagattaagtgctgattccttaactagaggaagctgagaaagtatctggggtttagacttactttggaggaaggacccaaattaagagctatttatcaagaaattcatgtaatttaagaagagggttcagatcttagattaccaaaaagcagtct

SEQ ID NO: 909805 - DNA, 620 bp, Homo sapiens
aaaagccttcttatttaatatttaatgatggctagtgtaacataggctccacatatacagcaaaagcaacaacttcaatcaaagaatttgactaaaatctagataaaaatgaggcattattttctttccatattgtattcattacagtatgttatcatatacttcagggaaatgagcataaacattacaagttctaaaggtaacacggatatttcccaatggtagttcttaaaataattcctttttaaatggtgttcttcatttgaatatattgcaaaatattttaatatcccaaatgatgtccacactaagaatgatataaagttagcttcccatctctattaaaatttcctttggcaatcaagtatttgaaatgtgtgaaaaactgatttttctctttggctactcagtttttattcatctttcttgtattcttaacaaattttcagttgtacttgtaacattctctactgtgacatataatakaaaagcaattggcctcttattttatccttcccacctttcttaccatagttttatgatcacacaataatttcagttatcattaacttgtgttttgaatgtataaactgatattttgcttactgcctctctagggt

SEQ ID NO: 909806 - DNA, 604 bp, Homo sapiens
ttgattttaggtggttttgtttatgggaaccccaggtaagaagcatatgccaaactcttggtttttatcctcctgatagtcataatagtctccctggtgcactgtattatctcaaaggktttaaatgtttgcatgcggccatctctagaatgtcaaatggtgcgtcttcaactggaatgacaagagttgaaagaaatgtgtgatcatgaggacactgtaacctatgaatcacatgctgtgaccagaaacacaaaatgatgtcaactgagagtggtactaaggccctaagttttagtcacactctcacctaagtgaaaacctggccaaaaagcgggtaattttttaaagcaaaattatgggaggccattgttttggactgagctcatgcactaggccctaacagaccaaatcaaacaaaaacggagtcactcatgctaaatatgacataatcacactaagactttaaagaaacacaaagatcctagaccaggacaaacaaggttttgtttttctcctgtaaacagggcattccagtatagggagttaccctctactcagtccttgttcctacctttgcaaaactcactgttctgtttcccagtga

SEQ ID NO: 909807 - DNA, 616 bp, Homo sapiens
agaattctgttctccaaatacttcagcaaatcatttataaatgcttatggtaattgtttgatgatattaactgaattgcaaccaattatagagaaaagaatgtgatttatattgtaatttgattaggtttctatgtattattcagcaaggttccctaagtaattacagccatttcatttctaagaagtcttgcagccagtctcgggtaggatctttgaccaaaaagaaacttcagaaaaataaagttattaataacttacatttaagattcagcattaggaccacgaagaggtctacacttgactaattgttctattcttaaaggtcaataagaataagaattgaacaagttcttaatcagctttctctttttgaaacagtagactacccggtgagtttttccttacgtgtaatcaactcttaggtaaaatactaagtagcccatcttttcttcttacctgtgacaagatgaataagctctgtgtatcctgagatcagtatctcttcactctsttattttttctttcctctctgggaaaaatcaactctaactccttttatttttcctcatatatttctttatactcttacatctttcctgattccagtcctttag

SEQ ID NO: 909808 - DNA, 677 bp, Homo sapiens
cctgcttgtcagctctgaagatctcccagaacagttctcgagctctactaagggacagactgcctcctcaagtgggtctctggcctccatgcctcctgactggagacaccttccagcaggagtcaacagacacctcatataggacagttctggctgacatctggcaggtccccctctgggacaaagcttccagagaaaggagcaggcagcagtctttgctgttctgcagcctctgctggtgatacccaggaaaatagggtctggaatggacctccagcaaactccagcagacctgcagaagaggggcctgactgttagaaggaaagctaacaaacagaaagcaataacatcaacatcaacaaaaaggacaaccacaacaaaaccccatccacaggtcatcagcatcaaagatcaaaagtagataaatccatgaagatgaggaaaaaccagcgttgaaaattccaaaaaccagaattcctcttcccctccaaaggatcacaactcctcgccagtaagggaacaaaactggatggagaattagtttgatgaattgactgaagtaggcttcagaaggtgggtaataacaaactgctctgagctaaagragcatgttctaacccagtgcaaggaagctaagaaccttgataaaaggttacaggaactgctaacttgaataa

SEQ ID NO: 909809 - DNA, 624 bp, Homo sapiens
attaaccacctcttctaattcgcactcccttgcagttcctctcagcctgtaactaagccaaaatattttctacattctccaactcctacctgaactttgaattttcctctggatttttccccaggtcttgtctttccttctcaaagaaatttcatgaaagattagtctaccttcacaatcttcagttaccaatattcaacttgttcagtctgtcatctcatggctaatatcaaatattatttttctatattttctaaatttttgatcataaaatatatttctttcacattagaaaaagatgataaaaatatgtgtgtacacacatttaaacaaacaaaaatctttgtgtactttgacgcaagttgtgacaaatactgctacaaaaactcttgatgtggaaggataaatgtgttcaaataaccttattcagccctctacacctgtttctctgctttccattacagaaaaattcttttgcaaagttgcctgtacttgcttttctatttcattttctctgattcatttctggacgstcgccaaataggcttttgatcccactattgcactgaaacttgactcatgaaaatcacagcaggttctttctcagtcctcactttacctgat

SEQ ID NO: 909810 - DNA, 657 bp, Homo sapiens
taccaagtcttattggagagagtcaaggtggtataattattacaggtagacatgtgtatgcccactgtgtcttaagtgaacgtgtatgtgaaaaggaggaggaactgtagcacatggcagagttatctgttctctctaggctgctagatttaagaacaccagaaacagcaatccggcttcaactgagaaatctgctgaggaagttttttctagctgagacaaacatgaaggcaggaatgttttgtaggtctgctatagactgaatgtttgtgcccccacaaaattcatatgttgaagccaaatactcagtgtcatggtatttggaggtgaggcctttggaaagtaattaggtcatgaggatggagcttccatgaatgagattactatccttataagaagagacataagagagcttatttcctctctctttctgatctccaccacgtgaaaatataaggctgtcatctgcaaaccaggaagtaggccctcaccagataccagatctatcagcaccttgatcttggatttcccagccttcagaactgtaagaagtaaatgtttactgtttaagccagscagattgtggtatatttgttatagcagactgaactgactaagataaggcctaagtaaatctataacaaagcgtgtaggcag

SEQ ID NO: 909811 - DNA, 597 bp, Homo sapiens
tttataggaatcttctttaatgaaggttaatcactttggtagtctttgaagaatttaaagacttttccgacttctctctctgttcactaatgtgcaattttgaaagccaaattaatgaaactcttccttgcatagctcatccttatcccataaattcatctagttaaagtaaataggaagataatgactacattcttgtgtcataaccaccacctttgctttaatatataaagatcgatggtgagtcgaagtatgagaacattgaccaaggaggaggctggaaatgaggttgaaattgtgaactaacctgttgtgaccttttttttaaacctttacagtacacatgattttattgtgtctacttctatacttaaaagatattagctttaatttgaaatgattttttaaatgataagactcctttgtcaatcgtcatccttgactgaattccatctgctgttcctaatacrataattcgttggatctaagatgtcaatgattgtgagccttatcattatttcctgaactactaagaaaaaaatctacaaattaaactataaccaacaatgctttcttgtctatgagatgtgttatttt

SEQ ID NO: 909812 - DNA, 577 bp, Homo sapiens
agtaagaatagttaaaggaaattttagaattttaatttttcatttatagagtagggagcaagtagatactttccaacattaatggataaataaaaaaggacaaggcgtaaaaatactctttagagtaatgagtagaaatgattaaaaacaactaagcgggaaatttacttctatttttcttatctttaaacaatatgtattttgcaaaatgtttcacaattaacattttaaaattgtaaaacatacttcatatttgagatgactgaatgggaattagaagcggaagaacacccattttgctgatgttggtatgtatacaacaggaaagcctttacaaatatagtggaagccaaaacctgcccaagtcaagaattcacataggtcttgactgaaagtattctcacctaccagcctcagtaaagaccattccctggaatcttacaccamcaagcatatgcattagtcagtgtgtgagattcggtggggaggacttggcagacagacaaaaaagagtctccgaacttctttggaaagtgttttgccacttatcctaaagctataattctgccaactggag

SEQ ID NO: 909813 - DNA, 586 bp, Homo sapiens
tttttacttatatggtacatcaacatttcaaaacaaccttttaagatacagaatcttccaagaggaaggttctttatatgtgagaggcagctttccttctgagggacagcaatgactagtttgttkgggtacaaaactgacagttgggaaagtcttaaatataattctggcttttctacatccttaggttggccatacagaataaaaacgaacctgttagggaagcagaattttggaggaagtacatacacatattagagaagcactagaaactccactgtaataagagttagggaatcccttgaccactgtctgagttatcttgtctgataagatctggatagaaactgttgtcaaaattagcacacaggcttcatgagacttagtaaagtgaaatgaaaacataaaaagattctgtagaaaaaatatgtaattctgttaaatttattttgcctttataatctgaaaagaaataactttaaaatattgcaagtgactacaattttttaaaacaattaattagataatgtaataacctgaaagtgaagttctcatagaaaacccattttgtggcattctggaagag

SEQ ID NO: 909814 - DNA, 484 bp, Homo sapiens
cggcaccttttattgaagatattgtcctttttccaatgtatgtttttggcacctttgttgaaaatgagtttactgtagawgtaaggatctgtttctcggcaatttattgtgatccattgaagtatgtgtttgtttttataccagtgccatgctgtttgggttactatagctccacagtattatttgaggtaaggtaaagggattcctccattttttttttttttttttttttttttgcttaggatagcttaggctattttgggtcttttgtggttccatataaattttaggatattctttttctatttccttgaaaaactattagtattttgataggtattgcagtgaatcagtagattactttaggtaatgtggagattttaacaacattgattcttccaatccatcaacatgaacatggaatatctttccatttttttggtgtcctcttcaagttcttttatcagtgttttatagttttcat

SEQ ID NO: 909815 - DNA, 619 bp, Homo sapiens
ctttcacaagaagacccttgtcaagtaagtaaataaactcctagggaataccttctgcatctttctgattaaccagcagarcacctagcatgatgccctctccacagaaagatccagtagacagccatttagacatccatccccacccatgttttagatatttcatccttccagccctgcttcttaaatctcccacccgcttgaaacctggggtttcctaaatgatttccaggcctgctgccatactccatttttaataggaatctctaaagtgagctataatttgagaatacgtaatcaaggacactgtgggattctcagctttaggcaatatgttctgtcagatagaagaaagctctggcaaacagcagacccagattcttgcaccagctgtgctcccaacttactctataatttcaatcaagtcattctaatggctattgtctgtctgtttcactggtggaatctacagaagtcttagccttcctgactccttaacaatgatcatgtgaggatcaatgagatgaagtctgcagagatatgttgtccccttggggaaagacactttgaaaataaaggtattagagaaaatctctggtatggctttcaagagctcaga

SEQ ID NO: 909816 - DNA, 691 bp, Homo sapiens
gcgctggaccctcaggttagaaacaaatgactagaccttgcactcaatgttctggcttttctggaggatggtaaaraaactgatttctatcttatatgacttggagcactgacaggaccagtgtcagagtttggaagctgctgaaaacagaaaagtgcagcatattacagttgcagttctgcagacagatgccaggaagagcaatagattggaaaaagtttaagaggtcctagctcctctagttgggctgattggagtaggtcttccactgcaggaagccaggatgcaaagactgggtgagttgatcatttttacagatgctcaaatctcatcaaaaaattataaatctttcaaggaaacaaacatagccaaatcaaaggaacaaaataaaactccagaaatggaccctaagaaaacaggtatctatgagcttcctgacaaagagtttaaaataactctcatgaagatgcttaaattaaaacgaacatagacgctaattttatttaattgaaatgaaaacaaaatgaaaatatcttgtttcaggaaaacaaagcatgagcaaaatgtgaatatcaacaaagaaatagaaactacaaaaagaatccaaaattctggagctaaaaatacagtaactaaatgaaaaaattaatcagagttttcaacagcagaaaaaaaataagtgcctttcaag

SEQ ID NO: 909817 - DNA, 691 bp, Homo sapiens
gcgctggaccctcaggttagaaacaaatgactagaccttgcactcaatgttctggcttttctggaggatggtaaaaaractgatttctatcttatatgacttggagcactgacaggaccagtgtcagagtttggaagctgctgaaaacagaaaagtgcagcatattacagttgcagttctgcagacagatgccaggaagagcaatagattggaaaaagtttaagaggtcctagctcctctagttgggctgattggagtaggtcttccactgcaggaagccaggatgcaaagactgggtgagttgatcatttttacagatgctcaaatctcatcaaaaaattataaatctttcaaggaaacaaacatagccaaatcaaaggaacaaaataaaactccagaaatggaccctaagaaaacaggtatctatgagcttcctgacaaagagtttaaaataactctcatgaagatgcttaaattaaaacgaacatagacgctaattttatttaattgaaatgaaaacaaaatgaaaatatcttgtttcaggaaaacaaagcatgagcaaaatgtgaatatcaacaaagaaatagaaactacaaaaagaatccaaaattctggagctaaaaatacagtaactaaatgaaaaaattaatcagagttttcaacagcagaaaaaaaataagtgcctttcaag

SEQ ID NO: 909818 - DNA, 652 bp, Homo sapiens
gggtactagaaatgagtttaatagactatttacaattattaggaaacaatactgggtaagtgatgacttacggtrtagatcttaacggctaccaatattttaggaagcttttattactcctgagaccaaagggatgaggagagggagcagttattgaatgtcagtgagacttgtaactataagacaggaacatctgcaaacaagtgtcttttggtgagtggaaaacaacctcagctaaccctcagtcaaacaaggagggagctgagggagtaaatactcctgtttctctttcctttaacctctcttttctcccatagctgaaccaacaagaaatgcagagtaagagagtcagcatggtgtgacggatagaggccagtctcttggccacagaatagtgtagaaaaagctggaaaagtgtaggaaaatgatctctagggacaaatataaaatgcaaatcataagatggaagcttggaagcaaaagaacttatagtatttcctaatagtatctctagagttaaagtttctgcctgagaatctctctcaaagtggaggtcgctatcaatatttattgcaaggcaaagaagtaagtgctaaattaatttttgaattcagttcagcctgagttgcagagttttgacttgagccctaca

SEQ ID NO: 909819 - DNA, 609 bp, Homo sapiens
attatgaaaaaaagacttaaagtggatggtccagaaaatgtaagaaatacttttggaattcagaacagcaggaaggataaggggaagaaragagcctaaggaaggagctttgtgaggtggcaaattatgacctacaggttaagttgtgttagagtttggagtgtgctgggggtgggtgtctgggagttcaatgcattccaaaatgatgctccaaacatatcaatcttaaggaaactaaagagtgactgaggattttcaaacagaagaagactgttaacactttagtaagagtagctgcattaggaagagagttatagatttgatccaggccctgccttgaactcaggtttttgcagattaatacactttcctcattattgactctaaggaagcctcttctaggacattgttgagaggagtaaataaattaacacacatgtaaacaattagcctagcatttagcatctaggtagatattcaacccacaaatatttttgttatggaactttctttctttgagactgagatcaggacgggggagaaaaaggttaaaagagtggtaaaaaagacgttccaggttaaggaaaagtatactggcagtaaaatttt

SEQ ID NO: 909820 - DNA, 609 bp, Homo sapiens
attatgaaaaaaagacttaaagtggatggtccagaaaatgtaagaaatacttttggaattcagaacagcaggaaggataaggggaagaaaagagcctaaggaaggagctttgtgaggtggcarattatgacctacaggttaagttgtgttagagtttggagtgtgctgggggtgggtgtctgggagttcaatgcattccaaaatgatgctccaaacatatcaatcttaaggaaactaaagagtgactgaggattttcaaacagaagaagactgttaacactttagtaagagtagctgcattaggaagagagttatagatttgatccaggccctgccttgaactcaggtttttgcagattaatacactttcctcattattgactctaaggaagcctcttctaggacattgttgagaggagtaaataaattaacacacatgtaaacaattagcctagcatttagcatctaggtagatattcaacccacaaatatttttgttatggaactttctttctttgagactgagatcaggacgggggagaaaaaggttaaaagagtggtaaaaaagacgttccaggttaaggaaaagtatactggcagtaaaatttt

SEQ ID NO: 909821 - DNA, 658 bp, Homo sapiens
ttaaatccaagctagaaaatacatttggacggagaaaacaggctctgttcaattttctctcatctgtttaattcctggcacatatctctgggtcatgggaaggttctggtgggctgctgtcattgtctcccccaaaacaagaggggtgtgtgtgtgcatgtttgggaggaatgaaagtaaggagatttgggtgacacatattctggtttaaattttcataaaattaccaatttaaattgaaatgtaattatcctaactggcatctttttggcaacagcttaaaaaaaaatccctcggctttactgtaccaagcaaaagcccagaggagtcctgacactggcctttaatcaaaagctgaaaagacacaaaagctttcagataatctatgccaagctatcttggacagcacagaatcgcctggagcacccttctggtggcatttaaaacacctggtgcccttagaaaaaaaatacatctgtgtctgcaatttctccttctataattcccttaaatctttctctctcaacccattctcctctcttttaaaagtaaagatgctgcagtgacagtaaaataaagcaattttatttaccaaggaartgatacttgtcattggctatgcctggaggtgacagactcaggtggccatctgcacaaa

SEQ ID NO: 909822 - DNA, 562 bp, Homo sapiens
ctgcatagacatctggctattgtttctgcaatttcttgaccagaaaatctgttagtcagtagtaatttgaccacaggtaaatattgctgctaggtactgtcataatacctcctttatacccatatytctgcaccttctttattgaattgcattgatccatttatgggtttcctcttcattagaccatgtactcttagagggcaagggtcatggccacatatgtttctacaccaagcacacaaacaggatctatattgtgaagtgactattctcactggaacagcatgctgaatgaagcttatgcatttcctccaggtcataactaataagtgagtgcagttaaaaagttttacccagaagcttagccaacacctaagtttctccaggaatacttacagatacgtagaatgatgtttgcaagcacagccaatgatttatatctctgtgatgatataaaaagaatttagacattttctatccaaagcactctgcctataaaataaggaaataacctggaaattaattttctcttcatttcattatgcagcattaaaaacagcct

SEQ ID NO: 909823 - DNA, 553 bp, Homo sapiens
cttatttgtccttttagcctcaaatcagccagtccagcttccaagctcaatgctgctaagtgaatgaccatacacagagcagagaactaccaagctaagcctaataaagatgagatatttcagaaataataaactatgagtgttttaagccactatgattggggatggttttttacatagcaatgaatactgaaatagaaatgaagacagtcaccaaaatcttcagagagatgatacattaaaattaaatattaaagaacacattggcattgtctcagcaggcaaggggaacaaaacagagtgaatactatgttcacaaggcatataggcaagaatgaacactgatatggtttggctttatgtcctcacccaaatctcttctcaaattgtgatcaccaggtgtctaggaagggcccttgtcagaggtgattggaacatgcakacagtttcccccatgctgttctcatgataatgaatgagttctcacaagatctgatggttttatacaggggtcttccccctttgccctggtcggagctgattggaacatgcg

SEQ ID NO: 909824 - DNA, 606 bp, Homo sapiens
atgcaagagtcatatttggtttcaaacagtrtctgaccctttgtcagtgagagataccccactctaacagatagatgtgatgtactatgatagaggtagatttgactgctgtgacatctcagagataatggcagggtagaaaagacttccaagaattaaaaattgatataggagaagggattgaccagatgaaggagtgggagacagtggacagaagttgtgagaaatatggcagtctgtggattggagctggaaaaagataattggatggaacgctgaggctactcaattgcttccatcgaagcaactgtgttcttatgtattctgtatttttgagtttcatgtaagattttgcttgaatgaagcttcatgaaaatgaaaaaaaaaatcaataactcatagtagggaacctgaagagtttgaaacagttggaactgagagcgcataaatgaaaatgttaggaaattaaattaacagaattggcaaagggcaacctgtaaactgattaaatgaaaactcaagtgtaacaggatgaaatagaattttcctcgtatataataataaaagactgtaatcaggattggcaccattacacttcaataggag

SEQ ID NO: 909825 - DNA, 606 bp, Homo sapiens
atgcaagagtcatatttggtttcaaacagtatctgaccctttgtcagtgagagataccccactctaacagatagatgtgatgtactatgatagaggtagatttgactgctgtgacatctcagagataatggcagggtagaaaagacttccaagaattaaaaattgatataggagaagggattgaccagatgaaggagtgggagacagtggacagaagttgtgagaaatatggcagtctgtggattggagctggaaaaagataattggatggaacgctgaggctactcaattgcttccatcgaagcaactgtgttcttatgtattctgtatttttgagtttcatgtaagattttgcttgaatgaagcttcatgaaaatgaaaaaaaaaatcaataactcatagtagggaacctgaagagtttgaaacagttggaactgagagcgcataaatgaaaatgttaggaaattaaattaacagaattggcaaagggcaacctgtaaactgattaaatgaaaactcaagtgtaacaggawgaaatagaattttcctcgtatataataataaaagactgtaatcaggattggcaccattacacttcaataggag

SEQ ID NO: 909826 - DNA, 603 bp, Homo sapiens
aaaaaatatttcaaaagtatgtatattgctctttatgctgtgccagtgaaggaaggaccactgagctatytggtgaccgaccaagggccttcaaggaagggtaggactcacagcctcggtcagtacattttaggttttcacaggttccatcctcaagggtactgtctgttttttattcaagggctctggggtgttggaaatgacttaggtctgaaaattttatatggatttatgactctccaaagttaaaccaagtcagacttccatttgccagacttggaaatgttccagttaaacaaatcaaggaagaactttgtgggtttctcatccattttagtcctaccaacccattgttaattgcagaatgccaaagaccccaactggaccaatcatcatgattatcaggtaagccctgaacactattgcaataagtgtgccctcctttgctcctagaatttaggtgtggctggttggccactgctacctgagatcctgttgtctccattggcatctgagaagccagttttaagggcaatgtttcactgtctctggcttaaagagaacagacacagaagtgattttccaggattattggaatcaccc

SEQ ID NO: 909827 - DNA, 603 bp, Homo sapiens
aaaaaatatttcaaaagtatgtatattgctctttatgctgtgccagtgaaggaaggaccactgagctatttggtgaccgaccaagggccttcaaggaaggstaggactcacagcctcggtcagtacattttaggttttcacaggttccatcctcaagggtactgtctgttttttattcaagggctctggggtgttggaaatgacttaggtctgaaaattttatatggatttatgactctccaaagttaaaccaagtcagacttccatttgccagacttggaaatgttccagttaaacaaatcaaggaagaactttgtgggtttctcatccattttagtcctaccaacccattgttaattgcagaatgccaaagaccccaactggaccaatcatcatgattatcaggtaagccctgaacactattgcaataagtgtgccctcctttgctcctagaatttaggtgtggctggttggccactgctacctgagatcctgttgtctccattggcatctgagaagccagttttaagggcaatgtttcactgtctctggcttaaagagaacagacacagaagtgattttccaggattattggaatcaccc

SEQ ID NO: 909828 - DNA, 556 bp, Homo sapiens
cttattctagagaagcttattatctaccacaggagacaaatataagcagagaattccaaactaatatgccaagaactacataaaaagtgaggatatgcatttagtccaatcttcctagaggagatgatgctgaggaaattttaaaatataggtaggatttggtcagaaagctagaaggacatttcaggcagagggaactgcatgagaaaaggccaggagactggcaagagcatttagctaagttactgaatccaagaaatactttgcactatatattcatactgtttataagatggagaaaagcctagaagaaggaacatcataaattattgttcaggacatcttcacttctctgcttcttccctccgggaatatagtatatttcactgtcccactgattttaggattagccatatgattaactgtgacctayggaatgttagcagaaggagtgtgaaaacatgaattgtgcttgcctgatggctacttgctctctttcccctctgccagtgcacgaagatcatgctctgactagcccactgccccaaggagaatg

SEQ ID NO: 909829 - DNA, 630 bp, Homo sapiens
actttgttagtaaagaaaaaaacattttgtcttttctttataaagtatggaaagactggctgtactaaaatactagcttcattttctccctagtcagatttatgttgtaacatgtaaattttaaaagagaaagagagaagagaaacatactgagacagagctatctttataactgctgtagacttgccctttccctcatcccaatttcaaaaaagatgatataaagcttcatgttggcaagttaatcacagtcagggagagaatgagctcaactgtgtatgtaaaaacttagttgtttttctttgattcatccgatagcatcacactgggtcagtttcttgtttatgctgtctttattgtttctggtcttagaacaataaacagccctaagtggtttcaattacagcagcaaaactgtgcaaatgaactttggctttgtttcatattgaatagagggtttttatgattttataaatggtgatgtttaggaatcttgccaaacctgttctataaacagtgaagagtcacatttgccagctctaggcctttaaatatccttcccttgatatggataaaatgtttttaamgttgtcctatggagatgaataggaatgatgaaattatctgcag

SEQ ID NO: 909830 - DNA, 610 bp, Homo sapiens
ttttcttttttctcctgggaaagtaaacttcaataaatagtaaaatcaactgtatatgtaaatttggcttcagcaagggataccaagctytcaaatcacctctaacattttgagtggttgctttatcttactagaccagtgccctctatctaatcccaaaaggatttttactttcatatgacaatttccctttggtttctatagttgtttattcctctttgataatgaaactgatcaccagttaccttgcctgataatttatcattttttcaatgattggcaactaagaacaaacaaaaatgtctatgcatttctgtttattccctaagtaatttcatctggtctcattgctttaattaaatgctacctaaaagttgatgactcttcaaaggtatatgtaagttttaactaattctttgggaaaaaatcaaaatattcaattgcctacatgttggttatttgttagaatgtcaaaatcaatctgttcaaaacagaacattacagtaaagggacaaatgctacttctaataatatgtagaaatgtcagtgccaagtatcaggaacaaaatgatgttcctgtttttcttttataaaacaatgtgaatgttgg

SEQ ID NO: 909831 - DNA, 610 bp, Homo sapiens
ttttcttttttctcctgggaaagtaaacttcaataaatagtaaaatcaactgtatatgtaaatttggcttcagcaagggataccaagctctcaaatcacctctaacattttgagtggttgctttatcttactagaccagtgccctctatctaatcccaaaaggatttttactttcatatgacaatttccctttggtttctatagttgtttattcctctttgataatgaaactgatcaccagttaccttgcctgataatttatcattttttcaatgattggcaactaagaacaaacaaaaatgtctatgcatttctgtttattccctaagtaatttcatctggtctcattgctttaattaaatgctacctaaaagttgatgactcttcaaaggtatatgtaagttttaactaattctttgggaaaaaatcaaaatattcaattgcctacatgttggttatttgttagaatgtcaaaatmaatctgttcaaaacagaacattacagtaaagggacaaatgctacttctaataatatgtagaaatgtcagtgccaagtatcaggaacaaaatgatgttcctgtttttcttttataaaacaatgtgaatgttgg

SEQ ID NO: 909832 - DNA, 647 bp, Homo sapiens
ccaaaatataaagttattgtaatatataattttcaaagcccccactttcactttttctttccttcaggaccattttttttaggtaatatagtgatacagaagaacctataaacaytgtgggtagaagaaggtgaatttggcatgtttttattaaaactactctaacatttacttaaacatttttaaaaagcccaaacattggagcctggaagatgaagagttgtatatgttattctttccaggaagttaaataattataaagacactaaaaatagcagctgttttaaaagaatagcttgctcataatttgtcctaaatttcctggaattaagaattatgatatggtttcatcctgctgtgactgcagtaagagaacaaacgaagctccttttacgtcaaggaaagtgtttttgagggaaatgaagacttttgtttctcctgcttctctgttgactgttgtgatttcccaaaaatgggtcttttactaggaataagaaaatagtcatccccaaggtagtttgctttccctatttcataaatacaaattactctctctttatttccctgctacatttggtgttagcagaactggctggtactgttctctggaatatccttgctaaatttgcattttttcttggcaaatt

SEQ ID NO: 909833 - DNA, 610 bp, Homo sapiens
gtgcttttgccatctcttgcatggttctctttggagaaagtcagtgtccacgtcatgggacagtcatgytgagaagcccaggaaagaggtcagaagcaaatcttctgagttctcccaacaactgagtgagctcggaagtggaccctttgtcacatgagccttgacatgactgcagctgctctagctgacatcttgattgcagagtcatgagatgctacctagctaggttgcttccatattcttaatccatagaaaccgtgagataaaaatgtttgttgatttaagccactaagttttgggggcaatttgttatgtagcaataggtaacgaagacagtgacctacctctaccaaagtggcttagccaagtttagaataaaatattcctatccttgcatgcagatcttacaattaattcattgtttgtatagactgttatcatgtctaatgcagatatttgaaaagaattatcagggcttttgtttagagcagaagttctttgctatgataagagggacagaaatgtctagttttatttcttccagagagtttccatttgcttggatgtatgccacggatatccatattcaaataaaatccacaattcctgg

SEQ ID NO: 909834 - DNA, 606 bp, Homo sapiens
aaaaacaaaacaacaacaaaaaacacagttaccagcttcaaggatggggatgtgaaaatgttgtaatggaaaagctgcatatagagagagagtctgtgagacggtaagttttaagtcatagataatcatgagtcttagaggtgggaagaacatctagagagagcttattcagaaagacattctgggctatttcaacagtaaagatgatgctatctccatttttggggggagagtcatggcctttggtagttttgagtgtatttaccactaggtagtaatatcttgttttcaaactgattattgctgactgaatcatgtccccttaaagatatgctcaagtcctaatccccggtacctatgaatgtgagtttatttggacatacatcctttgtagatctaaaaaagttaagatgaggttttactggaacactagttcaatgactggtacctttataagaagagaaaaatttgaacactgatacagacacacagggakagtgccgtgtgacaaatgagacagaaattggagtgatatatctacaagccaaggaacaccaagaattgcaggcagcctgcggaagctggaaaaggcaaggaaggattctc

SEQ ID NO: 909835 - DNA, 628 bp, Homo sapiens
ttttgtattaaagattcctttaatcttggttgatttttattaaaaatgtcttcatgtctgcccttaacaattttcattgtyctatgcactttttttgagttttcaaatttgatattttaatgaatctcaactgttcttaaaatagtctcattacttaactttttttgcttttatatttacttatatgctgctgctcttttgaatttagtctatttcctaggtagcattcataactcatggccacatacttgcttctgaatgaaatgttttcatttttactttacttccaaaatgaaatgttttcatttttactttatttcttgcaacccacatgctcttttctccttttggcttattcaccttattatttttctatgagttgccatgtggttgtgataaagttcaatttctttactttttaattttgctggtaatttaccacttaattcaaacatatcttgagcagttatggtctcatatacctaaatttgctttatattttttcttctggtatctgagcaatttaaaaacaactaagattttcttatttccatgagaaataaacatttaggaaatgtgtataattatcaccatattagtttgcatgccaaagaagtgagagctttgg

SEQ ID NO: 909836 - DNA, 557 bp, Homo sapiens
tttgggcagtatggccacattaatgaaattgattcttccaatccatgagcatggaatgtttttccatctgtttgtgtcttctatgatttcttttagcagtgttttgtggttccccttgtagatayatttcatctccttggttagatgtattcctaagtattttatatacttctattttttcaggctattgtaaatgagatttccttcttgatttggctcgcaagttgaacattattggtgtacagaaatgctactgatttctatacattgatttaatgacctgaaactttactgaagttgtttctgagttctaggaggcttttggtggcgtctttgagttttttaggaatagaatcatattgtctgcaaagagagatagtttgatttcttcttttcctattaagatgcattttatttctttctcttgcctgattgctgtggctagcacttccagtactatgttgaataggagtagtaagagtgggcatctttgtcttgttccagttcgcaagggtaatgctttcagtttttgcccattcagtatgatattggctgtg

SEQ ID NO: 909837 - DNA, 528 bp, Homo sapiens
gaagctgaccgaggcattcaggtggttccagaggctggaaagtctcatacgacaggtttttttctcacaaaagagaagtgaaataagtaccttattatgttccaacaatatcaagatacaaatctatcttttagaaaaatgctaaataaaaacacagtcagagagagacttccaccactataaatagtttcttataaatgccacctagagacaaaattatcatttctatgatcctaaccaaaagagccttgcatgtcttggaaatactttgccctctaaagcaaccagaagaacattccttcagtctatgtgttcttgtgctggattttgaaacttttgagcatttgctcccaaagtgaaatttaaaaggctaacagcagggacacctggataactagaaaacttacctattgatatcacaggctgcttctccaaatggactgtatataatttcttgcaagcatagtaaaaatcctatacttgyttgaaatgaaatgaaggaaagcctatcatgaatttctttttctc

SEQ ID NO: 909838 - DNA, 664 bp, Homo sapiens
tagatagtgtgcaagctttctgatggcagaggctaagackttatcatgtttgtatccccagcccctagcacaccatgaaacacaaaatgcccaataaatttttgctgaataaataaaaaaatacaatacttgatacccaactccaaggcactttcagtgtagttagtaaagatagaacattttgaaacataacacagcacagggcaatatgaaagaaaataaaaaattaaataaatctgttataagcaacaaagcaggtatttagagaaggcaaagattacttttagctggggtgacaggagcaacagaatcaacgacaattcaatgtgtgttcatgacacaagtcctgtgttagttgttttcaacaacaaccctgtaacttgataatattatccccattaacaaatgtggaacccaaggttcagagaggtaagtgatttttcaaggttatataatcagcaatgccaggatttgaatgatgaatctaagatttcaaaacactgagaatggaaaggtgggtatcccaggtagagtaaaaacagaaacagaaaaaaatgtgcaagtgcatctcagtgtaatgtatgtcctggggattaaaaacaaatcaacttgatataatctattataggaatgctaaggatgctgatcctagcaagtaagctgt

SEQ ID NO: 909839 - DNA, 682 bp, Homo sapiens
tgatttcggggtgcacatgtgggtttgttccacaggtatattgcatgatgctcatgtttggggtatgattaataccatcacccaggtagtgagcatagtacccaatagctctttttcaatccttgaccccctccttccctcccactagtccccagtgtttatggctgccattttcatgtccatgtgtaccatgtttgtctgtttaactctcacttataagagagaacatgtagtatttggttttctgttcctgtgttaaagatttgcttaggataatgacctgcagctgcattcatggtgctgcaacagacatgatttcattctttttttatggccatgtagtattccattgtgtatgtgtaccgtatttcctttatctaatccaccattgatgggcacctaagttgatttcatgtctttgctattgtaaatagtgctacaataaacatacaggtagatgtatcagtttggtggaacagtttcttttcttttgaatatatatccagtaatggaattactgggttgaacagtagctctgttttaagttcactgaaaarcctcccaactgctttccacagaggctaaactaatttacattcccaccaacagtgtataagcatcaccctttctccacggtttcaccagcatctgtgtttttttggctttttattagtaactattc

SEQ ID NO: 909840 - DNA, 682 bp, Homo sapiens
tgatttcggggtgcacatgtgggtttgttccacaggtatattgcatgatgctcatgtttggggtatgattaataccatcacccaggtagtgagcatagtacccaatagctctttttcaatccttgaccccctccttccctcccactagtccccagtgtttatggctgccattttcatgtccatgtgtaccatgtttgtctgtttaactctcacttataagagagaacatgtagtatttggttttctgttcctgtgttaaagatttgcttaggataatgacctgcagctgcattcatggtgctgcaacagacatgatttcattctttttttatggccatgtagtattccattgtgtatgtgtaccgtatttcctttatctaatccaccattgatgggcacctaagttgatttcatgtctttgctattgtaaatagtgctacaataaacatacaggtagatgtatcagtttggtggaacagtttcttttcttttgaatatatatccagtaatggaattactgggttgaacagtagctctgttttaagttcactgaaaagcctcccaactgctttccacagaggctaaactaatttacattcccaccaacagtgtataagcatcmccctttctccacggtttcaccagcatctgtgtttttttggctttttattagtaactattc

SEQ ID NO: 909841 - DNA, 682 bp, Homo sapiens
tgatttcggggtgcacatgtgggtttgttccacaggtatattgcatgatgctcatgtttggggtatgattaataccatcacccaggtagtgagcatagtacccaatagctctttttcaatccttgaccccctccttccctcccactagtccccagtgtttatggctgccattttcatgtccatgtgtaccatgtttgtctgtttaactctcacttataagagagaacatgtagtatttggttttctgttcctgtgttaaagatttgcttaggataatgacctgcagctgcattcatggtgctgcaacagacatgatttcattctttttttatggccatgtagtattccattgtgtatgtgtaccgtatttcctttatctaatccaccattgatgggcacctaagttgatttcatgtctttgctattgtaaatagtgctacaataaacatacaggtagatgtatcagtttggtggaacagtttcttttcttttgaatatatatccagtaatggaattactgggttgaacagtagctctgttttaagttcactgaaaagcctcccaactgctttccacagaggctaaactaatttacattcccaccaacagtgtataagcatcaccctttctccacggtttcaccagcatctgtgtytttttggctttttattagtaactattc

SEQ ID NO: 909842 - DNA, 561 bp, Homo sapiens
aagcaggggagatttaatacagcaaagttggtgctggagaaataacttggagggctgaaagtacaactctaggtagagccttcagtaaggactcccagaacaatatcccattgacctcatggaacttgtaaggagccactcctcctgaagctgtcttggagccatagtaaaatcaagaacttgtcaccattacaactgactctactaatgcaagaaaccatagaatgcttatctgtagctgtggtcccgagtttcagaagcctgatcatagcgctgccactgctgcttctgccatcccaaccatttcgtaaaactcagaaagctggagagtgggcagaaaaacacgactgcagggaacctggacattgccacagctacgtttaccagcagaaacagccaaaggagggctgaaatatggcctccacatsgctttcaccttccacacatcacatatacacatctaattggagaagactttttttgaagctggctaaaagagaatctgagaaatgatgcttttagttttgcaacaactttaacttgaatgaggatagaatggaa

SEQ ID NO: 909843 - DNA, 647 bp, Homo sapiens
gcaaaaggtcaaattaacttgagagatatttttgcaaagcctacttccagagtttttgcccttcattttttcttttgtatatatttacattttgaaatgggaagactgaaaaagagggaagctatatacttgtttctgctttggtctgaaaatttggtagttgaatgtacttctttttgaaagcatctttttggctgggaggagaggctcatgtctgtagtcccactaacttgatttggaaggctaaggtgggaggattgggtgagcccaggaatttgagagcaccctgggcaacatagggggaccccagtcttttaaaaaataaaaaacttggctgggcatggtggcacatacctgtagtcccagctactcagggggctaaggcaggagtgtggcttatgcccaggagctcaaggctgcagtgaaccatggtcatagcactgcattacagcctaggcaacagaccacaactcaaaaagcaaacaaaaaacagaatctttttgttttgggcatgaaaaataagtgaagaggctttagagttcctaggatctccactggatttctaacaagcaaaagtttccctaaagcatggaaamacacacagatttaactatatttaaagtaaaatgatccacaaagctcatcct

SEQ ID NO: 909844 - DNA, 473 bp, Homo sapiens
gtggaaataggaatctaaattacaattgtaaatgtctaaagcttgtagtctggggattttcctaatgggaatatttgatgtgactttttgttattcttatggttgtgctcataagcacatcrcaaggatggtttaaaggcccgagcaccataaattagatattctttaagaaatcatgttcttgacatattttttcattatctgagaagaatgaaacagattttttttgttaattagtgctaaggcatgtattttgcattagcattaagtttaccaaaatggctttaaaaacttgaacagatggcagaattataataacttttccttatgatttaggttaagaataaagtgtcatgagaattctcctcctacctaacttttctataaagttaatgcatttaatagatatggcatgtttgtttttctcactgaggtgtaaacaactctatcacacctcagatgagtataatgag

SEQ ID NO: 909845 - DNA, 589 bp, Homo sapiens
ttctctaacaaggtaaacaatggattagtaaaaactacacatatcagacctggtttcttacaacattaggctcaaaatgcaagatttacataaagagaacatctatggtgagaaataatttgcttagacaggaaattttatcactgccattcagttagttggaaaatgaagatttagagatttggggaattctctaatgttctacataagcatagggtaaaataaaaacttcgtatttctttgaattaatatccaattctcttctagaggaaattttattgaattggaagtgtaattcttctgtttaaaagaaagcctcagccaggcatggtggctcacacctgtaatcccagcactttgggaggccgaggcgggtggatcacaaggtcaggagttcaagaccagcctggccaacatagtgaaatcctgtctctactaaaaatacaaaaaaaattagccaggggtggtggygggtgcctgtcctcccagctactcaggaggctgagggggagaattgcttgaacttgggaggcagaggctgcagtgagctgagatcacaccactgcattccagccagagcaacagtgca

SEQ ID NO: 909846 - DNA, 710 bp, Homo sapiens
ctttcccttcaaggtaaattgctggaagttttatgcacaatttttattgctgtataagaaattaccaaaacctaacaacttaacatgcctgtattacatcaggttctgtgagttaggagtctaggcatggcctagctgggctctctacttcaggttctcatgaagctgaaatccaggtgactttggctgtgttctcatcagaggctcaactggggaagcgcctagcataataatagactagtaagaaatccactcctttaaaacagcaaggatgcaagcttttgcctatcatactaagtttacatttatgtatgcctgctgcattagcacatctcaacacacctattctgtctttggcatccttaatttttgtagaggctgtctcatcagttatagtcaatatttttctgggcaataacacaaaaaccaggatgtttcttcagtatattcttcttcacagacttgttctggcatcaggtttttattggaaatggccttggcaaactcatcaattaatttctctgttgcttcatcatcagcagatgctttatcattacaaatcattaaaaatttaatgtcakgtcttttctccaaattctgcaaccattttgttgaattatcacagtttccttcgatttgcagttcactgggattgatgtttgcttgtttcacgatcaccatactattaagtggcatgtgttcactgcaat

SEQ ID NO: 909847 - DNA, 586 bp, Homo sapiens
agagcgtgtccaggcagtagcttgaatggctacagatggaaaaggatttggctttctttatgttttcttcctttgatttttaactgcccatccccccagtattaatggttagtacagaaaagaaaaaggagaaattatcacccatcacccctccacccagaattaaccacagttaacactggggcccggttccttccaggctggaatctcagaatcgctttcttaatcagaggcaatggtctgcacagctttatatcctgcaatttcttgcttagtgtaaaagcattaccctgcgatctgatttccttttgcatctcaaacccgggaagtttggccattagcaaggatttcctgaatttcctcggaatcatcacagaggctgggcttggtcttcctggagcttagggctatttctccctcccctcctttcaagctgcaggtcttcgtgagaagaaggcggatgcaatagcaaagacttagctttcaggcctccttcctcaagstggtaattgttccctttaaaggaagagagaattaactgagtgccagcgctggattaggcctgggcatccagaaagtgcccaca

SEQ ID NO: 909848 - DNA, 682 bp, Homo sapiens
ggtggtggatgcaaggactctcacatagcattaaatttcctggtgagcaaattctctcatatgaaatgcttctattcttctgtttatatcaaagagaatgtctggatttggtactaattgctctttactcaagctctaatatccttttctctctctctctttttcaacatattcaaagtctagggaacacaaatatatgcacttaaagtgtaagagtattcacttgttttttaatcatatttttatatcacttgtatttttgttaaatgtcctggttttccaattatggtccttatattaactttcctttaaaaaattaacttcattaaaaaaccatgtatcaaggaatactatgcagccacacaaaatgagaacatgttctttgcaagaacatggatggagttggaagccactatccctatcaagctgatacaggacaagaaaaccaaatactgcatgttctcacttgtaagtgggggctaaatgatgataatacatggacatatagaagggaacaacagacactgaggtctttgggaaggcagaggttgggaggaaggagaggatcaggaaaaataactaagargtacttggctcaatacctgggtgacaaaataatccatacaacaaccccccgccgccaagacacaagtttgcctgtataacaaacctgtacatgtac

SEQ ID NO: 909849 - DNA, 588 bp, Homo sapiens
cttttaaaacatttggacatatttatcttatttgctcagctcctaactatatgaaacatatagcaggtattgattcctgtcaayaccacccctaccttaaagttttcagattggcatagggacatggcagaatgacacagtaggaagaaagcaacacacacagatgaagcctttccattgaagcccattcttacatgtaagtgattgtgctctctccacattttcatattcttctcacaagcacaaaaatacagtattctgtggaagagtttgccttttcattctttataaacaggataaaacagtcgaagctcaagtttttattaaaaatcttcaaaataacttttaaacttagaatattattcagtaccactgaatcgtgcctcatttggcagaaaggcaattctgtccatattacaatactgacagaacaaattgatctaaattttgcacagaagtgctttgttataaattttgttattaacttttatctgaacatagtacacctcgtgtataatattaaaattgcctgcttaattcatactttattccccagaagcaaagaggaaagtagattgtactgatcaa

SEQ ID NO: 909850 - DNA, 588 bp, Homo sapiens
cttttaaaacatttggacatatttatcttatttgctcagctcctaactatatgaaacatatagcaggtattgattcctgtcaataccacccctaccttamagttttcagattggcatagggacatggcagaatgacacagtaggaagaaagcaacacacacagatgaagcctttccattgaagcccattcttacatgtaagtgattgtgctctctccacattttcatattcttctcacaagcacaaaaatacagtattctgtggaagagtttgccttttcattctttataaacaggataaaacagtcgaagctcaagtttttattaaaaatcttcaaaataacttttaaacttagaatattattcagtaccactgaatcgtgcctcatttggcagaaaggcaattctgtccatattacaatactgacagaacaaattgatctaaattttgcacagaagtgctttgttataaattttgttattaacttttatctgaacatagtacacctcgtgtataatattaaaattgcctgcttaattcatactttattccccagaagcaaagaggaaagtagattgtactgatcaa

SEQ ID NO: 909851 - DNA, 615 bp, Homo sapiens
cgctgtgcgtggccatgaaaaaatatttttacatagctactatattcatagaatttgaccttcaawagatagaaaacgcagtgcaaaatgcccttcacacttccatttctggtttcccaggatccatctctggagatgaccactgttacaagtttctcgtgaatcctttcagagatgtttcatgcctatagaagcatcctgtgtgaacgtgtgcctgtgtgttggggggagggtgtgtgtgtataatacctccactttatcctatttacaaagggttgtataccatacaaactgttttgcatcttagattttgtggggagtggagatgagactttttataggaaaaattttaagaacacttatattatgaaaagattaattttattaacaaaagttctatgttggttaatttgtattttgtccttttttttaaaaaaagatttccttttgtagctgtttcagttggctttgctgtaaataaaaaggtatgattttttaaacgtatagttgattatatgccttgctctcattttctgagaaaaagtaaatgtgttttcataataaattcaggtttgtctgtatatttgattatataactgcattattttgaatata

SEQ ID NO: 909852 - DNA, 648 bp, Homo sapiens
atccattaaaatttcttctgcaaagagaggaatattcttggcttggtcttaggtttttttatacttaaggattttgagattatggagaaggtattgcaggcctgtacaattcacatttctttttctttttcctgtatataggtccacagctgagttatcaaactacttattttaccccaagtcacttagaaaaaaaacagtctagtcccaatgccaagtctgctgtagagttttatatagaactatttttattacataaatattagaaataacttaaagatatcacattaataaatgtaaatgttttattaataaatcttaaatgttttagtcagcattataaaaacattaaaaatccaaaagtatttaattatttaaaaaaaagccttggaaaaactagaactctttgtcttgaaattttccaggctatcacacctttaattatagtccaaaaacgtatgtcactaattatagccattcaaagcaaaaacaaagagagtgtacactcaacttggaagcagtaaaagctacttatctcwtttacaattaggaatgattcaggtgaatgatatattgttggacagtactgtagactttattttatagtagcaggtcagagtagaataattatgtgctttttgtcacgga

SEQ ID NO: 909853 - DNA, 500 bp, Homo sapiens
agctgtcctcatttacaaatggagatggtgatatctgttagtcccctgccttctactgcctgctgtaggacaatttcccattcctttcagcaacccttcagtgaagagaggggccacaaaggcaaaggaatcttagctaataggcactatagcaattttctaaatactttattttttttagagcaattttaggttcacagaaaaactaagagtcaggtgcagagatttcccatatgcttcctgccccacatgcatagtctcctgcattatcaacatctcccaccagagtggtacctttgctacaattgataaacctatatcaacacatcacaatcatccaaagtccatagttaatattagggtttactattgstgttgtgcactctatgaatctgggcaaatgtatagagacatgtatctattaccatagtaccacacaaaagcatttccactgctttaaaaactctgtgtctgcctattaaccctcccaaaccatcata

SEQ ID NO: 909854 - DNA, 598 bp, Homo sapiens
tggagtgtagtgtcatgatctcagctcactgcaacctcccacctcccaggttcaagcaattctcctgcctcagcctcctgagtagctgggattacagttgcccgccaccacgcctggttaattttttttgtagttttaatagagacagggtttcaccatgttggccagggtggttttgaactcctgacctcaagtgatccacccacattggcctcccaaagtgctgggattgcaggcatgagccaccgtgcctggcccatgttgatatgttaaccaaaaaaattactctgtttggccccacttgagacatatggaaactcctggactagtatttttttctggcaaggtctgcatggcaggtagacaggggacctgcaggagggtgagagacaggcagaatgggcttgtcagggtccatgaccagaaggaataagacggtgttctaagaagacagcccactagaaccgaagtctgaaagctgttatgctagataaatatttcatgaaatgaaacattatgcattagaccatttgactcacatcatgtcccctacacaaaagtytggaaagtggcagaaaatagaaagattgaacaatga

SEQ ID NO: 909855 - DNA, 606 bp, Homo sapiens
cacagaaatccaaaggtcaacagccagcctcaaagatcaaaggtagatgaatccacaaagayaagaaaaaaacagcacaaaaatgctgaaaatcccaaaagccagaatgcctcttttcctccaaatcatcacaacacttctccagcaagggcactaaatagggctgaagctgagatggatgaactgacagaagtggcttcagaaagggggtaataataaatttcactaagctaaagtattatgttctaacccaatgtaaggaagctaagaaacatgataaaagattacaggagctgttaactagaaaaaccagtttcaagaggaacataaatgacttaatggagctgaaaaacacagcaggataacttcgtgatgcaaacacaactatcaatagccaaatcaaccaagtggaagagagaatatcagagcttgaagacaatcttgctgaaataaggcaggcagacaagattagagaaaaaagaatgaaaagttgtgaacaaaacctcaagaactgtggggccatgttaaaagaccaaacttacgactgattggagtacctggaagagatggggagaatggaaaaaagttggaaaacacatttcagga

SEQ ID NO: 909856 - DNA, 620 bp, Homo sapiens
gtcccaggatactaaatcaatatgcagaaatcataagcattcgtatacaccaacaacagacaagcagacacccaaatcatgaatgaactcccattcacaactgccacaagagaataaaatacttaggaatacagctaacatgggaagtgaaggacttcttcaaggagaactacaaaccactgctcaaggaaatcaaagaggacacaaacagatggaaaaacattccatgctcttagataggaagaatcaatatcgtgaaaatggccatgctgctcaaagctatttatagattcaatgctatccccattaaactaccatcaacatttttcatagaattagaaaaaaatttaaaagttatataaaaccaaaaaagaaatcgcagagccaagacaatcctaagcaaaaaaaaaaaaacaaaccaaagctggaggcatcacactacctgacttcaaactatactacaaagccacagtaaccaaaacagcatggtactggtacaaaaacaggcacatagacaaatggaacagaatattgaactcagaaataacaccacacatccataaccatctgatcttcaacaaacccaawgaaaacaagcaatggggcaaggatttcctatt

SEQ ID NO: 909857 - DNA, 663 bp, Homo sapiens
gactgctggtctagaaggaagagacagacattacaaaatacaatgaacgacaggcacaataatagaaaaacacagatgataaaacataggaaaagagagggaagtgccaggaaatgctttgagtagaaaaagsctcaagagtgtgattatagaccttctttctgactaaatatgcttgttatttctactgtgacaagactaccccaggctggggtgagaggcatcatgtgaggccatctcttcccagaatcccaaatgggatcttctcatttgatttcttacccttcacaccctcccctggattgaaagggataacactcaactgtgtttccctcctggataaaactactctaatgcaatatcttctctttctctcgatcacagtaagcctgcaggtccttgcagattattgcaagcatgattgagcagaaggaaggttgaagtaatgctcttgagtgtccctctgcttcagtgtggcaggagaggggcttagaagtccccgtgtgccatgcagaggtttccaaaggcagggaaattaagagccagtgagattgcagtgggggcttctatagcaagtggccgaggtttgatggggtctacagtgcctaaaagagccagatgacatcaaggcagcaagaaagaccactgtggaggctcttgcag

SEQ ID NO: 909858 - DNA, 620 bp, Homo sapiens
gttctagttgcactgactgttgaaaactgacatctgagttggaaaggagagaaatgtttaaaatagagacatgttgaactcaccaaataaggagggaaagaagagagaagaagaagaaaagaaataagaatgtatgtttctgcaagttcaacaattacgtgtgttaacgcaggagcttaaagtaggagctctggagtacacagactcagagcaccatgaacatagttgggaggcacagcaggttaacagagatacggagtgaagagatagctggaggatgcatggcctataggatctattgcttggaagaagtcaggagggcacaagacaagctgagactgcagtgaaagacctgaattttccaccttgagaggatgagctatagtgaagtgccttcatttgcccaagccctcaaagctaactcagaagttaactccttaatacagttttctttaatgtccagattcaagacaccctttgctctttactcttccccagtacttttcctctgcatactcttataaatatggtagccatgaatctcaktctgcaaacccaatttttttaactttaaaatttttaggctttaaatccagcattttaaaaacttttgatctaat

SEQ ID NO: 909859 - DNA, 619 bp, Homo sapiens
accactgtagcacctctggggctacctcacacgttgtagatgctccataaggaaaaaagacaaggttgagcaaattgtactgagaaactggatgagaatggttggcctaattttrccccaagaattaacccaagcatgcaggtgtatctggtttaattttgcataccttccgtgaaaaatgacttaccaagcagaacttcacacattgcggttatgagaatgcattttttcattggctccagttcacatggtttaaatagcatttcatttcactatgagctttattttaatttgaaacttcacaaatacgaaaccatttgaatcaaaccagatgcaagcactcagaatatcctgctcgttcctgtcagcctgcttcacttgagaaacaattcaatttctcttgacttcaagcaaacccttattgagcaggcctctttttctctaattggcttttagacttctccaccctttactagctggtttgtggaaaaaagcaagtaatcttcaaaaaaaaagttacaccttttttccttaaaaacaagttattttgtttggcaattataaaataatacagaaatatgagtatgcatattgcatctatgtgttttgcttgcatatt

SEQ ID NO: 909860 - DNA, 642 bp, Homo sapiens
tcaatttgccaagaaaaaatgcaaatttagcaaggatattccagagaacagtaccagccagttctgctaacaccaaatgtagcagggaaataaagagagagtaatttgtatttatgaaatagggaaagcaaactaccttggggatgactattttcttattcctagtaaaagacccatttttgggaaatcacaacagtcaacagagaagcaggagaaacaaaagtcttcatttccctcaaaaacactttccttgacgtaaaaggagcttcgtttgttctcttactgcagtcacagcaggatgaaaccatatcataattcttaattccaggaaatttaggacaaattatgagcaagctattcttttaaaacagctgctatttttagtgtctttataattatttaacttcctggaaagaataacatatacaactcttcatcttccaggctccaatgtttgggctttttaaaaatgtttaagtaaatgttagagtagttttaataaaaacatgccaaattcaccttcttctacccacartgtttataggttcttctgtatcactatattacctaaaaaaaatggtcctgaaggaaagaaaaagtgaaagtgggggctttgaaaattatatattacaataactttat

SEQ ID NO: 909861 - DNA, 380 bp, Homo sapiens
atccagtctgagcttcagtcattgttcttgctatamttacataaatacttaggtcaaaccagacaaagctaaatctattttacaaacaaatttattttcctctaattatgttcagtaaaaattgaaatgtctataacaactctgttattgtactgtagccctgtacattgttttcaagtttttattatcaacctgtagactggactgaatcttaaattcttctatgttcctctaatccaattttctcctatgtgattactaagaacagaaactgctctttcttaaggccctataaactaaactcaatgacttaatacaaatttcaaggacaagcttcatgcttgatgcatgggccacacagtgagttcattaaactaccc

SEQ ID NO: 909862 - DNA, 618 bp, Homo sapiens
gtttgtactaatttgttacagcagcaattggaatataatacacttagattgtgatagaatattcttcataggtaagcactctcccatcccccacctccttatgcaagatgtactccctgccccttgacattggattttgtcacatgactttttgaccaaaaggatattactgaacgtagtagatgtaatgtgactatattaagctgttcttgcattgctatcaatagatatcagagactgggtaatttataaagaaaagaggtttaattggcttatggttctgcaggctttacaagaagtgcggtactggcatctgcttggcttctagggaggtctgaggtagcttacatcatggcagaaggcaaagggaatgcaggcacatcacatgataagagcatgagagtgagagagtgcattgtaggtgaggaggtaccacacgcttttaaacgaccagacctcatgagaatgcacatcatgaagacagcaccacgccatgagggatccacccccaagatccaaacacctcccaccaggccccaccttcagcactggggattacaattcaacatgaggttgtggggagtgkggcaaatgtccaaaccatatcattctgtccca

SEQ ID NO: 909863 - DNA, 582 bp, Homo sapiens
taaaaaacataaatatgtaagctccacacctgaacaactgaatcagaatttctgggcgtactattaaatctctacaggtaattctgataagcagccaaagttggaaaatatttaggcctgagtgatttctgtttgtttcagaatgtaaaacaaacaaacaaacaatctaatcactgactactgtttttcttgttcacttttaaaacattaagtagacatagtctgaattgaccacttgagtttctgccaaatttcacagcagacatattcttgcctgacatggtcaaaaaagttattttatgattcaaatcccttccaccccatcagacggatagtagaacgaacattaaccctgaaaacatcttcctctgagtcaaggtttctcgccattggcagtattgacattttgggttggataattctttactgtagggtctgtcctgtgcataataggataggtagmatccctgccctctacccacacaatgtgagtagcatacctcctatccccagttgtgacgactaaaaatgtctcccatcgtggctgactgccccatggagggcaaaatcaagggcaaaatg

SEQ ID NO: 909864 - DNA, 583 bp, Homo sapiens
cagggctctataaaaatacagcaaagagaggccatttcatttgaggaaatgttatatgtagatatttttaacttgagtctagaaaattttctagaagtataaatatgtagcttaaatatgtttcttaaagatcactggataactaaaactgatggcttgcctcacatccttgttttaagattcacctgcttaatacccaggaactcctgaaatttaaatacttgattaaacattaagacacctgaaaattaaaagtttaatgtaatcatctgacctcaaattatgccaaaaataaaactgctccttttctaaaatgattaataaaaaagatggcaatgaaaaattgtaacacaaaaagcagatgggtatcgattcacttctcttccaaacaaagtctttgcaactcagctttctcattgtaaatgtagagttttacaaatccttacctacttytcaaatttaactggaaaataaattgaaatgatgtatgtgaaagtattaaaactatgagccatatcagtgcaatatgatgaagagttgaggtaatttgaaaatatttagcctggagaaaagaagactcaca

SEQ ID NO: 909865 - DNA, 602 bp, Homo sapiens
gatttgcttgatttatttctggtttgcttgatctattttgatcaagttaaccagatagctgccaatagccatttttaatatgtgtcacagtgccacrgatgtgttggggcagcaactgctggtttccccatgtcctgtttagtactttcctttgttgcatatagacaaataaaatagaagccaagaacatctggaaaccatcagtaaataacagtttggaaatttctgcttcatttggacttgtcatacttcagaaaagactattcataatataattaaatttacattttaatttcttctggaaagttcatctacttgataatctcttaaaccatttatttttaattttcattgtcatcatcccaatttagcaataactgcacttaaccctctctacctcctcaaatgtacacatctggtctccagttataataggtttcttcctaaaacttagaatggagaatcttattccctacattataagcctctaaagtcttccaatggtgtattgaaaaaatattcaagctcattagttataaattcaaaattcaccatatgctggaaactgtttgttcttacctctatctcatcttttcacaata

SEQ ID NO: 909866 - DNA, 586 bp, Homo sapiens
ggactctgagcaggctgttgtggaacagggctgtccccttggccttctgtgagtgcccactgcacctgttccccttgcctggaatgtcctctccgcactttcatttttctttaaccaatctaaaggacaacttgtcactttccagggcataaattccctgacctctgacaggccaggtcccctgaaattccccgtacagcccccactcctgttgttcatttccagcaggtctcacaattgtaagcaggtcattatttacatgattacttgaggtcttccccaagaccataggcccatgagcacagacacagctggcactactgctcaccgttccaccctgggcaccccatctgtgccgggtctggtccatggcaatgcccaatccatccactttgaatgaatcagtgaatgaatgctcacagacagatacacccccatcttatccagaagacagaaattgtccgctgccatgacctcgggtgtgaagaytgcagaaccatggttaggcacgctgccatagcattccctgagtatctcatgccacctgttctttgggccctaaggtgacttagagtgtggaatcagc

SEQ ID NO: 909867 - DNA, 621 bp, Homo sapiens; identical to SEQ ID NO: 909700

SEQ ID NO: 909868 - DNA, 508 bp, Homo sapiens
tttcactgtaatgaaccatagtcctgagtctccctgagccctgtgagcccttctagtgagtcacggaacttaagaatggttattggccgggcgcggtggctcacgcctgtaatcccagcactttgggaggccgaggcgagcggatcacgaggtcaggagatcgagacaatcccggctaaaacggtgaaacaccgactctactaaaaatacaaaaaattagccgggcgtagtggcgggcgcctgtagtcccagctacttgggaggctgaggcaggagagtggcgtgaacccgggaggcggagcttgcagtgagccgagatcccgccactgcactccagcctgggcgacagagcaagactccgtctcaaaaaaaaaaaaaaaaagaatggttaygagacaccagaaatagactctaagacagccaggcagaagccaacacccagaacaaaggccaggcacagaaccagtcttttttttttttttttttttttaagacggagtcttgctca

SEQ ID NO: 909869 - DNA, 540 bp, Homo sapiens
accatgtgagcacacaatgagtatgcagctacctgcaagccaaggagaggccaaacttgccaacacttagtcttggacttccagcctccagaatgtgtgaaaatacatttatgttgtttttgttacccagtctgtggattttgttacggcagcctgaacagactaatccatgcttcattccatccacatttgttcaattgagaccagcaggctcaccatgcataaaaaccatggcagatcttgttaaactcccaacttcccaagccccagcccagacattctaattcagttggtccaagactgagattcagaatgtgggtgacttcagaactccgcctagagaaacagatttcacagcttggcagagtgagcaaagccagcacacagcaggtgcttaataaatgctttctraatggatgggttaatggatgaacacgctctttcaaataaaagagtacaaagccaaactcagataactttatgacatttctcacttcagcaagcagtgtttggtgagtcaagtggtttatctgtagttgg

SEQ ID NO: 909870 - DNA, 626 bp, Homo sapiens
aatatataaaaatatgtataacatatataaatgttttataacacccccagtggggtctagaacagtaccctatgatcaaacatattagtaactcttcagtaaaacgtacaaacatttacacttagtgggataaataaagatcgtcaactggtcaggtttgtcatcaaaacttgcatttttcagagcttttggataaatgatggtgagcctgcactaacccctactttaggagtgtgtgtgttcagcaaagagcagttactgccccaatagttgctggtgtttttacttaaattaatggcagataatgtggatctcatcttttacaaaaattggaatgtgaataaagaaattctattcgatatacaactttgattcctactagactttataaaagaccatgtgatactttaaaaacagtggtgaaattcactcttcaagaagataatactcacaggagggcataaatgccttcttgagtaattttagatccagatatgttactctgttctgagatgattgataagatcagaattataratttagaataggaaatgaggtttccattacatacagttaaaattagtaccaagacatttttagctttttccctttttgctcataagtct

SEQ ID NO: 909871 - DNA, 656 bp, Homo sapiens
cctattctaacaaggggaccatggtggcactttgtatacctggttatcagcataagctcagatcctgtatccactaatactgaaagattatgggtatacccccttccccartagacagttatctttgtagaagtaatttacctaagctggtaattcaggctcttctctgaagttctgcgactctttttttttttttttttttttaagacggagtctcgctctttcgcccaggctggagtgcagtggtgctattttggctcactgcaagctccgcctcccgggttcacaccattctcctgcctcagcctcccaagtagccgggactacaggtgcacaccaccgtgcctagctaactttttgtatttttagtagagacggggtttcaccgtgttagccaaggtggtctcaatctcctgacctcgtgatccacccaactcggcctcccaaagtgctaggattacaggcgtgagccacctcacccggccgaagttctgcaactcttacaattaatgcttgtgaagaatattcagctcttcttgccctctagtttaaggagacgagagtctctttaaacatgcccccaaggaggccctctgattttcacactttgctttacattggtgattgattgtccttaccctgtcattttctctcat

SEQ ID NO: 909872 - DNA, 579 bp, Homo sapiens
tctgctttttatcctaaataaacccacgcatctttctcatttgagaaaatttacattgctttccctggaatatttcttgccaactatggcagtttacaccatwgagaggaaagtctggttaacaccaagttttaggcctcaggtatatccaagatatacttgttccagatacagagagacagatgaataaaaagattcaccacatgttgaaataattggtctcaaaaatgccatcaagggaataataaatcaacatggacagaaaaactcagtacatcaattcctagttacagacatattttttccacatgttgattcttcatttctaccttcatttccatcgtaatctaatgaaattctaaatggacacaattacttctcaggtcattcactgttattagaaaggggggtggggaaatctggcattacctgtccacattttcaggtgcactgtccttgacacagcaattccacttccaggaatttggcaaagaaggatctttgccaaattgatacctctctataccaataccaaatcttcctaaatattcagatatggattcaagacaaaggcaagaa

SEQ ID NO: 909873 - DNA, 586 bp, Homo sapiens
actgggcatgctacctcaaggtgttggggggagaatctgataaatgccacactcagaaaggacagtcttggctttctgatggctatttacagtgacctccattatccggctggggctctatcttctatgcagcacaaagaaacattgttatttggcagtatttttacaaagttgtaattctttgacttagtcatttgtgatctaatttatacaaaagtggatattatcagcacaagcatgtctaaatttcaattattcctccaagtatatttgaaataacttgcacttaaaccgggaaatcttcgaatttgtttaaattatgtacttcttttcccaactgtatatctcatatttgctctcaagtccattcaaattatttaaaaccatccatgtcaaaccaaaatatagatcaaagccatagagttctttcagtgttttgcttttggcttctgttactttttttttttttttggcctaaaatgtcataaatctatcattaaccaccaactgttctgaatgttttttaaaaagcaagtttaattgaaaaggattaaygaattcttcatctattacttcaattagctta

SEQ ID NO: 909874 - DNA, 632 bp, Homo sapiens
tttaattgaatgttgaaagaaaccaaaagtcagaggtaggtttttttaaggcctatgatcttcagtgttgatacatattctaacctgaatttctagctaataaaaaatatttcatgttcttattatatgagccaggaactgtgccaagagtgcattatctcatttgattttaatttggatgaacaatcctttaagtactattatcattcacactttacagataatgcagctaagacatggagaagttaaatcgcttgtctaggtgcagacctagcacatgaacaagttgggtctgaaggaatctaaagaccacttggtttcccaatgcatttctcataatcactttaacaacagttaaccaatgcaaaaagtgataacattttaagaaacttacaagagaacacaatctacaagacgccatgttacaaaggctgctatcaaacatatttgtctgcctctatagttacgtcaagtgaatgaatatacaatcttcccaatattctcacagagtaccagattatcctaactttcgaatctgcctcataatgcctaacacatcaccaacattaccaaactacatgcctctaaaatggattcamttctacaaagccctctacaattttcacaagcaa

SEQ ID NO: 909875 - DNA, 502 bp, Homo sapiens
tattcactatcatgagaacagcacaagaaatacccacccccatgattcaattacctctcaccaggtccctctcatgacgcatgggaattatgggagctacaattcaagatttgggtggggcacagccaaaccgtatcactgtatctttgttctcatttgtttcaaagaacttcttgatttctgccttaattttattatttacccaaatgtcattcatgagcatgtttaattttcatgtaattgcatggttttgagtggttttcttagtcttgacttatatttttattgcactgtggtctgagagtgtgtttggtataatttttttttttttttttttttttgcatttgctaagaattgctttatgtccaattacgtggttgactttagagtatgtgccatgtggcaatgaraagaatgtatattccgttattttctagtggagagttctgtagatgtcaaacagatacatctggtccaatgttgagttcaggtcctgaatat

SEQ ID NO: 909876 - DNA, 529 bp, Homo sapiens
ttcactatatattctgaatacaaatactttatcagrtatatattttacaaatatttgttaaggggcagtggcttgcccttttattcccctaacagtggcttttgaatagcaaaagtcctaatttttttatgttgtccaacttatcacattttggggtcatatttttggtgtcatatctacaaaatctgcgctcaaagtccctgaggatttctcttatgttttcttctagaagttttaaattttggtatgtaatcaactttgagttaatttttgaacatggtgtgaaatacagctctaagtttatcttttttacatataaatatataattattctagcacaatttgtttaaaaagctaaagtttatccattgtattgctttgaacatttattagaaatccattttccatatatttgcatgtctatttctggtttcttattctattttactgacctgtatgtctgttaatgacagtaccacgctgacttgataactgtagctttatagtgagtttcaatattgggcagtgt

SEQ ID NO: 909877 - DNA, 599 bp, Homo sapiens
cccaaaatgaaatcgtctaatgtttgcacctacttataggtttggattcaagaaacataagacaaaaaattcrccagagttttgttaatgtattctcataatacttaacattttgaaagcagcattacatatattttaatacagacatcatattggtaaaccaactctgaaaattacaaaatgaaaactaaaacaatcatccttattagtagcatttgccactttccatggtgtaaatattctcaccacggtcagtttcaagctaccaacacgatgtcactgaatccagattttggaagaaacaggcaaaatctgctctcatgagctgctcgctaagggcatgtctagcacccaactatttaatcaccatgaatacaaacagctacatatgtagacagatcacattatggtgactcaaatattatgagcagtgctgcatgatgtttcaagatggtattgagaccttggtaaaagactggaacaaaacaccacacaatcttcccttgatttagaaggcccctgcatttctggaagacccagtgcacgttgtgtatctgtataagcacagggaattctggggtcagatcaatggaaacaag

SEQ ID NO: 909878 - DNA, 482 bp, Homo sapiens
acagtgcagtaagaagacgctgcccatggaacacacctgggtgggagtcagccctgccacttggttgctctatgaccttatgaaactcacttgacctccccgagtgccggcatcctcatttatgaagtggagttgttcatgagtattaccattttcccctagccttgtagggtttaggggatggtgagagagaaaccacagagcactttgtttatggctataacgctgccattttctactgttactattactaccaggaatgaaaacaacaaataaaaacaaaagcaacccaaaaattgctcccaaaggaaaggtgtgtcgcttcctctctgttctgttctcacacaaagttgcctaggaccctgatatgctttgggtgtgtctccacccaaatctcaacttgaattrtatctcccagaattcccacatgttgtgggagggacccagggcgaggtaactcaatcatgtgggccggtctttcc

SEQ ID NO: 909879 - DNA, 698 bp, Homo sapiens
gattgtgtttaaacttaagttttaagtaaggccttgggattaaaggctatttcttaagtacctaagtatctagtactccagtgccattatctttttgatatttctgtaacatgttagattatgatcatttaaaaattagtatcagagtgctgcgtcctattattactacatatagtctatacagaaatggataagacatgttgaaatagcacatgaagagctcaagttcaaacacacaggcagccctaaggagctgcctgaagtgcctggtagccagggcttctcatcactgagtaaatgatgcactcagcttccctcagaacacgaatattttctgagcagtagggcctcgggtgtgggacatgcagacccttattgggaaaacaattgagtgttaaatggtaccacaaggaagactggtgtgaccctaaactgagggcagggacttgaaatgaaagggatgcagttcaggggagtacatgtcctgcagcatgttgggagatagcaaaccaacctcagatttcaattttgtcaaggatgatacaagaactagtagtgtctcggtgactgtggtctactcagagctccatcacagctaccctgagcccaaggcagtcaggtgtggtctgatttcataasgtcttcagtgagacggacctggatggggattctggttctaccactgtgagaactatctt

SEQ ID NO: 909880 - DNA, 593 bp, Homo sapiens
gctgtatatgcaaattttctctctcttatcagtcaacaatttagacaagttttctagtaagaagggtatgaggacagacagaggcttgctttgtacctgctgtgtgctagggacacactcttgcaagtgatttctgtcctaatagagctgggggtcacgttctgttatgggagagcctataaagcatgatacaattaataaaaataatagctttatttgagggccttcctgttctacacactgtgctttttgagaggtgatggttgtttgtgagattcagtatctgggataataagataggcgttgaaaaaagaaaaagggaaaaaagtcagcatccaactggagaagcagaaccagcaggatatatgtgtgcatgtgattagatagatagagatgggagttgaaattgaaattgattgtttatttggtttatgtgattttgggggctggacaagcaagtctgaaatcctcaggacaggctgtaacccacaggtatggctaaagttgctgtccacaggtggaattatttcttctctytaggaagcccctgtcgcacttaaagtcagctgattatggatttttattacttgtat

SEQ ID NO: 909881 - DNA, 599 bp, Homo sapiens
tgcctgttatgggcatgtgcttgcttctagctggctgactaacaatagaaacaccatttgggatgttcctatgaaatgagcaccaacatgatttttccttaacaatgtgcagccatggatgaatcaagtcaggtcaagaaagcgatttttgttacctgtgacataatgatatgattaatagctatagaatcataaaatgtagctcaaggacagccttagctataaaataaacacatccagtcttctacttttattttgtaggtgaggaaacatgggtaaaaggtacaggggcttgcccagggtcaaatgatttatgataatcagcctcaggactagaattcctaatccagtgtcctagtgaccatgccatactgcctcttatccatccttccatccacccagccatccattcagtctattctacaggcatttatgaagcgtatccttataaagcttaactctgtgccagaaacaatgtgtggctctagtgaatcattcctccctgtgtgcacactcctttgcagtatgacttttctgttcctcccgtcaggtggtaractttatttccccaccccattgaatctggactgactttgcca

SEQ ID NO: 909882 - DNA, 623 bp, Homo sapiens
tttttagctcaatataatcaaatttctctatttctrcgtctgttgcctatgctttttaagtcttacccaaaatttttttgcccagatcagtctcctgtagtgtttccccagtgttttcttttcatagttttaggtcatacatttaagtcttcaatccattttgagttgatttttatacatgatgaaagattgggcactagttttattcttctgcatatggatattcagttttcccagcactattattagagtctgtcctttccccagtgtatgttcttggtgtctttgtcaacaaccaattggctgtaagtgcatgggtttgtttctgagttctttattctgttccattgacctatgtgtctgtttttcatgccagtatcatgctgttttggttataaaagctttgcagtataatttgaaatcagataatgtgatacctctagctttgctctttttgttcaaggttgctttagctatttgggatcgtctgtggttccatatggatttaaggattgttttttctatctctgtgaagaatgttattggtattttgataggaattgcattgaatctcacattaggtagtatagacatttttataatattcttacaatccatgagca

SEQ ID NO: 909883 - DNA, 592 bp, Homo sapiens
gggttttatcaccttgcccaggctggtttcaaattcttgggctcaagcaatccacccacctcatcctcccaaagtgctgggattacrggcatgagccactgcccttggccatgaatattcttttttcatttcataacttgtgacatagacttatcctttagaataagctccagtgtcactggcattagtgagactttgctgagccttgaagttactgaccactgatcaccttccccatttgcttctacatcatctacatcatatgatgcaaatatttattgggatgttttaatttgcatattttcccctactgtcaccagactataaactctctgagagtacggttttacatgtttagttctgttattcctgtatatggcacataataaaatacatagtaaatgtttttaaatcaataaattaatgatttactttatagatgaaaaaattattacccatgggtctgggttacatatagtgagatatataagagcagctcatattgcttacagagtacatgcaatacatgattatagatgatttagaaagtcttatatagacttgcatattgttaaatgcctatcacttctaa

SEQ ID NO: 909884 - DNA, 628 bp, Homo sapiens
atggtaacccacacacattctgattattggcaaacattcatatagataaatctcccttttgcttgataatgagtgaccatataaaaaaatcaaagcaaaatacaaaaggataagaatctacaggaacaaactgtccaattaaagaatcaatggaagaatttgacctgcagcgacaaattgttcaattgatccaatatatgtaaccgtaatctgaagcctaagaaacagtacagtagaataaataaaaatgctggatttcagaggaaggacacatttttgaaagtgttctcttccatgaaaccaaagacgatttaaagaaccaatttggcatcttcaataagatgcacagaatagggattgggctgaacctatgggcatggtgggctccaaaatccaaggcaggtagttgtggttgagacctatgctcctgtagttagtgttcccttgcaagtatttcatgcaagacggagaccagaaacaaaaccatggcctgaagtcaggttgtagagaggcctaagttacctctgagaggaagctgaggctgaaagaaatggaactatgttgttggctagacasagtttatagagtcctctgggctcagggaagtgaaaggaaaaaggagtcttct

SEQ ID NO: 909885 - DNA, 591 bp, Homo sapiens
tcgacctaccattttttatctagcaaaaatattgtttagaaatgaagatgaaagagagtttttcaggcaaatggaaactgagakaatttgtcgcctatagacctgcactatcaaaaatacaaaaagagaaatgataccagatagaaacctggacacatacagagcaataaagaatattggaaatggtaaatatgggctaaagtaaaagatttttcttatttttcaactgtctctagaagacaattgaatatttaaaatagtagtagtagtaataataataatgcattgttggatttgaagcatatgtagaaagcatgatgacaatggcacaaaggaaaggaagggaaaatggaagcctgttgttctaaggttcacattataactgaagtaacatagtattttatgaaggtagactatcgtaagttaaggatatatattgaaaccttagaagaaccattaaaacagtaaaactaggaggtatagctaataatccaagagtggaggttaaaaaaaatcccaaaacttaataaacccaaaaaagggtggggaaaaaaggaacaaaatatctatataatatatagaaaggtaata

SEQ ID NO: 909886 - DNA, 703 bp, Homo sapiens
gtttaagtgaaattgtaagaacaacttacatacggaattgaagttgcatttagtacacataaaacaacggagtaagacttttttctggctttgaaaaaatgaataacttttgtagaaatgttgccttgggtatttttaaataggaataatttataaaaattaggctaaagatatttcaaatgacggaatggcatgtaaactctgtgctgcaagaaagtagcctgctttttttgagtgagatggtggcagaaaataattcaaagacaagtacttcttgaaactgtagagaggcaagagagggacctgatgtcctaagcccaatttttccatttattaccggaaaataacaactcgttaaccaattctattaaatatttgcattttagatatgcaaatttgaagaaaaaagaaaacaaaaagaacctcctagctatcattgaagatcccctgagcttttcctccgaactgataggattctgtaaaatatcattagagaataaatagcaatctggagctaacataaaagcttctgctgctcatgagaaaattataagataatattcatttggttgtaatcgtytactaaaatgatgccccagggataatagaaaaataatacattccaaattgtttacctatttttactgaaatgattcctttatgcgtcatccaacacagtctaaccccctgaaagagaccttta

SEQ ID NO: 909887 - DNA, 604 bp, Homo sapiens
tgtatgtggccccttgcttccagagggaaaggagagaaaaaggaaatcctgtgactttctccctacccttaattaaatacacaactaaggtgagttctaatttcctaaccttgccaaaaggctcatcactaagccacaggaatattcttggcagtgcctcagatggtctaaaaatgctgtggccaaagggcatccagatgataatggtgacacctgcttttctccctgaaaagcacagataccgcacctgcctttggttctgttatgacttcattaagctgcacaaggtgtatgtgattggaaaagcaactgctcctttgttttgctttttgatttccttctccaagtgtgtctattttaaatgggtcaatggatgttaatgctaggaaaagctgacatttgaataagatcacagagtgtggcatccagcacctcagcaggccaagccaggctaggtcaggagagtggggaactmtgaggccccagagtgggcgccaagaatcggtgtgtccaggcccttcctgcaaagcacctctgcccttcttgagtagagaagagtttccagaagctccacacctgaaggagtaggggtttctctggctgg

SEQ ID NO: 909888 - DNA, 575 bp, Homo sapiens
tcattacaaggtatggagaaaaatacaaacacatgatttatttytttttcatagcagaaataaatattttagattcatctaggtgtaagttagaaaattaaacataattgaattgaatttatataaacattccttgggtgcttacattatgtgagatactgggctaaaaatttaattgaatgagcgagttcctgttcttcagcaatctggtgaagaaatacaacctaaggtgacattaccgttcactttaacagtgaggtatctggacagtgttctggaagactgcagagactgatgtaaagcaaaagtaaatgaaggagcctaggacaggctccatggaaatatgacttagctgacttttttttgagacagagtctctgttccccaggctggagtgcactggcgtgatctaggctcactgcaagctccgcctcccgggttcacgccattctcctgcctcagcctcccaagtagctgggaatacaggtgcccgccaccacgcccgacttagctgacttttaaaccatgtgacaaaaaatagtcagcaaagaacagaaaaagatttaagcaaggac

SEQ ID NO: 909889 - DNA, 575 bp, Homo sapiens
tcattacaaggtatggagaaaaatacaaacacatgatttatttttttttcatagcagaaataaatattttagattcatctaggtgtaagttagaaaattaaacataattgaattgaatttatataaacattccttgggtgcttacattatgtgagatactgggctaaaaatttaattgaatgagcgagttcctgttcttcagcaatctggtgaagaaatacaacctaaggtgacattaccgttcactttaacagtgaggtatctggacagtgttctggaagactgcagagactgatgtaaagcaaaagtaaatgaaggagcctaggacaggctccatggaaatatgacttagctgacttttttttgagacagagtctctgttccccaggctggagtgcactggcgtgatctaggctcactgcaagctccgcctcccgggttcacgccattctcctgcctcagcctcccaagtagctgggamtacaggtgcccgccaccacgcccgacttagctgacttttaaaccatgtgacaaaaaatagtcagcaaagaacagaaaaagatttaagcaaggac

SEQ ID NO: 909890 - DNA, 600 bp, Homo sapiens
tagattagatttcatttgtgatgtaagaaaaaaatacataatatctttttcatatttaaaggagttatttaatatcagtaggtcgackgctgctctagtgtctcacaattgtcaaacttgtattatgcatggggattacaagtgctttattaaatgacttgttaatattatcctccctcaaaaaggatttgtagtaagaaacgactgccactacaagtgaactagaagacacgagtcctgaaattctgctactcattagtacgacgaggcttgcattagaataagcacactaagaaaaagtaacaaattccaatttcatatttctcatccatgtggaaaaaataaaatataagcctgaatttcaaatgtgtttggtggagggatgttttagaatgaccagtatttttatttgttttatttttaatttgatatggcttttccactttgttttgttctgtttaaattccttaggtcttctgccactcacaatactagagtcctaaataagctaactgacatgatttccaggttgcccaaatagggaaatagtgagatgcttaaataattcgattagtgtagtttattttccatatcaagtaa

SEQ ID NO: 909891 - DNA, 574 bp, Homo sapiens
tatctcattgtggtttttgcatttctgtaattattagtgaagttgagcttttttttttttttttttttttttgaracagagtctcactctgtcaccaggctggagtgcagtggcacaaacttggctcactgcaacctctgcctcccgggttcaagtgattctcctgccttagcctcccgagtagctaggactacaggcacgcaccaccatgtccagctaatttttgtatttttagtaaagatgggttttcaccatgttggccaggattgtctcaatctcttgacctcatgatccacctgccttggcctcccaaagttctgggattacaggcgtgagccaccttgcccaattgcattttttcatatgcttcttggatgcatgtatgtctccttttgagaagtgtctgttcatattctttgcccatttttcaatgagttgtttgttttttgcatgttaatttaagtccttcatagattctggaaattgaacctttgttatatgcacaaatgcttcctagaattttatatctagagcttgtgagaaagaacatctttcatctctggggacagaaata

SEQ ID NO: 909892 - DNA, 619 bp, Homo sapiens
catggaaacatagaggggagcagcacacactggggcctactggaggttggaaggtgagaggagggagaggatcaggaaaaataactaatgagtacwagacttaatacctgtctgatgaagtaatccatataaaagtttccccatgacacacgtttacctatgtattataagaaacctgcacatcctgcacatgtacccatgaacttaaaagttaagaaaagaaaaaagcattatacagaatttattctttaatcatcagaatatcattattctttttttaatatatgtgccaggtattccactggatgctatataaatttttttatatgccacttctaaaagattttgaagtagcttatatatatataaagttaaaagaagttatggctattaatagagatataattatattatcaaccaaaggtctccaaaagttgctaaatgggattagctgatttggatcaaagctctctggtgaaaaaagccaaataggatacatgagtagttacagaaagggcagagaggtgaacttatattttctggcaataaatctgatttataaatattccaagttgctgactggtggcaaatttatatgttttgattatatgcagtatag

SEQ ID NO: 909893 - DNA, 622 bp, Homo sapiens
ttcttgaatctgcaagattatgtcttttgcccaatttgggaagtttttagccattattyccttgaatactctttcaggttcactttctcccatcctgtgggcttctaatacaacacatgatggatcttttgattttgtcccacaggtgttggaggtgctatttttgttttctgtttgtttgtttattttacagtctgcattctccctgttgtttggattgggataaattttattgatatgtctttaaattcactgattctctcctttgtcatatccactctaatattaagtccattcggcaaatttatttttccattattatgttttttggttctttaatttctatttggttctttttataatttctattcatgactgggtttatttttatttgtttcaaaagaatttataattgattatagcagcatgtatgtgggctgctttaaaatccttttcgaataattccaagatctgactcatctcagtatgagccttaccttttggtgttgattgccttttctccttcagcttgattttcttgtatgagacatgatttcttggtattttgtatgttatgttagcctctggatcttatttatatcttgtattttagcaggcagtc

SEQ ID NO: 909894 - DNA, 616 bp, Homo sapiens
tgattcgcaatggtgtttcagtgtggcccagagacccatagctggagcagtggtgtcttaaatagactgttcctaagacatgctgtaagcagtgttctctgctgcccctacactccttttttgggggaatggttttccaagcttcccgtaaatcctatgagctttccaattatctgctccctccaaaatatcttttcttataagttagcaatttatctgacttgcacccgagatcccaattgtgatgcatattggtacccactctttatctgatcagctgtggccagcttggttaaccatgtgatcaactttcctcagaaatagctgtatgagtgaggcaggaaaccagaggatattagagaacattaatccgaaactacaaaaagattaaaaaaaaaaaaaacagagaaaaaggtctttttgcatgcactagtttactctctataaacaaaaaagcaaaggtgcaatgactttgagggataatgaatttattctgttatcacggtgtattagtccattttcatactgctatraagaaatactcgagactgggtaatttacaaagaaaaagaggtttaggggactcacagttccacatggctggggaggcctcaca

SEQ ID NO: 909895 - DNA, 685 bp, Homo sapiens
tttcaatttttttatttttattttttggaacagggtctcatctgttgcccaggctggagtgcggtggtgcaatcacrgcccaatgcagtctcagctgggctcaagtgatccttccacctcagcttcccaggaagctgggactacagctgcgagccaccatgcctggctgattttatttttcttttttggtagagatacggtttcgccatattgcccaggctggtctcaaactcctgggctcaagcaatccgcctgccttggcctcccaaagtgctgggattacagttgtgagccactgtgcccgacctataatttatttttttaaacatttaaaactcttttgttaaaaaccaagacttaaacacacacattatccagggtgtacacaaagggtcatcaatatcattgtcttccatctccatatcttgttcctctggaaggtcttcaggggcagtaatttgggtggagctgttatcttctatgatgacaatgccttcttctggaatacctcctgaaggacctgctcaaggctgttttacagctattttttttttcttttataagtggagttgacccttgatcaatgtgaggtttaagaatatagacccctgcataatctaaaattcatgtataattttttactctcccaaaacttctaacagcctgctgttcaccagaagctttg

SEQ ID NO: 909896 - DNA, 638 bp, Homo sapiens
attgttctatatttgacgtaactctaagttctcgtaagaaatctcaaacctgtctctaaatctcctctgttttcatctaaagattttgttagtgtatatctttgagcattcagaagtagacagttgcaactacaaattcatttcatctgttccacaatggtttggttacattgaaggattatttaacgactctataacatcctagttatattttctgagaaatttatggtccttatcgggcctcaatcaaatgtcattcatgtcttatttcacatgtagttagaaggggagtgtgtgtaaaatatggccatgaggtgactcttgcagtatctttactcatcttggaaacagaaaaaatgagctagtttcataaacttaatttctttacctcttcagttttctctacctgaaatattgaggcttctctttaactcatcttttaaagcacagaatttcctaaactttttaaaaattaaatgacttttcctgattttgcagttttcttttcccttcatgaacgttatcactgcagaaaaagcaasgcttgtactttcaagactataaaataagcccagtttataaaattattatttggaggctaaatatggaatttcagatactcactctgaaccacaaaa

SEQ ID NO: 909897 - DNA, 561 bp, Homo sapiens
acctcagcctcccaagtagctggagttacaagcatgygccaccagactgggctaatttttgtattttttgtatagacgggatttcaccatgttggccaggctggtctcgaactccttgcctcaagtaatccacctgcctcggcctcccaaagttctgttattacaggcatgagccaccacactcgatgtaaatatttttatctctttaacatacaccctagtagaaggcagctagactcaccagagaattgcctgcttgtaaatagtttttctactacatttagttaaaatgctcttctcaataaactatcctactatatatatatataaacacacacacactgtatccctacataaagctgagggttaccgagaataagtcaaatgtattcattaatgtcaataatgaattgggtgggagtggatttagacagaaaagaaataaaaacaaagggtatatgtatatcaaatcatcacactgtacaccttgaatatatacaatctttattgtcaattaaatattgttttaaaaaataaaggaccagaagctgaatatagtta

SEQ ID NO: 909898 - DNA, 561 bp, Homo sapiens
acctcagcctcccaagtagctggagttacaagcatgcgccaccasactgggctaatttttgtattttttgtatagacgggatttcaccatgttggccaggctggtctcgaactccttgcctcaagtaatccacctgcctcggcctcccaaagttctgttattacaggcatgagccaccacactcgatgtaaatatttttatctctttaacatacaccctagtagaaggcagctagactcaccagagaattgcctgcttgtaaatagtttttctactacatttagttaaaatgctcttctcaataaactatcctactatatatatatataaacacacacacactgtatccctacataaagctgagggttaccgagaataagtcaaatgtattcattaatgtcaataatgaattgggtgggagtggatttagacagaaaagaaataaaaacaaagggtatatgtatatcaaatcatcacactgtacaccttgaatatatacaatctttattgtcaattaaatattgttttaaaaaataaaggaccagaagctgaatatagtta

SEQ ID NO: 909899 - DNA, 579 bp, Homo sapiens
atacagccatgaaaaagaacaagattgcatcctttacagaaacgtggatggaactggaggctgttatcctcagcaaactaacacagaaaaccaaatrccacatgttctcactaataagtgggagctaaataatgagaattcatggacagaaagagggaaatagcagatactgaggcctacttgagggtgggggctgggaagagggagaggttcagaagagaaaaaactatctgatactatgcttagtacctgggtaattaaatactctgtacaccaaacccctgagtcatgagtttacctatataacaaacctgcacatgtactcctgaacctaaaataaacattaaaatattttacaaaaataaaataaattaacaattaaaaaaagaaaaaaatgagacaataaatagatcctgggaaaaactgtccccagaagtgttcttttaaatttgcactacagatgtaatccaagttgagtaaaatagaaaagcatggatttgctgttcctgaaagtcattcatggttaattgccgaacactttcatctgcagtgtctgtggaagggtagaaccttaagtag

SEQ ID NO: 909900 - DNA, 548 bp, Homo sapiens
ccatctaaaaaggcagtggaattccaaaggttactaaatatactctggctttttcatggcgtgcaataataaaataatgctctcttttcatctgtttttgtctttttaggtaaaagtattttttcaggaaggaactttctaagatcattcagtacgtgtttggagtgaagccctgttcattttcatttctacaaatctcataccagaaagatctaatgcagccccactcctatgtgtagcttccatcagtgtcaatgccagagaggcccaagggccccctcgcacagttgagtatataacctcatgagtccacaacttcacttccccgagtgaagagaagaatggaagtgaagaaaagaatggaaattcaatcggtaccagcagactgtcagttcctccagtagcaaacaataaatgcatctgagraagttctggtgaaccaatcaacaggggggctttgttctgaacttggcggagcctacctcgtgccttgtaaatgtcagtgtgtgtacgtgtgagggtctgacattactcagcagcacatacca

SEQ ID NO: 909901 - DNA, 609 bp, Homo sapiens
gttttaatttaaaaattaaaaatgtaattcttccctcacagatgtgagctaagtctcagctcttccttttatctcccaactcctgattcaactaagcaaacaaaaaataccttccttttctattcttccttctacatgataaacgcaaaaagaaggaaggcagagagagagagaaagaaaaaaaataaaaaaagagagaaagaaaaagaaagagaaagaaagaaagaaagaaagaaagagaaaggagagagggagggaggaaggaaagaaagaaaagagaagagagagaaagagagagggaggaaggaagaaagaaaggaaggaagcaaagaaggaaggagggaaggaaagaaaaagaggaaggaaggaaggaagggagggagagagggaggggaagggagagaaagaaaaacagaaagaagaaaggatgaaagggggaagaaagaaagattgtctagaaaaatgcatgatagtgttttagcaatcattyaaatgaatcattcataactgttttctccaatcagaaatttgtctgattcagaaaatttagaagtatttaaagaaaagaaatttgtctgacactacttctctttacattgctgaaagtgg

SEQ ID NO: 909902 - DNA, 616 bp, Homo sapiens
ttacaagacagagacagaacagggaacattttaaccttgctcagggcatgcccttagaaactataaggattgatgatgcatcaagattaatttgatgacttgcatttcaaccaagagggcagattttcaggaacgcatattctgacttggagctgggaaaggcacaaaccctgggcccagtccatctttggggactgagaacagagagttgagaactcatcttactaataattcctgcaatattggagtgtgtgtttttaacttggagtcagacacacttttcctcacccgcagagtggacagtaaaagtaatccagaatgttgcatctgtgttagctcttcttagaagggcctggagctgctacaggaagtttctcatttggaattatgaagttctttcttctcttgggccactttctcttgcaagtccagctgggcattaccctgccccgtggaatttactccaacacagaatccttcatgcttaaccccaattccactgtctgggccttcggagtcagagccaaasctcagcagcagataaagtacaaaagctagcaaggtagaatttgaagcaaactgccctggtgtatggtttttagggctgccataacaa

SEQ ID NO: 909903 - DNA, 599 bp, Homo sapiens
ttagatttctagtggtcaccaaaaaggttgaaatggtgtcaagaataaacaaagccggatgctaaagaggtaaggacagattttcatcagtaatgtactattgcaatarggaaacatgttctgtataaactgaactcagcttcaatttggagggaggtgactgttgttttaaagggagaatgagagagtagggagggggcaggtattagagtcagggaagtaaaaaattacaaaaaaaacagaaacagggaattggttcatgtaaaatccacacaactttgctaactggagcttatcagagttaggctccttccctcccacagaggctgggagacagggtccctgtattcaggtgttggctgaaacaaacagtacatccttgtgacagccttgagtgttctcaggcaagcattttatatgtgggtttagggtcattcttaggaacactactttgagctattagaaactatattagtgagtgttcaagtctttatatgccaggctgaggcctagtcaagaagagggctccaaagagcctggctagagtttggtgaaggagagaatctgttatagtgaaaatttactactctcccacacct

SEQ ID NO: 909904 - DNA, 646 bp, Homo sapiens
gtattgttcatatgctgtcaggctacaatggcagagttaaatatctgcaacagagacaatatggcacacaaagctgaaaatatttactgtctggccttgtacagggagagtctgcccaccccggtgtagataaagtataacataccatcaattaagaaaaaatgtaatgacaattataccaaaaagtagttataaaatggcagaaaaaaatcaaaggagtatcttctaaaagctattgccaaagtgattgaggcattccttgtacattatgaacctgagcatccactataaagaatatcccgttaaaagccatgcttaataattccatgcaaattgtagatgttaagacataatcatttaatcacaaatgtcttagggttacagtaacaaaagcagccagttcaagaatttacttttttatacctacattttcactatccttagagaaatatttcagctaagaaaaaaataattttcttttttgtctttttttttcttaaaaagaaggttaagtacctttggtaagtatctttcaaatatcacaagaaggcaccagcatgtatatctcagtaattttttagccttcatatattatttgtgaaataaaatacaaacacakaaaacaacacaaaacaaggtataaggc

SEQ ID NO: 909905 - DNA, 628 bp, Homo sapiens
atttaactattcatatctacattttaaaatatagataaatataattaagatacacatacacgggttcaagtctttggttttctattaactacttttacaaactttgtatgaattattttatcttttctagtattggtttcatgtacagtgatatggatattagaatgcctacattataaagtagttgcaaaaatacctagcttaagaacttctcttagggaccgtcataaagaatagtttcagcaatgattagctttttactccacttcctttacttatgcttattccatgttatgtcacctgatataaatattttgtgctcctcaatgttcctcagtggtagcatgtagcactgagtagagtcagtcttgtaagagctaattgtaattgattccattgtatcaaataatgtcaaactgtgcttatagctaatctgtctaaaatgcctccgaaactcaaattgacatttgtgaatagtcccagacttagcattgcaaaaakgttgagctctacaagctccctgaagacctttagaacatctgaaactaaatgcttcatgtaagtagcagaaaaattcttccacagaataggtgagtagggagcactggcttctttacagatttaaggt

SEQ ID NO: 909906 - DNA, 628 bp, Homo sapiens
ttatatgtgacattctagagtatttgcattctttttagtagttttgaactttattctgtaaaacagtaagttgcttgaaaagaagccaatcctttctaggtgtgcttgaagcaatgcccttctgaggactctattcaatgccccatgaaatagggagcttttcacactgcatgtgctaatcatgctcatgctcatgacgaagccccaaggggagccctttgcagacctctgaggttctttcttaggtagttgcctctttccagtatgctgcctgtgaattctagatgccttggcatctctgaactctgtacttgtcttctcaattcagcaatatcataggctctctatgcatttcttcttcctgtgctctagcctggaaacatttgtagttagcaagatgggacaattgtagggctcactttattttttttccttttctcagaggttattcttctgtactacccattgtctaatatctgaaaaccattgattatattttactttattttttagttgtttgttgtttaaaatgggagggtaaatcttagccctattactccwtcatggctggaggcagaagcaaaaacagattacttcttaattgtattcttactatagacatattgag

SEQ ID NO: 909907 - DNA, 590 bp, Homo sapiens
tgaacaatgtagtattattcagcagtaaaaaatgacatccagtcatttgccacagcatggatggaactggagattattatgttgagtgaaataagccaggcacagaaagacaaacatcacatgttatcactaatttgtgggatttaaaaatcaaattaattgaactcatgggcatagagaataggatggttaccagaggtgaggaaaaaggtagttggaggttggggggaggcatggtaaatgggtacaaaaaaatggaaagaatgaataagacctactatttgatagcacaatagggtgattatagtcaataataacttaattgtatatgttttaataacttaaagaatgtaattagattgtttgtaactcaaagaagaaacgcatgtgggatggataccccattctccatgatgtgcttatttcacattgcatgcctgtatcaaaacatctcatgtacccataaatacatatacctactatgtactcacaaaattttgamaaaaatttgtttaaaagagatatgtggaagagtagaaagtaaaagttgtctgcaagcttttctggcatttattttacaaacccttatg

SEQ ID NO: 909908 - DNA, 582 bp, Homo sapiens
tggaaaatacaggtaatttcagtaagagatccccactgttagaatctataacaccctatggtgtctttaaaaagaagaaaatgcgtcactagtggctcaatcccatactcctttaaaatktgttaagcttgacaattcaagctgatggcaaataactcctttctcaagtaatgttttaatctgaaagaaatatattatttaaaagggaaatccccattaatgccaagatacggaaacaactacttagaatacacagcaacatgaaagagtaagataaaaggagagaaattgaacatcaaacatgttcctctaaaccagaaacagaagaaagtgttctttagaagattagacaggtcttgaatttttattgttggcaaagaacagtgtttaaaggcaagagctcaacctttctacagggcagtgtagtttttaaattcgtggagcaagatggtgacactggctgtatgtactagcataaagaattgaaaacaatatgacctgaatgatactcaaaaactgatatattaaagactcatgttgagagacagatcatgagcagagccaattttgattttaagcata

SEQ ID NO: 909909 - DNA, 581 bp, Homo sapiens
tggaaaatacaggtaatttcagtaagagatccccactgttagaatctataacaccctatggtgtctttaaaaagaagaaaatgcgtcactagtggctcaatcccatactcctttaaaatktgttaagcttgacaattcaagctgatggcaaataactcctttctcaagtaatgttttaatctgaaagaaatatattatttaaaagggaaatccccattaatgccaagatacggaaacaactacttagaatacacagcaacatgaaagagtaagataaaaggagagaaattgaacatcaaacatgttcctctaaaccagaaacagaagaaagtgttctttagaagattagacaggtcttgaatttttattgttggcaaagaacagtgtttaaaggcaagagctcaacctttctacagggcagtgtagtttttaaattcgtggagcaagatggtgacactggctgtatgtactagcataaagaattgaaaacaatatgacctgaatgatactcaaaaactgatatattaaagactcatgttgagagacagatcatgagcagagccaattttgattttaagcat

SEQ ID NO: 909910 - DNA, 525 bp, Homo sapiens
cctgcttctgcagttttctcagattattttgggttaaaatactcagtatgtcaagacgacatattctggggcagccttgatagggctcagatgggaagggccatctctggaaatgggawtttattctacaggtattaagaggaaaacagaggttttcttttaattaatttttttattatactttaagttctagggtacatgtgcacaacgtgcagctttgttacatatgtatacatgtcccatgttggtgtgctgcaacctttaactttgattgaggcactattcgcaatagcaaagacttggaaaacagaggttttaaacagaggcacaacaatcaaatatgcatttaggaagataacttgactactggtggagaaaacactggaaggaaaaagggaagaagagcagtttagaattctcttaagataataaggcatctataccctctgtttgtttcttagggatcattaattctctcaagactcaaaaggctaataatgattgctgtggaaaaatactactttc

SEQ ID NO: 909911 - DNA, 602 bp, Homo sapiens
tacagaagttataataagggaaagaaaatgaaagagtaatcagatgtggagtggacatttgcctttagactcatagtgtctgattaaaccccaggactggggataatagcccataagtatcctgcccaaaggtttgacatacttccccagagtttgaagccccaaatgttagaacaaagagagaaggtagtggaaactatgtacaccactagaatttggtgtgtcaaggatgcatatgcatgagtttcctataaaccaagaggacaccgtaggaagtaaccaggcttgagccagtataatgggattctacccaagagagtccaagaagtgaactagaggacacatggcctatgtcagcaaactgtgtatatatatacatatactgtatatatacatatatacatatacgtatatatatacatatactgtatatatacatacatacatatactgtatatatacatatatacatacatatacaaatatatattttaaatatatataatttatataataatataaatatataaaaatatataatataattatatwatataatataattatataattaggaatataatatattatattcctaaata

SEQ ID NO: 909912 - DNA, 651 bp, Homo sapiens
taaatgaaaccgatcactttttcagggttcccacctaaggacgtagcatgccatagtcatctctcctgtcttgttctccrctatcagccatatccaatccaacactgtctagtgcattcattgcaattttattgttaggtatagtatgaataaactaacagttagtgtattccctgattggttgggtcactgtgggagacagagcccattatcgaaggatagaaactgagcaggagcaaatattttctttcctttcttccagagccatcaagtcactggctcacaaattaggctatggaacatggattccccagctaggtctttgactcttgagatgtaaagatgcaaagatgcaaaaacagtttgtgattgtccacagttgacatggtgagattgagagtccagtgtgctgttcttaccagcctattcctctggaatgactttggctgttttcttggctacctactgttcttttgttctcatgtgttttccaacatcaattttcccatttcgcatcaattctgttagtgtcctgatatctttccaataaattccttatctgctggggttggcttctgttattctcaaccaagaatcttgatcagcacaattgctaaagactttcagttttctttcctaattatcttggag

SEQ ID NO: 909913 - DNA, 658 bp, Homo sapiens
tgtaggtactttgctaagctttgtatctttgctacataatatgatgccaattatatagcaggatttccatgaataaatggaacggtaagatggagcttgaaaagttttcyaccacatctccaactggttgcttaatgttcctgtgaatatattgcttagccattcagacaccacatatctaaaataaaattcatccgttctttaaaactttcttcccttaaggggttagtagtggtttttaacaatgtggttcatcagaaaggtggaaaaatcctaaggtccagatgtgttatggatccacgtgactattgaaaacatttaggaagagatgtggagataaaaacagtagaagtaaatatttttaggaagatagaaacgaaaattgctgggcattagctagcaagtatttgtggtctagccagaagtattaatggcatttttaaagtatttgaatatctgatgctattgaatgatagtataatggcattcccagagttatttaatattgatataaaattccagcttttgcccatttagtatgatattggctgtgggttggtcataaattgctcttattattttgagatacattccatcaatacctagtttattgaaagtttttagcatgaaggggtattgaattttattgaaggccttt

SEQ ID NO: 909914 - DNA, 605 bp, Homo sapiens
cagagagtgtgttaaaacacatttctgggcctcaccctcagaatttctgagttccagcaagttccccggtgatgataaatgttgctgatcaggaaaccacacttgcaaaatgctgtctcaggaaatagcaatgacaatttaaggggtagttgctggaaggcaacagctgttcttgtggccactcagttggagccattgtctaggtggctattcaagcgtaagggggaacttttatttgcttcttacataactttcagctctgtcatccattttactcaacttccaaaactcagctaagcataagtttaatgcttgggagttattcaaactagatttgtggagaatatgataaatttgcttgctaacaccataaaactggtaatctttgccatgcaagtatatgtgagatacactaattcctttcaatgatataatttcaaattaatttttatttatttatttattgaggcaagatcttgctctgttgcctaggctgaaatactggtgtgatygtagttcattgcagcctcaaactccttggctcaagcaatcctcttgcctcagcctcctgagtagctaagactaccagcacaggtcatcatgcc

SEQ ID NO: 909915 - DNA, 603 bp, Homo sapiens
cagtctcccgagtagctgggacttcaggcgtgcaccaccatgcccatttttgtatttttagtacagataggttttcaccatgttagccaggctggtcttgaactcctgatctcaggcgatctkcctgcctcggcctcccaaagtgccgggattacaggcatgagccatgctggttctctctgttttccatttctctattttcttttttctccctttccgtgagttatttgaacattttttttttttttagaattctattttgatttatctatgacattttttgagtgtatctctttgtatagctttttcagtgactgctctaagtattacattatacatacataacgtataatgtactggtattggcatctttcccagtttgagtgaagtatagaaagcttatccctttttcatatttttaccctccatcatttataacataattgtcttaaatatttcctctatatatagttagaaccacgtcagacagtgttgttatttttgtttcaatcatcaaagataagttagaaaactcaggaagagaagaaagatctatcgcatctacccatttctttttcattttattgttcctttttctttact

SEQ ID NO: 909916 - DNA, 595 bp, Homo sapiens
agtgatccatagtagaaataataaaagaaaataaagctttagctatatgggaatargatggaagaaaggtaccaaaaaaggcaaagacaaaacaaaaaagggggagggggatggccattgatttgactgaatctggttaaactgcactttggcaatgataacagcatgttcccacaacagtattttccaacctcggccacactgtcctcaaatatgcagacttaccccatgctatcccccaggattgtggcaggccaggtttcactaacgcaggcctccgtgacaactgtttcagcactgactgagtggttaagttaaatattaaaagctaaaaaagccagtgcccttatacaaaggctggaatgtaacaaaagcccattaagagtttttcccagacctttcctgggccttaaagcgtgacaaaataatgaaggaattcctaacagtacccatttaggtttaaacacgttttactgggggtctgaagaaactccccaaacctccgtgatttagcaggagacaagataaaggtaatcaccccagcacctggacccatttagactaaatttactgaggctctagaagcaggtcttca

SEQ ID NO: 909917 - DNA, 595 bp, Homo sapiens
agtgatccatagtagaaataataaaagaaaataaagctttagctatatgggaataggatggaagaaaggtaccaaaaaaggcaaagacaaaacaaaaaagggggagggggatggccattgatttgactgaatctggttaaactgcactttggcaatgataacagcatgttcccacaacagtattttccaacctcggccacactgtcctcaaatatgcagacttaccccatgctatcccccaggattgtggcaggccaggtttcactaacgcaggcctccgtgacaactgtttcagcactgactgagtggttaagttaaatattaaaagctaaaaaagccagtgcccttatacaaaggctggaatgtaacaaaagcccattaagagtttttcccagacctttcctgggccttaaagcgtgacaaaataatgaaggaattcctaacagtacccatttaggtttaaacacgttttactgggggtctgaagaaactccccaaacctccgtgatttagcaggagacargataaaggtaatcaccccagcacctggacccatttagactaaatttactgaggctctagaagcaggtcttca

SEQ ID NO: 909918 - DNA, 595 bp, Homo sapiens
agtgatccatagtagaaataataaaagaaaataaagctttagctatatgggaataggatggaagaaaggtaccaaaaaaggcaaagacaaaacaaaaaagggggagggggatggccattgatttgactgaatctggttaaactgcactttggcaatgataacagcatgttcccacaacagtattttccaacctcggccacactgtcctcaaatatgcagacttaccccatgctatcccccaggattgtggcaggccaggtttcactaacgcaggcctccgtgacaactgtttcagcactgactgagtggttaagttaaatattaaaagctaaaaaagccagtgcccttatacaaaggctggaatgtaacaaaagcccattaagagtttttcccagacctttcctgggccttaaagcgtgacaaaataatgaaggaattcctaacagtacccatttaggtttaaacacgttttactgggggtctgaagaaactccccaaacctccgtgatttagcaggagacaagataaaggtaatcaccccagcacctggacccatttagastaaatttactgaggctctagaagcaggtcttca

SEQ ID NO: 909919 - DNA, 657 bp, Homo sapiens
gctgggtctgtgaggacagagaagggaccctgggagggacaggagcagcgtgagcatagggagtgccccaactgcggtcatcctggcattggcatctggccccagytctgccccaccctagctggagggcctgagccagggacctgccttctcagtgcctcagtgtcctcatctgtgacagaggtgacagggttttcttccaagggtcctagtgggaattaaatgagatagcacataagaagggcttaggatactgcaagtcagatctgtgattacctaaaacaaagttctttaaatttaagattgatactttcttgttacggctcaaggaaaaaataaattaattaattaaaaaataaatttaagattgaaagcttcatgacacttttaccatatttcatcaaatctcagatgctatagattgtgtgtcacactcttattgtaagtaaccctaagaaagaaagaatgctactaattgaactctgacctgttgccttctcaactcagtgactgtatgatgcattcctgatttcagatacattaaaatattttaaggctgagtgcactggctcacactggtaaacgcagcactttgggaggccaaggcaggatgatcacttgagcccaggagttccagaccagcctgggcaacataga

SEQ ID NO: 909920 - DNA, 585 bp, Homo sapiens
acagtcaaagaaaatcttgttgttttgttacgtgctactaattttttgagggaaattgcggggcacwttgtgacgtagcaaaggttaattgatataaataccaaccaggttatttatctagttaacgtcattgatattataatctagatgattacaaaatctccaattcattgaaaaaagatgtaacttttgagaccagtaagacctgactttgaatctggagcttgatactttgcagttgcctgactctcatctcttaattttgccgcacttgatttgggccctaagaaaaaaatgggaacacaaccttgtacagcttttgtagatgaaataaactttataaataaaatatattcagcatatactacatgctcaacaaactattattatttttattaattacatgtcattatttagacatcatgtaatgtacttattctgttttttacatttatattattattcttatttttaatattttgctgtcaaagctttagagcttagtactgagattctcaactgtcattaattacatttttgagcattttaataacattttatggaattccaatcagcgttgcaatt

SEQ ID NO: 909921 - DNA, 585 bp, Homo sapiens
acagtcaaagaaaatcttgttgttttgttacgtgctactaattttttgagggaaattgcggggcactttgtgacgtagcaaaggttaattgatataaataccaaccaggttatttatctagttaacgtcattgatattataatctagatgattacaaaatctccaattcattgaaaaaagatgtaacttttgagaccagtaagacctgactttgaatctggagcttgatactttgcagttgcctgactctcatctcttaattttgccgcacttgatttgggccctaagaaaaaaatgggaacacaaccttgtacagcttttgtagatgaaataaactttataaataaaatatattcagcatatactacatgctcaacaaactattattatttttattaattacatgtcattatttagacatcatgtaatgtacttattctgttttttacatttatattattattcttatttttaatattttgctgtcaaagctttagagcttagtaytgagattctcaactgtcattaattacatttttgagcattttaataacattttatggaattccaatcagcgttgcaatt

SEQ ID NO: 909922 - DNA, 649 bp, Homo sapiens
tagcacagaggtacattgtacccagtgttgttattgtgacatattgtgctgccttgtgctgtgtcatattgtaattcagacattaacwtatgtgactaccactctttatgtagaaaatacagtgttctcatttgttccaaaaattgtaatatgcatatttcaaactacaaaatatatctattttcacggtagtatcaattatttattgagcttcttcataatatactagtaagcatattttaaattaagttgtgaaaataatgaataaataaataaaataaagaaagagctgcaagttgctgagattctgggacatgtgaatatgttatctcagtaaagcatggcctgtgcagtattactccagttcctttctatttatgttcctcagacttgatttttttaagctttaaaataattagtttaaatattttgtcaaactttagaaaacacttcttatagacaaattgttggacaaagaaaggaacaataagaagctgtgggaagtaaaagtaatattttgggagtcaaaattgtcatttctctgtgctaagattgaagatgtatacacattatcgtcagcattcacacactcactcacacacacacacgcaatttgtaccttaaaatactatacaaaataaaattggtg

SEQ ID NO: 909923 - DNA, 649 bp, Homo sapiens
tagcacagaggtacattgtacccagtgttgttattgtgacatattgtgctgccttgtgctgtgtcatattgtaattcagacattaacatatgtgactaccactctttatgtagaaaatacagtgttctcatttgttccaaaaattgtaatatgcatatttcaaactacaaaatatatctattttcacggtagtatcaattatttattgagcttcttcataatatactagtaagcatattttaaattaagttgtgaaaataatgaataaataaataaaataaagaaagagctgcaagttgctgagattctgggacatgtgaatatgttatctcagtaaagcatggcctgtgcagtattactccagttcctttctatttatgttcctcagacttgatttttttaagctttaaaataattagtttaaatattttgtcaaactttagaaaacacttcttatagacaaattgttggacaaagaaaggaacaataagaagctgtgggaagtaaaagtaatattttgggagtcaaaattgtcatttctctgtgctargattgaagatgtatacacattatcgtcagcattcacacactcactcacacacacacacgcaatttgtaccttaaaatactatacaaaataaaattggtg

SEQ ID NO: 909924 - DNA, 615 bp, Homo sapiens
gtggccatctgaaagtcaaggggagaccccctcagaagaaaccaaaygtgccaacaccttgatcttgaacttctggcctctagaggtgtgaactttttgttatgttttgtctggccttttatgttttgtctggcctccattttgctctggcaaccctaggaaactaatgcaaatagcttataggaaataaaattatttacacattttctaactgttaggtagacacagatgtagactttaatgatagaatgttttataaccctcacattaggaaaatttaagactcttaaaatgagaagtgtttaaaagaatatggtgaaattgttatgcacataaatcacttatgatgctgtaaattaatacatttcttgacaatttctgtcccaagtctaggtcattttcataattaaaactaatgttatattgtgtgcaaacctgtatcttgctttttagcttagcaaaagaaaattagaaattttccaagtgattaaatgttattgtaagtacaatttcaattactccctgatggttatgttaatggatttcatatgattatcaaaccatcaaatatattttatatctagattacatatttttatcattagtagtaacacc

SEQ ID NO: 909925 - DNA, 558 bp, Homo sapiens
ctgcactgatcagttggttaagtcagtgtgttaagaaggttttgtggattgcataaagaaaatatttaacaacatttttattaacattgttttgatgaactgggaaaaatgctttatatttctcaatataaaaattcattcttgtggatctttagggtgttataaagattttgaaggtcaaaaattttaaaggtatcatttgcatggaataaaattcacccttttaaagtgcatagtgctatgagtttcgacaaatgtgttagttgggtaataaccaccaaaataaagatataatacatcttcatcactttataaaatttctttgcaccttttatagtaaatctgcctccccaacaaacagtcactggcaaaaaatgatctgttttccgtcactctgacattgtcttttcccagatgtcatataaatagaatgatgtagtatgtarcctttgaattggactccttttcactttgcatgacacatttgagattcattcatgatattgcatatatcagtagttcatttattttaatttccaagtggtatccattgtgtga

SEQ ID NO: 909926 - DNA, 643 bp, Homo sapiens
tgccaggtggcctgggccgcagagctgtggagctgtgagcctggtcaggagaggctgtgtagctctgagagccaggcaggagctggcgaccctttggagagggtgctacaggtgccacagtgactaccgtcagtgctcggggctcttcagaaactaggtaggtatgagtgtgagctcacagggagactctggaaaactgagacttggggaggaatttagttcagcagaaaggaggggcaggtgcttcagggagggggaatgacagagggatggccctgacctaggggacaccaaggacccaggtgactaaggcctcagggacatcttggcaccatgaagaggccagtactcctcgtggcacagctctaggggcaccattcccatggccatgatcatatttctgtcactttaaaaattgtatgtggcaggtgcagtgagttacacttacattctgaacactttgggaggccaaggcaggaggattgcttgaggctaggagtttgagaccatcctgggcaacatagtgagacctccatctctayaaaaaaattaaaaattagcctggtgtagtggcatgtccctgtagtcctaactacttgagaggattgcttgaacccaggaatttgagaccagccttggcaac

SEQ ID NO: 909927 - DNA, 693 bp, Homo sapiens
ggataaccttaatcttagactggtgagcaatttatggtactttgatatcttccttttaggwgctttgggcattttaaattgatcatatagtgcatggcatgcagcattagaacaaaattagaatagatttgaatattaagcaaagggactggagcagaggcccagatatcaccactggaggcatcaaagggataaaactgtacttcatctcctccacaggagcatgcaagcgtttgtggttgtaggtgggtgcctctgtactctctcccaaacagcaatcctttctgctgttacaaaatgcaactattccttttggggacttccaagtcctttatggtcagtccatatgttgtgattgcactgaccacaaaggtgatcataggaaagcgtataactgaggatagaccaaataaattcagtcttatgattttatctggtataatcagaagagaggaagactttttcactggagatggcaagatagtggagtacatatatggtgtttccagcgactattttttactactatatgtaaagagacatctgttaatgaaatcagtagatctaaaagataatgaaagacattgctgaggatattatttgagcatctggacttggtgctttctaagtcattcttccctgaattttcagttgattgtgacaagagttcaaatttgagttaagtttccatcg

SEQ ID NO: 909928 - DNA, 498 bp, Homo sapiens
gcaaaattttagggccctacttcatcagtagcttataccattttaagtcttaagttttaaatattctgcagataagttgcaacatcttactttggttttaatttatatttctcagcttaataaggagtttgaaccctttttatatgtctgagtgtttgtattaatcttttaataaagtgtctatctaaatttcttgttcatattttttaattgggttttctgccacaattattattaattgacaataatttatttatacaaatataattaaatgtattagaagtgatcacttccattccttagattacagtttctctcaattatgccatttttaaattacaaatccttatttctttattttaataccgtttagttatttttatcatttattttatggtcagtacatctggatcctgtttaagaaatagttcccaaccaataacagaaagctaaygtcctacaaaattatttagaaactatgatgttttacctttatat

SEQ ID NO: 909929 - DNA, 633 bp, Homo sapiens
aaatattcatattttctattgcttttcatgtcaatttagtattttcaatgtattggtrcaaaggtgtttataatatcttgtgttttaacatctatatactctcaaattatgtcctttttaatttttagtcatggtaatttgtggtcctccctttcttcttggtgaagcttataagttcattgatgttttgaattgttttgggtgcctcttgtggctcatctcacatcctattgtccttacctctatttctagatgcagctatgacattcagtcttcaactcactttgtgctgatggtgtccaactcaagcccacacatgatacttttccttattctcccagaagtctctacactgctgaagtatggggttaaaatagaagattgttgacagatagcatactgggtatgtactgcccctagggaactcttcagtatagataaatggaagcctataattaaatacttattttcaatcttctagtcaacaattttcagaagcattgataagcacaaataaaatatattggtgatcaacttaatagtacacccttaacattaatattcctacttgccttttataatttttgatccctcatccctgctccctgggataacctccccaatacaccatct

SEQ ID NO: 909930 - DNA, 614 bp, Homo sapiens
agatatcaggacattttttttaagaggactggcatggttgcttatggttgtaatcccagcrctttgggataccaaggtgggaaggttgcttgagctcaagagtttgagaccatcctgggcagcattgtgagactctgtctctactaacaataaaacttaaaaatttagccagcatggtggcacatgcctgcagtcctagctacttggaaggctgaggccaagggattgcttgggccaaggtatctgaggctgcagtaagccatgattgcaccactgcacttcagcctaggcagcacagtgagaccatctctcaaaaaaaaggaaacaaaaacaaacaaacaaacaaagaaaacaccaaccaaccaaacaacaacaacaacaacaacaaagacaaatgatatcaggggaaattccttagaaaggaattaaaattcaaagggtgattattcaagtacaaaatttcataaaaataagttcctaaacaaaatatagactagtaacatttttacaacagcaacttaaatatccatttgagaaattctccattcatacaacacctccactgtatgaatgctgagccagaaagtagcctaccattacagcttagctcttaa

SEQ ID NO: 909931 - DNA, 648 bp, Homo sapiens
agaataatcgcataatttgaagtagaagggaaaaaaatgtactcttaaaattgctccctcttgtttccatccccagtcaacccaggttacatttgcagtccttaaaaatgtgatgaataggaaatagagtcatttaaatttatatgtcacctaggaaatgtatagaaaggaatctaaaagctaagggactttttagtgataatacactcaggatttcatcagacttttacaacagttaatagggtgagagatggcatagcttcacaatgctagagataatgctccattcccataagtagttatataataccaatcacagcagcacttagtctttaacaaaagatcaaatgagttctttctgggagttacttaatccatagatcaggacaataaagagacagagtatcactgtacattattcagaggaaaggacagagggcagtgggtgttgggcaaagggtggctgtatgtgagaaagtcttgctaccaggctactttgacacagtatttgtacttacaggcttcagcatggtcycaattcctgctcaataaatctctaagatttaaagatttctgagatcaaagaaagtttgagggatttattccactagtcacttgccacagttcacatttatagttagagggtat

SEQ ID NO: 909932 - DNA, 614 bp, Homo sapiens
aaaagagctgttcatggcctaagctggttgtgtcaggacataattggttaggtgaattggtgagagctctcrcctacccctaatttttgggttgggaaggtgggcatttggttaggagaggatgacttccccatgcctggcaaaggacctgtattctaattttgtcctaggacccacaatttatgtgtctttcctggtctcgtctagtatgctatagacagtccctcttagttgtgactttgacaaatcctgtccctgagacatcttctaacagagagaggagaggaatactgacaaatgtatcttgagctcttaaaatttgtgacatcctgtgcctaacacttgctattaacaatctcatttcattcttacacaaccatagcatagaaattctccagttagtaccattttatagatgatgaaactgaagcatgaacattccagaaatttcacaaagtcttatagcccagaggcttcatatctaaaattcaaaccaagaatccttttatcagaaatccgtaaagttctgcgtcatgtcagatgtgagctggaccaacaccaaaacagaaaagaagtttcacatttcagtttgaaatgaagatgtggctttttca

SEQ ID NO: 909933 - DNA, 667 bp, Homo sapiens
cctctcatgatctaatcacctcttaaaggtcccacatctaaatattgtcacaatggctgttaaattttgatatgagttttggaggggacattcaaactaaagcaaagttcaataaccttgagtgctgattttgctggtaagtcattacttatctcttccatttgttgttgttgctgttctgttctccaaatctgaaagacatgtcttcaatcttttattctaagctcactcttctcaaatgtgaatagattcatattcaaaaagggtaatggtatagggtgcaataaaatggtgaagagggcctataaatttcaatagaatggacatcccaaagtggcaattttaaataatttactgttaactctagcttattttaaaatatattgcaggcacatgaatattccatacttattaataagatgtcttattaaatgggggtacttgcagggtgttgcccttttgtactaagctccattgcaagatgttcatggccattaggaaggacagtttcactctctgtttagatttactttatcagagaaattttgaatacagtgtgaatcagcactttaatgttgaacaaattatttccttggatatggtagattctcagttcartaagtcatcaatgcataaataagtaatctttgttaatgtttttccatga

SEQ ID NO: 909934 - DNA, 621 bp, Homo sapiens
agtttgacttcctttttttaaattaattaatttatttatttattatactttaagttctagggtacatgtgcacaacgtgcagatttgttacatatgtagacatgtgccatgttggtgtgctgcacccattaacttgtcatttacattaggtatatctcctaatgctatccctcccccatcgccccaccccacgacaggccctggtgtgtgatgttccctgctctgtgtccaagtgttctcattgttcaaatcccacctgtgagtgagaacatgcggtgttttgttttctgtacttgcgatagttttcattctgagtttgacttctttagattccactgataagtgtagtatacaatattggtctttctttgtcttatttcactagcacaatctaggttcatccatgttattgaaaatgacatgatttacttccttttaagtctgaataatattccattgcatgtatatatacacacagataatctttattacattttctttatctatttatctgttgatggacrtttgtgttatttccatagcttgggtattaggaatactgctacaatgaacatgagcgtacaaataattcttcatgattctattttcagttgttttggt

SEQ ID NO: 909935 - DNA, 681 bp, Homo sapiens
ctttaggttccatgggtcaaaagtttctagtttcctgagaagaaatgctttcaccaggaagcatagtaaragtaccactgaactttaatttgtggttgccacctagtgattatatctctctatatcaaagaagagtgtcaccattagcaagggaggaactaggggtgatattatacaggggaggccgggaagaattaatttcatattcaggtgaaacattggggtatctcttgctactctcctgtccaacttgtatttcaaatggacaagtgcagtagtcacatcctgagaaatgcatgcagaagatggataagcccagacacctctggaatgcatgtatgactcactctaccttctaatgcacttaggctaacagagatgtgaagagagggtgtgggtcatgtaaactaggcagacatgataagagttgcctgcagaattgctacaccactgtaaaactttcctctgtccaattaaccttcctcttctaagtttctccatgaaagagaatacgaatcttagagaatctgtaccaagctggggttgattcatgttttggatattgtgtactgcaatagatacttcttgagcctccaacatcactctttggaaatgaggcattcattcatccagctaccaggaatgatgccaactagctcactaaggccagctgttggctca

SEQ ID NO: 909936 - DNA, 549 bp, Homo sapiens
agaaattcattatggaatacatgataggaagccaggagagtccatcttctcttgtatcaccttccccacaactttctatcacagagtttgagatgccctagatttataaatatgaggatcccacactggactataggcagtgtggtggttttaaaatatgcccccaaaactctgatgcttctcccttcaagaggtagaacctaagtccctcccctagaaagtgggctggacttagtaactcactactaatgagtaggacaaagtagaattgatggcgtgtgcgactttagagacttcattattattagcattgcattactgcaaattccaccacgatccattgcattgttctttctgccatgctctttctgctatgttgagaggccatttgatactgtttggctgtgtccccacacaaatctcatcttgaattgtagttcccataattctyacatgttgtcagagggacccagtgggagataattgaatcattggggcagcttcctccacactgttcatgtggtagtgaataagtctaaagagatccaa

SEQ ID NO: 909937 - DNA, 583 bp, Homo sapiens
tatctgctcaatttagcacctgtaaagactgcttatctccctggcaagattatatttcacttcaaagatggagactgtatcttgcttttctatctactataatatctaccctaatatgaagaatataggaagttatcaataaatccatttttgaaaaaaggtgtttacattgttcattctattacatatcatttatcttcctctctatttttataaaacctagactgttaataagccaacttgaatacagtttaaattaaaagctgacactaaacaaagtctttctagttcacttgctctctctcaagcatgtgtgtctgaatttccatggagtcaataaaacagagttatagagttcactatatctttaatcttttccctcttgtctactaattgcaaagaaagcagactgagtctagatactgttaggctgtttataattatccacctttgcttgactatgyatcctttctagtacagaaaaccaatcaacaaacaaacaaaaaaaacaaccaattgtcactgtgtgatttatttcctaaactaaaccaccatcaaacagatagctacacaaatataagca

SEQ ID NO: 909938 - DNA, 608 bp, Homo sapiens
caataaatacccaactcttcaatgcccagacaccaaagaacatctacyagcaatgacaccatccaggaaaacatggcctcaacaaatgaactaaataaggcattagggaccaatccttgagaaacagaaataagtgacatttcccatagataattcaaaatagctgttttgaggaaactcaaagaaatgtatgataatacaggaaaggaattcagaatcctatcagataattttaataaacagattgaaataattaaatataatcaagcagaaattctaaagctgaaaaatgcaatttgcatactagaaaaagaattagagtccttgaatagaagaattgatcaagcaaaagaaagaattagtgaacttgaagataggttatttgaaaatacacagtcgaagagaccaaaagaaaaagaataaaaagcaatgaagcatgcctacagcatgtagaaaatagcttcaaaagggcagatctgcaacttattggccttaaagaggaggtagagaaagagataggagtataaagttcattcaaagggataataacagagaacttcccaaatctagagtaagatatcaatatcaaagtacaagaacactataga

SEQ ID NO: 909939 - DNA, 687 bp, Homo sapiens
aattgcttaatttttacatatttgtagatatcccacattttctctctgttattgatttctgatttgatttcattgtggttggggaagatactttgtatgatttcagtcctcttaattttastgggacttattttatgacttactatatgtcctatcatggagaataatccatgtgtaccagagaaacaaatattttgaaataagtagggtttctagggtaagcagtttcatacgaagactcagagacaaagcctaaaataccaactctcaagagaccagaggacaggagtgctgtgtcactcaacaaagccacatccactgaagaccaaggaccaggagtacagggctccatggggaagggcaacttagaaagttttggatttgctgcagatttgttgacttttcaagagggcactgatgtattcggtccctctctctgacagagaagacaccccctctcctacttgataactgaatgatgccatagttactacctgatgtgcagttccttcaaatagagaggaagtacactggccacaatctctgaacaacagacatagaggactggcttacaggggaagctaaatttttcactttatcatggagcactaaacctctgctattgtatttggcaacagaaatgaggatcaagattaaacaatgagtgctgagtctcaatccatttgg

SEQ ID NO: 909940 - DNA, 527 bp, Homo sapiens
tataatatattcataccataatctagttttctagaaaatgttaagtaaggtagctgctctctgtctccaaccctggaatatgtgttcctcttcttgcttcttatatccactttaattgttaaagtaaaactgtgttatattttcctgtttacttctctagaattcgatttaactataaattattttaggacacagaatggttctcatttattctcatttatccttataaccatatttgttaccaaaacctgaagcaaaagttcacaggtgctacacagatttctgtggaaagtaaaaatgtgactcacctgacattttccatacatttgataaactaaaccatgtcaatctatgaaataagaataccagaacttttttaaattataagatctatagaagagaaaaatagtacttaataagtgatatattaaatgcattagattttaagatggtgattaacattakattaaaatggaaatactaacttttgaaatcagttcttaaaatagaactgatctattcaaagg

SEQ ID NO: 909941 - DNA, 527 bp, Homo sapiens
tataatatattcataccataatctagttttctagaaaatgttaagtaaggtagctgctctctgtctccaaccctggaatatgtgttcctcttcttgcttcttatatccactttaattgttaaagtaaaactgtgttatattttcctgtttacttctctagaattcgatttaactataaattattttaggacacagaatggttctcatttattctcatttatccttataaccatatttgttaccaaaacctgaagcaaaagttcacaggtgctacacagatttctgtggaaagtaaaaatgtgactcacctgacattttccatacatttgataaactaaaccatgtcaatctatgaaataagaataccagaacttttttaaattataagatctatagaagagaaaaatagtacttaataagtgatatattaaatgcattagattttaagatggtgattaacattatattaaaatggaaatackaacttttgaaatcagttcttaaaatagaactgatctattcaaagg

SEQ ID NO: 909942 - DNA, 527 bp, Homo sapiens
tataatatattcataccataatctagttttctagaaaatgttaagtaaggtagctgctctctgtctccaaccctggaatatgtgttcctcttcttgcttcttatatccactttaattgttaaagtaaaactgtgttatattttcctgtttacttctctagaattcgatttaactataaattattttaggacacagaatggttctcatttattctcatttatccttataaccatatttgttaccaaaacctgaagcaaaagttcacaggtgctacacagatttctgtggaaagtaaaaatgtgactcacctgacattttccatacatttgataaactaaaccatgtcaatctatgaaataagaataccagaacttttttaaattataagatctatagaagagaaaaatagtacttaataagtgatatattaaatgcattagattttaagatggtgattaacattatattaaaatggaaatactaactttkgaaatcagttcttaaaatagaactgatctattcaaagg

SEQ ID NO: 909943 - DNA, 580 bp, Homo sapiens
agcttgaaatgttatttccagtcrttctcaatgcaacatattgctcttatatgtttggatttaatacatttaaatgtatttatctctagcgattttttacctataacataaacactaattttagcaataaaccactaattctgagtcaagttattactgataataatactttaaaacattcaattagttttgaaaagtatatatcaatatcattgaaataaacttcatctaacttttcgagggtataatcgttggcaggtagaatttattttttagctttgtagtgaaagtacacatttatatactacaatgtcatcatcttttttggagataaggattgcagcgtttttagaaatacagcacatggactaattgttggcagcattccttcttggactaatatcttactctcatcagagcaagattgagaaagcttaggtcatcctttatttcccaaaggtcactatttccaactgtggatgcatttttaagactaacacgactaagaaagaatttcacaggcatggcacacttccataagtgttctttctacactcccacaaaaattatttctctatcc

SEQ ID NO: 909944 - DNA, 586 bp, Homo sapiens
ctttatgttcacagcaaatcctatgaatattcacactaagtgggtaagaaaaactataaataatctcaaatctatttattcgctaagggaatacagagcaggtcaaattttactgcccatcgaggaataaaaacattcaattttttagagggttttggattttgtaatcacacgtaagtgattaagcccttgtattttataagatattttatctcagttgctgcaaatgtatagtcactttaacctagcactagcttaattaaagaatacaaatgtacattgtaggttaagccttaagttcatgctcaatgttatgcacggtcttgacatctggtgaatgcaggctgcctaaagaattagaaagcaatttagaacttcttcgaatagaaatactgtgaaaagactgagatttagtttgacaagtctataatgagactatctgtatagaaaagcttaagctctttgatttttatctgacctgtgttygaatattggctgagttgaaaaaaagatattgactatctttaatttgcatctgatcaccagttgaataatgaaatatacataaaatacataggctatgctc

SEQ ID NO: 909945 - DNA, 548 bp, Homo sapiens
tggtttaatcagaatttgctttattttggagcacaaatgctgcacttactagagccagcaaatatgtagcattacctaaataaaacccctttgccttataaagcttgcagagccctcctatcattaatgtgattaaaagttgccagagggctcatggaaatgcaaaatcctaggtcccaccattagaattccgtcaacagtaggctgaagaagagactgggcatctgcactttgaacaaatgccccaagcattttgagaattgcatttaaagaaaaagattttgaaacccagaaatctgaaacaaaatctatttttcaaaacctgaaggagcaactctttcatcacttgaaagctatgtcaacattttgcatgcccaacaaatttgttactggaagcttttgaataattttagttgaaatttaatattacttgrtacttgcaaatgcaaagatttgatatcatagacttgtcaaaaactaattgttaagtagtatgtatgtaaatacaatattgaaacacattggaaataggcattttaaaaatgaga

SEQ ID NO: 909946 - DNA, 663 bp, Homo sapiens
aaacacatgggatatttttaaacaaatcaatggaattaagagagggcagaagaatgtcaactgactgccagaaaaaatgaagccatagtctgaatatttggggaatggraaattctgtttgggacagggcaataattctactggtgaaatcccagggaaattattgttgaagtgaaagcaggtaccaggtatggcaatagtgagaagtgagtcccaaaccataggaatcaatgggaaaattttaaatggggaattgatctcctttatttctcacctcaaccttccagaagataagaagctccatcagtaaaatagctaggtatctatccattcatcgaatctgccaccaaaacagcactgacaaacacatctctgatttaatttttaaaaataagttggcaaaaaaacataagcatattttaagaggtgatttaaaaaaaaactagaaagaacaaagaggggataatttaccttagtgttattagaaaaaatagagaaacaaacaaacaaaaaaagcttaattacatcctgaaaaagcttgatgataatgcatccatgaaccaaaataggaactgtttaacatgaagcaacgaaccgtagcaataaaggccactttgacttcactaaagccaacaataaaagaaagttgggagagatagccaa

SEQ ID NO: 909947 - DNA, 611 bp, Homo sapiens
actctatttataaaataacgagtttcaagaagattaagtaacctgccacgttgatacagctaaaaagagatatgacttacatttgaatrtatttccactgcttacaaagccgcccacgcttaataaactgtgctgtactcctttcaccatgggtcatatcttcagcagaaagtgctgggacataaatcaagaacttctggttcccaaactgattcacttgccgccttatagttcacattctgaatcaactgctgttgtgttggtgacagtaaaagcacaaaagaacaatcaggcttaatttttttttaaagagtcccttcttggtatcaagactctggagtgtagcatgacaaaaaaatataccactgttgttataattatatgaaatcacaaaagtcaaagctgaccattattaacttcagtaaaaatttgacccacataatgaaatttccaagctttaggacaatatagatattagattgatccagaggaaataaattagacaacattttcttttaaaagtatatgtggcattaatgtggatttgtgaaataaacattatacctttgtattcatacaaagtcttgtataaataaatacatattttgttt

SEQ ID NO: 909948 - DNA, 658 bp, Homo sapiens
gtgacataagactgaatttgaagtaaatactattattattattgcatgtaatctaatcttgaaactcatttgaataggaaggccagaaaaaatattaggatatgaaaacaaatcaactcaagagatttgaaatagcatttctggcttagtttattgatcagagaactggtaacagaattatggaaataatttcctgatcaatatttttggaatggagaaaccttgagaaagggttgttggtgaattaataattttgtttgggacacttacatttgaatttcctattggatagatacatcacaatgtcttcgtttttcaggcacccagtaagggagtctataaagaactaattttcccctacattggaaggtggtgacaggaaggtattttaatcagggctctggtggaatacaagacagaaataatttccagggagaaactcttttttcaaacaattcaggcagaagagggaatggcaagatgaaattttggattctacatgtgctcacctatcatttaattttcattaccaacaccaagtatacacatttttaaaaatgatgaagataacatttcaattatgtwgtgtaaggatgaattaatcactacgtcatcatgcagaaagaactgatttaatcattaaaaacaaaacaattac

SEQ ID NO: 909949 - DNA, 585 bp, Homo sapiens
aacagtcaaagaaaatcttgttgttttgttacgtgctactaattttttgagggaaattgcggggcacattgtgacgtagcaaaggttaattgatataaataccaaccaggttatttatctagttaacgtcattgatattataatctagatgattacaaaatctccaattcattgaaaaaagatgtaacttttgagaccagtaagacctgactttgaatctggagcttgatactttgcagttgcctgactctcatctcttaattttgccgcacttgatttgggccctaagaaaaaaatgggaacacaaccttgtacagcttttgtagatgaaataaactttataaataaaatatattcagcatatactacatgctcaacaaactattattattttattaattacatgtcattatttagacatcatgtaatgtacttattctgttttttacatttatattattattcttatttttaatattttgctgtcaaagctttagagcttagtaytgagattctcaactgtcattaattacatttttgagcattttaataacattttatggaattccaatcagcgttgcaatt

SEQ ID NO: 909950 - DNA, 617 bp, Homo sapiens
ttcttgacagaaactggcttgacagtttatccagcaaacattactaagrcatgttctgtgtcatatccattgttttaagcattctataaatatcaactaattaaataccattttgtgatctatgggtattcatattaacccatttcacagataaggaaactgaggcacagagcagttatataagttgtccaagatcactcagccagtgagtggcaaagccagcagtcaaacccaggtagcctaactcaagattctgtgctcttaattacttagctatgctgcatggcatatgtaaacatacacactgttaaagcagtgatggtttttaggaaatgttagcttatattttcgacaggaggaaactggtcactattattctctaatagaccatatttcttacctttgactgcgcattagaatcacctggggagctttccaaactcaacccagaccacatccctgacctagtagctcattcttggaaggtgagacccaagcaccagtagtttttaaagctccccaggtgattccagtgtgcagccatggttgagaagctctaatctgggagaagagtcattattgatggccaatattttatcagaaacatctgatgaaaa

SEQ ID NO: 909951 - DNA, 644 bp, Homo sapiens
ggaaaggaatcagcttctgaactcattcagttgactgttgccaggccttgggtccctttccacatgagcctctccacaagactgtctcagcacctggtagttggcttgtcccaagatgagcaatcaaagagagagtgttcaggacagaagtcactattttataacctaacacgctaccacttctgtaatagtctatttgttagaagtcaatgagttaatctaggacacaggaggatgacacaagggtgtgaatattaagaaactgggaccactggtggctgtcttgcaggcaacctgccacaactatactttattcacttccctttgggatttattgagtgactctcacagttaacaaagaatagcaactaaactaaggaagagaaccattttacaagttaatactctactctcattgatcttgatgtttttcattttttgtttgtttgtttgttttttgagatggagtcttgctttgtcacccaggctagagtgtagaggtgtgatcttggctcactgcaatctccacctcccgggttcaagcaattctcctgcctcagcctcccgaatagctgggattacaggygctcgccaccacgcccagctaatttttgtattttcagtagaggcagggtttcaccatc

SEQ ID NO: 909952 - DNA, 615 bp, Homo sapiens
ttcttgacagaaactggcttgacagtttatccagcaaacattactaagrcatgttctgtgtcatatccattgttttaagcattctataaatatcaactaattaaataccattttgtgatctatgggtattcatattaacccatttcacagataaggaaactgaggcacagagcagttatataagttgtccaagatcactcagccagtgagtggcaaagccagcagtcaaacccaggtagcctaactcaagattctgtgctcttaattacttagctatgctgcatggcatatgtaaacatacacactgttaaagcagtgatggtttttaggaaatgttagcttatattttcgacaggaggaaactggtcactattattctctaatagaccatatttcttacctttgactgcgcattagaatcacctggggagctttccaaactcaacccagaccacatccctgacctagtagctcattcttggaaggtgagacccaagcaccagtagtttttaaagctccccaggtgattccagtgtgcagccatggttgagaagctctaatctgggagaagagtcattattgatggccaatattttatcagaaacatctgatgaa

SEQ ID NO: 909953 - DNA, 604 bp, Homo sapiens
caaaatcaaacttacgtttttagaactgtctttcctgacacctggcttttcaaatatttcagagggcccctgaaacatccagaaaaaagaagtaaacargattatgtgatatgtgtaggtacatgggattgccaaaatgatcttcagtcttcttcagattatacttttgtgaataatactaacatatgttccaaaactgtatgggatttctaaaattctaatgtctgaatatatgctatgaatcataattaaggttgctatgttaagttattgtaaaccacggagataaccaaacttctttgtcaattgtgtttctaactgtaaccaccctggatattttgctgttcacagacaattgtcctgttttctttcttttcaaaagatggtttataataagctataaaactgtaacaggtgctctcaaatacaggcttctgataactttggaaattgtaacattggaataaaggaaaacgcacaggactcatgaagagctgaaatgttcacgaatatcaagcaaaacaaaagttaactaaatggactgaactcagaaagctgaagcaaactttttgacttttggttgtaatattgctgatccttgttt

SEQ ID NO: 909954 - DNA, 577 bp, Homo sapiens
tctaactgtaaccaccctggatattttgctgttcacagacaattgtcctgttttctttcttttcaaaagatggtttataataagctataaaactgtaacaggtgctctcaaatacaggcttctgataactttggaaattgtaacattggaataaaggaaaacgcacaggactcatgaagagctgaaatgttcacgaatatcaagcaaaacaaaagttaactaaatggactgaactcagaaagctgaagcaaactttttgacttttggttgtaatattgctgatccttgtttggtttttcatagtcaaagaaacttatttaaaactatttacagcctttaataattgagtaaggtatactcctatgaacaaaatttggagcatgtttgtttctctctgcttggttcctctagagtttggaaactctctgtgagtattcttaacttatggcaatatagttatttgcatcagtgcactaagaaraattcatttttcttttgcaacaggacacaattggagaaaatggttattttgccaaggctttgactagaaggatatgcttccctttaaggagtcaag

SEQ ID NO: 909955 - DNA, 600 bp, Homo sapiens
tgccaggatgaaaccagagagtgtrttataagaatgctcagtaggttttacccagaggaggccctcactaagtagcagcttctcttcctgctgctgctgttgctgctgtgttgactcagcattatttgaaggctacacagatggcctggcctgggttttcataaaattgtgttgatggcatgacttgctggctctccgcaagctcatttgaacctttttaaaaatagggtccctgctatattaggcaggtcactgctttggtatgaagggacttttagggccatgctgatgaagcatggctcaggagtggccaccagtcagccatgagtcaggacctctttggcatgcttcttgccagtgttttaaaaatgagtccacgtgggaactttctgtttattctcaggaacaggaacagatgggaattatgggaaggccttactctttgctgtgacaccttatgtggtcacatcatctcctcttcacccttccccatagtcagagcctgtgcctctacatgaacttcaacaggggaaatgggaacagaagtgcttagggatatattttaaggcttgtagttttatgctttgggtttactttcct

SEQ ID NO: 909956 - DNA, 612 bp, Homo sapiens
ttattttttcctcagttgaaacaaatgttgctagaagttgagcagtttatgataaacatatgttcactgtctcaacaatggtcttgcttgacacatgaattggtcacatcagcctctcatggctttgaaatttcctcagcttgtgctgaaggatttggcagtttctctgctttcaattgcattgttcaacatgagataaggtgatctttttgctcatatgttggaagcaaaatgtaacacagcttcatctacttgtaggtatcttcctttcttaggtcttataaagtgcttggttgttgctttgcaagaaaatatgaaattgctgccattcctccaatgatgaatatttgctttgctaatatcgaatttatgccccattgctctgtttacatgcctttctgtgtacatgataccttttcatttcaatgctaaatcatagtataatctttctgaagacattttaaacaacaattcaattcagtatatgtagcaccagcaatgcacaaatctcagttgaagtgatgacaaygtgaatagctatgatcaactttgtatatacaagggcaatgacaactctttcatgactgccatctagcctacagcaattgtaaa

SEQ ID NO: 909957 - DNA, 585 bp, Homo sapiens
tcttcccaaccagtggaccagcacttcctgggatcacatcccaaataagctacctgcacccaaatccttgtctcagagttggcttctggaggaagctggcttaagacacatttacaaataaatattacataaatgttagtagaaaaattttcatatacaacctcctcctcaacatcaataaaaaggaaaattgagaaatgtgagatttaatattccgcagtggactgtcagcaatttcaaagcccaaagatgtctgataaaacatgtaatttattcaacctcatttcctatgatcctccaatatttgcttaactgtattaatactgtgggactcatctgccttagttggaaatcctcttcttaaattcttttttttaaattaactaacaaaaacctctgcttctgaaatgtataccatcttatattattctatgctctggaaggaatagtcccatattcctttatagcatgagayagatttttcttaccacttttctcaccactctgcctgccctttatgagctctccccagcctctcctcagcagctatctacttgttaggagagatatgtaagttaacatttt

SEQ ID NO: 909958 - DNA, 630 bp, Homo sapiens
caaatgctgagattctcactcttggatcttttattttaactgactctattggttttcaattcagaaaggtcaacgaagaaaattccctttggcaggtacaaatcaaaagaaaggtatataaaaaagaatcatraaagatttaagcattaaaatatttatttttgcatagtttaatctttttctgttggacttctgtcccacatacccaatcacaatgtgtgtgagtagaataaactatgatctgaataatttacaaatgttcttaattctaaaaaattaagaataccactatcactgatgataaattagcttagcattttcaaagcaatgcattttacacttatgtacttattttaaatgattttagaattgacttaaaaataaagggaaatttgtcacccttagatctttaaggagaaagtggctttggtccccaactcctagaacccattcaagtgcaggcaatgtaaccacctaccatggaattactcactaactcttttattcttttccccagatgttttctctctcctgaaataagccttgactctatttgatctgcagagccttggcatgaagaatattttatgtttcttctgtgaagtaaaaaggcaagtcttgttgactgat

SEQ ID NO: 909959 - DNA, 640 bp, Homo sapiens
agaacaggtagtctcaagagtgggtttccagatggggactttaagagtggccagcctttgagagtgactttagactgcacatctgaaataactgaatttaattaaaaaatataggcagatgtcttagtcagctcaagctgttataacacaataccataaactgggtggcataaataacagcaatttatttctcagaattctggaggctaggaagtcagagatcaaatgccagcaagttctgttcttggtgagggccctcttcctggcttgcagacactcataatctctctgtgtgttcacataacttctttgtgcacttgctgagagagaaagctctggtgtctcttgctttacttataaagacactcatcccattatggagactccaccctcatgacctcatctaaacctaattaacctcccaaaggacctgccattttgggggttagggcttcaacatataatttttatttatttatttatttattttttttgatgtggagtctmtctctgtcacccaggctggaccatagtggtgcaatcttggctcactgaagccttctacctcccgggttcaagcgattcttctgcctcagcctcctgagtaattgggattacaggcacacaccaccatgcctgg

SEQ ID NO: 909960 - DNA, 621 bp, Homo sapiens
gtagtcagcaaactatggcccacaggccaaatctagcctgtgactgttttggtaaataaagttttattggaacctggtcaccctcatttatgtattgactatggctgctttcatgcaacagtggcagagttgagtagttgcaacagagactgtagggcctgcaaaacctgatatatttagtatctggccctttacagaaacagtttgccaagtccctgcactagaaaaatatattactgactaaattctaatatagggcattcctgcctccagagagccagggcctaacttttatgcctgcagaataacaaaaacacaagctgtgtttaagttgaaccattgagagcatgaggattcagcaagaatattgcaattcactaagctaggattttgtttataaactttaatttttgatactttgaatgctaaggaaactcaaatttagttccctctcccacttttaagcttttgatgactcatcctctgagctccatatcccagaccctcacagccaggctggcccttcctgctggccctgctctgcmccttgaggactcctggcttggaactgaaccaccttgctccagttgaaccatacctttgctctagtcatacatcttg

SEQ ID NO: 909961 - DNA, 651 bp, Homo sapiens
tggcggcttctaattgtaaaccttctcatacttgaaaccttccctgtgtcaggatgaggaagctcgtatgaagagtgggctgattccatttgtttgcagtttatgatcaaatttggacatcttatttcgaagcgatataagaaaggcacttgataagctgtctgcagcagtttctcctaaggggtctgccaaaaacggtgtgggatttcagggtctggttttctttgccttctccaggtaagcttgtttataaagaggaaacatttgtgccgctcagcagatttgagagacccggtgggaattgctgtttatttgtcttttgatcacaaagcctggggtttggctccaaggctgaaggtctcgaggcctctttatctcctccccttgagactttaatctctcctctgacattcctttggcccgtgaggtggctggggagttgaaggagggggagtactgcaggtggacaaagattccctggcctcatcagagtatctgtccttagtctgacctcccaccagggactgtggttctttytgagatcggctccggagcctaacctccccctcccctttgtcctacaaacaaccaaaaggaagaaacaacaaagccacccaccctcccccaaaccccaggcaacatttattttgg

SEQ ID NO: 909962 - DNA, 623 bp, Homo sapiens
aattaatagcgttattttttcctcagttgaaacaaatgttgctagaagttgagcagtttatgataaacatatgttcactgtctcaacaatggtcttgcttgacacatgaattggtcacatcagcctctcatggctttgaaatttcctcagcttgtgctgaaggatttggcagtttctctgctttcaattgcattgttcaacatgagataaggtgatctttttgctcatatgttggaagcaaaatgtaacacagcttcatctacttgtaggtatcttcctttcttaggtcttataaagtgcttggttgttgctttgcaagaaaatatgaaattgctgccattcctccaatgatgaatatttgctttgctaatatcgaatttatgccccattgctctgtttacatgcctttctgtgtacatgataccttttcatttcaatgctaaatcatagtataatctttctgaagacattttaaacaacaattcaattcagtatatgtagcaccagcaatgcacaaatctcagttgaagtgatgacaaygtgaatagctatgatcaactttgtatatacaagggcaatgacaactctttcatgactgccatctagcctacagcaattgtaaa

SEQ ID NO: 909963 - DNA, 512 bp, Homo sapiens
tcaaatttattgatttgtgtatgttgaaccaaccttgcatcctgggaatgaagctgacttgatcatggtggataacttttttgatgtgctgctggatttggtttggcagtattttgttgaggatttttgcattgatgttcatcaaggatattggcctgaagttttgttttgttttgttttatctctgccagattttggtatcaggatgatgctggcctcatagaatgagttagagaggagtacctcctcctcaatattttggaatactttaagtaagaatgttaccagctcttctttgtacatctgatagaattcagctgtgaatacatctggtcctgggcttttttttttttttttttttggttggtaagctatttattactgcctcaatttcaaaactctttactggtctgttcagggattcaatttcttcctggttcagtcttaggagggtatatgtgtccaggaatttgtccgtttcttctarattttctagtttacatgcatagagg

SEQ ID NO: 909964 - DNA, 570 bp, Homo sapiens
aagactagagcagagataaatgaaatagataatcgaaaaccaacagagaaagtcaataaaatctttagctgatggacaaagaagaaaagagagaagactcaaattattaaaatcaraaatgaaagttactaccaattccttaaaaataaaaagtattgtgaaagagtactatcttaaaaattggataagctagatgaaatgggaaaactcctagaaacacaaaatctaccaagactaaattatgaagaaatataaaatccaaatagacctataactagtaaagagattgaatcagtaatcaaaaatctcctgacaaagaaaactcctggagctaatggcttcactggtgaattttaccaaacaattaaaaactaacaattattctcaacctattccaaaaattgaagaggaggcaatactctctaactcattctatgaggccaaaattaccctgatatcaaagccaagtatcaaaattaccctgatatcaaaacactacaagaaaaatacagatcatatctcttatgagcagtgacgcaaaaatcctcaacaaaatactatccaaccaaa

SEQ ID NO: 909965 - DNA, 593 bp, Homo sapiens
ggggaaaagatggcagcaagcacatcagctatatccaactgtttcaactgtggttatgtgcaagagaaattagatgtgtctgtaggaacttagtggggaaaactagggccaatcatgggagatgraccctgtgaggcagatattgccccttaataggtgtgccttccacacctagatccaggggttcgggtgcaaagtgacaaattgagtgtagagacagattatcacctcccttgttctagcttacatacttctattaatgctgtgcagctggataatgctttgctatattaacttatagattttttttctgtctgtattatccccttcctttcccatttgaacatgctcccagcctcacttaatttcactgttgactcaccgtgcatgtggtacttgaagtcctcacggctttttcaaatgcaccttgtttagctttctctctccatcctgtttacttgggccacaagagtttgtgggagggaaagtaactcctcactccagaatttaagataagggaaataagtttgcccctgagcagtaaactaagccatcaacatttaatgtgtcagaacagagtcaccttgaacgga

SEQ ID NO: 909966 - DNA, 601 bp, Homo sapiens
gagtggtttgaactctaccaagacatagtttctgcacactttttctgctcaggagttacrtggccagaggtcaaagatgggcatagattttgtaatttattacctttcatggggtatgtggccagaggtcaaagatgtgtgcctttcccatttgttcctatagataacatcactattgaggaacctaacatgagtttatttgagatgattttcaggctaacctcagcatgacttgtgactcatgactcaactgatcctgtggtcccaaccagaagtggacccaggacacaaggaccattttccatacccctgtgatttcatccccaatcaatcagcagtacacattccctagccccatgcccaccaaactgtccataaaaccctaacttccaagcagtctgagaaaataatttgagtgataactccagttcttggacatataccaggacttaagtgaattaaactctttctctactgcaatgccatggtgaggtaatacgggaaagaaagaaaaagtacaatcattatatcatcatactcttcctttggcaggaattgcatagttataccagcattcttctcacctcttccctactccctc

SEQ ID NO: 909967 - DNA, 601 bp, Homo sapiens
gagtggtttgaactctaccaagacatagtttctgcacactttttctgctcaggagttacatggccagaggtcaaagatgggcatagattttgtaatttattacctttcatggggtatgtggccagaggtcaaagatgtgtgcctttcccatttgttcctatagataacatcactattgaggaacctaacatgagtttatttgagatgattttcaggctaacctcagcatgacttgtgactcatgactcaactgatcctgtggtcccaaccagaagtggacccaggacacaaggaccattttccatacccctgtgatttcatccccaatcaatcagcagtacacattccctagccccatgcccaccaaactgtccataaaaccctaacttccaagcagtctgagaaaataatttgagtgataactccagttcttggacatataccaggacttaagtgaattaaactctttctctactgcaatgccatggtgaggtaataygggaaagaaagaaaaagtacaatcattatatcatcatactcttcctttggcaggaattgcatagttataccagcattcttctcacctcttccctactccctc

SEQ ID NO: 909968 - DNA, 609 bp, Homo sapiens
ctggaatggggaatgtggctgaagtgaagggaaggaatttgtgggagggaagcgccagtgggaagtcaaagaagtgggagatgactgtgtaagctgaatcttgggcatttaagtaacacactatttttaaggaaatgactggtacaggcaataaagacccaatacattaaataaatagggggaaaagtggccttattcaaagtctctgagtggatatgaaaaacaaaatacatcaagcctgtagtcccagcactttgggagactgagacgggtagatcacctgaggtcaggagttcaagaccagcatgggcaacatggcaaaattctgtctctactaaaaatacaaaattagccaggtgtggtggccggtgcctgtaatccagctgcttgggagactgaggcaggagaatcgttgaaccacagaggcagaggttgcagtgagccaagatcacactactgcactccagcctagaggacaagagagaaactccatctgaaaaaaaaataaagatgtttgaaaagatcagttttaggggaaaaacaaaacaaaamcaaaaaacaaaaaaaacgcacacagaaaatagaatgaaaacctgaaaacagttttat

SEQ ID NO: 909969 - DNA, 645 bp, Homo sapiens
ggctactgtgcagcaatgctttgtgtttgcctattagattccatttttaaagggcaattcctatctattgggctcttactaagtgatattcyctccagtgttatagatcccattttctattaagcatctaatatacatcagatacttataggtttaaaattatttttagcatacaacaatgtgaaacaaaatgatgctctaataaagacgacaacaacaaaagcaatggcaacaacaacaaaacaacagcaacagcaacaacaaaaccatcaggttctatgtaaagcaggtggcaagaagaaatggcattaaaatagcgcagggccaaggaatctcaagagaggccctgacaattggcactgaatgttgattcttcagtaattacggagctcagtgacctgagaagaattggtggtgagcaagcttgcctcagctatgcttcccacccccgtgtttgtgccagctgggggcccagggctggtttaaattctagcaagactctcataccagtgcaaacatttacaaaatactgggtgtttatcttggcttcgaagaaaggtaagcatcttttggagttcacctgacattaaaaacatatttaaacttggggtattggcctgttgaaattgtcctatatggatgtat

SEQ ID NO: 909970 - DNA, 645 bp, Homo sapiens
ggctactgtgcagcaatgctttgtgtttgcctattagattccatttttaaagggcaattcctatctattgggctcttactaagtgatattccctccagtgttatagatcccattttctattaagcatctaatatacatcagatacttataggtttaaaattatttttagcatacaacaatgtgaaacaaaatgatgctctaataaagacgacaacaacaaaagcaatggcaacaacaacaaaacaacagcaacagcaacaacaaaaccatcaggttctatgtaaagcaggtggcaagaagaaatggcattaaaatagcgcagggccaaggaatctcaagagaggccctgacaattggcactgaatgttgattcttcagtaattacggagctcagtgacctgagaagaattggtggtgagcaagcttgcctcagctatgcttcccacccccgtgtttgtgccagctgggggcccagggctggtttaaattctagcaagactctcataccagtgcaaacatttacaaaatactgggtgtttatcttggcytcgaagaaaggtaagcatcttttggagttcacctgacattaaaaacatatttaaacttggggtattggcctgttgaaattgtcctatatggatgtat

SEQ ID NO: 909971 - DNA, 657 bp, Homo sapiens
taaatgaaaccgatcactttttcagggttcccacctaaggacgtagcatgccatagtcatctctcctgtcttgttctccrctatcagccatatccaatccaacactgtctagtgcattcattgcaattttattgttaggtatagtatgaataaactaacagttagtgtattccctgattggttgggtcactgtgggagacagagcccattatcgaaggatagaaactgagcaggagcaaatattttctttcctttcttccagagccatcaagtcactggctcacaaattaggctatggaacatggattccccagctaggtctttgactcttgagatgtaaagatgcaaagatgcaaaaacagtttgtgattgtccacagttgacatggtgagattgagagtccagtgtgctgttcttaccagcctattcctctggaatgactttggctgttttcttggctacctactgttcttttgttctcatgtgttttccaacatcaattttcccatttcgcatcaattctgttagtgtcctgatatctttccaataaattccttatctgctggggttggcttctgttattctcaaccaagaatcttgatcagcacaattgctaaagactttcagttttctttcctaattatcttggagactctc

SEQ ID NO: 909972 - DNA, 566 bp, Homo sapiens
taatgaattgaatgtaacaaaagtgatgggatgtcatttcagtccttaagttgcaaaagactgactttcctcttccttgcagattctctctctcttgctgtttttgatgaagcagactgctatgtagaagtggccaggtggcaagaaactgaggttagcctctggccaacagtcagcaggaaactgaggccctctgaccaagagcctgcaaggaattgaattatgccaacaaccaagtgagtgagcttgcaagtggatctttccacagttgatccttaaaattagacctcagccccagatgtcacaatgattgtagcctgtggaagatcctaagcagaaaatccaattaagttttacctacattcccagcccacagaaactgtgagatactcagtatgctgttttaagtcatttagtttggggtaatttattacatagcagcatataattaagacactagacattttrtttcttcgggatttttgtttttgtttttctttattttttatgttgttccaacatgtttgctttttcctcttttaataggttcaagaatagtgagaaaa

SEQ ID NO: 909973 - DNA, 481 bp, Homo sapiens
acatctgagatttgattagagtatcaaagggatagtcctggagtgcagcaaaggagtggagacacayctgtggtgactgaaagttgccacagtatggaagcactcagcctgtgcagccccttctgccccatctggattgaattggcccagagacaggagggacttctcattgcagggtgaaggtaggcagaagatccccaccagccccactgccatcacaaacacaaagtctttacaacaggagaatctcacagtctttgcaagccctcaggccagtttggagtattgccaagaattgacacagctgcatgtcctggactaggagtacaaggtgaagacttcccacccccagaggcttaagctgcagcaacacagcaccatctggagaacagagtcatctcttgagtgtgccctcctctgggggccagtagccactgtgcctctccagcactggagctttatcttcagtacaccaagccca

SEQ ID NO: 909974 - DNA, 481 bp, Homo sapiens
acatctgagatttgattagagtatcaaagggatagtcctggagtgcagcaaaggagtggagacacatctgtggtgactgraagttgccacagtatggaagcactcagcctgtgcagccccttctgccccatctggattgaattggcccagagacaggagggacttctcattgcagggtgaaggtaggcagaagatccccaccagccccactgccatcacaaacacaaagtctttacaacaggagaatctcacagtctttgcaagccctcaggccagtttggagtattgccaagaattgacacagctgcatgtcctggactaggagtacaaggtgaagacttcccacccccagaggcttaagctgcagcaacacagcaccatctggagaacagagtcatctcttgagtgtgccctcctctgggggccagtagccactgtgcctctccagcactggagctttatcttcagtacaccaagccca

SEQ ID NO: 909975 - DNA, 459 bp, Homo sapiens
ccataaaaatctctttaattttgtaaaaaagtgaatgtgaactcttccctctccttttgctgctagctgcaatggagatgtgagggctggagaccatgccaccatattgaaccatgagtagaaagtcacatactaaaatagtggagcaacaacattcaaaatgcctgacatcttgaatctgtacaataacctggaccccttgttctggcctcctatcatatcagagagaaacaaacttccatcttatttaagtcatgattatttgcttatttccatacatttgtttatgcagttatacgatatttattccatctatctattatctatctatcatctatcctatctatctaaccatctacccatcatctatcctatctttctatccctctatcatctatctatcatccwtcttattctatgtgactatcaaccatcttattctaactatctatctatcta

SEQ ID NO: 909976 - DNA, 634 bp, Homo sapiens
ttgaatcatgggagtggacccttcataaattgcttagctccatccccttggcgatcagcgagtccttgctctgttgtgtcgcacgagagctggttgtttaaaacaccctgccatgttccccttcttgctcttgatttctctcttgacacgtgataccctggccctccctttgccttcctctgtgattggatgctttctgaggtctcacccaaacctgagcaggtgctggtcccatgcttctactgcctgcacaactataaaccaaataaatattttttctctataaatttaaaaaaatctgaacagaccagtagttaattatgaaactgaatttgtattaaaaatatttatcaagcaggagaagcccaggactagatgaattcacagctgaattctaccaaacataaaaaaaatagatggtatcaatcaaggaattcctctctaactcattctacaaaaccagtatcatcctgacactaaaatctagcaaggaaacaacaacaacaaactacaggccaatatctgatgaacatagatgcaaatatcctcaacaaaaygctagcaaaccaaatccatcagcatatcaaaaatgtaattcatcatcattacataggttttattcctgagatgcaag

SEQ ID NO: 909977 - DNA, 610 bp, Homo sapiens
aatacacgtaatacatgtcaaacacctagaaccatgagtggcacacagtaagtgttcaacaaatgttagctttcttttttcttttttttttttttttttttttgagacggagtctcacagtggtgtgatctcggctcactgcaacctcctcctcccaggttcaagtgattctcctgtctcagcctcccgattagctcggactacaggcatgtgccaccatgcccagctaatttttttattttttattttttatttttagtagagacagggtttcaccttgttagccaggatggtctcaatctcctgacctcatggtctgcctcttgacaaactcctgttcttcaagactgaatttgactgcttcctctattcctaagttttctagatttcctgggcaaatttttctcctccttctcctaagattctctatcattttgattagtcttatagttggtacttttcaaactgtatcatcatgacttaattacacatctgtgtcccccacraaatggtgtagcccataaagatagatttggaatcccttagaggcaggttctatggaaggggaaggaaagcagattctgaccagcctaaaagagacccaatttta

SEQ ID NO: 909978 - DNA, 630 bp, Homo sapiens
cacatggacacagggaggggaacatcacaccccggggcctgtctgggggtaggggggtaggggagggatagcattaggagaaatatctaatgtagatgacaggttgatgggtgcagcaaaccaccatggcacrtgtatacctatgtaacaaacctgcacattctgcacatgtatcccagaacttaaagtatatttttaaaaaaaaggaatgaaatactgacatatgctacaacatggttgaaacttcaaaatattatgtcaagtgaaagaaaccaatcacaaaaggttacatattgtattgttctatctatatgaagtgtccagaatagaccaattccaagatacagaaagtaggttaaaatgtccggaaattgagtcactctaaagagacataaaggagattgcctgggactgtgggtcaggtgtgagactggagaatgaggagtgactcttaaagtgtattggtttcttttttggagtgctgaaaatgtgttaaaatttaaaaaaagcaatgacagaaataaacacagacacatacacacacacacacacacacacgtacatacacacactaccagatgcctgggccacactgcagagctgcagattcctaatatatagagatatatt

SEQ ID NO: 909979 - DNA, 603 bp, Homo sapiens
atagttggctactgattattattatggaccactaagttatgcaattcaatggtaatgctcttaagaatgtttatttgtccactttgatgatcatacatagaaaatacaccatgatcaggtgggcactcattgattgaacgctcctgtgctatagttattctctttgataatatttgtttcaattccattctctgttttcattgtgttacgacattggacaagacactctatctctttgattgaaaacttatatttctgggttatatatcctgactttcaaatatattaatatatcatatacatttttccacataaaatagttctaaaatgtaattttcacctgtataatatttagatgtatcaacgaccattgtttatttaaccattctgttagtatgcacattcaatttattttttaaaatttaactaatatactgttatattgcagaaaatatatttgaacatgactttttygaatctttggtttttttctgtccagtagattcctagaagtgcagttactgagtcaaagcatggatttttttttacaggctttttattcatgctgcaagattgtttacaaggaaggaagcatagatttac

SEQ ID NO: 909980 - DNA, 626 bp, Homo sapiens
cctatgagcttgtaaaatcaaaagcaagtcaattacttcctagatacaatggaggtacaggcattggataaatacacccattccaaaagggagaaatttgccaaaacaaagggctacaggccccataccagtttgaaatccaatgaggcagtaattaaatcttaaagctccaaaataatctcctgtgactccatgtctcacatctaggtcatgctgatgcaagaggtgggctcccatggccataggcagatccacccctgtggcattgcagggtacagccccccctcccagatgtttccacgggccagtgttgagtgcctgtggcttttctagatgcatgggggcaagctgtaggtggatctaccattctggggcctggaggacggtagccctcttctcacagctccaacaggcagtgccccagtggggactgtgtgtgggggctccaaccccacatttgccttccatgttgtcctagcagagggtctccatgagggctccactactgcagcaaacttctgcctggacatccaggtgtttccattcatcctctgaaatctaggcagaarttcccaaacctcaattcttgacttctgtgcacccataggctcaacaccatgtggaag

SEQ ID NO: 909981 - DNA, 646 bp, Homo sapiens
tgctttcctgtgcatttaaattgttttattatatatttggtccactgtttattattgttatctgcatcagggttggtctgataraagcttcttcaccattgccagaagttttcctaataaaggattctgttttttttgttgttgttgttgtttgtttgtttttggtttgcagtcaagtgggaaaattatgaaaatgctgtgaagttttcatacaggtataattgtatgattcagagaagagtttttttgttcagagagtgtcttaatccaacttatttatattaaaatatcttttctttaaaataaatggtggcacccagatggtttatttgtttgtttggtatctttattagatgaaaagttttcaattgtagtagactgaatagtgtcccccaaaattcatgttcgtctataacctcagggtgtgacctcatttcaatggtatggtatttgcaaaaggaagtagttaaagatcttgagatgaaatcattccggatttaggttgggccttaaatccaatgactggtgtctttataagaaaaaagagggagatttgggcacacagaaatcagaggagaagaccatttgaagaccgaggcagagattcagtgataagccaaggaacactggaaaccaccagaagctg

SEQ ID NO: 909982 - DNA, 719 bp, Homo sapiens
gttaagctgcattcccagggaaaaaaatacggtttggtgggctccagcttatctgagccacaggtgtatgatcctggtactaccacctccccgatggttccttgggggaagttccttaaactccctggggmcttcctcatctgcagaagggttgtgacgatgggctggtgtcacaaggctgttgtgagatgagggagttagtacccctggtactcagtgagagcaagctcagttcaccttagctaccacccagccctgcaaaccacctgcgctcctacaactccttgcagtttacaatgcattctcatcttcataactgtttctacttttagcttctcagcaagctgtggggtaggcatttcacagatgagaaaaccgaagagaggctgggagatttgccaaggtcacatggcacgtacacagctcagcctcctgactcagtccagcacttttcctgtctctttgctgagatcacagttaccaccttcagtgcagtgtggccccctgggcccaccccaaagctgctgggaagtttgcgaagaaatctgagtcacagaaaaatgaggcatctacttcagatcctataccttggcgtttcacggaatattttggagtgttttatcctaggtagtaaatttgacttcgctgtctgtgaaaaatagatctgtgctgtcaacggtggacactgaatgtccacctggcaaacttatcagttcagt

SEQ ID NO: 909983 - DNA, 604 bp, Homo sapiens
gggatcccttcctaggatgcccgggctggcctgctgggaggcggcggggtctcctcctcagggtcctgcactcgggtttcacatcgggtgaaatttctgggctggggctcagcacgcgagaccgctgcctcacgcgggccacacagaccacctccccgcgggccgcagcccctggtcaccggccctcctctcggtgctggggccgcctggagccgctgggagccgagtggccctcggggaggcggcgccgcggtgcccagggtgcggggtccgcctctgtgcgcctgagggcgggggtcgtacaggagctcttcccggggctggtccccgaggcgctgcacctcctaccagcttcctgtgatcgaaaccgaaacctccacctgcgcaaccctcccagatgggcttgaggttggggtgtggccgggacccgggcggggaggggtaggggtggagtgaaggcggggtctgggggggtgcgcgtggacggggagagtggaaccgcgggtgtggacctccaagtatagacgtcagagaacattygtcgtcctggctcgttggtctaggggtatgattctcgctttgggtgcgagaggtcccgggttca

SEQ ID NO: 909984 - DNA, 541 bp, Homo sapiens
gactgcagaaggcggcaggtcctggatcaccaaggaccttgaaagcatgtggaagactttgatcaatgggggaatcattaaggggttttgcattccggaactatcatcagcttcagcggggggcagggggtaggatagaggcagggaggcaggaagttctcgcagggtccaggcaagagatggtggagtgtggtcctggggaagggggcagtggacggatctgagggaggttcagttaggatgggcaaggattgagatctggctggatcctggtgacaggggagatgaggctggggcccttggaggatggcgtcctggtgctgttaatgcaggtgtgagagtgggaggaggaggagcaggctggcagaaggcaggcacaagtgcaggtctgggcgggagtctgcagcgctctgggctggccacacsggtggggcaagggaggtggaggatcctgccctagagcttggtctcctctgtctgaggtcaggttccccagaggtggggctccagagggaaattcttgtgcaagcagtttctcagg

SEQ ID NO: 909985 - DNA, 630 bp, Homo sapiens
tttttgtttttgtttttgtttttgcagcgcctgttttgaggattctgagtattagggtgggaagcaagtattattacatcagcctggctagctcagtcggcaaagcatgagactcttaatctcagggtcgtgggctcgagctccatgttgggcggagcttttaccattcttggtacacagaattcagcatcatcgcaggtgacccagtttccgaagcttggcccctaactggaaggtaaagtttcactgagtcccaactcaatctgtgtccccatcagaggtttcaaggcctcctcccaaattcatcaatctgaccactggactgctgtgttatctctcacagccggtgtccgagaaccagagtctcttagggaaaaggaataggagatttgcaccccaggaagttctgtctgctcaccctaggctggggtagagaacctggatccctttacgttagcacaagacccaaagtttccttccctcccccaggagactcartcccagggctggaggtggatgtgctgcttccaagttcagccaagggagaagggccctcccacccagttcagctgagactgtgggtcaatgtagggccagccctacacggtctgtggggttttctccccatgt

SEQ ID NO: 909986 - DNA, 708 bp, Homo sapiens
gttaacaaaattaactttcacaaatactctaattgtcaatgtggcacttatattcctctccttacatacttaaatactatgatataaagccaatatatcttatgttacatgataagagaataggagacagaagaaaaccacagtattatatacacaatatatacacaaccaaaaatgcatttataaaaaaatggggagatcatatttattacaatcaaaattatcattgctgtaactggtcatgtagtcatagctagtatttataactactttattcaagtatccattctgtattccctttgtcttcaggaagcacctcagctggtagtgtttttttgtcttttgtggttacccaattttttattcctgaagggctgtgatcactaacaaccttgtcttcattgggctgttgtttcctattaaccttaatcacagggcatggtaatactaagcaaaactataagggatcacccacactctagatgtattttaccttacctacattatggactagcagtccaatttccccttggtagtcaggatcaatcaccccagatagtactttaactcccttctttgcctattgattgagaagcatgaggagttcaaagcggccaggtgagtcttagcttccatttcaatggaatcattattgtrtctcctaatggaaggactcctccctttgcaactaagacctccagcccagca

SEQ ID NO: 909987 - DNA, 574 bp, Homo sapiens
agtttatattattatctatataacagatctcaaggaatttgcaaaaacaagtagttttttaaatctaattataagatctcagaaaacaaggtcaatatacaaaagttagttacttattaagaaattcatcctttgcagtgagcaatgagaaacaatattagtttctaaaaatgccatttacaattgcacagacatgaaaataaatactgagatataaatctgacaaaactttttaataatctacatgtcttttactacatgtgcaaaactacaaaattctgataaaagaaattacagaagatctaaataaagtgtgataagttcaacattacttcactattgttaagatgttaattctttcctatttgatgaatatattcaatgcaatcccaattttttagaaaaatactcctttttagatatcaacaaacatatatataatgtttatatgaaaagccaaaaaacctgaaatactcaataaaaactgaaaaarcataaagttggaggatgcatgctacccgattttaagacttactataaaggcacagtgtcaagacagtgtggtattgactaa

SEQ ID NO: 909988 - DNA, 625 bp, Homo sapiens
aggaacccacagaattggagaaaatattcaaaactatgcacctgcaaatgtctaatatccagaatctacaagcaactaaaaaaaaawcaagcaaaaaacaaataactttattaaacaataggcaaaggatatgaatagacacttctcaaaagatgacatacaagtggtcactaacatatgaaaaaatgccccacatctctattcatcagggaaatgcaaatcaaaaccacaatgagatgccatgtcaaccagtcagaatagttattattaaaaactaaaatatgacaaatgctagttaggttgtagagaaaaatgaacatttatacattgttggtggaaatgtaagctaattcagccactgtggaaagcagtttggagatttcttaaagaacttaaaacatccatttgactcagcaatgtcattactcagtatataccaaagaaaagtagatcattctaccaaaaagacacttgcactgacatgctcatcaaagcactattcacaatagcaaagatatggaatcaacttaggtgcgcatcaatggtgtattggataaggacaatgtggtgcatatacagcatggagtactaggtcattatatgaaagaaaggaatcatcatttac

SEQ ID NO: 909989 - DNA, 600 bp, Homo sapiens
ccttttccctagtggaaatcaaggtagaccaagaccagtagattaaaacagaaatcagagatgtgctatggtttggccctstgtcgccacccaaatctcgtctagaattgtaatccccaactgttgagagaggaacctggtgggaggtgattgtatcgtgggagccatttcccctgtgctgttcttgttatggtgaatgagttctcatgagatctgatgtttttaaagtagcagtttcccctgtgcacacacacactctctctcctgccaccttgtaaagaaggtacttggttctccttcaccttccaccataattgtaagttccctgaggccttcccagccatgcagaacagtgagtcaattaaacatctttcctttataaattacacagtctcaggcagttctttataacagtgtgaaaacgaattaatacaaaacttcaatttaacaattaaatcatgtgataaatacagtcctctcatcgtgttgcttaaaattagggatcagaatctcaacgagaggaatagaaatattgcctgatttcagacgaacacccccttgtattaatttccagaagtcagaaactatagtctataagcc

SEQ ID NO: 909990 - DNA, 641 bp, Homo sapiens
cacagtctacatgaacttcttcactgtcacatttcaattaatgtccatacgtagtacttgataaatatctgtctccaacccatccctttttctttgacactccaaattcacatctctgaagctatgtcttcgaatgtaattgtcacaaaccaaattcatactctactactccatttctgctcttcctcctttctttcttatctatgattcttatggtaacagtgcaaaggctgggagaggaaaaatagaaatgtattaatgtaaagttgtcatactactcttgaagtgatataataccactttctgttagactccaatatgttgaaggtttatgctataagcactaaggtaaccaaaagatgctgcagactattatagcatctcttcaaacagacttcacagaaacttgcaagcagcctgtgtctatgacatcagttggcatgagcaacaggtttttgattttggagaactatgtttacctgacactgcaacaaaacaaaagcagctatacatgataggaatgaatacaaatattaacaactgataycattgaatttttggagggtgaggagcccctcaagacaaatagagactttcaattttaaaagagcagatattgtgtttgttcccctgacttattt

SEQ ID NO: 909991 - DNA, 585 bp, Homo sapiens
aagtacaggtttaaaaagtatgcacatatatattttgttaactgtcctcatttgttcagagccaaacaggctgttagggagaaaactacaaaagaagggaaacacraaagcacttatcttcaacagaaaataagtcaatccctgataattatttcgtgatttacacagaacaatgcaggcatatagatacatgttccctttaatgtcgggtcttcgcaaaagctatgtgtttatactgccacaaaagtgacggtagccatgccacattaatcacgttttgtttaccagctaaatcctaatggcctttgagaaatggctcagtaagagcaggctctccttagggccacctctaatcaagtgattagactgattgggaaaatggcatgacccatcaaataaacccttggtatcacgtgtttgttttttaatcactcattgccaacacgagattattatttttcaattgtacatttttccctatgattatgtctgtcaaggactaagatacatgacatttattcttctataaatttgttaccatgaatatgacatttactcttctgtgaatttgttatttctaagata

SEQ ID NO: 909992 - DNA, 618 bp, Homo sapiens
agttgcctgggataattttcctccaggctctgggtacatggttacaatttacagaaaggtaaggggcaggactgcactgtgaacagaggttgtcttattrtggagataaagtccctcaggtaacagttctcataggaatagataaaaagcctgtttgggtgggtgtggtcatggtcttagtttccttttccatgattaatattccctggttagtgaggggaacaggggatcgaaggcaattgtgttttttggaagaacttcccttagtcagataagaaaacttcagagagagctcctgcctgtgcttggagggagaaattaagggagggccagagaaacttcaattctggggcagcttctaagtccttccaacttcctttaatacaaagtgctcagcatgcaaaagtgccgtaccttggggtatcattttctgttgactagcccaaaagaatgaagcttaaaaaaaaaagagaatctccaaatttttctaatttataaaaattgaatgaatgtggcattgaatgtgtatatataatcacttttactttcaggagtatcttccaactctgaaattctatgattctaagacacattctatgtaatatctttccttgaaaa

SEQ ID NO: 909993 - DNA, 618 bp, Homo sapiens
agttgcctgggataattttcctccaggctctgggtacatggttacaatttacagaaaggtaaggggcaggactgcactgtgaacagaggttgtcttattatggagataaagtcyctcaggtaacagttctcataggaatagataaaaagcctgtttgggtgggtgtggtcatggtcttagtttccttttccatgattaatattccctggttagtgaggggaacaggggatcgaaggcaattgtgttttttggaagaacttcccttagtcagataagaaaacttcagagagagctcctgcctgtgcttggagggagaaattaagggagggccagagaaacttcaattctggggcagcttctaagtccttccaacttcctttaatacaaagtgctcagcatgcaaaagtgccgtaccttggggtatcattttctgttgactagcccaaaagaatgaagcttaaaaaaaaaagagaatctccaaatttttctaatttataaaaattgaatgaatgtggcattgaatgtgtatatataatcacttttactttcaggagtatcttccaactctgaaattctatgattctaagacacattctatgtaatatctttccttgaaaa

SEQ ID NO: 909994 - DNA, 602 bp, Homo sapiens
tggcacagtacagtccttccacctgttcaatttttgattgttaatattctaaatatacaggaaactaccaagaataatgataaacaggtactcagacttaacaatagttaaattttgccacayttgcaaaatctttttattctaggaagaattttttaaagcttcaatgtaccctcccacctcagagagtaataagcattatcctaaaattgctatgtggtcatcccttgaatggtttttcacttttactatatatgtatgtatccatgataatgcctagtattgttctgggtgttttgagtgttttacacaatgttatatatactatattgtgcttttagagtgtcgggtttgtaacatggtaatatgctctatccctcaccatctatgcttattatgcccttgcaccttgcttttagctgtgttttcaaaatgtatccatactggtacacatcctgctaggtggctactttagttgctgcatagtattccactgtcttcagaagaaactatcaacagagtaaacagacaacctatagaatgggagaaaatatacattgttaaggtatatattaacaaagggaagccaggcaggtggctca

SEQ ID NO: 909995 - DNA, 612 bp, Homo sapiens
attttatataaatggaatcataatatgtggccttttgtgcctgacctttttttttttttttaaacttagtataatgttttctatgtttgtctgtgttctagcatctctccttttttaaggctgaatgataytcagttgtatggttatactacattttgtttatttgttcattagttgatggacattttggttgtttttattttttggctgttgtgaataatgcacccatgaaaaattgtgtactaggttttgtgtgtggttttatatacttgtaattctttggggtatatacctaggactggagttcctagcttatttagtaattctgtgtttttctgtttatgattgagttagcacaatagatttgtttggaaaagaagtttttgccaaaaaaaaaaaaacaacaaccaacaaaggaaaggtacaaaaacaaacataaaaacactcacctagttttgatgggaaaaactactactcttaactagcaggttgattctctgtacttcagtttcttcattgtaagtgtggatggatttgattagacttccattacccttcttccagcttactcattatgaatttagtattggaatgctttttaggatttcatat

SEQ ID NO: 909996 - DNA, 657 bp, Homo sapiens
actcaaattgtgatgtaaatgtactgtaaagttttgattacaaaattttctcggggatggaatttacttagtaggactaatttgaaacawctgggaattctttttcttgtaaatatattgaccagttatagaagtttgctagtaatatcaccctttaacttcaaagtatatagctggggtaggctacaacagttatagatagctttgcatacttattattttagatactgagaccaatattttggtagaaagggggaacagaatgtaagaaagggaatataaacaaagagaagattgtacagataatggcttaaataatcttttggctgctggcaacattagcctgtctttaggttagacatcaaccccacagctagtcaggattatttttgtcctattcacttggtacttttatgtagaaagtactgattgcagctgttccccactagggtgtcactgaatgagttagctatttggaggtgtatgttcttctctgtagctctgggacatgtcgttgaagtggtatgggtgctcatgatgatccttagccccttagcacctttccatttggatgccgagaagtaaggtgctcatacttctcagtttgcttgtcatagtcccttttactcctattgtagatctgttggcacctgtcac

SEQ ID NO: 909997 - DNA, 587 bp, Homo sapiens
atagtagaaataataaaagaaaataaagctttagctatatgggaatargatggaagaaaggtaccaaaaaaggcaaagacaaaacaaaaaagggggagggggatggccattgatttgactgaatctggttaaactgcactttggcaatgataacagcatgttcccacaacagtattttccaacctcggccacactgtcctcaaatatgcagacttaccccatgctatcccccaggattgtggcaggccaggtttcactaacgcaggcctccgtgacaactgtttcagcactgactgagtggttaagttaaatattaaaagctaaaaaagccagtgcccttatacaaaggctggaatgtaacaaaagcccattaagagtttttcccagacctttcctgggccttaaagcgtgacaaaataatgaaggaattcctaacagtacccatttaggtttaaacacgttttactgggggtctgaagaaactccccaaacctccgtgatttagcaggagacaagataaaggtaatcaccccagcacctggacccatttagactaaatttactgaggctctagaagcaggtcttca

SEQ ID NO: 909998 - DNA, 587 bp, Homo sapiens
atagtagaaataataaaagaaaataaagctttagctatatgggaataggatggaagaaaggtaccaaaaaaggcaaagacaaaacaaaaaagggggagggggatggccattgatttgactgaatctggttaaactgcactttggcaatgataacagcatgttcccacaacagtattttccaacctcggccacactgtcctcaaatatgcagacttaccccatgctatcccccaggattgtggcaggccaggtttcactaacgcaggcctccgtgacaactgtttcagcactgactgagtggttaagttaaatattaaaagctaaaaaagccagtgcccttatacaaaggctggaatgtaacaaaagcccattaagagtttttcccagacctttcctgggccttaaagcgtgacaaaataatgaaggaattcctaacagtacccatttaggtttaaacacgttttactgggggtctgaagaaactccccaaacctccgtgatttagcaggagacargataaaggtaatcaccccagcacctggacccatttagactaaatttactgaggctctagaagcaggtcttca

SEQ ID NO: 909999 - DNA, 587 bp, Homo sapiens
atagtagaaataataaaagaaaataaagctttagctatatgggaataggatggaagaaaggtaccaaaaaaggcaaagacaaaacaaaaaagggggagggggatggccattgatttgactgaatctggttaaactgcactttggcaatgataacagcatgttcccacaacagtattttccaacctcggccacactgtcctcaaatatgcagacttaccccatgctatcccccaggattgtggcaggccaggtttcactaacgcaggcctccgtgacaactgtttcagcactgactgagtggttaagttaaatattaaaagctaaaaaagccagtgcccttatacaaaggctggaatgtaacaaaagcccattaagagtttttcccagacctttcctgggccttaaagcgtgacaaaataatgaaggaattcctaacagtacccatttaggtttaaacacgttttactgggggtctgaagaaactccccaaacctccgtgatttagcaggagacaagataaaggtaatcaccccagcacctggacccatttagastaaatttactgaggctctagaagcaggtcttca

SEQ ID NO: 910000 - DNA, 568 bp, Homo sapiens
gacttaaagacagaaaattttcagtggcaaggcttaaataggaaartgtttgggaggccgaggtgggcagatcacaaggtcaggagattgagaccatcctggccaacaaggtgaaaccccatctctacttaaaaaaaaaaaatacaaaaaattagctgggcgtggtggtggtgggcacctgtagtcccagctactcgagaggctgaggcaggagaatggcatgaacctgggaggtggagcttgcagtgagccgaggtcgcaccactgcactccagcctgggtgacagagccagactccgtctcaaaaaaaaaaaaaaaaaaaaaagaaagaaaaagaaaaaataggaaaatgttcgttgaaatcttgctaaagtcttagaatgcaatctgactaaaatcataaataaatacataaacaagcagacaaacaaattatccctgcccctgaaaagcagtcaatcagaagttctttgtgctacactcctactaagaggagataatagctaattggtatttaccctcatggtaaaaattcccttagtgccttcagaaaatattaccatttacc

SEQ ID NO: 910001 - DNA, 564 bp, Homo sapiens
tttatatatatatatatgtwtatatttatttatctttgtactaatcctacaatgccttgattaatgtagttttacagtaaatttaaaatcaggaagtcaggatcttccaacttcaatctttttcaagatgattttggccattcttggtcctttacattccttatgaatttaaatatcaccttgtcaattttgaaaaaggaaacttggattttgatagagaatgtactgaatctgtagattattttgaaaattttaccattttaataatattaattttcttacacataaccatcaggtgaggtggcttaccttttatttagtttctttcaacaacagtttttagttttcagtgtacatgactttgattcttttgttaaatttattcctaagtgattttaaattttagatgttattttaaatggaagtgttttcttaatgtttgaatttttcattgaaagtgtatagaaatacagctgcttttggggtagtcatctcatatctggcagtcttactgaattcatttcttagatttaagagggttttatgcagattcattagaatttt

SEQ ID NO: 910002 - DNA, 567 bp, Homo sapiens
gtaagcctcacctccagtgcagctctgaagatctggcccctcagatctttgccccatgcctgggcaragattggccagccctccttataactctgaactattgtctccctgggaaggcccagggcagacagagagcctgcagagggggctttatctcaagaagtgctggctccatgccagtcttggccaaggctgaagtctccctccagcaccactgaatgggcagaaactggaacacaccatcccaagaccccccaaacccctttgtaagaggattagggtcccctggtgagagacttccctccccactataaggctgcgggcaggcttacacagaaggagctctggagagaggcagttgaagagagaggtgacacagacacaatagccagagagattaagtgctgagaattaccccagccacaatattcatcctttaaaagggcggaaggaataaaaaacttgccttcctgggtggtgggagtcccaggcttcagagggagctgaagataattaaaggtcaggacataggaaggttcagcaagtgtggagtcatccacgtgagac

SEQ ID NO: 910003 - DNA, 611 bp, Homo sapiens
agaagagaggactctaattctacctccaaaaccagctcctcctgaagccttcccrttttgcttgatggcaactccaatcttagagctgtccaggcccaaatccttgggggacattcttggttcctctctttcccacacacccacatttggccaatagcaaattctaacagcttcaaaatatatgcagagcctgaccacttctcactaccaccacagtcaccgcccagttccaagccaccatcatctctcacttgggtgactgcaactgcttctgcccttgagcccagcaatttgctccccaaatagcagccaaagtggccttttcaagagggaagccaggtcatgtcactctctgctcccagcctaccaaggctcccatctcactggaagtaaagctttgggttgcttaagaagtcccatgttttgggtgctcaaaaagtccctgctgatagctggaatgacatgagggaatgacatggtggagaaaaggacaaaaagaagtggggaacaatggctagagggctttccacaaaggcaggggtgttggcatctgctaggcaggtgatgaggagaccttatggtaggcatctaagcagagaaaacgtatagaa

SEQ ID NO: 910004 - DNA, 576 bp, Homo sapiens
agagattggaacagtttggaaggctcagaataaggtagaaaaatgtgggcaagtttataacttcctagagactgggagggctcagaagaaggcagaaagatgtaggaaagtttgcaacttcctagagacttgttgaatggctctgaccaaaatgctgatagtgatatggacaataaagcccaggctgaggtggtctcagatggagacgaggaactcattgggaactggagcaaaggtgattcttgctatgttttagcaaagagcttggcggcactttgtccctgccctagagatctgtggaactttcaacctgaatgagatgatttagggtatctggtggaagaaatttctaagcagcaaagcattcaagaggtgacttgggtgctgttaaaagcattcagttttatgcattcacaaagatacggtttggaataggaacatakgtttaaaggggaagcagagcataaaagtttggaaaatttgcagctagaagatccgatagaaaagaaaaacacattttctgaggagaaattcaagccagctgcagaaatttgcatacataacaaggagccaaat

SEQ ID NO: 910005 - DNA, 474 bp, Homo sapiens
gcgttcgccttccttacagctttctctgyggcttgttgcatctctattcacaaacacttgattggttatttccagtaactgtgaggtattcatatccacaaacccagcctgtttctgcaattttctcctgatatcttctgtgctttgactaaggccatgttaatcatgcgctgattttcagggttatctggatcaaaacgaatgtacatatggtaagcctcacacagtctttcatagaattgcactgcactttcctcttttcctcggttgaccttagagaccttatttacatttgtagccttttgagcccctttctttagaccttctattaatgcctcatggtaccgtcttagcctctccatgtctggtccctcattcgggtcccattaggggtctgttcctggcagctgaattcttatatattcttgggggttttggtaatcggctgggatgtgctcctctagccacttagtt

SEQ ID NO: 910006 - DNA, 474 bp, Homo sapiens
gcgttcgccttccttacagctttctctgtggcttgttgcatctctattcacaaacacttgattggytatttccagtaactgtgaggtattcatatccacaaacccagcctgtttctgcaattttctcctgatatcttctgtgctttgactaaggccatgttaatcatgcgctgattttcagggttatctggatcaaaacgaatgtacatatggtaagcctcacacagtctttcatagaattgcactgcactttcctcttttcctcggttgaccttagagaccttatttacatttgtagccttttgagcccctttctttagaccttctattaatgcctcatggtaccgtcttagcctctccatgtctggtccctcattcgggtcccattaggggtctgttcctggcagctgaattcttatatattcttgggggttttggtaatcggctgggatgtgctcctctagccacttagtt

SEQ ID NO: 910007 - DNA, 650 bp, Homo sapiens
gcttgtaatttggaggtttgggatattctctactctagtgtcctggattcctgcagcgwtgataggcccccattctgttagtattatagggatgagtcttgggtttattagctaacgaaaaataatgtatcaatgccattgccatgtaattcgcttggcaatggcatttttcctcctccaattgagcctttttttatttttgaggttgcctcccagtcattgaaaaccttaaaggctgtatttagtaaagtagggaagggaatgtgagtgccttgctctaatttttggagtttttgtctgatgtctggggaagcctgacgtataagctgtacagccagaatggattggcccttagggctttcagggtgtgaatttgtatatttatgcattgcctccaccagtccagcttggaaaagggtggagttctcagatggttcctgagtgatttcttgtaacttagaaaaattaacaggttttatcacagcctttttcattccttccatcaagcacgttattatataatctcatcggcagatgagataacgtttgttattgccaattgggttctctgttgaggacagcttctgcctcaacccttttatcattaggattatgagcatgaactttatttgtctacgcttgagctaaag

SEQ ID NO: 910008 - DNA, 594 bp, Homo sapiens
cccctaagttgggcctttaacccaagtttggacaactatccttgctctttaccaagaggagtctttaagcccctatgttttaggtggagctccaacccttccaggttgggtctctaacccaatttcattctttacctggtatagaatatacccccaccacttacccaaagttggccaattggtgttgcagtttatttcctttgggtcaggggtctcttcattagtccctttgtggttcaccaggaggaagttaccagaaagttgtccccatcaagaccccaagagagggttcttggatcttgtgcaggaaagaattcagaccaagtccacagaggaaagtgaatacgtgtttattttaaaaactaagggaatgtaagaatagctactccatagacagagcagggtgttcctgaaagtaagcacaggaatgcacccaccttaggtataatacttgtttgtatataaagacaaatcatgggagagatgtgytctgccacaaggatttgggataaagtattgctaatctttgtgtaactactatctttcacaagagtctatattattatctttaaagcaaaacttgttcttaaacta

SEQ ID NO: 910009 - DNA, 594 bp, Homo sapiens
cccctaagttgggcctttaacccaagtttggacaactatccttgctctttaccaagaggagtctttaagcccctatgttttaggtggagctccaacccttccaggttgggtctctaacccaatttcattctttacctggtatagaatatacccccaccacttacccaaagttggccaattggtgttgcagtttatttcctttgggtcaggggtctcttcattagtccctttgtggttcaccaggaggaagttaccagaaagttgtccccatcaagaccccaagagagggttcttggatcttgtgcaggaaagaattcagaccaagtccacagaggaaagtgaatacgtgtttattttaaaaactaagggaatgtaagaatagctactccatagacagagcagggtgttcctgaaagtaagcacaggaatgcacccaccttaggtataatacttgtttgtatataaagacaaatcatgggagagatgtgctctgccacaaggatttgggataaagkattgctaatctttgtgtaactactatctttcacaagagtctatattattatctttaaagcaaaacttgttcttaaacta

SEQ ID NO: 910010 - DNA, 632 bp, Homo sapiens
tctgaaggaagcactaaacatggaaaggaacaaccagtaccagccactgtaaaaacatgccaaattktaaagaccatcaacgctgtgaagaaactgcatcaattaatgggtgaaataaccagctagcatcataatgacaggatcaaattcacacatgacaatattaaccttaaatgtaaatgggctaaatgcccaattaaaagacacagactggcaaattggataaagggtcaagacccttcatcaatcttgagataatttttgtgtaaggtgtaaggaagagaaccagtttcagctttctacatatggctagccagttttccaaataccatttattaaatagggaatcctttccccactgtttgtttttgtcaggcatgtgtgctgtactcaggagtcccatctcacgtgcaaagatacgcatagactcaaattaaaggtagggaggaagatctaccaagcaaatggaaagaaaaaaaaaaagcaggggttgcaatcctagtctctgataaaacagactttaaaccaacaaagatcaaaagagacaaagaaggccattacataatggtaaagggatcaattcaacaagaagagtaaactatcctaaatatatatgcactgaatacagcagc

SEQ ID NO: 910011 - DNA, 632 bp, Homo sapiens
tctgaaggaagcactaaacatggaaaggaacaaccagtaccagccactgtaaaaacatgccaaattttaaagaccatcaaygctgtgaagaaactgcatcaattaatgggtgaaataaccagctagcatcataatgacaggatcaaattcacacatgacaatattaaccttaaatgtaaatgggctaaatgcccaattaaaagacacagactggcaaattggataaagggtcaagacccttcatcaatcttgagataatttttgtgtaaggtgtaaggaagagaaccagtttcagctttctacatatggctagccagttttccaaataccatttattaaatagggaatcctttccccactgtttgtttttgtcaggcatgtgtgctgtactcaggagtcccatctcacgtgcaaagatacgcatagactcaaattaaaggtagggaggaagatctaccaagcaaatggaaagaaaaaaaaaaagcaggggttgcaatcctagtctctgataaaacagactttaaaccaacaaagatcaaaagagacaaagaaggccattacataatggtaaagggatcaattcaacaagaagagtaaactatcctaaatatatatgcactgaatacagcagc

SEQ ID NO: 910012 - DNA, 649 bp, Homo sapiens
aggaaaaagttgaatctctgaatagaccaataacaggttctgaaattgtggcactaattaatagcctaccaaccaaaaaaagtccaggaccagacagattcatagccaaatgctaccagacgtacaaagaggaactggtaccattccttctgaaactattccaatcaatagaaaaagaaggaatcttccctaactcattttatgaggccagcatcaccctgatacccaaacttggcagagacacaacaaaaaagaggactttaggccaatatccctgatgaacatcgatgtgaaaatcctcaataaaatactggcaaaccgaatccagcagcacatcaaaaaacttatccaccatgatcaagttggcttcatccctgggatgcaaggctggctcaacatatgcaaatcaataaatgtaatccatcacataaacagaaccaaaaacaaaaaccacatgattatttcaatagatgcagaaagggcctttcacaaaattcaacagcttttcatgctaaaaacactcaataaactagatattgatggaacatatctcaaaataataasagctatttatgacaaacccacagccagtatcatactgaatgggcaaaaattggaagtattccctttgaaaaccagcaaaagacaa

SEQ ID NO: 910013 - DNA, 649 bp, Homo sapiens
aggaaaaagttgaatctctgaatagaccaataacaggttctgaaattgtggcactaattaatagcctaccaaccaaaaaaagtccaggaccagacagattcatagccaaatgctaccagacgtacaaagaggaactggtaccattccttctgaaactattccaatcaatagaaaaagaaggaatcttccctaactcattttatgaggccagcatcaccctgatacccaaacttggcagagacacaacaaaaaagaggactttaggccaatatccctgatgaacatcgatgtgaaaatcctcaataaaatactggcaaaccgaatccagcagcacatcaaaaaacttatccaccatgatcaagttggcttcatccctgggatgcaaggctggctcaacatatgcaaatcaataaatgtaatccatcacataaacagaaccaaaaacaaaaaccacatgattatttcaatagatgcagaaagggcctttcacaaaattcaacagcttttcatgctaaaaacactcaataaactagatattgatggaacatatctcaaaataataagagctatttatgacaaacccacagccartatcatactgaatgggcaaaaattggaagtattccctttgaaaaccagcaaaagacaa

SEQ ID NO: 910014 - DNA, 649 bp, Homo sapiens
aggaaaaagttgaatctctgaatagaccaataacaggttctgaaattgtggcactaattaatagcctaccaaccaaaaaaagtccaggaccagacagattcatagccaaatgctaccagacgtacaaagaggaactggtaccattccttctgaaactattccaatcaatagaaaaagaaggaatcttccctaactcattttatgaggccagcatcaccctgatacccaaacttggcagagacacaacaaaaaagaggactttaggccaatatccctgatgaacatcgatgtgaaaatcctcaataaaatactggcaaaccgaatccagcagcacatcaaaaaacttatccaccatgatcaagttggcttcatccctgggatgcaaggctggctcaacatatgcaaatcaataaatgtaatccatcacataaacagaaccaaaaacaaaaaccacatgattatttcaatagatgcagaaagggcctttcacaaaattcaacagcttttcatgctaaaaacactcaataaactagatattgatggaacatatctcaaaataataagagctatttatgacaaacccacagccagyatcatactgaatgggcaaaaattggaagtattccctttgaaaaccagcaaaagacaa

SEQ ID NO: 910015 - DNA, 704 bp, Homo sapiens
gggaaagcatgtaagcagaaaaactggtaggttattgtaattgtccagatgagtgatgatagtggcatgaacctgggcggtaagaagtgataagacgtgggatttagtctgaacagagtacctcaatttcacataaaattattattcagagtgaatcctcagctctgaggtttggaagcatttccatttttttaaactgatgattgaaagagctgagctgagtatttcatcaatgccctgggaggcaatgtttggcattccaagcctgcccattgagtgcagagaggcccaaatcaccaggacagcactcaggtgggcagagcagtagattttattggatccaaagggaaagccctatgtaagcatgcatcaaagcggcccctgcttctcttcctaggtgagagatcagctaacttttcagtcagtcatacaactatctattgtggctatcctctctgacaccttagaggagatcttagttgtttggcacattccttggagaacaatggaattaaatcttttgtagcctaacaaatattcctcaacatgcagagctgatttctggggaaaagaaggaccaattggcatatggcattcggaatcttytggaaaggaagtaacctagactcctacacctttctatccaagatttaaaattacagaagcaggagtggcctgaccatgttttgttggcaggagaggat

SEQ ID NO: 910016 - DNA, 650 bp, Homo sapiens
gggaaacgcagtctaaattccatcaagaaagtatctattcctcatggttcctggtatgaaatataacaattaaaatgcaaacatgaaatgcaaacaaatgtcatttccaaattagacttgtaattagaaataaatgaataagtttgttggtttggttattatgaccatataactaattactttgttaattataagatttgccaggatgtgtctttagccttaatatatgttaaaaaataatagacttagaaaataaataggaatgttggtaccagctgcatggagaagccctggacaagttgggcctgtccctgaggtgtaatggtcaggcccacagacaaaccatcccatctcctctgaccagcaccagatgtaaattatggggccaccattcagtggagtagaaatttttgcttgaaagtctaagggagcccacattgaatatagataacataaagtcaaggtttctgttttgattaagattattctcaaagctcagaattactggaatttgttggagtagttgaactttttgacatgaaaagatggrttttcctgtgtgtaaactctattgtgttacagttgttggtgcaaaaccacttaatgcattttctttaggaactctcaaatacctgtttatgcatttttgt

SEQ ID NO: 910017 - DNA, 515 bp, Homo sapiens
tttgttacttccagttttttttgtatactttctgcaaaagctctttcatacacatttagacattttcgtttgtcatttattgtttccctgcacataaaaggaaaatatcagtaaaataaattcgttraatattctagaacatcttcatattctctaattgcccctccagttctatatgtctgtctttctctatccagctctgtgccctggggagctcaccactgtgggctgcatcttccaagctcagtgtcttccaggtgctgattggcttagccagtgaaaggcaccatcaggagactggggaatgagaaaaggaatattggagtatttctcccagctatggtgcaatgtctctggtagtcactgtaaccctctgggactacagcttccccagttcttactgagttcctattaagatctcctgccttaatattttcaaaactaggggtagtaatgacttctcagtgggaccttagttcttttattaaagcctttttatttgaacccccgatggt

SEQ ID NO: 910018 - DNA, 609 bp, Homo sapiens
cacacacttcttcaagttcttgaggggtgtcttaacttttcttttccttttgggctatacccttctccaggccatcttagcagaagggggtttattataaaaactcatgaggtctggtgctggtcctgagaagctgatggctttaggggacagctgccttccatttcactctcatgggccctgggttctctactttttggcatatttctgcctttctctttgtgctccctgcccttatttctttttgttagataagctactgtgctctatctccactggagagaacccaactgattggtccagagattagcctctcccaatcaggctgactttcatgtgctgtgtctcattaaatagattaatagtcagtcaatgagtaggccctttgcaggtgagatgtccaacctggttctgtcagcggctcccccagtgcaagttctagctcaaccctgcatcattggcatggggatgtaggctggatggcataaactratcaaagtgttgtccaggcaccagtcctggttcacgagctattaatagtctgagtgagaaagcacaatgctaatataagtggttagagaatgttacagcaatttgactttgctgaaa

SEQ ID NO: 910019 - DNA, 652 bp, Homo sapiens
taccaacgctgtacatccaagagaaaaaaaaattaatgtgcattttctcttcaggcacttgtgtgaaaaacatccgtcttcctgtcgtcatcrctgagtgagcccacggtcaccaatccctgggtcacagctccccaaaaccaagagaaacagccagcgggacaaggccagggcagccctaaacatgccacatcaccccagtgctatgcgaaggaagcttcaggggcatcttcaaggaaatgtgtgaatctgaataaattttacagattaaaacttttacaaaatttataaaattttaatcattccaattaagcatttagaacactacttggttagtgggaaatttatagctctaaatgcccatcctcaaaagaagaaatgcttaaaatcaacgacctgaagttccaccttaaaatgctagaaaaagaagagcaaaagtaacacaaagtaagtgttaacaaaaaataaagaacagaaatcaatgaaataaagagcagatgacagagaaatttagcaaaaccaaaagttggttctttgaagggactggcaaacttgataaactccaacctagactgatcaagaagagagagagcacatgttagcaagaccaggaatggaggagggtcatcataacagaccctacaggcatcaa

SEQ ID NO: 910020 - DNA, 575 bp, Homo sapiens
tgtcaccagcaattaggtctaaatcttattcatacttactttagagcatatggaaattagaacagtgtgagtaatttgagcaaattatattttctatattaaaggttgaaatataagtctacctttttcataccattagtactatttcaggttcttaaagcacttctaggtacagcaactgtgagatatttaacagaaaaactttgtcacattataaaaacaaactctaaatgtgaaagatgatgtttacaaattttgtaagtttcttctcatgattacagttttctctaatagatgaaaataggggaaaaaacatttaaagtgaagtgaatgcacattcattcatccgcttatcccaaaagtactaagtcacagtgttttgccaagtactttaataagtgatgggtatacagagatttggttggttttattttagggagggacagcggaggagatacagttttactaagatataattcacatactataaaattcacccatttaaaktctaaaattcattgtttgttagtatattcacagagttttgtaaccatcaccacagtcaattttgattt

SEQ ID NO: 910021 - DNA, 621 bp, Homo sapiens
aatggggtaaaatgaaggtagagtctggtggggaaaataatattttaacaataacaartgatattgtactgtgagtactttttttttcattattggctaataagttttgtttaatagactaaattctctttagctttaatttaagacattttatgggtttcttttttcttttacattgttttcatattcttagttaccttgtcatatgatttctataaatttggttctagttaaaaaatttctcacaaaataacataaaaaaatattcagtatatccagatatctcatgtagtctaaagtaaaattttcattttaaaaatgcctctaaggggcaggatgtggtggttcatacctgtaatcccagcactttgggaggctaaggtgggaggatagctagagcctgggagttcaaggccagcctgggcaacaaagcgagatcctctctaaaatttttttttaaattgccaggtaggtttgcatgtgcctgtagtcccagatacttaggaggctgaggagagaggatttccttgagaccaggagtttgaaactgcagtgagctatgatagcaccactgcactccactctggatgacagagtgagatctcatttaaaaataataat

SEQ ID NO: 910022 - DNA, 646 bp, Homo sapiens
gtagagcactcctgtagtgccagctattaggttttgaagggaagatgagggttaaagaaagacacacacaccaaaagagagcaacccaacagcaaatccaggctttgtgtccagcataaaacctatagaagtgggggaccagtctaatgccagagcccaccactgcttacaggctggggcagtttataggtgtgggtgggagtggtctgggcagtatggcttgctgccccgcaaaatattgataagatattcccatgatgaggcaattcttgtccttgttccagtggaatgtcatcgtggtgtttcttggaactttgtccagcaagatataatggagatgtttctttagtgggcccttgtccgccttgtagtcaggtggttaggcaggatatttctcatggtccaaactcccataaaatgtttcactttaactgaggtctgcaaaatagcggtgagcttataaaatggtgcagttcatactaacaccagctactagggatgctgaggtgggagaatccyttgagcccgggaggtagaaattgcagtgaaccctccttgtatcactgcactccagcctgggtgacatagcgagaccctgtctcaaaaaaaaaaaaaaaaaaactgagtgatgaactgtcaaattatg

SEQ ID NO: 910023 - DNA, 646 bp, Homo sapiens
gtagagcactcctgtagtgccagctattaggttttgaagggaagatgagggttaaagaaagacacacacaccaaaagagagcaacccaacagcaaatccaggctttgtgtccagcataaaacctatagaagtgggggaccagtctaatgccagagcccaccactgcttacaggctggggcagtttataggtgtgggtgggagtggtctgggcagtatggcttgctgccccgcaaaatattgataagatattcccatgatgaggcaattcttgtccttgttccagtggaatgtcatcgtggtgtttcttggaactttgtccagcaagatataatggagatgtttctttagtgggcccttgtccgccttgtagtcaggtggttaggcaggatatttctcatggtccaaactcccataaaatgtttcactttaactgaggtctgcaaaatagcggtgagcttataaaatggtgcagttcatactaacaccagctactagggatgctgaggtgggagaatcctttgagcccrggaggtagaaattgcagtgaaccctccttgtatcactgcactccagcctgggtgacatagcgagaccctgtctcaaaaaaaaaaaaaaaaaaactgagtgatgaactgtcaaattatg

SEQ ID NO: 910024 - DNA, 665 bp, Homo sapiens
ccttgaagaccatttcccttttcttccaggtgccactgaaaacagcagccttcagagctttgctgaagctgctgtcgtccagagtctgttgaactcagcagtgaggctagcagggctgggagcacctctcttcttcaacaactgcatcttgatgctcacttctggagctgtcatgtcagcttctctatcagctgtatctttttcctttgattggtacctcaacaaaagaccatggcctctcttttttctttgctcctaaaacaattctagaaagagtaccataatccaaatttcttcttttgtattgtcaatctgttcaatttgactacaaaggacaccattagcaaacattctctcttactcagccattctcagatgttagtaagtcctgactttagttttgccttagcatactctttttcacttatctccttgactgtctgtttacaccttccttttattcattctttgatatttgctactttgctttttttcttttcctgtgtactctccattaaacgtatctgcttttgggamtttgtgtttggctttatgaagccattggtttagctctgtccctaaagaggtttccttgaagcctttcttaaaggcctttttcaggtcactcttgtcacatcccaaaagtggcacagagcttctgagaa

SEQ ID NO: 910025 - DNA, 660 bp, Homo sapiens
gattttagtaaggtaatcaaatatgtgtactgtagatcttatcctcagtggaacgtggggcagtgcttcataatcaaacacaataatatttttgcagtaaaacatataaatgttcactctaagccagataaataaagaccataaataacctcacaattttgcattatcaaattttgataccaaatgagttataaaaatctttccatttcagatccctttgtattttggaattgcatataaaggattgtggacttgtattttagcataacatttagacaatttctaagcattcatgcatggttggggcatcagggcccttgagcaaggagtacctacaggggagaggaggcaaagtacatacaggatactgtaagccaacttcatctgctcaaaatttgcattgattgctcctacttttctttattgtgactgtgattcaaaccaccaagaaactgtccttgtgaggcataagaggagtttaatgtacacagagatttgtgtttttcatactgatagaagtatatttaagggattggggtcctgtgccttcaaaaggtgcctgatagcaaggaaatgtggctcaaaaggatttgcctgyatacactcttgttgtcaggcctttgatagctttggcctcagttttgcccatagatgatgact

SEQ ID NO: 910026 - DNA, 676 bp, Homo sapiens
agtttatgtatttcttaaccattaacacatgtaaaactgtcctgccmttactctctggttttaaatgtgtcactgatgtttttactgttattcccccaaccccattttcctcataagccatgcactttttaatgtataattttccaaattagagtaatttttaaagaatatgtcatgttataggaaaactgactatttttttttcttacctagcatagtgaacttttgtggatttggcaagcaatgaaaataaagtcatcaaagattctgtattgcagaatcaaaaagaataaggaagagaaacctacaagtattcactattcagtggagatgcctctctttggtggaggaccattcagagcttctatctaaagactaaccttgggtggattttctcactaatagtttattattctggcttctgggtttcctgctcttctgaacctgagcatcctcttcctcagcaagtggttttgtttctttggcacatagggccgtgaatggatagtgcaatactgttaaagaatttggactttattctcttgcatctctgaccttgaacaaggctattagttcttactgacttcatatcccctctgggaacacaactttatgacccaccagtggcacttgaccttgggtctgtggcacctgatgctgaggggtcagaatcaag

SEQ ID NO: 910027 - DNA, 586 bp, Homo sapiens
cgcgtttccagcactctctatgaaatgccacgctgctacaaaccccccatagcacccactcggcggcatttaccycactctcctgtcacagcccatttacttgtctgtctctcttactggcctgtgggcaactcgagggcaacatctgtctcagtcactgtggagagatggcaaagtgtcgtggtgaagtgagacagccaggccccagtccttgctctgccacttaccagctgtgtgggagctggtctatgtgtcctaaccttcctttgaaggtgcttctccaaatttcactacgtccacacagtcacttgggaatcttgcagtgattctgattcagtaggtctggggttgatctgcatctccaacaagatcccatttctaacagtaggtgatggagggctccacggttgggggcagcaaatctttttttttttttttttgccaccagatattatgatgacagctggccacttgctgtgcctcagtttcttcatgcataaaaagtgcaaaataatagtgtctatctcacagggttgttgtaaatattgaaggattaaatgagcgccaggcaggtgctgagcattca

SEQ ID NO: 910028 - DNA, 662 bp, Homo sapiens
tgcggaaaggatgggaaaggcaactatttcttgcctcgattttttaattttgtatgtttggggctgcttttaacacctgtgcgtgtcatgaagggagatagaaaaaaaaaggsggggggatgaattgggtgggggcgaggggtaactccttgggacacagactcagatctgggttcaagtcctgactctgcctctcaggagctgagcctgaatttccttatctgggaaatggggaattacagagcctgcctcagaagcttggggtgagaattaaaggggtggacagtgtaaagtccttaagtagtgcccgatgcagagaaagtgctaaatatggggtagttattatttgtgattttttttgaaacaaagtcttactcttgtcacccaggctggagcgcagtggcgcgatctcagctcactgcaacctccgcctcccgagttcaagcgattctcctgtctcagcctcccgagtagctgggattacaagcgcctgccaccacacctggctaattttaatatttttagtagagatgtggtttcaccatgtaggccaggcaggtcttgaacttctgacctcaggtgatctgcccgcctcggcctcacaaagtgttgggactacaggcgtgagctaccgtgcccagcctttgcgatcattattattg

SEQ ID NO: 910029 - DNA, 617 bp, Homo sapiens
tcctatcggcctgctcttcagcraacaggagtttccttttacagacctcaagaatagacacgtttctcgtctattcctgtcgcacgcctcaaggttgcgcggcccgttcttatcagcagaaggcacctggtgcattgtgggagagccggctgggtgggagccctttccagagaggtttcctcctgctaggcccctggtcagccgccttgctgacccggagttgattattgcttctcctcacaacttcctcctccaccactttttcttgattagaggatccccaacccaggagagacaccctctgagagtgtccccagaaggcccttagccaggaggcatttgtaagaaagtttaagctgttcattgaggggagagggcagcctctaggggaaataagaacatcccagggtccactcagtcccagcagcgtagactccaaatctcggcaaatgtgagattggtatagtcttcccaggagctccagtgttctgatgatccgaatttttattttattttatttttttgacatggggtctcattctgtctcccaagctggagtgcatggcacaatcataccttactgcagccttgaactcctgtgctcaagcaatcctcct

SEQ ID NO: 910030 - DNA, 559 bp, Homo sapiens
attagtcagcatctaccagccgtaaataggagttggcactctccctgcattccgtcatttaatcctttcagatacacctgcacaygattaatattcccatttaacagatgtgaacaccgaggaaaggtgggattaggacgttaggacatttgtcatgctcatacactataattgaaatgatatacagatgattagcatggtccctgtgcaaggatgacatgcaaatttgtgaagcatgttaggacatttgtccagccagcatgttgcagacctgagatttaaaccacgtgatctgtctctaaagcctgcattcttcttcttcttcttcttttttttttttttttttttttttgagacggagtctcgctgtgtcatccaggctggagtgcagtggcgtgatctcagctcactgcaacctctgcctcctgagttcaaacaattctcctgcctcagcctcctgagtagctgggattacaggcacccaccaccatgcccagctaatttttgtgttgttagtagagacagggtttcactacgttggccaggatggtctcgtact

SEQ ID NO: 910031 - DNA, 622 bp, Homo sapiens
aaaataataataggtaaatgtctcttaagtatatcctcagggatcatagagctaccagatgaaaattgatgtggctyatgattttatcatataggtgctatcaaccccttagttaattatattgaggaactaagatgctcttagcactatgctaaaatatatgagggagatataattcctggttcctattatcaagcttaccaggaatatataatatacctaaaccaaagaataatgtaaaaactttatataactaaacagaagatggagagtggtataaacaataaatattttaggaagagataatgatggagaggaatggtgaaaaaaagctccaggaatgtggcagactacagttctctgctcccacccttgtcagagcgttatacagcccttcccttgccttgcctcctcatgggtgaagtatgcttccacgctccagtgtcaagcttggccaggtgacttgctcttgataatggaatgtgagtggaatgtgtacactataagcagccagaaattctaaatgcacatgcttagttctgttggcctttgcattcctgccctctgttataagaaaaatatgtcctagatataccacagaagctgcccttaatgagctaga

SEQ ID NO: 910032 - DNA, 609 bp, Homo sapiens
ttaactacagattttggtaggaggtggatataattatcagtgttagaacagcagcctgactaatttgacctatgattcttagaaatggcgcagaggaccattttataaaaatatgctactcagcctaagctgctttaaaaataagtctggtttgagaaggcaagagaacactacaggaattaacgttgaaaacactaaaaggagtgaagaataaatcttggtcatgtttagaggcatcagcattacttcctctttccctgtcttctctaatccctagcttgtcttgttgatagctagtttatgtatatatgacattagtcgttaattcatttttcccttccacaaaatgctgggcattagattcagttttgtagatacattagtgaacaatacactattcctgcccaaatgtaccatttgtgagcaatttatcctattagcctaattattattcagtaccaaatccattaccataaatacctttctrtttaatgtcactgtaagttctgttttatcattactttcttattcttttatatgctctatacttttttatggaaatgatgtgtttttctcccaagaaaaaggtgacacatggcttgccaatta

SEQ ID NO: 910033 - DNA, 641 bp, Homo sapiens
ctgcagctgtggtttaggcggctgcagcgktaaccaggtaaccagcaaccggggagcgccagtcccaactcagaaggggcgaggctcccacaggctctttggagtgtgcagccgcagcggcgcctccctgctgcagccagaatgatggcagcagcctctgccatcactgacatgacctcaaactgcaccccctacccagtaaatccactatgcctgggccccaggccccttctttctctttctgcaacatagatgctctttccttctctgttctcttgtacttgctgttccctctgcctcaaatgcagaactgtcttcttctcatcacttagatctcaccacctcagagaggccttccctgaacacccaacctaaaacatactctctggtcccattattccatttaattttgttcatagcgctagtttattatctgtgccaacccccacttatacatgctccgtgaaggcagggactttgtattcattggtacctcatactgtgcccagcatgtaacaggtgactattgggcatttttgcatgtataaataaacaaaagtagatgtatttctacacctttaccattctttgtactggctgagtattttctcattgtaaaatgtactataattcatgtcctt

SEQ ID NO: 910034 - DNA, 570 bp, Homo sapiens
caggaaggaagtggtgtgtggtccatgcccagcatcacattcaccaagactgccgtccacattcatgaacttgtttgttgctagaagattccccaaatgcagatgtgattttgttaaaatgcttgacaattcagagtaagtaagacctgtccccaaatgcttagtttggggcaaattctgctctgcgttagataaaaggcctgaagatttctcagaagttaagaatgatatttcaggtgaattataagaagagaatgtccttttctatttagaaaatgcaataaacttcccctgcagcgtgtttacctttttaaaactagacgggaaccacattccggcacaacaaaatatccccgacagtttcttctagggcggtgattatgatgtctgtcatgagtggaaatgcttaaatatttcaattccacaaatgtttatcatgcacctgctatgagtccaatcatctctgggcacagaggaagatacaaaaaaaaaagaaaaaaagaaaaaaatggytgggctcagtggctcatgcctgtaatcccagcagtaggaggctgaggcgggcagatc

SEQ ID NO: 910035 - DNA, 570 bp, Homo sapiens
caggaaggaagtggtgtgtggtccatgcccagcatcacattcaccaagactgccgtccacattcatgaacttgtttgttgctagaagattccccaaatgcagatgtgattttgttaaaatgcttgacaattcagagtaagtaagacctgtccccaaatgcttagtttggggcaaattctgctctgcgttagataaaaggcctgaagatttctcagaagttaagaatgatatttcaggtgaattataagaagagaatgtccttttctatttagaaaatgcaataaacttcccctgcagcgtgtttacctttttaaaactagacgggaaccacattccggcacaacaaaatatccccgacagtttcttctagggcggtgattatgatgtctgtcatgagtggaaatgcttaaatatttcaattccacaaatgtttatcatgcacctgctatgagtccaatcatctctgggcacagaggaagatacaaaaaaaaaagaaaaaaagaaaaaaatggctgggcycagtggctcatgcctgtaatcccagcagtaggaggctgaggcgggcagatc

SEQ ID NO: 910036 - DNA, 629 bp, Homo sapiens
cccagaaaatatccaaggaaaaggaagtacaactgaatgttagatccaaatagcacaatctctcagctcactagagcagaatctgtctctaatacactggtcacaggctctattactagctctttttatccatctcgaggtagaaaagccataatttaaactgacagcattacttgtcatgaagtctgtgggtttacaatttctaaatgtcagtttgaacttctgactagttccttagagcactacactttgtttctaaatgaggcaacatgtcagctctgcatacataaaagcagttaatcagcaatttgcagtgcaacacaagaggaatcaactggtatgctaatagtcccacaaagcaccttcaattaggaagcaaagccttgtcctaagccagtaataccctcgtatatcacaaaattcattcttctacttagtagatgaaacatttcatgccaaggagaacttattattttgaagcaattgtctgcattcagcctgaggtacccatgtgtccactggtctataatggaggagctacaggyagtgggtgaatgaggaccactatgattcctgaccctcctcacttgcggctttcattcagtttccaatgggttcttattctttgc

SEQ ID NO: 910037 - DNA, 590 bp, Homo sapiens
taaaaaacaatgcataaggtccctaattaatatcttatgtaaagaatccttgttaattataaaattgtgaccataatgaaatraaaatatagacttaatagaaatacaagttctgaatttctcacattaaaagcccttgaaaaaaaagtcaaatcattctcttaagctcacagatgactatatttaatgtcctacagcaaccatgttgattattttcaaaattattatgaatattattaatggcaaatgttaaactaccaaatattctgcaatactggtaagtactctctgaagtcatggctcagcaatttcagtgtacacacatggtgaaacaagagaaccaagaacaacaaaatcttcattcacttcagtacaataggctcagagcaatgaaacagaaatactcatttgtaaaacatactttatatccacatttaaatgcctaattaatcctaacaattaaatgcaaccactaaacgtttcctttgcaagatatcttttttatttccataaacttgaaatctaatggaaatcattgtgtcattatggctaaggcaataaatgcctattggtcaataagctctgaacct

SEQ ID NO: 910038 - DNA, 616 bp, Homo sapiens
gtgacatgcacagctggagtggagagaacagcaggaggtgggatgggagatgtgtgggacagtcctcagaggctgggcttggcaaaccatgtgaaggattttggtcattatcctgagagtcaygggaagccatggaaaggctggaagcaaaggggggctcagggtggtcttctgaaataagcattctggcaatgggggttggggggagaacttatagggggtgatgagtcgacagaatgaaaacaaggcaatctctttttatagaactcagaagagagatgatggtatctctggctattgtgctggcagagggaatgttgagaaatggaagcttttcatagaaatttagtgggccaaattactttgctggcttgtgcaaatgacagaatggttggaccactcattgaagcaggacacactaggagagaccaggtttatttttgtcaggatgaagcacaagaatgacatacatttggtcttggatacactgagtttgatgtgcctttagagttgaatatggagatagttataggccactgaatacataggtatggactgatgtcattcaggtttcatccacaaattgtaactacagctatcgactcaaggggcaact

SEQ ID NO: 910039 - DNA, 586 bp, Homo sapiens
aggtgtctaatttcaacatgatgtttgcaggggacaaacacactaactatagcattccatccctgggtccccaaatatcatgatcttctcatatagcaaaatacaatcatccattttcaatagtccccaaaagtcttgttttaacatcaactgaaaagtccaaaatccaaagtctcatctgaaactgaaagtatgtttctttcagctataaacctgtaagtcagggaccaactgtacagtcaagttgtttttcttcaaatcacaatcactatttaattttaaagaaaaaagtctgaaagtatccatagctgaataattttttagttgttatatcgagcagaaatgatattcaaaacaaaaaggtggctatctccactttcagttgagtttcacaagtcctcttccttgagttgggcgtggtacttccttaggcagtagcaatgctttgtgtgtacttgccgtttcattacataggatactaaatacatatttttaaaaattggrgtggaagaaaattgacattttttgttgttcatcaagaatattcttaaatgaatctgccttttaatttttctgagactgttta

SEQ ID NO: 910040 - DNA, 586 bp, Homo sapiens
attatgatcttaaatttatcagaaatatatattccagagtacttgtcagagtctttataataaattttggacatagctgactgaaaatactttcagagaagaatcaatgtaaaacaataactgtcaataaaaagcttgaaatctttatagttaaagatctgataaaaattcattacaataatgatgaaattaacaaggaaatttgattattttgtgaatcaaatattttaacatattttaagagagaaagataaattctaatttttcatcagtgtactattaatactaaagctagtttttttaatgaaatttataaatgaatctatccaatctcaaccagctttgaacacacaagatttatttttcaagattgccttcatgtaagccatttatagcatttaaaacatattcatcagcctttttgcctcctacattttgtctttcttactttggaacaatcagtcattctactttattagaattatcattttattagttttacagaattaattactccttttttccttaacagaaaacatatcatamtttgaaacattccttaccaaaaccacctgtcattttcctt

SEQ ID NO: 910041 - DNA, 516 bp, Homo sapiens
ttgctgaactcttctcgaaatcagtgacatgggagtttcctatgaaggtgttattcagcttgatcttttctaggctgaaaatgaaaacatttctgaaacaccagaaataaagacacacaatgtgttatgtatagccagagagccacagttaaatattcacttagctacgtagtaaaacttacctcagacctaagaagtctggcagagtaattgttacctaaaaatgatcatttgggctgggtgcggtggctcaagcctgtaatcttaacagtttgggaggctgaggcaagcggatcacttgaggtcaggagtttgaaatcagcctgccaacttggtgaaaccctgtctctactaaaaatacacacacacaaaaaaattagccaggtatggtggcagayacttgtaatcccagctactcgggaggctgaggcaggagaatcgcttgaacctgggaatcagaggttgcagtgagccaagatcgtgccactgcactccagtctgggtgaaagagtgaga

SEQ ID NO: 910042 - DNA, 619 bp, Homo sapiens
tcaaactggggggagtggtgttaaagtggagtttttctcctttattttgttaccaaagtttaggtttttcgtttaaaataaactgttataactartaagatgcttttggtaagccgtggtgaacacaaagtgaaaatgtataagagatacactaaaaataaaaagcaagaaatcaaagcatactgctaggaaaatgacttaaccacaaagaaagccattaatcgagaaaaaaggcaacaaaggttctacaaaacaactagaaaacaatcacaaaaatggtagtaataagtccacatgtatcaataattaatttgaatgcaaatggtttgaattattcaatcaaaagatgtagggtaattgaatcaataaaagacaaggtacaactatatgctgcctataagagactatcttcacctgtaaggacacccatagaataaaagtaaacagatgaataaaggtattctatgcaaatgaaaatcaaaaaagagcaggtttagctctacttatgtcagataaaatatatcttaaatcaagggctgtaaaagagacgaaaaatttattatgtaatcaaatgggtcaattcagcaagaagttatgataatcatagatatacacacac

SEQ ID NO: 910043 - DNA, 563 bp, Homo sapiens
caaaaagactacaaacaatactctcttgtcatttcttttgctagattttattggttcattatttttaacattgtaaggctgtttttagtgttttgcagaagttttatgtttctgtggagtttaccatgttggtatttttttttggaattgtgtttaactctcagacttcaaatttattctccaatctactgccattgacagttcctttattgttatgttacaatattattattattattattattgagacggaatctctctctgttgccaggctggagtgcagtggcacaatctcctctcactgcaatctccacatcctaggttcaagcgattctcctgcctcagcctcccaagaagctgggattacaagcacatgccaccacgcccagctaatttttgtatttttagtagagacgaggtttctccgtgttggccaggatggtctcaatctcctgacctcgtgatctgcctgcctcggcctcccaaagtgctgggawtacaggatgttacaatgttattttagtgtattgttatttaactattttctatctagattatgaact

SEQ ID NO: 910044 - DNA, 586 bp, Homo sapiens
ggaaagaatttcaaagaaggacgggtacaaacaagcccggagagtggactataatacatacctaataccccaatgcccagacactgaaggccatgttctagcatcagtggcattcaggaaaacatgacctcaccaaatgaactaaataaggcaccaggggtcaatcctggagaaacagagatatgtgacctttcagacagagaattcaaaataattgtgttgagaaaactcaaagaaattcaagatgacacagggaagaaattcagacttttatcagataaatttaacaaagagatagaaataattaaaaagaatcaaacgaaattctggaactgaaaaatgcaataggcatactgaagaccatatctgtcctttaatagcagaattgatcaagcagaagaaagaattagtgagcttgaagacaggctacttgaaaatatacagtcagaggasacaaaagaaaaaagaataaaaaacaatgaagcacaactagaggatctagaaaatagactcaaaagggcaaatctaagaggtattggctttaaagaggaggtagagaaagagatagaagtagaaagtttgttaa

SEQ ID NO: 910045 - DNA, 643 bp, Homo sapiens
aataataatcattattatatccagttaacttcatacaagagtagcttctttgaccctctctctagactagcctgacattaacagttctgtgacattgttgttacacttggtgaaactgctgattaaatttctgtcccttccctgataagatgaagacaatctagcattgtacatgaaggacctgtatggtcctgacttgtttcatcttcttgccattagggtgtgccattcttttcctggagtggtgagcaccttaacctttactctgacctatcttagaaatcatcttgttccttctcattgtgcttagggatggcaggaagtagcattaaaacttcctatttttttctcatactgctgtgttggtacttttttttgtaaagtatcatttgattacaggaaaaaaagatcttgtctttaactctactttgcatctgggaaattaagttggcatctggactaagtaatgcttactgaataaattagcaaagtatataataccaatgttagatgtcactcaattaaacttcataccattagatatcrgaaaagcatgacctaacaattttctgttgggatacaaaggtgtacatattcattcaaaaaacatttattgagtagattctatgtaccaggttctata

SEQ ID NO: 910046 - DNA, 339 bp, Homo sapiens
agtgcttaccagtattacttataatattcacagctcaattaaacttgaatgttgtttacaaatcagatgttgctctgtttccggcatgtaactatggttaatttacattaatcatrgttcaaaactttatttgcaaaaaagaaaggagctcaaatttgtgtgatatttgcaatgatttaaatataatttagaaaatgactagtacagaaaatgaaatcaagggattgaaaaatttaaatattcctaaaatataactacctcactgaaagtgcttggtaatgtttataagtcctttacttctcttttaatgattcttaacattttgtttcaagaaagaga

SEQ ID NO: 910047 - DNA, 565 bp, Homo sapiens
taatgcaacaaaactttctatgcatttataaatatgttccccattttactgaaataaattcttaaatatctaatggatttcttcttagagaagttaaatattcatttctttaaaatatgcagcctgctgcttaataaatagaggttttataactgtgcttttgtttatatatttaaacgtataatgtaaaatttgttatatatatatataaaacgtgtgtgtgtgtgtgtgtgtgtgtgtgtgtgtgtgtgtgtaaaacaaatgttgcatcttattccgtgttaaaaccaagggagtctttagggataaagagtttaatcacatgagggaattaaactctttagagctctaggggactattgatttagattgtgttttcatctctttaaaagacaccaatatgtccttaccaaagattatttgttgtctgctttgataaatatatgaccagattggagctgaaacctaaactaccagggatcaatcacacattgcatcattcatcctaagccatgcatttgaaatyatcgtgtccttttttttgacaaacaagactaaaaaagac

SEQ ID NO: 910048 - DNA, 525 bp, Homo sapiens
ccatatttaggtatctagtggcatatcatttatggagatgaagttaaggaattcagtgcaataatcagacagacatttaaattgttcctttttttcatttggaatctgycaccaggtatcttagtaggttgggttaagtacaacaattagaataagtctgcaattcttttaaaattaaaaaatctaagtagagagatcacttggaattaaaaatatggctttctatgcttatccaatttgtcatctttcattttctatacagaaatcttgaattagcaaaagttttaataacactgaagaaaaaacatcaaatgcatattggatacgttgtttcctacgtaagctatcagatttttattttctaactaatgacttgcatattatcccaccttttcttcaaatactccatagtttaaaaactaatttgtttcagtttacactcagtcttaactaaaccattctgagaccccagtaaaggggttaaacttcaacatatttctatttatgccttaatccactttttaa

SEQ ID NO: 910049 - DNA, 643 bp, Homo sapiens
ggtattacatattcatagcatgccgcagaaatcattttaagtctatcaaaaacaactatattgtgcattttcaaataagcacatataaaagatgagctataagaagagagaaggatgctaaaataaataagtraaagagaaaaatggctgggcacggtggctcaagcctgtaatcccagcacttttgggggccgagaggtcaggagttcaagaccagcctggccaacatggtgaaacctggtctctacaaaaatacaaaaattagctgggcatgttggctcatgcctgtaatcccagctactcgggaggctgaggcaggagaatcccttgaacctgggaggcggaggttgcagtgtgccaagaccgcatcgttgcactccagcctggacaacaagagtggaactccgtctcgaaaaaaaaaaaaaaagagaaaagtaggtgaaaagaagtaattaaatggtaaggaaagaataggtcaggacaggaatccaggatgactttactatatttgaaccatagaacattaaccaaaatcttatttttcttcccctcagtagtttgaagttgagcaatatctgtgtcttttgcatcacactctgaaattgcaaattatttcttgtcctttcagataaatgattatgca

SEQ ID NO: 910050 - DNA, 537 bp, Homo sapiens
ctgtctgccgaggctctattgtttctgattctttctggactctttggcagatatatttgtagcaggctcaaggctaaacaagattgtatccaagaccttaagtgcatgaagatgtttcctggtctaaacctgggagcataataagcaaacctgccaaatgggtgtaggtgtgcactctcaaaacaaccctcttagatgttggactacatcagggttttacaacctcctacctgaatctcaagactctgacaaagagacttttgtccatggataggtgcagaatttttgttgtagggggtatacaagcaggtgaagttctattccatcatcttactgatgtcctccacatatctttcaaacccaaggagaaactaccattgatattcatatttttgggaaagtaaacttataggttggttggctctgtttttgactttgatcaatttctttagcatctctgacgtttagtttcctcatctgaaaatttgttctayattggactcaatctgtcatattcctttcagctctcacatttca

SEQ ID NO: 910051 - DNA, 499 bp, Homo sapiens
tcaagggtattctcaaacccataatctagtataggccaaactactgggctgctttctgtagcccttctcattgacttacttggtcgttgtctagtaagttaccataatgataacttatagctgatgttattgaatcactgcaaacattctctggaccaccaagctctaactagcaaagaaagaggttttgttaatctctacatttgccccttccccaaaaataaaaataaataaaaagtagccatgtaatgtcatagcgaattcatttgagcacagaagtaataagttcaattttataaaggttggtgcaaaaataattgtggttgaaagtaatggcaaaaccaattacttttgcaccagcctaayatgagtcaagcttcataagagttattggccatctgaagagctgtgttgagaaggaatctgataccataccaaagatcaatgtgaaatcatgatttgattaattaaatatgctatgaatatgagagaggggaaa

SEQ ID NO: 910052 - DNA, 627 bp, Homo sapiens
atgaggaaatggaaatagaaaaagacaaaacaaaaattaattcattacaaaagtcaaaaaggaaaagaaattaaaaagaataagcagaacaaatagcagtcatagcaaaagattaaaaaataaatcaaattgaagccacaaatgtaaaaggaggaaactctccatataaaacatgacaattatcaggcttgaataggtagatagaaagatagatagatagatagatagatagatagatagatagatagatatagatgaaatagatagatagatagatagatagatatagatgaaataaagacacacaactgaatccaattgtatgaaaatcaattgaatactggatttgaaaagcatagtatctactggaacatttttggaacaattggggaaataaaacatggacagaatgttagataatattgctgaatagatgttaaaaggtctaggtataataaaacgtaaaagatttatatgatctgaaaagaaaccagagtatagtctagatattacaattacattgtgattatggaagagagtgactttattcttaggataaacctgyggaagtatttagggaaaaagttaagttatgctttcagcttacctctaaatgattcaacagat

SEQ ID NO: 910053 - DNA, 657 bp, Homo sapiens
tgtggtataaacataatataaactaaaagtgttttatatacctcatgtaagattctgacagatacctaaaatatttaatagccattttctcttacattgtatgatacttaactttttcctttctttcattcctgctttatatagtatatagagagaaatttataaaactaaaatctgtaccagacagaccttcgccaactcaagaaagtgcaacacaaccctctccattccttttgacagaagcccaggagtcataactgagaaatccttctccctcaacggtcaaatccaatacattactaaatcctgatatttaaacctccacaataggcctcatatccattcacttgtctccaaatatactgtcatcaacttagcccaggccactatcatctctcgcttgggctattaatctctagtacctagtaagtgtttattctctgtcaaggactgcttagtgtttgcaatggattatctcattcaatctcaaggccagacctatgaagttgatcctatcattgtctctatttcacagatagataaactgaggcttagagaattagartaaaactcaaaatttgaacatgaagtaacatggctaataaatggcatatccaggatttaaacaaaggcagcctgattccaagctgcacaaat

SEQ ID NO: 910054 - DNA, 617 bp, Homo sapiens
acctctctattgttttccaattattgattatggtaaaatacacataaagtaaaayctaccatcttaaccatttttgagtgcccagttcagtggcattaagtacattcatactgctgtgcaaccatcaccaccatttatatccagaactcttttcatcttgtaaaactgataccctgtccccattaaatgctaactccctaacccccagacccagcccctggcacccaccattacactctctgtctctatcattttcactactctagggacctcataaaagtggaattacatagtatttgtcctttaatacaaactaataacctggtaaaataatgggctgaagactttaatagctgttgtcttctactcttactttgctaagtgtttgtatcagaatgattgcagttcactgtatatcacttttatgtaaataaagttgttgaaaaaaataatcgaaacttgtgggttgtagctcaacagtgccaagacagaaatttatatgttttttacaatacctatagatgtatacacacacacacaggaggtagaaaaagttgaaaaataattatctacccttctacatcaagaagctaaaaaagaaacaacaaattaaactg

SEQ ID NO: 910055 - DNA, 524 bp, Homo sapiens
gaaaaacctgtccaacaccccactttcctgatttagcctactgtgggctctgctgtatagcctgtgatgacccaaatcattttccagattctgccttcagaactgagctgagtccttgtgtgatgctgctgcagtgcccccaaacagatgggaaggaagcataattgaagaaataatcctctatgctggccccactccccgcccccgatggaactctcactccattagagcaaacattcccagaggtataagatgatgaataagagattcttttgtctggttttgttactgccctcataactattcttttagttttttttttttttttttttaacctggaagaattgccctcaacttatgtaataggtgcaatagacccttgatttagattgtaggtcttgaagtgctcaggagccctaagcatgtggcccatacccattttaggacagattgttacrgcggagagcatgctgtaaacttcattggcaaagcggagtccagcgctactatctgggccaaatcta

SEQ ID NO: 910056 - DNA, 524 bp, Homo sapiens
gaaaaacctgtccaacaccccactttcctgatttagcctactgtgggctctgctgtatagcctgtgatgacccaaatcattttccagattctgccttcagaactgagctgagtccttgtgtgatgctgctgcagtgcccccaaacagatgggaaggaagcataattgaagaaataatcctctatgctggccccactccccgcccccgatggaactctcactccattagagcaaacattcccagaggtataagatgatgaataagagattcttttgtctggttttgttactgccctcataactattcttttagttttttttttttttttttttaacctggaagaattgccctcaacttatgtaataggtgcaatagacccttgatttagattgtaggtcttgaagtgctcaggagccctaagcatgtggcccatacccattttaggacagattgttacggcggagagcatgctgtaaacttcattggcaaagcggagtccagygctactatctgggccaaatcta

SEQ ID NO: 910057 - DNA, 485 bp, Homo sapiens
gtccttacgaactgagaaactaaatctctgttgttgaagccatccagtctatattttgatctaagacacagcaacatttctgccaggttggaaggatgagagttagccatgtgaagtgaaggaggaaggttggtccaaagagaaggaacagcatgtacaaagtccctgtagcaggaaagagcctgatgggctgcaggaatggtcagaaatcacatgtgacgacagtgtagtgagccagaaaggaggcaacaggagaggcggcagcggaaatctgcaggagtcaaatcacacagggcctttgggctatggcaagaagtttgggtttactctgagtgtaacaggaagccattgaagactttaaacagggaagtgatgtggttcatttatgtgagtttcttaaaagatcacgctgactactgtgtggaagccagatggagcacaaggcagtagggagcmagagacccaactttctagaaagagaaatt

SEQ ID NO: 910058 - DNA, 626 bp, Homo sapiens
gaatatgcataattatcatctctgttgttaaaaaatggggattatatatagttctgaaatttgcttttccaaatttttatattattcacatctttccatttaaggacatactgcataaaattttacagtaagaatatgctgtaacttatttacccattcttatattataatgttatttctatttttttggcctttacaattaattctgcaatgaccataattttacataattaatttttgtatgcatgtatttttgtaggactgattccctaaagtggaattctaagtaaaagcagagacgactgaggcacaggaggtcacaagaaacctcctgcatgcaggtcatttaaaatatctgctattatcatgtctcttaaccttccattggacaacacgagtcatggaggtggtgaattacactctgcccacaatgtagcaacggcaaggacagagacagaaggaagatttagggatatataatagagtttgccacattgccaggatgtgtgtatttttggttttgtctttttctttaatgacataaatttcttgagcagctgctgccagtgtccyacttatatccccctcacattcacctctataagccaatgctgtcaccatgaata

SEQ ID NO: 910059 - DNA, 664 bp, Homo sapiens
cacctgataagtattcaggaaatgcttataaccaattcagcagaaaatataattttcacctaagtggtgtgatgagtatgattaggatgtctctgccaagattttctaagagaacctgaaattagcctacttcttatttcttgaaatgaaagcatataaaaattggattagaattagataatcatagggaaaaatgaattatttgttttgcctaattttaatccatcctatgagtctagtccttccttgctgcttcttttttttcttgtctttttaaatttttacctttttgtggaggatgggatctcactatactgcccaggtaggtcttgaactcctggctcaagctatcctcccacctttgtctccctaactgttgggatttcaggtgtgagccacagggcccggccttccttgcctcttgaatgaaatctacatccataatttatttggccactcttaacaattaacagccttctgttcactcttaaaccctaaaacagtctatgtctataattaagacagccattctcttatattatcaaactctaaagaatatgtaaagttaaagcctcttgccctccccatcttaagattttgtttgcagtctacaggttgcattagaaagaaatgcacaatgcrtgtatgtgtgcctttttcattt

SEQ ID NO: 910060 - DNA, 579 bp, Homo sapiens
ttcaaacaactaataatagatctactatttgattcagcaatcccactactgggtatatacccaaaagaaagtaaatcattatatcaaaaagatacctgcaaccgtatgtttattgcagcactattcacaatagcaaatatggaatcaacctgcgtccatcaacaggtgattggataaacaaaatgtgctatgtgcatattataccagggactactactcagccataaaaaaatgaagtcatactttttgcagcaacatagatggaactagaggtcattatcttaagcgaaataattcataagcggaaattaaaatactgtatgttctcacatgtaagtaaggagctaaataatgtgtacatatggacatagggcatggactaatagacactggagactcagaagggtgagaagatgggagaggtgagggattagaaataaattaatgcatacaatgtagactatttgggtgatggctacactaagagctcagacttcaccactatgcaatatatccatgtaacaaatggcacttgtaacycctaaatctatacaaattttttaaaaagcaagatgaagt

SEQ ID NO: 910061 - DNA, 581 bp, Homo sapiens
cctccttgtaatacatcatgcacttaatgacagctcccattggaagmcgctgaattaactggtttctctctgctggaagctctggtctgaagtgaatcttggcagtcaaggtcggagggatcgcattaattacgtatttgcactaaaacacacacaagcaaaatattacctcaaatgtgagctgcagtctttgtggcaggcgtgaaaaatcatctttatcacttctaaacaacattgagcagtaaaaacatacaaaatgagaaaatgaggcaactgtgaggcaacaaaacagatcaaggtaggtcaaccaaggctggtaatttggaagactgaggcggaaacatgtcagcattaattatgctactgcttgaattatatctggttagaaactgcaaaagacacaaggcctatttactatatgctccttttgactaaactgagttacctcataatgttcatggttcagcgtctctatgatgatgttgtcacttgactggtcaacgtgagtgacaggatggttcagcttcacttggtctccgaggaggtccattatccgttcgctcacttgaccagatccacct

SEQ ID NO: 910062 - DNA, 584 bp, Homo sapiens
aacttgttcaaggccaggaaaacagcaagtggtagagctagcattcaaattaggtctatgtgctcccaagcccatgttatatcaataactacaaggatgatattatcacagtaatacaatstggataggatgatataaacttggggatgagtttcaagctgatgaccaagagaaactcatattcagctcccattctattttgcttctgcattacctatccaagagagttgactggatactgcttgccatgaacaacaagccaatctcagaactgcttgtactctgaaatagacggttgatatgttctctcatacgtgcaacaccatgtgtagaaaaaagtggccaaagtgtttttaggctgcattattgttgattatcagagcagatgttggaacttagaagatctgaattaaaatagtgcctctgctgtggggttgggtgggttattttccttctctgagcctatgtctttattgagcaaatgagtataatagtatctacctcatggtattggtgaacagattcaaattggatgaatatacatatggcatagttgaatgtactatgtatccttgtaaatgttc

SEQ ID NO: 910063 - DNA, 603 bp, Homo sapiens
gacaggcgtcccctcaggagaacgggagctcctccagcgcagggccctgctcagcacccctggtcccgggggcccccacggaggccgccgcgctcagtgaaactttgccgcgcgcagcagtggccggagacccgcgcggaccctctccccgcggggacccgccagggcgagtcgcccctcccccgcggcagacgacccgacctgggccaaggtcggccaagtgctcgccgcctgcccagcggcccttggacccacaggacccggacccgagtgcgcggaagcctccgagccgcggccaggtctcagaatgcgcggcggggcagcccggcccgtcaagcagcgaagccgaaactagaagcctgaggtctggcttggtcactgtttgctggggaactccgacgagcaactacccttcggggactcagtttcccccgggccaagtgagacggacagctgcggctcccgcgagaactcgcgcgggaacaggagctgcgggctccgcacagcgcccggcacgtagacccagtctactaacgggctggaaggtcgcgctcccgcctccgcgcckccctagaacctttctcacctcaagctcgggctccc

SEQ ID NO: 910064 - DNA, 577 bp, Homo sapiens
gtcttttcatcctatgaaaccctctgggttcctggattccttagggagaggggattgggatcagcggtattctgtgtggggctaggcaggcttyctgaaggaggtgacactagagtggggatttggaggaagcaatggatggatgtggctacgtgggtggacagagaggagcagggaagtgtttcccacgtgactggagtgtgagtgcaggcagcgctgggaggggcaggaggtcttcgtcgatcaatgtcagtttgaatgaacagacaagaaagggtggaaatagggaaaggaatgaaaaccattggatcactgggcacccacttcatgccgggctctgggcgggatgttgggtctctgtcctcaagaggcttgcagtctcaagtggggagaccagtggtcatcaattacccaagcttatgcaaaataacactcaggagaagaactcctggatttgaggtacagaggcaagggctgggtcagagacacatctttattgagtcaactgcttatgcatcgaagcagggtagggcaagtttgaacctggaggaatttttgtcttcggcgtctggtcact

SEQ ID NO: 910065 - DNA, 562 bp, Homo sapiens
ctccgtccaggcccaagaggtatagccagaccatatgtgtgatggcagggtcccagtctggggttcacatgcagttggtggcaggacttgtcctcaggccagggggcactttgactcccagtgcagtgacctctgccaccccacaaagcctctctgtggagggggcgcattgtgtacggggaagcagtctcacaggttggcccaaactgctctgggacctcagagagaagggaaggcaatgaatgtattctttagccaacatctaggcagggggccctgggatggctgggtggcaggtctgagggctgtaggtggccagagcccccatggggtaatgccaaaactcagatgcccagatgcagtcatagtgggtgggagagtgaagccggaaggataacccaaagagaaaagggaatgaaagcaatagccaacatttactggggaccagaaactgggacaagcattttataggacagtgtctcccttgcaagcctctcaataaccctaagaaaragaagacatttttacccgcccactatacagagggtgaaactgaatttca

SEQ ID NO: 910066 - DNA, 430 bp, Homo sapiens
ttaaagatactgattcctttggttaaasctgccaccaaaaaaaaaaaaaaaaaaaaaaaaaaatactgatttgtgggcactccatcccaaatctatggaatcaaaatcttctgggggtttttaataaacatctcaaatgaatcctatgataagacaaatttggtaattgttacacaaacacctaatttaaaaatctgatcattctactatctaaacacactcagagttaatgagggagaagggagaaattgattcttctgtaagacgggtagctttgcaaaaaggaaaacagcttaaatcacattcatttcttattaaaagctgatgattaatatcattttagtttttcctgggatggtgatataatatggtggtcattcctgtcttaaccaaagatatttttgtccactctaggttcacatgtagattt

SEQ ID NO: 910067 - DNA, 584 bp, Homo sapiens
gaacccaagagtctgagaccaacctgggcaatacagtgaaaatctgtctctacaaaaaatttttaaaagattatccaggcatgttgatacccacctgtggtcccagctattctagactgagaagggaggatygcttgagcctgggaggtcaaagctgcaataagtggtgattgtgccactgcactccagcctgggcaacagtgtgagaccctgtctcaaagtaaataactaacatttctggataaataactgttagtgaggcttatttttaatacatgtcattttcttagtaattctaatactaggcttatataatatcaacttacaatagtaaattttggtgaaaatttgtatttataaattccattaaaatgtccagttctacctaatgtagtttttcaccaattcctggtagatctaacttgtgaataacagattatgtataccagaaggttttgtaactttgtgcacttaactatcaatctacttaacaaatatctcgcctttttatgataaataacttctattccattcttttaaagatcatgttagagtcgcaaggaagtcatttctcttggttattg

SEQ ID NO: 910068 - DNA, 584 bp, Homo sapiens
gaacccaagagtctgagaccaacctgggcaatacagtgaaaatctgtctctacaaaaaatttttaaaagattatccaggcatgttgatacccacctgtggtcccagctattctagactgagaagggaggattgcttgagcctgggaggtcaaagctgcaataagtggtgattgtgccactgcactccagcctgggcaacagtgtgagaccctgtctcaaagtaaataactaacatttctggataaataactgttagtgaggcttatttttaatacatgtcattttcttagtaattctaatactaggcttatataatatcaacttacaatagtaaattttggtgaaaatttgtatttataaattccattaaaatgtccagttctacctaatgtagtttttcaccaattcctggtagatctaacttgtgaataacagattatgtataccagaaggttttgtaactttgtgcacttaactatcaatctacttaacaaatatmtcgcctttttatgataaataacttctattccattcttttaaagatcatgttagagtcgcaaggaagtcatttctcttggttattg

SEQ ID NO: 910069 - DNA, 584 bp, Homo sapiens
gaacccaagagtctgagaccaacctgggcaatacagtgaaaatctgtctctacaaaaaatttttaaaagattatccaggcatgttgatacccacctgtggtcccagctattctagactgagaagggaggattgcttgagcctgggaggtcaaagctgcaataagtggtgattgtgccactgcactccagcctgggcaacagtgtgagaccctgtctcaaagtaaataactaacatttctggataaataactgttagtgaggcttatttttaatacatgtcattttcttagtaattctaatactaggcttatataatatcaacttacaatagtaaattttggtgaaaatttgtatttataaattccattaaaatgtccagttctacctaatgtagtttttcaccaattcctggtagatctaacttgtgaataacagattatgtataccagaaggttttgtaactttgtgcacttaactatcaatctacttaacaaatatctygcctttttatgataaataacttctattccattcttttaaagatcatgttagagtcgcaaggaagtcatttctcttggttattg

SEQ ID NO: 910070 - DNA, 584 bp, Homo sapiens
gaacccaagagtctgagaccaacctgggcaatacagtgaaaatctgtctctacaaaaaatttttaaaagattatccaggcatgttgatacccacctgtggtcccagctattctagactgagaagggaggattgcttgagcctgggaggtcaaagctgcaataagtggtgattgtgccactgcactccagcctgggcaacagtgtgagaccctgtctcaaagtaaataactaacatttctggataaataactgttagtgaggcttatttttaatacatgtcattttcttagtaattctaatactaggcttatataatatcaacttacaatagtaaattttggtgaaaatttgtatttataaattccattaaaatgtccagttctacctaatgtagtttttcaccaattcctggtagatctaacttgtgaataacagattatgtataccagaaggttttgtaactttgtgcacttaactatcaatctacttaacaaatatctcgcctttttatgatawataacttctattccattcttttaaagatcatgttagagtcgcaaggaagtcatttctcttggttattg

SEQ ID NO: 910071 - DNA, 597 bp, Homo sapiens
ccatacagtccagatgactgggtttcccccagtgaggcacaccccctccaccaagggacaaagtgctccattaaaggggtcctgttccccatgccacccacrtgagtgagactctccaacagcagttgtcagacaccccatacaggagcaatcctactggcatcaggttggtgcccctagaggtcagaggtcccagatgaaggagcaggcacccatctttgctattttccagcctccttgagtgatatctccaggcacaggagcgaatcagatgaataagacctgaagtgaacccccagcaaactgcagcaaccctacagaagaggaacctgaccattgaaagaaaaacaaacaagcagaaagcaacaacaaccgaatcacaacaacaacaaaaagcccccacaaaaaccccattcaagggtcagcggcctcaaagaccaaaactagacaaactcacaaagatgagaaataatcaacaaaaaaatgctgaaaacccaaaaggccagagtgcctcttctcctccaaataatcacaacatctctccatcaagggcacagaactggacagaagataagctgaatgaattgacagaattag

SEQ ID NO: 910072 - DNA, 670 bp, Homo sapiens
ctgcctgaacagatttttaacacagacaaaagtgccctattctggaaaaaaaaaaaaaaaaaaaagccacaaaggccatttattaataaggagcagaagtgagcaccaagattaggcaggaaagaataagctaactactgttttgtgcaaatgcagtcagatttatgatcaggatggcccctacctatgaagctaccccctcaaaccttgaagggaaaagatgaatatcagcttcctatcttttggttatacaagaccctttttctggattagctctgtcaatgctttgtccctgaagtcagaaagtccttgccaataagagactgccttttaaagtttttttgatatagacaatgcccctgaccacccagaaccccatgagttcaacatggaaggcatcgaagtagtctaatttcccccaaacacaacattctaattcagcctttatatcagggagtcataaggacctttaaggctcatcacataccatactctatggaaaagatagtcaatgctgtggaagataacccaatagagagaacatcatgaaagtctggaaggattataccattgaagatgccctaattgttayagaaaaagccatgaaagccatcaatcctaaaacaacatatttctcctggagaaaactatgtccagatgttatatatga

SEQ ID NO: 910073 - DNA, 654 bp, Homo sapiens
taaaattccttttctaatcaaatcctgcagagttgcattaaggtctgcctcatttgtgatctctactaygaagctctcatcaactaataacaatgatagcaaacagccaaatagcacttatactgttataatactacattgttgttaagacacatatactaactctttaatcctcaaaacaacccctataacttagaccataattatcctcatttaaaactgctaagccatattactactcattcatcttccataattcatttcccctctaacaaaatatactcttcctttatcctttatttagatattaaatcacagccttttattatgaaaccattttataaattaaaatataaggcatgagataaatggctaacccaaatgtgacctacacatataacagaataatattcagtcataaaaagaaattaaattttgacatatgccacaacatggatggacctggaaaacattatgcttagtgaaataaggcagatatagaaggaaaataatgtataattgtacctatatgaagtacttagaataggcaaattcataaagacaaagtagagtaggttaccaggggctgtggggagaggtagaagggtgggagttattgtttaatgggcatagtttttgttggggataatgata

SEQ ID NO: 910074 - DNA, 639 bp, Homo sapiens
cttttctattattattattatttaaggtatagatgacttcctgaatmttgcaaggtctggagcagctggacagtgtgttccagagacaggctattttgaacgaggctgtggttgaatttgggggactaggctggaggttttgtggagtgtggagtctctagatttggtgtcccttgagacatgaatgtcctgtagaaaaacaaagaagcatccagtctagctgactagctgtgaccaggcagggccaagcggtgaccatctgcccagggcaacgaagctgtcttcggtaccttcctcgggtatttgtaggaaaaaaattcacatttcttagctcaggtgatggtggatggaccgttgggctcctgagctccatcctggcctccattgcttgccagctgttgtaatttgaacaaaggatcttgcctctctgacctctacttgctcacccataaaatggcaaagctaagagatctcactcaggggttgtagttaagaccctgtaggataaagtatgtaaagtgcttagcacagaaccatcacgctatgtggtgacagcgtgaccctgcggaagatgtctgctaccacgctctgggcagtgacttgtaatttcctctaagcaatcttgggaggaggaggctc

SEQ ID NO: 910075 - DNA, 715 bp, Homo sapiens
actctgtagactttctttctcagaaatgaagttttctgctatttccttacaatctggccacaggatttaaatataattttattttaaatagtcatataaattttaaaatctatcttaaaacaggtattttaagtaataaagattaactcaaaataacaaagtttgctccagaattgccaatgtgtaacgtttagagtgtacacaagggcacgctagaacattttgcctgtattctctatcttgttttcaatagaaaaagatacagttaaaaactgcaaaggttttttttcaaatttcttcagtctctacgatcttactccagcgcctcttcactctttcatatccaacaaccatgaattttgctgaacgtcaaagatgctgtacaaaatattttatgagtggttcctatagtttcagtaacccaatagagcaaaattactgtaacaagctggttggaatgtctacgtttctgtgctattttcagccaacagaaaactgctattttcaaatagcagtttctgtgctattttcagcagctatttcagatattgcacagtaatatcttgatatatgaatgaaattggaragcaaattaagaacagtttgagatcttgcagttcttgattccccatatagtggtccttcccccaccacgaaaaacattgaacatcttgaagatcaatttgcagacccatgtcaggcagtcatccttatg

SEQ ID NO: 910076 - DNA, 587 bp, Homo sapiens
tggactcaagtgatactcccacctcagcttcctgaagtgctgcgattacaggtgktagctaccgtgcccagccaacatcaaaatttttagaatattatttataatttctaatttacaaaagcaacaaatagttttaaagctaatcttgaaagaacaagtattattatcagttaatattaatttaaggagaaaattaccaaagaagacaaagatgagtgctatgtaacattcgaaagaaaacaattttttttattattatacttcaagttctggggtacatgtgcagaacgtgcaggtttgttacataggtatacatgtgtgatggtggttttattgcacccatcaacctgtcatctatgttaggtatttctcctaatgctatccctcccctagcccccaactggggcctccccaggccccagcgtgtgatgttcccctttctgtgtccatgtgttctcattattcaactcccacttatgagtgagaacacgcgtgtttggttttctgttcttgttagtttgctgagaatgatggtttccagcttcatccatgttcctgcaaaggacataaactcatcctttgctatg

SEQ ID NO: 910077 - DNA, 667 bp, Homo sapiens
tctcagcaggagccctgaccccactgatgagtgytccactacaatctcagcacctcttcttttcctacctcagcatctagaagttggcagaatgggatgcgatatccaactgttaatatacactacagtgaagcatttactgaaaatgatttggtatcctagggtctaggactccactttcacatcatatttgaagaaaagaaagaaaattattttgtattttaacaattgtgtgccacattttacaatatttaattttagttgagaaacaccagatgcctgaaaactacaaaggaaatgtgggaaattaagcaaacaggtcaacaaatcactcacctttaagaattgaccagtttctacaaggtaagcaggtagagtcccaataggcgggtaaccattcagggtttctgagagtaacatagcacccaacctcagaatccttctcccctcttcccaaagaagaaaagaaacatagaaatataggccacctggtggtggcgtgataaagagagagagagagaaagactctagaatagtagctgccagaaggaaccaggtaatggcttaatttcagaaatcgaatgatgatttttcaaaagaagtaatgaatcattacattatttatgtcaatatcatgtctttgtaccacatatgcatattcatgaag

SEQ ID NO: 910078 - DNA, 576 bp, Homo sapiens
tgcttatttttgaaatttacctattggaaaacactgtctactctgaaagatactaagtacatagaaccattaataatctttcttctaatacatttatgtgtatgtggagtggttattgggawtatggaatatttaatgtttaattcggtggtactgtctgaggatgtcagctatgaaaggaatagaacacagtataattgtgttcagaaaagaataagataatttctgacaaaagagaatgttacaatcagaatgcagctgaatttccacaggtaagatgaatgagatgagattacagagaaaaataagggtaagagcaaaggcccagaggctaaaaggcaagggatatattcaaaggagggtaaatagttccgtttgactcaagtaaagtattaaagcaaaatatgaacctgaatatcagagcaaattgaaagaatgatagatattagttttatttggttggcactgggaagcaattgaaggattttaatggagaaaatttatgttgtttataaaacatggctaacaacaatagattggaaaaggtgctgaatacaggagtgaaaaaaatgttta

SEQ ID NO: 910079 - DNA, 498 bp, Homo sapiens
aaagtctgcaacatagaaactatcacaattgtacatgctgtaagtagccacctgaacattaaaatacagtcatttatttgattaaatgatggcccacaatttagcrgttaaagaaggaaagatttactttaatgtcagtagtgaaagtaagacatgaaagatggctctgtagaactatatgcatttagtcaggaaagtataaaattaagataatgattcaggtaacttgtacacaaaggggccaggttgtaggggtgggccgggttcttttacttcaattttctagcaaagctaaattttttaaatactcaaaattcgaagtcacctggtctaggcagatacagatttttaaaatgttaagtatctaaaaactggatccagtaatacaagtaatattaatttggccaatgttttggaaatccagtctacttaatttatataagtttaccaagatagtttctatacagacttcatggcagccaggatcgtgccaaataa

SEQ ID NO: 910080 - DNA, 622 bp, Homo sapiens
aaattctcttgtcttccatgaatttttctactctattgtcatccacatctaatgctttgtcacattatcttctacctcattcagtagtttaatggccatttcttcctccctttcgccayaaccctagcttgagccttcattgcttcctacctctgcaggtacaggcagatgggggatgaggggagagaaagagaaacattcaactgagataaattcatggcatgtgcttttttttgcaaattttaattttccattcaataagaaattatggtcatctctacaagtcataaaatatacatccaccttttttcttaaaatggcctttttcttcttgatcccccttcaggccttccatccatagttccctaaatccttttcaattcacctgccccatataatcagacacacacacacacacacacacacacacacacacacaaatgaacatatggacatgtacatttatagaggtactttttatcactgcacaaaaaggagattatatataatctcttttttacattacttatattatatataatataatatttttatgtataaaataaaatggattatatggggcaggtgaattgaagaggagttagggaactatggatggaag

SEQ ID NO: 910081 - DNA, 647 bp, Homo sapiens
gtaatacttatcatattaaatattgtcaaaattattttctcaaatgcctgtatacacacacacacacacacacacacacacasacagacagacacacacacagagagagagagagagagagagagagagagagagacagaattattttctcatgaaagcctattcatcaggaaattcttcttcctcccccaaggtgttttgctcattatgatcaaggaatcttgtcttcagtttggacaagacctttgaggttatcatttctaatccacaggttctcaagcaaatgtacaggcagagacactgataggatccagacacaggcccaaggacggtgtgtcagacaaggagaatgggaactaaactcaaggatatcttccaaatctgatattctatgatagtcaacacagcaaatcagtatacttaatgtgcattagaaataacaaaattttctctttgaggcagacaattctgaatacctgagtgggaattgaagccacagaatagagtcatctaggttatcccctgaaagtttcataaaaccattactgttttttctattctctcagtccagaaaaataaataggtaaatcagctctaatctccagtctttctgctataggataagaaaaagtagctattcttagaaa

SEQ ID NO: 910082 - DNA, 618 bp, Homo sapiens
gacaggaagaataacgacattctttagttaaccaaaatttcattgaaggtgtatatttgagttttgtttatggttttttaaagctggtttaagttaaacattattttagtctttcagtatgtcaggcactgagctgaattataacatttactctgacctagtaccctactggtggtgacatcataagattaaggagatggagcttattgtgatgactattttgcagttgaaataggggaggcacaggcagattgagaaactgctgtaactcacattgctaagttcgttttagagccagaattctagtcaggttataaaacacacactgaatcaccattctgccttatcttggcctacggtgtttagtcctttcatttaaatatacaaaaataaactcctatgatagcattcccaaaagattttattagtaattaaattgattttattctctttgtccaaagaaaaagcctcatctgatcacaaataattaaacaacagaacttcttgaaagttagrgactaataaacgtccatattctgtcataaggaagcctgggtggccacattctgttctctgagatctctgttccagtaacttctttgctatggcgtgtgcttt

SEQ ID NO: 910083 - DNA, 689 bp, Homo sapiens
tcaggaggctgaggcaggagaatggcttgaacctgggaggcttaaggcagaggtggaggtgaaggttacagtgagccgagatagtgccattgcatccagcctgggcaacaagagcaaaactccatctcaaaaaacaaacaaacaaaaacacacaaagagatatcatttcataccagtcagaaaatattttacatagtaaatattttacataataaaatattattttattatgtaaaaaataataataataataacaaatgctggtgaggctgtagagaaacgggagtatttatacaccgtaggaatgtaaatacttcacccactgtggaaagaagtatgaagatttctcaacgtgcctaaaatggagctactattcaacccagcaatgccattattgggtatatactcaaaggaaaataaatctcccccaaaagacacatgaacttgtatatttatcccattatttgcaataggaatcaacctaggtgcccatcaatggtggtttggacaaagaaaatgtggtacatatacaacatagaatactacacagccataaaaagagtgacatgatgtcttttgcagcatcatggcatgcagctggaggccattatcctaagcaaatcaatgcaggagcagaaaaccaaataccayatgttctcactcataagtgggagctaaacattgactac

SEQ ID NO: 910084 - DNA, 579 bp, Homo sapiens
gaagctagaattcagtatgagatttgggtgaggacacaatcaaaccatatcattccacccctggcccctcccaaatattatgtcctcacatgtcaaaatcaatcatgccttcccaacagttccccaaagccttaacttgtttcagcattaactcaaaagtccgcagttcaaagtctcatctgagacaagacaaatactttctgcgtataagcctgtaaaatcaaaagcaagttacttcctaggtacaatgggggtacaggcagtgggtaaatacagccattccaaatgggagaaattcaccaaaacgaaggggctacagtccccttgcaagtctgaaatccaatggggcagtcaaatcttaaagctccaaaatgacctcctttgactctatgtctcacattcaggtcatactgatacaagagtttggctcccacagactttggcagctctgcccctgtggctttgcagggtatatcccccctctgtctgctttcgtctctgcagattttccaggcgcacagtgcaagctgtcagcrgatctaccattctagggtctggaggagagtagccctgttttca

SEQ ID NO: 910085 - DNA, 686 bp, Homo sapiens
gcaactcttacaaaaattcttaagagccattcagttaattggctaataagctttgatcacacaataaaactcagtacctaataatagcaaaataaaatttaactatgtcawttccgtgctcacaaattcagtgataggacttaacatcatacacattctgaaactttttatagaaaatttataaaacacccactttttttgtaaaattcagttgaatatttcactgctacattgtaaaattaatttgtaaaaaatgaaccacctcaagagaaatccttctttagagaattacatctaacaaacatagaaataataacagaatccatataaaatcattgctgtacctaatgataattaacagttgctaaaaccattagctgatggggaactttaaaatagatggatcagactttcaatacttaaaaattcaaaggtaatcttttctttacattctctttcctttttcatcagaaaatgccacatatttttctcattgtactaaattataaatatgataaagtctattttaaaacatacactgaacattccaatttcagaaatcataagggcaaaaaaaaaagagaatgaatctggttcattgcatgaagcacatctcatgctgcatagtgagcaaataattattcctgcaactgaagtctcctaaaagctctttgttgtaccagctg

SEQ ID NO: 910086 - DNA, 663 bp, Homo sapiens
gacattataccaatgctaagaaaggaacagtcacagagaaataattcactacagacaggtaaggtattcaatccaaacccaatgccagagagagtggcaaaacyaagtttgagaatgggaaaactaagtagaaaaattgcccctgtcaggtgtgccagtgtagacagaaagacgatcatcaacattatggaagccaagaggagatggtattgtcttagagaagataactttcctgattaatgatcaaattttgagcccatgaaatgtgtagggaaagggtggaaatgaacttagcatgtatgaagcacttatcttttaattatacagtcagaatatgagggaggtaatctttccattcaaggcagatcagaaatggcacatgtaataatttggtgagctagaatttgagtcagactgccaatgggtttatcatgataaagcaaaatatattgatgactactctccctttaaatgaaactgttctgatatccaagtataatggagtaaatatcttaaaagctatcaccaaaattctttctactaaggggcctgtatttgcttacagatatctgaaactcagatgaagtgggcttggggcagggggtgggtagtcaagaggaaggtacagaatttggaaaagagtgatgaaggaaaagagaaggt

SEQ ID NO: 910087 - DNA, 699 bp, Homo sapiens
acttattctggtgatattaactatctatcatcatttggttaaggtagtatttgacgttttttccagtgtagaaattattttttcctttctaaactctgatagaagcaaatctataagtccagtgccctcaaggagaggggaactaagctccacccccggtaggaaaactatcaaagaatttgtggacatatgctataacatcacagtaatcaataaatattttggtggagatactgtaaggctctgccaacatcctgttactacttaatatttcatccactgattttagcaagcatcagtgtcttgtctataataattactacaacaatgtactagtaattattttctatttccttcatttcttctacatttattaatttgaattcttctgtaaaaaatgtcatttgtctctgtttatttacttgtgcattcattcattcatttattcagtcattatttataccagtgtgcacctttagatatttattttattctttgttttacaatccaatactaatgttattgattttgttgattaaattttgcattttggctgctgggagctcttycagcagagctccagtgtattttgacataccctcatctttctattactttttttttatttgttttgatttaagcacttcctaactttctggaattagaaagcacccaaggctcatctttatttttctgtcc

SEQ ID NO: 910088 - DNA, 691 bp, Homo sapiens
gcttggaaatttagtcctcaaatgacaaggctaggggtttctcttaccccaatcttggcatgggagggccaccaagagttttaagcaggaaagtattatgagagttaattttttagaaaactcacttaggctgtrtgtaaagagtggattgattgcaattagggagatcaagttggggcttgcaaaaatctttgcaggtgatgggagtgttgcaatttaaaaagtggagatagaaggaaggagccagagatgccagagatagaattgacagttgatctaaaaaagaacaacagctgattgggtttgcctatctacaaaactttggaactggtgaaaaaaattaggaagcagatgtcttcagctggacatgttgagaatagaatctggtatgatcagttttacctaaagacacttagattcatattatatagatactgaattctcagtgcagtggtgatgaaggatgcctagctttttcctgtgtccatagatttttagttggtttacccacctccaagaacccaagaacaatataagggaataaccagtgtcatactgaaaccacataaaacaaattaatatttgataatattgataaggtagtcagaaatttattcatataaaaagaacctggtccaaaagtatttaaaataagtttttcctaaaataggaaaacaggtaatttatatta

SEQ ID NO: 910089 - DNA, 635 bp, Homo sapiens
gctcatcaagtctcttgactcttacataaagactgaggggagctgggcgaggtggctcacgcctgtaattccagcactttaggaggccgaagcaggtggatcgcctgagatcaggagttcaagaccagcctggccaacatggtgaaaccccctttctactaaaaatacaaaaatttgccgggcgtggtggcgcacacctgtaatcccagctactcaggaggctgaggcaggagaatcgcttgaacctaggaggtggaggttgcggtgagctgagattgcaccgttgcactccagcctggtaggcaagagcgaaactccatctcaaaaaaaaaaaaaagactcaggagaaaaatgatgataatttaatgccagaaacaaccatgtctctcctaatggtggactgtctttggtcaggaaacaagaacagtataatcataatttgatcataatttgaattttgctttggttgccaagaaactcggggtcaggttgaagtgcagtgactatataygtctctaggtttttggcacaaatattcctccctgactcaactgtttcctgaaacaaaaaacaacaacaaaaatttttcactcgtcaaacacaccatccactttctttcagtttccttttagtct

SEQ ID NO: 910090 - DNA, 637 bp, Homo sapiens
tttcaccatttaagcaattatttctgttcaagtaagagctatttattttatttaaataatttccactaattagtcttttacttagtagtatttaaactargtctggctgctgaattttatcaaatgccttttctacatatgatgacatgacttttctcctgcctttaattcattaatagattatgatgatcacttaaacacccttgtatttgtgaaataaattctatctagtcagatgtattattttactacagtgttcaattctctaatactgacatttagatattatatatttatactcataagggaagtcagtttttagttttattttttgtactatatattttatattaaagttatactacctttataaaataagctggaaagtttccatcttttttatatgttacatagaactgagctgtaagcccatctggtcccagaggttatttttggtttttacttgtggtaaaatatacgtaacataaaatttaccatcgttaccatttttatttggctagtcaagcatagtcgtgagagctttaccatttctaagtgtacagttcagtagtgtttaaatatatccacattgtgtgcaagcaatctccagatctcttcatcttccaaaactgaaact

SEQ ID NO: 910091 - DNA, 643 bp, Homo sapiens
gcagggccctcctgtgggtctccctgatccccgcgcccctcaaacccctgggcytgcaggtgcaggacgcctggccctgctccctgccactgcttccaggccatcctccctccccagcctctgcaggagcctcctcactggactccctgtttcttttctgcacaggccccctcaccccgcccactttcctctccctgggggccaccctcttgcttctctgcgcagggcctactgctcacctatgggcttgtagccctccctgtgatcccggggagcccctgctgtccctcctgcccggcccacttgtccctccaacgtctgcatcactccatccctcagcctcctcaagtctttgctcaaggaccacctttgctctgggatccaccccgacgacctgctttaaaatcactcctgtatccaccatggcaatcttcctctgctattttctatttctttctagcactgtgcatttttgtttgtttgttttgtttttgtttgtttttttgagatggagtttcactcttgttgcccaggctggagggcaatggtgcaatcctggctcactgcaacctcatccttgtgtttccttgatttaaaaatgccactgggtgtgagatgctccaccaacttaacacctgtttcc

SEQ ID NO: 910092 - DNA, 608 bp, Homo sapiens
gggaaggggaaattgcttgcgcaaagtcacatgataaaataatggtactgctgagatgaaaagaaagtgactggggtctctatccccagtcatctctatccccatctcttggcytcaacctgtcctggcccatggggctggcccagcgcaggctaatgttgtgagtttacacacatcactggatgggatgtggaacctactccaggaaggaaatgtttcttctcgtggtgggagagaatgttcttggtcctgaattgtcctgaggcttttggaggtggccacacagtggttagggtgagtcagaatatcacctcctctcctgactctagatgggtctcctggctgctcagggtatcaatttacacttcttcaaagtgggaatggtgaccataataaccatgttgcctcagtttgctttggtgataaaggacaaataaatcctgtttcagcccacaaggttgggtctctgttgaacttgaccacctctcattccaagctgtgcattggtctctgtacccaagcctctccagctttttctcagtccttcaaacatgctgtgcctttcctgccactggacctttgtctatattgtttcatctgccaacaac

SEQ ID NO: 910093 - DNA, 607 bp, Homo sapiens
ttctgtacagcctgtggaatgtgagtcaattaaacctctttaaaaattgctcagactcaggcatttctttgtagcagtgcaagaatgcactaatacagccaccatggactaatacagcttcttatcaggagtttgacaatgtgaaggtaaaagggaaagttctgccttgctgggctctggcagacctgctgcttcaaagtccacctgactgtggccaattaacatctgagtcacaggaaacttcctgagaacccaaggaatagaagctaggagccctttggggcatcaagcagacacacatggccctggcatagggctgagccaatacacagaacccagggagagatgttcttggtattggatggggcactgaagggagtgtgttcccctttgaaagttgggttataccttaaatacagcatgttcaagatgaaactcagaatctctccctcttccttactcttctccaagggaatagtgaagccagaawcttagctgtgatcttcctccttaatccccatatccattccatcagcaaatcctacctattgtctttgaaacctgtctgcttctttctctccatgtctactaccatcactcttgtccc

SEQ ID NO: 910094 - DNA, 643 bp, Homo sapiens
atctctttttatccttgtcctgatagctgtgtgtggagtgtattccataagagaatctccaccttcttagacttttcctaccactccaagctctgcacccatcctacaatgctaccaactctaacaggcctgagtgggaaaggctgataaacatcgctttggacccacaaggctgaaccatgcagtgttttggaggccgttatgtgactcgattttattctaaatgcaacaaaaaaacccactgaagaatgatacaacatgaaagaagaatgacacagtttacattttaaaagagatgcctttccccctcttgctgtgcagagaatgaattgtagaggtatgagaatagaagcaggaagatctcttggggtggcagtagctgggatggagagaggtagacagatttaagaactgtttaagagaagaagtcaacgagactcgatatctgagaagctctcccagaacatgaggatctgaaagtaatgagagggaagatgaaggagatgaaggggragctacacagactcaaaacctagaacattgttccagcagcaatactagcagtggtggcagctgcagcagaagcagcatctaacggtgcagttgcagaaagcttaactgagctaaagaaagacttgaacct

SEQ ID NO: 910095 - DNA, 629 bp, Homo sapiens
aagtagtatagagagagcttttagaggtccttaaatagctaaatagtttgtatcttatctacatcaagggaaatcaaaagaaaacttttcagcagwagaacatggtcaatgtgtaacttcaatgaaccagtggtcctggaaaccttgaagataagacttctctagacaaaaatctgtcttctttaccttaacttttctttacatttttctcttctcccaaagatgctcagtatccttgggctgaccttttctctatattagtgccttttggtattttggacactccagaaatacaaaatattcttctctatttctcaactcccaaggaaaaattaaatagcctctgccacatatataatgaatctaaagataaccctcaagcacagatcatcatggctgctcttgaacctacctctcctgtaaaatacatttgcatgtaacatgagttgctgaagagtcaagagacaaaaatctctttgctcaaaagtgtatgagaatttctgtttctggggtagcctgggaggagagatgcttttgtctctgggtaagctttaggtcttgcggtagcctctaaaatgatttccaatgatccccacctctgggctttcctctgttcatgtcatcccctt

SEQ ID NO: 910096 - DNA, 694 bp, Homo sapiens
tcattctccattgattttcctttgcgcctgttcctaaaatcaatggtcaatgaatatgtaggtctatttatggaatttctattctgatctattattatcgttgtctaccgtmacacaaacacgacactgtcttaattattatagctttataagtattgaaatccagtagagttactcctccaaatttgcttttctttttagttattttggctatttcaggtcctttgcactttcctttgaattttagaatcttgtcaatttcacaataaaatgcctactctggttttgattgagattgcgttgaatctattcatcaaattggagaaaattgccatattaacaatatgaatctttagattcatgagcatgagatgtctttctatttatttagatcttctttaatttctctcagtaatatgttgcagttaaaattgtagttttcaatgattagcactgccacatctttattcaggcttatccttaagtactttgcatttttgatgctattgtaagtggtgttattttaatttctgaatattcactgctaatatatagaacaataattgatttttgtgtattgcttgtactctgaaatcctgttcaagtcaattattagttctaggagctttttttgtagatttatttggattttcaagatataatctagctgtctttgaatgaagacagttttcct

SEQ ID NO: 910097 - DNA, 540 bp, Homo sapiens
acctcattgaaacaggaatcaagtatataaaatacaacgaatatttaatggaatactcatatattttatcaaacaattttacrtggtaaatataaacttcctgttactttttcctttaaaaaaactattctcaaatatatcatagtgtatctcatatccccaccaccatgaaattttttgactgagatttgctcttttctcttgcacccgattagtagttttgtttccgaatccactgtactgagtcactcacgtctgtagagccctcatggtttttcctcaccttttcagacaatagaaatatgatcattgcaggcaatgggttattatctgcaactcccaggagacacagttccttagatattccaaatatttcatcacaggccacagcattgtacatttaggaaagaatgggaaagaattgcatatccacctgtgcatgatatttctgtagttgcaaaagttattctagagaaattgcattttcctcctccttcttatcatttaatagcatgctttgaggtgcatacaccctctggg

SEQ ID NO: 910098 - DNA, 623 bp, Homo sapiens
cataccgtctataaaatagatttatttataaatgatatgtatgcacttctgtactaatgcaatccatacattttaaaacatggattacaaaataaacataaataaaagtgctcatattttccttacatattacagtagatcatcttgcacatcccttggtgtgcatttcttttgagatataatgcttctcctgttgaaagttgtatgatggtggggaatgaatgaggcagagcagttgatgctagaaactatcattgctttgttttaaattgttaaaacttctttataaggttatacattggccatatttttgctgtagcagattcttttactctcattttacaggcagccaaatcaggcttctttactttgccaacaagaactggagggaactgggctcttggctgaatgccagccaacacttttactagcttcatgtttttgttaccaaacattacatcgtgtcctttgagatttacaaagttggcttcratccccagactgaattctgtgcaaattttcttgccctctctaagatttccacaagttccacagaaggtttatatccccatggttacctctcccttcactttctcattgtgaaattctctatcttgtttact

SEQ ID NO: 910099 - DNA, 617 bp, Homo sapiens
ctgaagcaggggaggccacagctaggccaagtcagattcctgacccacaggaaatgtcagataataaatgtgtgtagttttaagctgctacayttgtgataatttgcttcacagcagtagataactcctatagaggccatgagcagataggtatgagtcagagtggaacgaggcattacaacacatattacagtcaaagttaaacctttgacttaagattacataagaaacttctacaagttattacaacataaaacaactcaatagaaaaatgggcaaatgaaatgatcaggcaattcataaaatagaatcttgcgttgacaataaacatgaaacaatggttatcctcactagcattcagggaaatgaaacttaaagaacaaataatatttcatatctgtctaattagacaaaattttaaacagtttgataaagtcaagtgtgttctgaatatgtagaaatgagaattgacagacactgttggtaaagtgtaaattgtcccaactgttctgtgaagcaagttagcactattttgtaaaaattaaaagatgcacaattatgacccagcattttcatttctaggtatatgcttaagaagatatgagcaaggatattta

SEQ ID NO: 910100 - DNA, 633 bp, Homo sapiens
ctcattaatggaagagtattaggatggagaaattgttttatttttaaaataatttccagtgtagtgatgaaaagaaaaagwtactgaattttattttgaacatactgagtttgaggagcctgcttaactatttaggtggaaatgtcactttacctaaggaaaatgagtttgggctctgaaaagagagaagtacatgtcaccaggccgggggtggggtgggggatgattgaagccaagggaggagatgtgcttgttcagggagagatgcacagacaaatcaggttcctgaaaaacagaaacatttaatgcatgatgggagggatctattgtcttgctgaagaatgataagtgagatgcagggagaaaacttggaggacactttattgaaaattaaaggacaaatgtttctggagggaagaggcaacaaaataatagatggagattttttaatacgtgccttagtgttcttgcccttgaattggtacaaccctgaagcacattgcatacagtcttccagaatcccctgcaggattcagccccagttgcccatagtgaaggacttgtactttataacacctttcattgccttccatcccttctctgtctcacttctcaacttccctcttggtgcct

SEQ ID NO: 910101 - DNA, 610 bp, Homo sapiens
tacataaattctctttccctatcaaataggagatctagatttctttttctgagataatttgtagccttttccatttataattcyagttgctacaagaatcagcatcatctttaacaagagggattcattattagaaaatttaataacataatccttcatattaagacaaagagaaaaaggtcatataatcatcttcacagaggtagataacgcacctgataaacttaacacttaaaaatatacattgatgactattttgttttttaaatacgtatgattatatataattacatatatcattatatatggttatatatggtacaacatttactgaaatatataaataatgtatactttatattcatatgtgatttttaatatgttatacatgtgattatatgtctgtgtgtgtgtatactttagctcaaaagctggcatcttatttaacgtgattacactggagactttccattaaagtgaggaacaagacaaaggatagccatgatctccactgctatttaatactgggctggaggtcctagtctatgcaattagataagaacaagcaattagaagaataaaaattggaaagaaagaggtataactgtct

SEQ ID NO: 910102 - DNA, 618 bp, Homo sapiens
gatctgcatgggaaggtgtgtgtgttgggggtagggcagtcttatgggtctgagccctcaatctctgggatctgacactctctccaggtagatagcatcagaatcgaattgaattggaggacacccagctggtgtccactgaggaattgtttgcttgcttggtggatgggaaaaacacctcctcaattgggtcacaggagtcttctgtgttgattgtttaagtgagagaatagagggaacgctttgggtgtgtttttccccctcatttggcaggggggagttaaggttccatatagaattaaggttgctaatcaatggaccctaaaaaaaggagaggatcctggggcggtggagggcagttttgtgggactgagccctcaacctgtgggatctgatgctgtctccaggtagatagcatcagaattgaattgaataagaggacacccagctagtgtcctctgctggattgattgattggctgctggttgggagaaatctccacaaacttcttcrtgcccagaggtcacagaagtcttctgtgttgattgttgttgagtaagagcataggaaaagcactttgttttttattctttcattcacagaagtccacacaggggc

SEQ ID NO: 910103 - DNA, 618 bp, Homo sapiens
gatctgcatgggaaggtgtgtgtgttgggggtagggcagtcttatgggtctgagccctcaatctctgggatctgacactctctccaggtagatagcatcagaatcgaattgaattggaggacacccagctggtgtccactgaggaattgtttgcttgcttggtggatgggaaaaacacctcctcaattgggtcacaggagtcttctgtgttgattgtttaagtgagagaatagagggaacgctttgggtgtgtttttccccctcatttggcaggggggagttaaggttccatatagaattaaggttgctaatcaatggaccctaaaaaaaggagaggatcctggggcggtggagggcagttttgtgggactgagccctcaacctgtgggatctgatgctgtctccaggtagatagcatcagaattgaattgaataagaggacacccagctagtgtcctctgctggattgattgattggctgctggttgggagaaatctccacaaacttcttcgtgcccagaggtcacagaagtcttctgtgttgrttgttgttgagtaagagcataggaaaagcactttgttttttattctttcattcacagaagtccacacaggggc

SEQ ID NO: 910104 - DNA, 673 bp, Homo sapiens
cccttttccatgtaaggtagtatatccacagattctagggattagaatgtggacygtgtgtgtgtgtgtgcgcgtgcatctatgtgtgtgtgtgtgtgtatgtaaaggggaagagtggtcactactctgcccaccatgccatccttgaccagccagcacttgaccaccagaaactgattgcagatgcataagtgagtctagctctgaccagaactcctcagctgagcccagccccaattgctgctctctgaagtgatgaatgagataaagtttggttaagtaccttaaataaagatagggtggcatgacatgaaataaagggaaaatgaattcagtctttgaaaaggcccccaaaatgcaaactgactctttatgtaaaatattacacgatcaagtttctcaaacaatcctgataatctgaggcactccatttttattaactattttattaatattttttgctcttcttaaaaaatgtaatggtgatcttgttgggacaaactgtttctctactgagttatttgcagtataggaaattactgtgtagacttccccaccaacattctcgattctgctgtgagaagacctctgtcagcaaaagtggggcttaatcttcaagtccttgatctttggagtaataatgacttgtggcctgggctaaattttcattagg

SEQ ID NO: 910105 - DNA, 631 bp, Homo sapiens
gctgctgccaggctctgctttttgttattaactggaacaagattaagcaatttgcatgtcagcatgtgtctgtgaygtgtgtccacagatgcatgtgtgcatatctgcactcatagaccagttggaaaatgaagtgagaagaggcatattttcttacctataataaaaggttattgtgcttagctggattttgtaaagtgtttttatctcatatatttatacaatattgattcaatcaaattaacctaataagtgcaaataataggtatgtcaagacaaatagagagattagaggaaaaaacacatttattgagcacctactatgtgtacaccttcatcagcatcattgtccttaatactggcaactatagctatcatatttacagcatatggataaggaaacagttcaggaagatcaaaccactttatatgtcagagctagaattcagactcaagtgtgatttccattcatgtgtcatgaccacgataccatgatgcctcttcacccagaagttcatagtcgagcccgctgtgatgttcatgaacatttgctggcactctcatgacgatgatgtaaaagattttacacacaatagtcagaaatgatgtaagaaaaaaatgaagttttaaa

SEQ ID NO: 910106 - DNA, 638 bp, Homo sapiens
tgaggcaggaggataccttgagactacgtrttcaaggctgcagtgagtctaaggcacatcagccttagtgacagagtgaggccccatttcttaaaaaaagaaaaaaaagaaagaaagtatactaatggcacatgtgttgcactagtagccaggcactgacctcagtatgcatactgattatctcacttgatcttattaaccttgtaaggggagtactattattattattatttccactttaaatgtgaaagttaaggctcaaaaagatcatacaactaataagtggcagagccacagacatttataactccagaatatatgcttctgaccactaggctctaatacatgaaatagaagtgatatatttcattgtactgtaaaaacacttcgtatataactttatcattctgctgatcatatgctaagcatatcaagttttgtttggttaggctttctttcattttaatgacaaatcttggaagacaaactatgctatgttctttatgaagggagctcagaacaaaataggctgtcattaactggcaaacaccagtgattcatgtgaaagactattatctttggtgaaagaaggagtgctaggctaaggaccgggagccaggaatctgccatttcctggc

SEQ ID NO: 910107 - DNA, 637 bp, Homo sapiens
cattacgtgactgctagggaaccttcctgaatatgtggctctgatgatggccaaggggatcttaaaatttttccctcagcttgactaaactttatacaggtttcttcctaactgcatgtccctgacctcccttttagagcatgtacttgagaaaacttgctattgtaaattatttttctgctcctttgagatgaaatctcacagcctcttgccagtttacaacccagaagggtctttctcaaggaccgggcagcctttcctttgaaatgtaatcatcaagaaacatagtattcctatctcctaatctcaataaaagggtagaaacctaactttaataagcaccaattagcaaacagatggcctaatacatggaccaacctctctggtagtatcctccggtgctttttcactggcttatcccagcacttagaaattctcagaacttttgtttcagtggagttcagttcaatctctttcatcttgaaagtcttgaaccctgttgtaatagtcttaaacraagtcctccatgcctgtttcacttgtccagtgcaatttttctctgacataacaagctgagcaagccagtgcactgctgctgcccagttaagtgagaagagttttaatgtgtcatcctcta

SEQ ID NO: 910108 - DNA, 568 bp, Homo sapiens
caactttagaacccatgtatttttcctctgtcccatgccctgtctgatgtaagcaggcttctaagttgcaaataccaggtggtgtggtgtgctttgaagctatttattcaacatgtgtttatcaagaagtgtctgtccaggcgcagtagctcatacctgtaatcctagcactttgggaggccaagatgagaggatcccttgagcccaggagtttgagactagcctgggcaacatacctggacaacatagtgagaccccatttctgtaaaaaaaaaaaaaatacaaaaattagccaggcttggtggcaccagcctgtagtcccaactacttgggaggctgaggtgggaggatcacttgagcctaagaggctgaagatacagtgagtcaagatcacaccactgcacttcagcctcgtcaacagagcgagaccctgtctcaaaaaaaaaaaaatacatacacacacacacacacacacacacacacacaygtatatgtatatatattttttaaattaagaaaaaatgtctgctctatgctggacacttaaagtgacttcccctgggtccta

SEQ ID NO: 910109 - DNA, 632 bp, Homo sapiens
atttgcaacttcaaggacccatgaaggctattactattgttgatgatgaggacaatgacggtggtgatgacagaaaaggaaacggggcggggagtacagggtcaaagcagtgtgagaagacacaaagagccccaatgccaccacatcaacctcacttcagcttcctgcacccccactctcttggggtgcccttctctctccccacccctggaaatcctttagcctcagagttaaattaatcaacaggattaggtggaattggccacagaggccctgctggttggggctgagtcttctgtgtaccaaaagcaggtaccttggtgaagcctgggcagctggttcgaggagggggacgtggggggagtgaacatgggaacgcattcattaaacggcagccagattcggggtacgcagtaggggagcagcctcatggccagcctgggctcctgccctcgcactatcaaacagctaaggaatgggatggtcccagggggtgctggtctggagattgccccaaaagagaaggatacagggagagatgctttctctgagttcctggatcctgtctctagtcagggatgtggagcagtscatactgagcaaaggagaattgcagctcctacctgagagac

SEQ ID NO: 910110 - DNA, 592 bp, Homo sapiens
atagcgccactgcactccagcctgggtgacagagcaaggacctgtctctaaaataacaacaaaggccgggcacagtggcttacacctgtaatcccaacactttaggaggctgaggtgggcagatcacctgaggtcaggagttcgaaaccagcctgaccaacatggtgaaaccccgtctctactaaaaatacaaaattagccgggcatggtggcacatgcctgtaaatcctagctagtcaggaggctgaggtaggagaatcacttgaacccaggaggcggaggttgcagtgagccaagatcacaccgttacactctagactgagcaacaagagtgaaactccgtcttaaaaataaaataaaataaaacaacagtacaacaatgaaaataatacaaataaaaattaaaatatagtttcacaactatttacattgtattagatgtttagagatgacttaaagaatgtgggaagattgcatagactatatgcaaatactataccaytttatataaaggatttgagcttctctgggttttcatatctgccaggagtcctggaaccaaccacccatggatgctgagggatggctgtac

SEQ ID NO: 910111 - DNA, 588 bp, Homo sapiens
tctattcagggattcaacttcttcctggtttagtcttgggagggtgtgtgtgtcgaggaatttatccatttcttctagattttccagtttatgtgcgtagaggtgtttrtagtattctgtgatggtagtttgtatttccgtgggattggtggtgatatcccctttatcaatttttattgcgtctatttgattcttctctcttttcttctttattagtcttgctagcggtctgtcaattttattgatcttttcaaaaaaccagctcctagattcattgatttttttttttgaagggtttctttgtgtctctatctccttcagttctgctctgatcttagttatttcttgccttctgctagcttttgaatgtgtttgctcttgcttctctagttgttttaattgtgatgttagggtatcaatttcagatctttcctgctttctcttttgggcacttagtgctataaatttccctctacacactgttttaagtgtgtcccagagattctggtatgttgtgtctttgttctctttggtttcaatgaacatctttatttctaccttcattctgttatttatccagtagtcatt

SEQ ID NO: 910112 - DNA, 588 bp, Homo sapiens
tctattcagggattcaacttcttcctggtttagtcttgggagggtgtgtgtgtcgaggaatttatccatttcttctagattttccagtttatgtgcgtagaggtgtttgwagtattctgtgatggtagtttgtatttccgtgggattggtggtgatatcccctttatcaatttttattgcgtctatttgattcttctctcttttcttctttattagtcttgctagcggtctgtcaattttattgatcttttcaaaaaaccagctcctagattcattgatttttttttttgaagggtttctttgtgtctctatctccttcagttctgctctgatcttagttatttcttgccttctgctagcttttgaatgtgtttgctcttgcttctctagttgttttaattgtgatgttagggtatcaatttcagatctttcctgctttctcttttgggcacttagtgctataaatttccctctacacactgttttaagtgtgtcccagagattctggtatgttgtgtctttgttctctttggtttcaatgaacatctttatttctaccttcattctgttatttatccagtagtcatt

SEQ ID NO: 910113 - DNA, 657 bp, Homo sapiens
tataatattataaatattgggttgaattaaatgttttcaaaataaatatataatctatttgtatttactttttaaaatgtagctactagaaaatttaaaattacatayttgatttgcatttagatatgtatctgttgaaaactactgaatagtgctgctctagattgaaataaggccattttctgccatttaagaaactaggagaagaaaatacagctgaaaccaggggtcataaatgcaaatggttacatctggtggtacatgaaatgcttgagatctggatgtgaaacaaaagcatttctattgcacccaagcctaaaacctatcttgttaccttgccttttaaaacactgtgagcatgaagcagccaaccaaaagatgcctgccatttgccatttaagaagcattggagtaaaaagaaagaatggagagaatggatatttactgggggaaggcctttccttattcactggtagggataagggctcatgtttaaatgatacactctcacactcccaatttgagtaatggagcaaagataaagaggcaaatggaaagtctgaaatccctagggtcttagggtcttagattttctttaaatatctttgtgtgtgtgtggtttttgaaagattatatttggcacttaaatactgatac

SEQ ID NO: 910114 - DNA, 633 bp, Homo sapiens
tttactctcatttaatttcgttattttctcccgttagaagccccaactagaagctaaaggaagtcttgtattgaatttgggattatcttggaatttatattaaaaataaaacttgaaaatttctgacacaggaatagcagctagatttaatctcacaagccagtctccttttaaattgtattggctgcttgaaacactgttgaaaagtttgcaaccgcttttcagtactgtgaaaaagagtacagtgattaattagtaatgttttccacaggccgtgggaggtggagtagcaatgtactatatttgtaatccccatttcactaattgtcttggaagatatactttttaagaccagacgtggtcaatagaaataaaatgtaagacacatatataattgtggcacttggctaccacattggaaagtacaggtttagattttgaaagcagttattttatccctaaacattccttgcttgttccttaacctaatcagcatagtgtttattagggaatctctgaaytggtttctgcaaagacaggatagtttatagcagtatattcatgttttcttacctcgtgtttgaaacataaattataagtaggtattgtaaagactgctatgatcctagacta

SEQ ID NO: 910115 - DNA, 599 bp, Homo sapiens
gtatggttaaatggtacaaaaatagttgaaaagaatgaagaagatctagtattttatagtacgatgggatgatttgagtcaacagtaattcaattgtacatttcaaaataactaaaagtatataattgaattgtttgtaacacaaaggataaatgcttgaggtaatggaaaccttgtttaccctgatgtgattgttagacattgtatgcctgtagcaaaatatcccatatattctatacatacatacatacatacatatatatatatatatacccactatgtactcatatgaattaaaatttgaaaattaaaatataaaatataataaaaatgaaaattaaaaatattaattgacagaaaacataggaacatataaaacttgctggtaaaggtaagtatgtagtcaaatgtagattactctaatactgtaatggtggtatataaatcactttaaacagtataaaagttaaaaggcaaaagtatcaaaaagagccaaagctacaataagttattaatgtayaaacaataaagtggtagaaagttccacatcaataacaaaatattgggaagggtgacaaaagtactaatttttgtaaaca

SEQ ID NO: 910116 - DNA, 659 bp, Homo sapiens
ctatatttataaaagacaaaatagatttatgtcaaaaactgtcagaagaaaacaagaatgtcattatacaaagataaaggggtcaagtcataaacagaatattacaattgtaactataaatgcattcaatattggagcaactaaatatataaagcaaatattaacagaactgaagggagaaatacatagcaatacaattactgtaggggactttaataccccctttcaataatggatagatcactcaaaagtaaatcaataaggaaacagagaatttgaacatcagtataaaatgatggatctaacagatatatacagacccttctgtccaacagtagcagaatacaaatccttcccaagtatatatggaacattttccagattagaccatatgttaggccacaatacaagtgctaacaaatgtaaaaatgttaaaatcatatcaagtatcatttctaaccacaatgatatgaaattagaaatcaataacaaaaggaaaactgggaaactcgcaaatatgtgtaaattaagcaacatactaacaaacaaccaatgagttaaataaaartttcaagtgtaataaaataatatcttggtgaagcaggagaatagggaaaatgaggcaggagaatagtgaagggaattaaaagttggataaa

SEQ ID NO: 910117 - DNA, 641 bp, Homo sapiens
caatcattgatgtgcctgtccccagtttctctgatagtgaccctgcagcaattattcatgactttgaaaaggtgggcttctcattcttataaatattccaggattttttttctctctctctctcttttttacttcattggcaggtattaaattcattcatgaatgcacatgtttttgaggcaaagccttttcattcttttgttgttgaatacacattagttgattttgaaaggatgtagccgcttaatctaatggtagttggaaaattcgcaatgttaatgccttctgtgtcttacctgacttttttcccctacctaacagggaatgactgcttacctggacttgttgctggggaactgctatctgatgcccctcaatacttctattgttatgcctccaaaaaatctggtagagctctttggcaaactggcggtatgtattttggaagtcaaatttttatataagcatttccaagtaattttacttccttgttttttaaaaaaataatgartttgtccaaaacattttattttattgaaataattttgaaataaaaaacgttgtgaacctaaaactgctctagaaaataaagattattttttacagtcattatctggtgtaggaaaggatttaaatagtgt

SEQ ID NO: 910118 - DNA, 600 bp, Homo sapiens
aacatacggcatttgatttttcattgctgactcactttacttagaataacaagttccaggccrggcgcagtggctcacgcctgtaatcccagcactttgggaggccgaggtgggcagatcacctgaggtcgggagttcgagaccaacctgaccaacatggagaaaccccatctctactaaaaatacaaaaagttagccaggagtggtggcccatgcctgtaatcctagctacttgggagactgaggcgggagaatcgcttgaacccgggaggcagaggttgcggtgagccgagatcacaccattgcattccagcatgggcaacaagagcaaaattccatctcaaacaaacaaacaaaaacaaacaaacaaaaaaaacaacttccagctctatctaagtagctgcaaagacattattttgtttatttttataactgagtagtattttatggtgtatatacaatcatattttctttatccactcattggttgatgtgaacttaagttggttccacatctttgcagttgtgaattgttttgctataaacatgcatgtgcatatttctttttcacacagtaacttcttttcctttgagtaatta

SEQ ID NO: 910119 - DNA, 668 bp, Homo sapiens
caaataagccgttattgttaggccaaggttcgtttctatttttgctttgttttttagtagtgcactgaacaatcaacagtctctcagatggcatttagctgtcccagtttacacatttgcrgggtggctggccagtgcttaaggtgtgacttggaactgatgtggctggatgtcaaatcagtgaccttggcagatatttggatggagaatatttgcttgtcaggtgtaccctgtttgcttttcctccacagggttcatgtagaagtttccatagtgtaagacacattctccacttttttcctgaaaacctagtacatttcaggaaattagaaccagtgagtttctgggggccatccatcaggtgcaatatcaggtgctgatttgtcactgactggcaggctctttcccaattcaaagcatgagaggactccaaacttctttttgtggttggagtgcccctggaagttgattcatgttctcattgcaatttattttacattgcatcttggcataatgactttgactaaaagggatattttctgatgtctctgctttaatttagaaataaccaaactgatttttccaacatatctccaaaactgaagacacatgtgcctaggaaaacaggggtttctaatgaaaatgctgacacaatctcatgaatgctg

SEQ ID NO: 910120 - DNA, 645 bp, Homo sapiens
ctcactgttgctcactcagcacccagaggaagtggaggacagcccacagatgacccgccctgcaggagacaaggcacaccttatggtgtgggaaaactccaatcacaattatctttcgtcttaagttccaaaaggacatgcatttctttctactgttgaaacaaacaaaaaaagacgagtgtacttgcgaacaaaggggcaggaaacaggaggcagcaaacactacaggctttccttccatgtgacaaagggatgatgcatctcagaggtgggagttcagatcctgagatgccacacttaagaataataatagccggccgggcgcagtggctcacgcctgtaatcccagcactttgagaggccaaggcgggcagatcacgagatcaggagatcgagaccatcctggctaacacggtgaaaccccgtctctactaaaaatacaaaaaattagctgggcttggtggcaggcgcttatagtcccagctacttgggaggctgaggcaggagaatggcatgaacccgggagatggagcttgcagtgagccaagatcgcgccactgcactccagcctgggygacagagcaagactctgtgtcaaaaaacaaacaaaaaaaccacaaaaacattaatagccacagtctgtgt

SEQ ID NO: 910121 - DNA, 645 bp, Homo sapiens
ctcactgttgctcactcagcacccagaggaagtggaggacagcccacagatgacccgccctgcaggagacaaggcacaccttatggtgtgggaaaactccaatcacaattatctttcgtcttaagttccaaaaggacatgcatttctttctactgttgaaacaaacaaaaaaagacgagtgtacttgcgaacaaaggggcaggaaacaggaggcagcaaacactacaggctttccttccatgtgacaaagggatgatgcatctcagaggtgggagttcagatcctgagatgccacacttaagaataataatagccggccgggcgcagtggctcacgcctgtaatcccagcactttgagaggccaaggcgggcagatcacgagatcaggagatcgagaccatcctggctaacacggtgaaaccccgtctctactaaaaatacaaaaaattagctgggcttggtggcaggcgcttatagtcccagctacttgggaggctgaggcaggagaatggcatgaacccgggagatggagcttgcagtgagccaagatcgcgccactgcactccagcctgggtgacagagcaagactctgtgtcaaaaaacaaacaaaaaaamcacaaaaacattaatagccacagtctgtgt

SEQ ID NO: 910122 - DNA, 578 bp, Homo sapiens
tcagctctcacatacaaattatatgcagacacaaacatacgtacccacactgtctcacacactttctgatgtgcactcgctcatttttactctcacaatgacacccttgcagggttcccatgcagtccctatgcatgtgatttctgctgacaccaggtgaagctaagatcagctgttagggaatatggacataaaagaagagagcttgagtaaaacttaaaatctgttcagataatgaaagtgagaataacagacatttttaactagactgcataggctagtcatatatgctctggtacatacccaggcatgtacactcagactcatatacacactcttaaatctccatgtgcacaaatccacacacattcttaaatctccatgtgcacaaataccatcacacatatatacacacagagaggcattttcctactcacttgctcacacrcacactcgaaattcatgcacctctaggctattctctacagaaactcacacccatgcccaatacaccacacttctctttatgtatacaccagtgtagtaatatattcacacacactcatacctcaaggggt

SEQ ID NO: 910123 - DNA, 661 bp, Homo sapiens
ctcccttactcttgaccacttccccccccagaaaggaaacctgttctggtgttatcagtagtgagaaaactcacccccaatcattcatttcccttgaatcacwttcctctttcatcttcagagccaagctcctcatttccactcattcacttttcatcatctctattagtttgttctcatgctgctaataaagacatacctgagactgggtaatttataaagggaagaggtttaattgactcacagttcggtgtggctggggaggcctcaggaatcttagaattgtggcagaagaggaagcaaatacgtctttcttcacgtggcagcaggaaggagaagtgccgagtgaatggggaaaagccccttataaaaccatcagatcttttgagaacttactaccatgagagcagcatgggggaaccacccccgtgatctaatcacctcccatgaggtccttcccccaacacatgaggattacaatttgaattacaattcaagatgagatttgggtggggacacagagccagaccatatcatcatccaaccactagattcaggatcttcttcaatgcctattgactgtcattgcctggcaaaggtcatggttgaccactctattgataaattgatacatgcagtgggtactttggcatcttcattg

SEQ ID NO: 910124 - DNA, 589 bp, Homo sapiens
ataaatcgtagtaaaatttgagtcctycaatttgtcatgatttattctgtaaggtaatatatgcaataaaattcaaaactgaaaatttcacttgattccttagaatttggacgaaatcctgaaagaaaatgaaccttttctctggaaatttagtgtcaatgtcatcatgcagtgatataaaaagatataccacacagtgttaagaaaaacaggtaaattagatacaactctctgctatatactgaaagccatgggaacagggcgccaccgcctagagagtgagaaatgaagatgggtcccagcagaagtaacaaaaagcaagtgcttgccagagagagggggctgggagggagaggagaatggagaaagggagtgtgggaatgtgagaaagggcagttgtagcaagcacagaggaagaacaatcaggtaggggtgggggtgaggtactggagttaggagcagagaacaggagttgaagggagccttcaccaggatgggggccttgccaggccctggaaatgaccaccttcaaggaacatatagttgagaatttagagagcatgtagactggtggctctattttacagtt

SEQ ID NO: 910125 - DNA, 565 bp, Homo sapiens
aggagtcagaggtgcaggctgaaaagacattgcccctagagtggggaactgccaaaatctagccaggatattaggccaagagaaaagacctcaggcacaggggaagccagcttcagaatcttagaggtgagttagagaaatactgggctaagctgggtcaacaaaaatagtcatacgggaaggaagcaactcagtggtactttgtctcaggttgggttctcctagaagcaggctgtgagcctatgatttcagtgcaagtagttaatagggaaggtgaagggaatactgctagaggagtaggaaagtgaggcaaaggagggaaggcattgaacaaagggcataataccaagacagctacagtcggggcaactgaagcttaaccctgctggaaaattctgggaacttaggcagaatttatctcagagttagtctacctagcggtgagggagctggggtatttacacttcaacatccctaatgcctccagtctgctgtgtggrttgtgactcaggcccaggagcaagaaaaaaccactggcagagaaatgaaggtattgataattgaa

SEQ ID NO: 910126 - DNA, 576 bp, Homo sapiens
catgattgcagcaatttagtcacagcttcaggctccacatctaattcggttatcttactgtttctgccacagcagcagtgactttctccaccatagtcttcaactcctcaaagtcatccatgagggttggaatcaacatcttccaaattcctgttaatgctgatattttgacctcctcctgtaaatcacaaatgttcttaatggcatctagatggtgaatcctttccagaaagttttcaatttattttgctcttattcatcagagaaatcattaactatagcagctataatgttattaaatatatttcttaactaataagacttgaaagtcaaaattactccttgatccatgggctatggagtggaggttgtgttaacaggcataaaaacattaatctttttgtgttcttccaccagagctcttgagtcactaggtgcactgtcaatgagcagtgatattttgaaagaaatctttttttttctgagcagcaggtctcgacagtgggcttaacatatttagtaaacygtgttgtaaacagatgtgctgccattcggactgttgttttatttatagag

SEQ ID NO: 910127 - DNA, 576 bp, Homo sapiens
catgattgcagcaatttagtcacagcttcaggctccacatctaattcggttatcttactgtttctgccacagcagcagtgactttctccaccatagtcttcaactcctcaaagtcatccatgagggttggaatcaacatcttccaaattcctgttaatgctgatattttgacctcctcctgtaaatcacaaatgttcttaatggcatctagatggtgaatcctttccagaaagttttcaatttattttgctcttattcatcagagaaatcattaactatagcagctataatgttattaaatatatttcttaactaataagacttgaaagtcaaaattactccttgatccatgggctatggagtggaggttgtgttaacaggcataaaaacattaatctttttgtgttcttccaccagagctcttgagtcactaggtgcactgtcaatgagcagtgatattttgaaagaaatctttttttttctgagcagcaggtctcgacagtgggcttaacatatttagtaaaccgtgttgtaaacagatgtgctgccattcrgactgttgttttatttatagag

SEQ ID NO: 910128 - DNA, 626 bp, Homo sapiens
cctctcttgtgctcctgaagcttcccatcatcattctgatactattgtgccataatttctgactttatgtatctatatatcctccctaggatggtgagctgttttaggatagttcctttgtctttcgattcaccacaataacctgagtttatttttagcacaataccttacataacagacatatagaaaataattgttaaataggcaaattttaatagtggactagagaccttgggaagcagcaaggaaaccactgattagataaatattaatgtggcaaactggctttcattgttgtgagggttcttaacagtttttctcccacttctcgctgatttactatcactcctggcatcataaattcaagtcaataaatgttctgcatatatggggcaacatttgaactctttggagcagagatgtcatgtaggttgtaggaacaaatgtatggctccatgaaggttgataggaatgtaaattttaagctggaaaagaaagagacagcactcagaactgtatattcacttatttgtattaggtgagctaccagaaaaaatttttagaggcatttcatatggawaaaaattcatgttaaaagcatcttcaaagattgcaacaaatgtacg

SEQ ID NO: 910129 - DNA, 626 bp, Homo sapiens
cctctcttgtgctcctgaagcttcccatcatcattctgatactattgtgccataatttctgactttatgtatctatatatcctccctaggatggtgagctgttttaggatagttcctttgtctttcgattcaccacaataacctgagtttatttttagcacaataccttacataacagacatatagaaaataattgttaaataggcaaattttaatagtggactagagaccttgggaagcagcaaggaaaccactgattagataaatattaatgtggcaaactggctttcattgttgtgagggttcttaacagtttttctcccacttctcgctgatttactatcactcctggcatcataaattcaagtcaataaatgttctgcatatatggggcaacatttgaactctttggagcagagatgtcatgtaggttgtaggaacaaatgtatggctccatgaaggttgataggaatgtaaattttaagctggaaaagaaagagacagcactcagaactgtatattcacttatttgtattaggtgagctaccagaaaaaatttttagaggcatttcatatggataawaattcatgttaaaagcatcttcaaagattgcaacaaatgtacg

SEQ ID NO: 910130 - DNA, 599 bp, Homo sapiens
cacgagatccaagaaccctctcttgggtctggattgggactcctttccggtaacatcatgtctccctaaaatgtataaaagcaagctgtacggccgggcacagtagctcacacctgtaatcccagcactttgggaggctgaggcgggcagatcacctgagattgggagttcgagaccagcctgacgaacatggagaaatcctgtctctactaaaaatacaaaaaataaaaaattagccgggcatggtggtgcatgcctgtcatcccagctacttgggaggctgaggcaggagaatcacttgaactcaggaggcagaggttgtggtgagccgagatcgcgccattgcactccagcctgggcaacaaaagtgagactccttctcaaaagaaaaaaaaaagcaagctgtacttcgactactttgagcacatgtcgtcaggatctcctgaggctgggtcacgggtgtgtccttaatcttggcaaaataaactttataaattgatcgagacctgtctcagatacttttgggttaaacagaagcaataatgtctataaagaaaaaaacacaaagcaraaacacaagaattcaggaactacattgc

SEQ ID NO: 910131 - DNA, 667 bp, Homo sapiens
ggtccaaccatagcaactatgtcagtgtgcagataactgaaggtgcctttccctccctggcttggcttctccctcttacttctcttcccaagctctcaatttgctttatttttgtatmttttaccacgatattgtctctctgtgtgtctttatataaaacttgagttattccagttctgccaatctgtgtaatcacttggcatttttatttgtgttcataattttcagccatggagacatttgaaagacaacaaaatcgatcctggagaaacagagatgtgggcactattgcaatttatagaatttattgtaaaattggactttgatgaatctttgccatacatattctgttgcttaagattttttgtaacaatttatgtgtctattgctttatgtgaaagacgcttttcaaaattaaaatcagtaaacagtgttctgtgattaaccaggaacaaaagtagatggacaactgctcaatgaacatgaaacgatgaagatcaatttttcttctaggtcatggacaaattaaagtagttaagtgttaaaaacagagaccatgatgtcattcctcatgactacaatagaccaatatttaactctaagcgtatttcctttaaaaaaaaaaaaagttaactacaaaaatgtagttaaaggtgctaatctacta

SEQ ID NO: 910132 - DNA, 645 bp, Homo sapiens
gttgcggaggcagctgcaggaggagcaggcctcctagtggcgcaagctgcaggcctacctggagggccagcagcggcaggcccagcttgtgcagcggctgcagggcaaggtcagggccacccattcctgctctttccctcccacgtgttcactttgccctgcccccacccctggggctcaccatcagctcccaatccccagattctccagtacaagaagaggttctcggagctggagcagctgttggagagatccggagagctggagcagcagcagctgagggtgggtgccagggtggggcagaggcaggccctgccctccacctgcccagcctgatgctttaacctctctgccacccaggacgcagagcacagccaagacctggagagtgccctcatctggctggaggaggagcagcagggagggccagggctggcagcatggccccctgggcgagcgcctactgatcccctgtgccccattcaggagtgccagcctggcccaggtgaatgccatgctctgagaacagctggaccaggcaggtttggccaascaggctctgagtgaggagatacgaaaggtgaccagtgactggactcgcagctgcaaggagctggagcagtgggaggcggcatggaggcgcga

SEQ ID NO: 910133 - DNA, 645 bp, Homo sapiens
gttgcggaggcagctgcaggaggagcaggcctcctagtggcgcaagctgcaggcctacctggagggccagcagcggcaggcccagcttgtgcagcggctgcagggcaaggtcagggccacccattcctgctctttccctcccacgtgttcactttgccctgcccccacccctggggctcaccatcagctcccaatccccagattctccagtacaagaagaggttctcggagctggagcagctgttggagagatccggagagctggagcagcagcagctgagggtgggtgccagggtggggcagaggcaggccctgccctccacctgcccagcctgatgctttaacctctctgccacccaggacgcagagcacagccaagacctggagagtgccctcatctggctggaggaggagcagcagggagggccagggctggcagcatggccccctgggcgagcgcctactgatcccctgtgccccattcaggagtgccagcctggcccaggtgaatgccatgctctgagaacagctggaccaggcaggtttggccaaccaggctctgagtgaggagatacgaaaggtgaccagtgaytggactcgcagctgcaaggagctggagcagtgggaggcggcatggaggcgcga

SEQ ID NO: 910134 - DNA, 557 bp, Homo sapiens
acaggctagaagaccatggagtggcatctttgaagtgctgaaagaaaaacaaaaaaactgtcaacccagaattctataccagaagaaacagctttcaaaawtgcagtagaactgaaaactttctcagggaaacaacaaatgaagaaatacgttgtcaacagagacatgagaaatgttaaaaggagttcttcaagcaaggggaatatggtattaaacaaaatcttggatctacaagaggaaataaaaagggccctaaacatagaaagtacatttttccttatttttaattgccctaaaaagtaattgtttaaagcataattgtgtttatagaatgtttaaaaatgttatatatgacaacaataacacaaataatgggagggacaaattgggactataatgtaagctcctaatatgacacataaagaagcataatattatttgaaggtagactctaattaggaatgtgcattgcaaaccccagggaaaacactaaaaatataataagaggtataaataagctagtagactaaataaaaaggaatagtgagtgatatggt

SEQ ID NO: 910135 - DNA, 651 bp, Homo sapiens
ttacttatagtaggcacactgattctggcccgagggccggcaaatggagggctgttgtctgcgcatcccagatcctgatttcatggcactttctcaggatgagtaaccctgagggggcaggaggcttaaagcatttgctaataattgcacttttcagctatttcttttattccagcactttgccctgcccctcttgttgtaaactttaaaggtcacatttaagagttggctcataggggcttgaggccccattgctgctttttgtaatgttagaggcagattgagtaatgaaacgtgtacccaggagagcttacccttctgggaagtctaggtctgcattaagtatatttccctactgcctcaactagatgaccctgaaacagagcgatattttcatctcttccctgagttattgctctatccttgtcacaattgactggcttaaccacactttttcctgtgtttttcccaccacacaacaagtggacaacaatatttgcaactcatgacaagttatatcaaagaatgcggccaacttaataaactcctctgtgaatctgtatcctctgaaaactggccaaatcttctcttgtataaggccaaattagatatagaaaacggcacrtgtactctaagtgtccccttatttcc

SEQ ID NO: 910136 - DNA, 575 bp, Homo sapiens
tgtgaaataaactggtcacaactgtgacacttttggcaggtggtttcacacccccacaccttcctttttcctaaccatcttccagtttaraatgaatgtgtgccacggtgtgttctggccatagagacatagtcagaaatctgctagatggggcctttggggaagacactgctaacctgacagaaaaggacaatcagctgacatatctccttgcctttttcctccttagtccttttcccttgttcctatctggatggcagatgagatatgatggcagatggaggcatgatgagaaaaacaacacggtaaaagcaacactctaagaatcttccattttaagaaatggagaaaagtagggttgctgatggcatcacagagttgtcggctgccaacctccagactctatgctacatgaaaacataaatctctatttctcttagctactgttagttagattttcattgcttacatccataagcagtcttaacggataaactatcagctaatcttcatgcatagctactacatttttgtggtctctacccaaacttttcaaggctctgttgatgaaccca

SEQ ID NO: 910137 - DNA, 509 bp, Homo sapiens
caagaccaaactgaaaaatacttgcctccttggggaagctgtaggtagaattcatgctccctatctttcccacatttctgaaggacaatgcctgttagagcaattgaatgcaaatagtcaattgaataagcatttattcatttctcaataagtgcttgttcaattgaatatttcttaaataatatatttaagaacaagaagaacacaccacaatgtttttaaccctcagaaaaaattctgaggtaatcagaaaaatctccctttacataaactgcccttttctaatagggattacttgttcgttcattcattcattcagctccactagcaccaaaaagcacagctctgaaaggaagctagtagatttatcaccttatctggtcatttggatgaggaccccaggtaaataaactactatggggttaatgtgtctagctagagcaggaagtaacttaaggaagtagagaaygaatcagcagatgtggaaactcctcgccactaataaaact

SEQ ID NO: 910138 - DNA, 627 bp, Homo sapiens
aaagttacaaagatgaaaagttttgttttgtttttttttttttttgagacagagtctagctctgtcacccaggctggagtgcagtggcatgatttcagctcactgccacctctgcctcccaggttcaagcaattctcctgcctcagcctcccgagtagctgggactacaggcacgtgccaccatgcccaactaatttttgtatttttagtagagacagggtttcactgtgttggccaggctggtctcaaactcctgacctcgtgatccactcacctcggcctcccaaagtgctgggattacaagcatgagccactgcacccaactgaaaagtattattttacacaaagtttttaatttttagacatgtgcatttaatttattagtgttctgttggtaaactagtcaagttttcaaagacatttaagaagcatgaagagtatattttaatataatttacactacatacatttctttatgtaaagtgtttatcatccagggtgtcttcagtgtctgyatgtattcaacacatccatcttaaagttccctgacatccataacttcagtgacattccttgatcacactgagtctttctactgttgacatctaaactctaagaaccacagtg

SEQ ID NO: 910139 - DNA, 615 bp, Homo sapiens
tgaggtagccagtgtcttcacatataccaaggtwtactctcccacttatcatttacaaaaatattgtgtctcacaaatttatatgaatatcaaataaatgagttttccaacatttacatttccactaaatctgaagataaagagaactagttcctatctgaagaaatgaaatattcctcaagcaagtagacccataattttacacatgatggaaaagtattttagtcagggataagctcccaaaaccctgtgatatgaattcagaaattaattaaagagtaatttttttctcagtttccaagttaactgaaagacctgcatgcaggaatattggagcctcagcgtagaaagtattcaaaaataatatgattcattgtaaagcagttctctcttgaaatccatctgttctaattatctattgctgtgcaacaaaccactccaaactcagtgacataaaacagcaaccattatgctcacagggtctgtgggttgggattttaaacagagtacaatggggagggcttatttgtgctccaggacatctggggcctcagcttggaaggcttcagtgggttgagggtgactcaacagtcaggggctggtatcacctggaag

SEQ ID NO: 910140 - DNA, 592 bp, Homo sapiens
gttaagaatccactgtgctggggaagggggctgctgacaaggtgctcctggaccagcggtcactacactccaatgagtggtgtcagccaaagcatttcatagtgcagtagcagaaggatacatctttgtttgcatgtgccagcagcaggagcagcatgaagaggtgcatattcattggctgcagcagagtgcttgccagtgctggggtgcctgcctctgcatgttcattcaccacagtggagtgggcagcatggctgcagggtgcagggggctcctgttggggactgtgcactcgattaggctgatagtggtgttagcacatgagtggggtattcactatttcctaatttaccttgtgatttcttttttgacccattggtttttaaagaatgtgttttacaattttttcatatttgtagactttccagtattccttcaactggtaatttctagttgcattgcattrtagttggaaaagataccttgcatgatttcaattttattaatttgttaagatttgttttgtgacctaaaatgtagtctgtcctggagactgtcacacatgtgcttgagaagaatgtgtatcctcctg

SEQ ID NO: 910141 - DNA, 508 bp, Homo sapiens
aggcaacctacacaatgggagaaaatttttgcaatctactcatctgacaaagggctaatatccagaatctacaatgaactcaaacaaatttacaagaaaaaaacaaacaaccccatcaaaaagtgggtgaaggatatgaacagacacttctcaaaagaagacatttatgcagccaacagacacacgaaaaaatgctcatcatcactggccatcagagaaatgcaaatcaaaaccacaatgagatatcatctcacaccagttagaagggcgatcattaaaaagtcaggaaacaacaggtgctggagaggacgtgtagaaataggaacacttttacattgttggtgggactgtaaactagttcaaccatcgtggaagacagtgtggcgattcttcaggcatctagagctagaaatacaatttgacccagccatcccattactgggtatatacccaaaggaatataaatyatgctgctatgctcacaatagcaaagacttgaaaccaaccc

SEQ ID NO: 910142 - DNA, 692 bp, Homo sapiens
tgcagggttggggccctcatggagaacctctgttaggacagtgcagaagggaaatgtggsgttggaccccccacacagagtccccactggtgtactgcctaatgcagctgtcagaagacagtcaccatcctccagaccccagaaaggtagatccaccatgagtttacaccatgcacctggaaaagccacagacactgaactccagcctgtgaaagcagtcaggagggaggctgtaccctgaaaagccacaggggtggagctgcccaagaccataggagcccacctcttccattagcatgatctggatatgagacatggagtcaaaggagatcatttcagagctttaagatttggctgcccaactagattttggattgcttggagcctttagcccctttgttttcacccatttcgcccctttgcaatgggagcatttacccaatgcctgaatgtccattgtatcttggaagtaactaacttacttttgattttacaggcttataggcagaagtgacttgccttgtctccaatgagactttggactgtggactttttagttaattctgaaatgagttaagactttgggggactgttgggaaggcatgattgggttttgaaatgtgaggacatgagatttgggaggggccagcagtgaaatgatgaggtttggctgtgtccccatccaaatccca

SEQ ID NO: 910143 - DNA, 670 bp, Homo sapiens
tgtggtcctgtgttgggtgcatatacatttagaatagttagatcttcttgttgaattgaaccctttaccattatgtaatgcctttctttgtcttttttgacctttgttggtttaaagtctgttacgtctgaaattagaattgcaatctctgcttttttctgttttccatttgcgtggttaatttttctccacctttttattttgagcctatagctgtccttgaatatgagatgggtctcttgaagacaacatatcaatggatcttgtttctttacccagcttgccactctgtgccttttaattggggcattttgcccatttacattcaaggttactattgatatgtgtggattttatcctgtcatcataatgttaactggttattattcagacttgtttatgtggttgctttatagtgtcactgttctttgtatttaagcatgtttttggtggctgctaatggtctttcctttctgtatttagtgcttccttcaaatgctcttgtaaggcccatctggtggtaacaaattctctcagtatttgcttgtctcaaaagtatcttatttctttttcacttatgaagcttattatggatggatatgaaattcttggttggaatttgttttttgtaagaaggttgcrtattagctggcaatattttctggcttgc

SEQ ID NO: 910144 - DNA, 595 bp, Homo sapiens
acttgtgcctgggatggtgctagatgctgagaacgtgccattgcccacatgttctcagcatctagcagaagaatcagttccagagcacactcacccagcttctggaatctcacaggttagttgggaggtcactyaaatagaacacgacgtgtgctgtaaacaagttaagcacagagtgcaaaggagcatctaattcaagagctgcttaggatggttttgtagagaaggcatgtatgattctaaaatgaaggcatggcacgtgcaaggctgtggtgttacaagagaacttggagcatttggagaagcggacgtagcgcaatgtgaggcgagagatgagagtggtacatcctagcaaggaaactcccagtcttggaggtaatggagaaccattgatgaattttaaggattttaagaataggcataatgtagtcaaattcacactcagtgaagtagtccttgaaccattgttcactgcaccacatggtcacagtcttattaagctgacagttgaaagtttcattggaaaacaaacctggcagttcttgaaatggaaacatgaaggtaatgcagggcctacaactctaggttgcaaaaa

SEQ ID NO: 910145 - DNA, 604 bp, Homo sapiens
gcctcagtttcttcttctgccttatgtccctcagtcaatttttttcttctgaggaggcaagaattgaggttgcttcagacttgtacacattcgctgccggtaactcagatacccatcactgaaaacagaaccgggttggctcctgtgggtcatgaggcaggaaaccaaggtgctttttttcataactcatagcttcattggacgactactctctaagtcactaggttgacttatggctgaaagaaatctgtatctggcaccatctggtgtttgaaggaaaggaagtgctgctgtcagcatttgttccaacacttcaccttatcatgacactaagaaaacctcaagctggcaatgacatccaaaggggtagaagcagttttctaaatggtactggtatccctactggcatctctggaagaaagagttcagttggctcctgtagtatgtaggaggcagactctctcttaccaagattcacaaaaatgagaaattcttccaaatagaatgtgggtttctgttatrgtttgaatacgtcgctttcaaaattcaagtggtgccaatatgacagtattaggcgatgggagcctttcagaggtgattaggc

SEQ ID NO: 910146 - DNA, 635 bp, Homo sapiens
tattataaaataggcttcgtgttaggtgattttgcccaaatgtaggctgagggaagtgtcctgatcacgttttaaggtaggctagcctaagctacaatgttcagtgggttaggctgtagtaaatgcattttygacttataagatactttcaacttatgacacatttatcaggatgtaatctcattgtaagttgaggagcatctgtcaccttttgtgagtaaacatgctcagatgcagcaaccctgacctgcaactcttcaagatggttttgaagagtagggtggattttggcttacttggtacttgtaacagtaatgaaaaaagagaccttggaaccttgcagtgacttggactgtcttctgcttttttcagtctcttcagaagtgtccttgtcttcctggcctccaattgctctgctgatgttggtggctgtggcctgctacttgtgcatcttgtagctgggttctttttccttttctctctcaaattggtcagagcccagcatctgcccccaggatgatctgatcttgtctctgctcttgctgtatttttgtcatgttctccgatggctttgtccacatgtccacctgaagtgtgtggagtaaagtcttctgatttctgctcctataagtcct

SEQ ID NO: 910147 - DNA, 553 bp, Homo sapiens
tgtcaagttctctgagttcatttgaacattttaaatctggactgggtctggaagtcatgataaaaaccaaactggttccagaagagaggcctctagtaggtaagatatgaggagacagggaatcatgggttcatstggatccaaggagtctagaactccatcatctgaaactctagccaatctcatgtatgatgactagggacccaggccctgtgcttttctagggaaatgggtagaccttaccaaagacaacttaagagttacaatggccacagtgaagaatttttaacctagttaaaattgttcgcttgtgaggtgcattagaaaataaaggacccaaaattcttcagaaacaatgggaggtatttttttattggcatatggaggctccaaaaagacaaaatgaatcaaaaattgcccctccaaaaaaatccttacaaaaggccaatgaaaagcttaagcaactaattgatgaaacagaaaaaataatatctcactactcttattttctttttatccttctctcctactctgaatctacaaattttttcac

SEQ ID NO: 910148 - DNA, 591 bp, Homo sapiens
atattgcatactagagaagtatgyggggtcaagggagaacgtaccacttttttttgtctattaggagattatagaacttctttgatactaataagactgtttcagtagagagggagagattgtgtggaaaagaggggagaggttgcctttaaaagtcaacggagaatgagatccaaagtagaaccaaaaagacacaggagccaagatggccgaataggaacagctccagtctacagctcccagcgtgagcgacgcagaagacgggtgatttctgcatttccatctgaggtactgggttcatctcactagggagtgccagacagtgggcgcaggtcagtgggtgcgtgcaccgtgcgcgagccgaagcagggtgaggcattgcctcactcaggaaccgcaaagggtcagggagttccctttcctagtcaaagaaaggggtgacggacggcacctggaaaatcgggtcactcccacccgaatactgcgcttttccgacgggcttaaaaaacggtgcaccatgagattatatcctgcacctggctgggagggtcctacgcccatggaatctcgctgattgctagcacagcagtc

SEQ ID NO: 910149 - DNA, 681 bp, Homo sapiens
ctttaagacatttattcagagaggcttctaattgttgttagcccttcatcattttctcaaasatattgcctacagcattgacagcagcaataataaatataataacaattccatgaaacctcatgtgtgctaaaggatccacagacaatctgaacagcaggaaagaaagtttcttcctatcaattaatgggaagccaagtctaatttgccacctgcacagcacttttgaacctgtcagggacaaaggaagccagtgaaccttcatcttgtcactagtcttcttggggactgctctctaaagtaaatgaaaatagcattcattacagtaaaaaatagaacggctgtgtcagccccctatgttctcttcctaggtagaaacagagtccatcattgtcggtgaggaggtggctcacaaagccctctggacctttgcattcatctcctgcttctggagaatgaacatttccttaaactcttttgaaatgtttagaatgttaactcatcagttcccctgtgacttatgagtcaagagacattagaaacattagaagagttctactgtttcacagtctaactctgaaaattctggaaaggctaagataaattccaggtaaaaaaaagataagacttctgagaattttttggctcccctgaatcatctaagataacaataaaaacatg

SEQ ID NO: 910150 - DNA, 642 bp, Homo sapiens
gcagtggaatgggatgagttgatactgtaatctcttaactcatacatgcctttccagccattgtctggaggacagcattagatctggcttctctgtctgcccctccctgtgttctgtgttgtaggggttcatcccattgaatggggctgtctacaggggtgttgccttcttctctaacttctccaggaagtcccttcttgacaagaaggtgaacttgcatgattatgtagatctattctttggtcaagtatataaaagttttctgacttgcattatttccccctaaagcaggactgactgaacagtgctttttgtctagaaaaattcaagaagcaaagtgcttgtgaagtaatacttttggttacttgtaggacagttcagacgaacgtcagtagttttcaaatcaggccacttgtaccctggggatttgagtagatgctggaatagctgcatcaacaatggagttgtttctttttaccaaacagtaatgatattaaatgcctaaggagtatattcccccctttatctgtcttacatattggggttatttataagatttataaaaagcrttctgaccatatttaataaattacctttgtccagggtggtggatctcaacatgttatctgaagatggcctaag

SEQ ID NO: 910151 - DNA, 551 bp, Homo sapiens
gcctggacaacatggcataaaccccatctctaataaaaatacaaaaaattaaacaggcatggtggtgcaacacctgtagttctagctactcaggaggctgaggcaaaaggattgcytgagtctgggaggtcgaggctgcagtgagccgagattgcaccattgcactccagccacagtgacagaatgagaccctgtctcaaataaataaataaatagaataaaaagacaatacaaaaatagaaagaaaaagcattgttttgctccctctttatatcctccttgtgcaatttatagacttttcaaagatgtatcaggaatctatggaagaactggagctggagaatacttgctgatctgtttttcattccagcctccctctgtatttctattctagcaacatgctacctgggagggatgtaatatacctagagcactcagcccaatgcatgggatatactcagcactagcaactgttcttaagatcatcaagtgcccaaaggctttccaatttgaacttggatgcacttgagaaatggtaggctggtacccca

SEQ ID NO: 910152 - DNA, 551 bp, Homo sapiens
gcctggacaacatggcataaaccccatctctaataaaaatacaaaaaattaaacaggcatggtggtgcaacacctgtagttctagctactcaggaggctgaggcaaaaggattgcctgagtctgggaggtcgaggctgcagtgagccgagattgcaccattgcactccagccacagtgacagaatgagaccctgtctcaaataaataaataaatagaataaaaagacaatacaaaaatagaaagaaaaagcattgttttgctccctctttatatcctccttgtgcaatttatagacttttcaaagatgtatcaggaatctatggaagaactggagctggagaatacttgctgatctgtttttcattccagcctccctctgtatttctattctagcaacatgctacctgggagggatgtaatataccyagagcactcagcccaatgcatgggatatactcagcactagcaactgttcttaagatcatcaagtgcccaaaggctttccaatttgaacttggatgcacttgagaaatggtaggctggtacccca

SEQ ID NO: 910153 - DNA, 595 bp, Homo sapiens
caaagtagacatatggtactcaggggttattatcaactcaaatgcctttaggaggccaacagataacacagatatttgaagcagagaagaggtcagacaatacrgaatggcgcagactgtgatgaaagagaaggggcatgttctgcctgaatgcacacaaattcaaattcttttaaaactctgtgctgaccaaaaataaagaaatctgcagtctgtatttagccaaagggttacaagtgctgaccttatcaatacagaatattataatacataatataataatagttgaattggattttcagttgtagttccctgacttcactgcttctcccataactttgcagtccctcagaaataaaaaaggagtatttcagtttcttgcagccagtctctcagtttgctggtgtcttatttcaattctgtgagaccttatcttcttggtttatgcagatttccttcttctccctttcttttggtcttttctcttaaagtttttgcctcgtcttttccttatacaggaagtgacaatgccaagctgtcactgatgaacaagtataaagataatattatagccactagccctgtggactccaac

SEQ ID NO: 910154 - DNA, 647 bp, Homo sapiens
caaatgctttttctgcatatattgagatgattatatggcttttgtccttcattctgctaatgtgtgtatcacatttatagattttcttatgttgaaccatccttgcatcccaggggtaaattacacatgatcatggtgaataatccttttaatgtgatgttgttgctttgtagttactgtgagacttagataaaacatataatagttataacaggctattttaagctgataaaatttaacttcaaggataaaaaaactccacacttttactctccctccacattttataggtttttaatatttttcagactttatgcttttgatgttataatttacatcttttatattgtgtatctgttaacttattgtggttataattatttttaatagttttgtcttttaaccttcattctaaagatataagtgatttatacagcacaattataatattggaaaattctgaatttgactgtatttttatttttacctgtgacttttatactttcgtagattttcatgtaattaattaacrtccctttctttcagcttgaagaattccctttaacatttcttgtaaggcaggtctcgtgttgatgaactacctcagcttttatttgtttgggaaagtctttatctcttctttattt

SEQ ID NO: 910155 - DNA, 567 bp, Homo sapiens
atttttatgatgtatatacaattttaacaataaagttgaatggrtaaaagactagacagttctacattatttgccatacctttcactttgtatagactttcaacatttgagtgaaagtgggcagatacatattttttactaaaaggaaaccactcactattcaggtcacacaaaagcataatcacatacacacacacacaccccccacacacacaccccattgttaagctaggtcaacagtaaatgaatgaatgaatgaatgaatgaatgaatgaacaaatggacaagcaaacagcagaattgaatgtccttcatcgccaggcaccagagaggatggcaagcccctggacttagggttgggtgcaccttcagagctgggtctggagagaacagggcggggctgtgaccttgccccttaagtgctcatcctggctacgttgaagtctggacatatcacaaagtccacacaactttggggaagttgtgggaagaactgggaatccctgaggacagtgatcacagtgattgaaactcttacaggcaagcctgggtggtgcagggcacaga

SEQ ID NO: 910156 - DNA, 597 bp, Homo sapiens
taaacattctaatgtccatttaaaaatcgtgaaatgggtgaatgcagatcagtgcacaatccatgtctcagttcctcaccttaccagtaaactggtaagagttttcttaggtgatctcaaggatcattgtcctstctaaattcataaaattctttgaattagagccacttctttcctctatctaaccctctctttcctttcatcttcttatttcaaaattagccctgaaagagaccatttctggatgcacaaatgtgtacatatatacataaatgtatgtgtatatatacaagtatataattagaaaacttttccagattttgtacatacaaagtgcatttttttttgttttcaaggcctggaaatgtttgtgactttgctttttagattcagtaagcattgctcaacataaccacctgatattttttaaactgcttaggatggggctgatcagttttctgttgtggtttcctctatagcaatcatttgataaaattcaacggtttaccctaattttaatgatttcagtgtgtcacacccttcataaatggccaagaaaccctgctgtcctcaatcatcaagttcaagtatgttaca

SEQ ID NO: 910157 - DNA, 635 bp, Homo sapiens
ttcctgtccattcacaacttgaatcattgacctggactcagcccttccacttcacaaaaaggtctaattaattggcttctttggtgttaaatccaataaactcttcagtccccccactccttctacccaactctgctgctcattactgttttcttgaaactcttctcagatttttctggttttgtttcttctgtttccttgctgttggttacttctcagttttcttatgcaagctcttctttctgtctgactctctttttttaataaattgaggtataatatacataaagtgcataaatcttaattgttaagcttgatggatttttacatatgtattccacccacgaaaccatcactcagattataagtacccaggaagacttgctcatataccttctagtcaataacttgcctcaaaggtagccaatattttacctctattatcatgggtaagttctgcttatttttgaccttcatatacatttctgcattcaacgttgtgtctatgagattcattcatgttgttgtgagtagcacacttccacacttttacattgccwtgtggtttttcatcatttgaatgtcacaagctatttatttaatctactgataaccatcatattctttttgaatgg

SEQ ID NO: 910158 - DNA, 598 bp, Homo sapiens
aatgccagtaaagagggaggagttagatactaagaaaagaaagaatgtgagcttaaggctcataycatcagtgaatgaggagagtccaggaagttggtaaatgtctgaagcaaggagaggattgttaggtagaatctaacagcaagagttttggctgagcagtggttttcatgacaggtgaggagagcaatggcaatttcttcaaaactagcttcgatcagatgtttacattttaaattttatctcagacttcagtttaacccatctaatcatccctttattaatatttttctgaagttattcttattttgctttttacagttcttttcattttcaccattttaaatgagaatttactgaaagaaaggcccctgcgaaagagaagcctcattagaagctgtatttagacactattacccaccatactcttaagaaaaggcgtgcgttttacaaccaaagaggccacgctgtgtgttggaaaagccattcttaattccactaaattctgtgtcagtagcttgtcaggcatgcaaaagacagagctaatttgactttcaaaaatacagctattatctgttagataaagcagcagcaatcc

SEQ ID NO: 910159 - DNA, 644 bp, Homo sapiens
gtgtgatatttgtgatccatctaagaacccaggcagcgtcactctaggtaccctgcttttaaccactgcagcatggtaaaatactgttttattctctcctgyaaagagctttggttccgatgtggcatcctcatggtgtaatatgtttccactgtatgaagtttaggtaaatccttgctgctagtgaaaatatggctgttctcccaaagggaagattaaactttcacctttcacacattgtcagagaatgtaagcacaaaaccagggtgattccaaacggaatgaaaaagtttttttgaatgttttagaccacgtgctttcttgtggggacttgtgaaaacttgagtttgttctgccttatggccttgaggaaagaaggaacccactgtgccttcacctctcctttagtggagatgtgttgtctaggatgagtcagcaacagttctgatgtgggccttgtaatgtgagggatgcatgttgaacatttataagattcgcgaaataactatgaaagtttttttaacggtttattttgacagtatgctcatgcataaagtagatattctaaatatgtgcaaatgttcagttctttttaaatcacgctgtgttgctttttatgtctttgaagtcctgtggaaaaattt

SEQ ID NO: 910160 - DNA, 598 bp, Homo sapiens
tatgccacttctgtagagaaagtatgtgattaaaatctaatggaattaaatttaaacagagactaaatrtttcttaaattaccaaggacaagtatgttcttaaagtgtttatgtctaagagaatacctctgctgctctaaaaatttaaacatttatgtgaaaatgcttactatatgttattttagtatatcttaatattataaaatctttcttaaaaataaaaattaggtaatgtagagactgaaatgatggattaaacttagctgagctgtggtctgagggtctctgtaaattttactggctccttggatgcactttttcattctcactcctcacttaatatatcaatatattttaatgaaataatttagataaaattccagacaaaaatatttttagttgatgtataagaataatgcaaatctccagatgcaaaacaaaatgacaacgttgagattttaacttcgaaatgaaatattaaagaaatataacccagtgcgtattccagcaaggcctgactaatgtccacatcagtaattgctgagtatgtgctatgtagttagtacttatttagtaccttgaaaattacaagaaaaat

SEQ ID NO: 910161 - DNA, 598 bp, Homo sapiens
tatgccacttctgtagagaaagtatgtgattaaaatctaatggaattaaatttaaacagagactaaatgtttcttaaattaccaaggacaagtatgttcttaaagtgtttatgtctaagagaatacctctgctrctctaaaaatttaaacatttatgtgaaaatgcttactatatgttattttagtatatcttaatattataaaatctttcttaaaaataaaaattaggtaatgtagagactgaaatgatggattaaacttagctgagctgtggtctgagggtctctgtaaattttactggctccttggatgcactttttcattctcactcctcacttaatatatcaatatattttaatgaaataatttagataaaattccagacaaaaatatttttagttgatgtataagaataatgcaaatctccagatgcaaaacaaaatgacaacgttgagattttaacttcgaaatgaaatattaaagaaatataacccagtgcgtattccagcaaggcctgactaatgtccacatcagtaattgctgagtatgtgctatgtagttagtacttatttagtaccttgaaaattacaagaaaaat

SEQ ID NO: 910162 - DNA, 603 bp, Homo sapiens
gactatggaagtaatgcttttgtttagcggggaatagtcttcactgaggtaattaggacatatttttataatattaaaaatttctttttttgtatgttaatttatgtcagctctagaayagaaattgttttcaaagaaaaattcaatttattcaaagaaaaattttccatgtcatgccttctattaaaaataacataaaagcaagaaagaattaattagaaagttaaaaataatgcataaaagtaaattaaccataattctactactgaatttataaaattactcagaattttttgaattttcatccagattttgaaaactgatatccttaaaacatctaggtcattatactgttcaaaaattttttaaaaatcatgattcttttttaaaaattatatataacagaacagtatattacagagaacatgacttccagaataataagacctagatttaattctactactttctaattatgttagtgattgatagatttctaatcacttatttactcactggtaaaataagaaaagaatactttctaagcatatcactgtgattaaatgaggtgttctttctaaagagtacatatacaataggaaa

SEQ ID NO: 910163 - DNA, 654 bp, Homo sapiens
ttgtctatgtagtaatagccattctaactggggtaagataatatctcattgtggttttaatttgtatttgattagtcaggctgagcattttttcaatatacttgttggccatttgtatatttttgagaaattttgatttatgcactgtcttcactttttaatgggattattagtttattaacttttgggttatttgagattcttgcatattctggatattagtcactagttagatcaatagtatataaatattttctccctttcaaaagattttctctttaatttattgattgtttccttggctgtatagaagctttttagtttaatatacttccatttttttaatttcgcttttgtttcttgtgcttttcagtcgttagccataaaatatttgccttgacaaaattcctaaagtgattttcctatgttttcttttactagtttaatagttttaagtcttacatttaagtttttaatccatcttgagttgatgtttgcatatagtaagagatagcagtccagtttcgtttttctgcatatggacatacactttttcagcataatttattgaatagggtgtcttttcttcaatgtatgattgtggtacttttgtcaaaaatcagttggyggtaaatatgtagatttctttctgag

SEQ ID NO: 910164 - DNA, 570 bp, Homo sapiens
tgtttcctgactttttaatgatggccattctacctggygtgagatggtatctcattgtggttttgatttgcatttctctaatgactagtgatgatgagcctttttttttcatatgtttgttggccacataaatgtcttctcttgagaagtgtctgttcatatcctttgcccattctttgatggggttgttttttcttgtaaatttgtttatttcccttctagattctgggtattagccctttgtcagatggatacattgcaaaaattttctcccattctataggttgcctgttcattctgatgatagtttcttttgctttgcagaaactctttagtttaattagatcccatttgtcaattttggcttttgttgtcattgcttttggtgttttagtcatgaagtccttgcccacgcctatgtcctgaatggtattgcctaagttttcttctagggtttttattgttttaggtcttatgtttaagtctttaatccatcttgagttaatttttgtataaggtgtaaggaaggggtccagtttcagttttctgcatatgctatggctagctagt

SEQ ID NO: 910165 - DNA, 629 bp, Homo sapiens
atcttatgcctgttcattctcattccagtactgccttatttcatatttattttttgcagtatgccatttttattctcattcctttgtgcataattttagatactttatttgtggttaccttggagattaatgttaacattctaagttgataaagacataactggcattgatattaacttagcttcaatagctacaaaatatactttcatacacctcaatccttcctttcccttcatactgtggttgtcgcgaattacatcattacatattgtgtacccactgacatggatttataattatttgtatgcattgtattttaaatcacttggggaatacaaagagttatgaaccaaaaaatacgatagtattggcttttatatttacccattagttaccttttgctacagttttacattttttcctataacttcaaatttctctttagtgtaggctaaaaaacactccttttagcatttcttatagggcagctctactagcaattaccttcctcatcttttgcttayctgggaatgccttcgtttcttcatttttgaaggacagttttgtggaacaaagaatttctggttcagaggttcattttttttttctttttcagcactttaaaaatg

SEQ ID NO: 910166 - DNA, 600 bp, Homo sapiens
atttattcaataggaagtcttttccggattgtttgtttttgttaactatgtcgaatatcaaatgtttgtaggtgtgtggctttacttctgtgttcttcaacctattcccttggtctatgtgtctgcttttgtgccagtaccatgtagttttggttattgcagcgttgtactatagtttgaaatcaggtaatttgatgccttcagctttgttctttttgcttaagtttgctttgactattaagccacctttatggttccatatgaattttagcatagtttttaattcttttcattaccatactttaatttctgggatatatatgcagaacatgcagatttgttacatagatatacatgtgtcatggtggcttgctgcacccatcaacctgtcatgtaggttttaagccccgcatgcattaggtatttgtcctaatgctatccctccccttccccccgactccccgacaggcccyggtgtatgatgttcccctccttgtgtccatgtgttctcattgttcaactcccacttaggagtgagaacatgaggtgtttgggatagtatttttctaactttgtgaaaagtgtcattagtagttttat

SEQ ID NO: 910167 - DNA, 579 bp, Homo sapiens
gcaaaataaattccagtaatgtacagtatctcatatcctgcaaagtcaccgtgcagacagtgctgccaatcctttgcaggaagtggggttagagtggaggagtgcttgactttcaggaaacattctatgcaaaagcaattggatcagggtcacctacaagaaagtatggtgatcattttctaatacttataaccaggagttagaacatgtgacaatggatcaggccactaaaaatgatcatattacttgatatggtttggctctatgtccccaccaaaatatcatctctaattttgtaacaatccccacatgttgtgggagggacctggtgggaggtaactgaatcatggggtcaggtttttcccatgctgttcttgtgatagtgaataagtcccataagatctgatggttttataaagggggttcctctgcacatgctctcttgccttctgccatgtaagatgtgccatyatcctccttgatttctgccatgattgtaaggcctcccagccatgtggtactgtgaatccattaaacctgtttcctttataaattttccagtattgagtatgtcttttg

SEQ ID NO: 910168 - DNA, 611 bp, Homo sapiens
gaacttgttgaaagttgatcgacacctttggaaaggtgaaatccttttctgttcccattaagtgttgttaaggccattagcagaaattggaatagagaaatatgacctttcatgtggtagattcagagactgagaagatggacgagatggaaatgtactggcagcttataataagcacctgggtggggagtgataactaaagattgaaaattgacaaatgggttaaactggcagagatcaagacagagagggatggggtgcagtttgcatgcagaggtggtgagagaaaggaatgagagcatcaataatccagcagggtcgcccatgctgagggtcagatatggattactcagaaggtaggcaaaatttgctaggtgggagagtagggagatttggttacaagatgaagagatcaatttatagctgttgagaggagtaaatgatctagtcctccccagggagttaggataccacagataaatactccagactaaaatcaggaggtctgagacatttgtttrttcagttgcaaagtgactgaatgtctccaaccctccccttcccacagttggttatgtccttccaagtgactaacgtgaaatttctttgaa

SEQ ID NO: 910169 - DNA, 637 bp, Homo sapiens
tttgcattaacctcatcatattccttctgaacataactctctgttctggccagatttgcttcattattatattttgtttactagtgtctccatgtttttcttaacagaatctgtgcttcatttttggaatattttctctgctgatccattggaaccacatctttcaaaacctagcttctaactctttatgtttaagaagcgtttcttatgtttttaattgacaaatgataattgtatatatttatggggtgtatagtaagtttcaatacatacaatgtatagtgatcaaatcaggttagttaacatgtttatcacctcaatcacttatcattggtttatgttgtgaacattcaaaatcctcttttctagctacttaaaacatataataaatgatttttattatagtcaccctacagtgctatacaacactagaacttatacctcctatccagatgtaattttgtatcctttaactaatctttccctatcccatgtacccttcccagcctctagtaaccattattctagtctctacttctatgagatgaatatttttagcctctgcacatccattcacacccagattactctactgatatctgttgacttgccagarctgtcttaaattattttaata

SEQ ID NO: 910170 - DNA, 455 bp, Homo sapiens
agttccacagatctctaggacaagggcaaaatgccaccagtctctgctagcaagagtgacctttactccagtttccaacaagttcttcatcttcmtctgggaccaccttggcctggacttcattgtccatatcactatcagcattttggtcaaagccattcaacaagtctctaggaagttcttacccttcccacatcttcctgtcttctgagcccttcaattttctagaaagttccaaactttcccatattttcctgtcttcttctgggccctccaaactgttccaacctctgcctgttacccagttccaaatttgcttttacattttcaggtatccttatagcagcaccccactctctgtggtaccaatttactgtattagtctgttctcatgctgctataaagaactgcccaagactgggtgatttataaaggaaagaggtttaattgactca

SEQ ID NO: 910171 - DNA, 537 bp, Homo sapiens
ctagcaagagtgacctttactccagtttccaacaagttcttcatcttcatctgggaccaccttggcctggacttcattgtccatatcactatcagcattttggtcaaagccattcaacaagtctctaggaagttcttacccttcccacatcttcctgtcttctgagcccttcaattttctagaaagttccaaactttcccatattttcctgtcttcttctgggccctccaaactgttccaacctctgcctgttacccagttccaaatttgcttttacattttcaggtatccttatagcagcaccccactctctgtggtaccaatttactgtattagtctgttctcatgctgctataaagaactgcccaagactgggtgatttataaaggaaagaggtttaattgactcactgttcctcattgctggggaggmctcaggaaacttacaatcaaggcagaaggggaaggagaagcaggcaccttcttcacaggacaggaggataaggtgagtgctgagagaaaggggaaaccgcttacg

SEQ ID NO: 910172 - DNA, 661 bp, Homo sapiens
gaaaatgtggaagcaactttggaactgattaacagacagaggttggaacagtttggagagctcagaaagacaggaaaatgtggaaaagttkggaaatccctagagacttgttgaatggcttttaccaaaatgctgatagtgatatggatgataaggtccaggctgaggtggtctcagatggagatgaggatcttttgggaactggaataaaggtgattcttgctatgttttagcaaaggtactggtggcattttgcccctgccctagagatctgtggaactttgaacttgagagagatgatttagggtatctggtggaagaaatttttaagtggaaaagtgttcaaaaggaagcagagcataaaagtttttaaaaattgcagcctgatgatgagacagaaaaaaataaaaacctcaaaaaaaaaaacattttctggggagaatttcaaacaagctgtagaaatttgcataaataacaaggagccaaatgcgacttatcaaaacaatggggaaaatgtctccagggcatgccaaataacatcatggaagcccttcccatcataggtccaaaggcctagaagagaaaaatggtttcctggggtgggtccaggacccccctactgtgtacagccttgggacttggtgccctgcatcctagctgc

SEQ ID NO: 910173 - DNA, 661 bp, Homo sapiens
gaaaatgtggaagcaactttggaactgattaacagacagaggttggaacagtttggagagctcagaaagacaggaaaatgtggaaaagtttggaaatccctagagacttgttgaatggcttttaccaaaatgctgatagtgatatggatgataaggtccaggctgaggtggtctcagatggagatgaggatcttttgggaactggaataaaggtgattcttgctatgttttagcaaaggtactggtggcattttgcccctgccctagagatctgtggaactttgaacttgagagagatgatttagggtatctggtggaagaaatttttaagtggaaaagtgttcaaaaggaagcagagcataaaagtttttaaaaattgcagcctgatgatgagacagaaaaaaataaaaacctcaaaaaaaaaaacattttctggggagaatttcaaacaagctgtagaaatttgcataaataacaaggagccaaatgcgacttatcaaaacaatggggaaaatgtctccagggcatgccaaataacatcatggaagcccttcccatcataggtccaaaggcctagaagagaaaaatggtttcctggggtgggtccaggacccccctrctgtgtacagccttgggacttggtgccctgcatcctagctgc

SEQ ID NO: 910174 - DNA, 608 bp, Homo sapiens
catacaaaaatcactagcattcctatatagtaacaacagccaagctgagagcaaataaggaatgcaatctcacttacaataaccacaaaaggaataaaatgcctaggaatacagctaaccagacaggtaaaagatctctacaatgagaattacagaacactgctcaaagacatcagagatgacacacaaaaataaggaagacattccatgttcagggataggaagactcaatatcattaacatggtcatactacccaaagcaatttttaaattcagtgctatttctatcaaactatcaatgacattcttcaaagaactagaaaaaaaatttttaaattcatatggaatcaaaggaaaaaaaaaaagcccaaatagtcaagacaatcctatgtaaaaagaacaatgctggaggcattatgttacctgacttcaaactatattacagggctacagtaaccaaaacagcatggtactagtgcaaaaataggcacatagacaaagggaacagaatagggagcccagcactaaggttgcacacctacaaccatctgatctttgaaaaagctgaaataamaagcaacagagaaagaattttgtattcaataaat

SEQ ID NO: 910175 - DNA, 637 bp, Homo sapiens
tcttgaagacagcaaacaaataggtcttgcttctttatcaaatttgccacactcccttttaattgggacatttatcctgtttaaattcatagctaatattgatatatgtggatttgaccctgtcattgtgttgttagctggttattattcagtctcatttgtgtagctgcttcaaagtgtcaccggtctacatatttaagtgtatttttgtagtggctggtaacgatctttcctttctacatttagcactcctttcaagacctctcgtaaggcaggtctggtggtaatgaattccctcagcttgtctgaaaaaaaaggccttatttcctcttcacttatgaagcttagcttgactggatataaaattcttggttggaaattattttctttaataataatcaataccttctggcttgcaggttttctgctgaaaagtctgctgttagcctaatggggttccctttgtaggtgacctgccctttctctctagctgccttcaataatttttctttaattttyactttgaacaatctaatgactacgtgtcttgggaatggtcatattgcatagtatctcacaggggtcctctgcatttccagaatttgaatgttgacctctctagggaggttggggaatt

SEQ ID NO: 910176 - DNA, 641 bp, Homo sapiens
agcttcttgcaagttttacactagcatgctgcttttgaaattccaggtgttcaggctacaaggaacaaggctgagtgtccaccagtgctgagatttccccttcgawggtagacaagactggggccattgttactatgacaagatgcgctgtggattaaaggggaggaaaacaatgtgccttattgtctcattccctttcctggagaagcccaaagaaccacacaagacatctgaagactgaagggacagccatcattcaatcacagcattagactttgcatgtctatgacccaatctgtttcaatgattcccccagccatagttccactgcatctggctttgaagcatattccctctccctttccctgactcctgagaatacctcaaatacaaatcaagctttttgccagttacggtttctcattttgttagcttgttcaatatttgttgagcacctattatgtaccaggaaatggtctgagtgttggtctcctaagaccaaatccccatcctttggctcatggagctttgactcatggagatgagagaacataaacaaattagtgaatgacataatttcacaaatgctctgcacagcaagggacgaaggcaatggctgggacaacaatttggatatgaaa

SEQ ID NO: 910177 - DNA, 605 bp, Homo sapiens
gaatatatctttcctgacttgagaaaaaaatgagaatatctttcagtatcagggctccttggaggtcagggacattgaataatggatggtattattcccattatttatgtgaaaaaaaacactgagattaggtgatttttgtgtaaggttacagaatcaatccgtacgtttttaacctcaccttgagattctgagtcttgtacttttccctgctgggatcctcagtgagtctatgttttctcaacctctgaccagaggctatgcctgtgccctgtccttgtttttcatatggtaaggaaaatgtcctcctggatcctaggatctgaccacatcttattaatagagttcaaggcagtagaaagagcaaggtctttgaaagtagacagaagtgcattcaaatctcagctcccaggtccacataagttgtgagacctcattatgcaggagtaaaaacacgccccaaatcttagtggcttgaaaaccaccaatatttrtttcccactcactttatatatccatgggcaggttagaaggcccaagatatgaattgggataatatacctgagaggacctatagggctatgcttattgaatcgtgtggatga

SEQ ID NO: 910178 - DNA, 628 bp, Homo sapiens
ttcctttctctctagacctgagaatagagggaattggtaggaaaatgccagcgggcyggtttctaattccaccaagaagacaaggaaaatgggttgcaacagcagccagaggacagaaggccagggtagccggtcaggtcccagggatcaggtagaatttcattactcacaggactttttttttttttttcagcacaaaataaccttctagaaaacccagctgaggagaaagttcacaaaggggtcacataggtagcccaagctcttcgaggtcaatgcatggtgtgcctcttgatgcagcctggcactttcattaacgtatttaatcatgcttttatctttaatcatcaaatggcttaatagcatgcattgtattcccaggcctgaaataacaatggttatgtggctctgtgataaatgtttttaataaaatcagtaattaccctttttgtgtgtgtgtgtgtgtgtgtgtattatattaacatctttccatttccttaattttggcttttagatatgcaaaaaaaaaaagactaaggtagaatactcaaaatactgttttatgtttggttttgtttctaggagcgcctgctgaatagcaggaaaggtgaattctaagctgtggatt

SEQ ID NO: 910179 - DNA, 606 bp, Homo sapiens
ctgtaatttgacattttaatatttcttattatagaaacattggcaaattctcatatgaattctaagattttatctacataataagctagcattctgagaatgaattcgccttagtcatcatgtttttctttgcataaacctggctcttgcaatttttttgctaataaattgctaactaactttggtttctgaatgtgcataagaaaataaagctataatttcctttctcatgctgtccttatctacttttggcacaaagtttatgtttactaagtataattaatcagagaaagtttcatttcttttttgtaagattttatgtaagattagaatttccttttcctcaaatgtttggtaaaacttgcctattaaatcatttgtacctgatgttttcattttggggagattgttgacagattataaagtaatcctttaaagattacaggactgctcagatttttttttcactaagttttaatatttttytacaattcactcatttcaggttaattctttagggtaattagcatagagattataatattatcttttacatcactgatgcatttataatcgtattttttcacatataatatggcttatttg

SEQ ID NO: 910180 - DNA, 663 bp, Homo sapiens
ctcaaatgcttacaaacaactcaaccagttacaatactctggttccggttctctgcaaattatagcccaagtcacagcgaagaagctacctgaagatgtctttcatcatagttgtctcccatagaatccatgggaatgccaacatccctggcatctggtctctgaaaatccacaaggcatcagattcacacagaagtgagaaggacaacctgctctaatctgtacccacctttgtgcatggggcttcagagagtgcactatataataatgcctcaattgcaggaggttctactcaaacacagagtctaactcacagttgtgtttagacccttgctctccctctgtttctttcttcttgtcatggaattttaatcatgatatttctcatccagtctaatgcatcattctactagaggaaaaagtgtattactctcaaggatccaatctaatgcatcatcctactagaggaaaaagtatattactctcaaggaataatatgtgcagagatatgactccacctgcaacatagccytacagtagtagtttccaaatgcaggtatgtacaaggaccagggcttttccatgacaaagttgccatcaatccagtgcaaaattagaaaaaataatgtgactgtcatgagttagtaaaaaatcataaattta

SEQ ID NO: 910181 - DNA, 600 bp, Homo sapiens
caaacacgttattttcagaaaataaaaggtcttcgtcattaggtacaaatcataaagggattatctacggttactacactgtaacaactttttacatattgtattatagaacaagcttttgagaagacaaagcaacacatcagcagtttaaccaattgtctttctcttttaacaggctggtctacattagattagatataaaaggcccaggtattacttgtgttcgatcttagccacatggctgagaaacatccaggtacatttaaatcagtgacaaaagaaaacattatcccttagtaaaattacataaaataggaaacatctcttactttaagagcaaccatggtacttgttcctatggtgaaaactgatgttatctcgattagttaattattcatcccaacacctggtcttgctcccttttccacctctagctatgttaacactagagttcagtaatttgttgataaagaatcttaactgcagtatctaacagatcttagtgattaagcatatgacttacyctttgtacagataagtaaactgaggccaaaagaactgaggtatcttattaaaaatcagagagctagttagttgaaa

SEQ ID NO: 910182 - DNA, 565 bp, Homo sapiens
cataacataataacatagatacacacatgtacacatacacaaacatatagactgatgtaaccagatcttatgacttttcatttaaaaaattttaaccaggccaggtgcagtggctcatgcccataatcccagcactttgggaggctgaggcgggtggatcacctgaggtcaggagttcgagaccagcctggccaacatggcataaccccgtctctactaaaaatacaaaaattagctgggcgtggggcatcgtggcgcccggctgaggcacaagaagcacttgaacccaggaggtggaggttgcagtgagccgagattgccccgctgcactccagcctgagcaatgaagtgagactctgtctcaaaaaaaaaaaaaaaaaagtttttaaccatgaggcagtaaaacagagtaatacaaaaatacaaactcactggtttatctccacyttatattgttatccaaattgtgtttctggtgagaaagggataagttgagttgacctacataacaaaggctaaatctttttaccaatatttgtggaggaggttttttaagatttttttt

SEQ ID NO: 910183 - DNA, 645 bp, Homo sapiens
gtccacacctctcccatgtcaagggaacccactcatgctcacacaccagagcacttccagatgactggcagtacaagaagccttctcccagaatctctacctgtgacttgytgtgggggcctgcctctcactgcagagaaggcaaagcaggaagaaatcacacaaaacagcaagggctgtaaggagagcatcccttcttccgagtcagcagcaggtccaaagagtgttttaaaagtgcccaggacatagtgagagtacaatcaactccctacacagagtatcattgtattggttctcctaagacggaatctttccatcctcttttccaaatatgctgcccaaatagttcccctaaatatttttagttccagtttcattgtactctaataataatgtaatattcaaccactatattttctatttatattgaataatgtaatgaatgcttttcaagtaagaagatcttgtggatggagtctgtatcaggccctgtattacacgaatgagcaaaattgtgtcttttcctcattcttaagtttggcttagctattgctacgtgtgataaacaaatcgatgacatgtttggctgcttaagtttacaaattcatgtaataaactctcataggacagaaaaagactgcaaat

SEQ ID NO: 910184 - DNA, 622 bp, Homo sapiens
agtgtataaggtctattttcaagcaattcatagaatggtcaaaatatattaatctcacagccagagggagacaacacacagattaaattgtcaggtscaaacagaatagggtcttatgagtgttctgtaaaaacaggtagaaataaacaggcgccatatttaaagagaatagtaacattaatgaactataatctccattacatttcagatgttggagttataataaaaatttatatagaagtatctagtaccagcattgatagtccagagctatcttggtccagtagctgcagccgcaagacagcgtgaggatagagtagagtttattattagtgttacaagaatttttgtgtttgaataaaatgagaagaccaaaaccaaagcaagaacaaatttatgcaaatgtcacatgtttcatttaaattggtcctagtattttatgatccaaagagaattaatctttttactttaaaatactgaagatgagatcagtgatttattcctaatggagagagatacacaatgtactcttgaaacaggtgactttggacatacagtcagatctaggaagcacacaaaataaaattgagaccatctgggaaatgtttcttaagcaaaaatg

SEQ ID NO: 910185 - DNA, 579 bp, Homo sapiens
acagtaaaaatataaaaatgaagcaagtattcaatgaatgattctggcagacccaaacataaaaagcaattgtacattatcttaatactctggcctatttctgtaaaatttttcaaaaatctcataaatataaagaatgctatttcagtaaattcattcagtgaaaccaaatgcatttatttgacatcttgttttctaagtaaattaaaactaatttgaatatttttggtacttctgaaattcaagtaacttaatactttctatggttactaggaactgtagctaattatctatgtattaaaaaaacaattaaccagggtaatgatgttcctcctatgtcctcatttatttacatgaaagtgccagtaccttacaatctttttaatttattttccttattcatttgtttaaacaatattactgagcattaaatatatacaagtcaatatcctagtccaatgtaaagaggagtaagagatgatttgttttsaacaagcttgtaatttaacagaggcaataagttaggcagccacattgccacaaaatccaaatagaatatctgagaagtcagtagagaga

SEQ ID NO: 910186 - DNA, 579 bp, Homo sapiens
acagtaaaaatataaaaatgaagcaagtattcaatgaatgattctggcagacccaaacataaaaagcaattgtacattatcttaatactctggcctatttctgtaaaatttttcaaaaatctcataaatataaagaatgctatttcagtaaattcattcagtgaaaccaaatgcatttatttgacatcttgttttctaagtaaattaaaactaatttgaatatttttggtacttctgaaattcaagtaacttaatactttctatggttactaggaactgtagctaattatctatgtattaaaaaaacaattaaccagggtaatgatgttcctcctatgtcctcatttatttacatgaaagtgccagtaccttacaatctttttaatttattttccttattcatttgtttaaacaatattactgagcattaaatatatacaagtcaatatcctagtccaatgtaaagaggagtaagagatgatttgttttcaacaagcttgtaatttaacagaggcaataagwtaggcagccacattgccacaaaatccaaatagaatatctgagaagtcagtagagaga

SEQ ID NO: 910187 - DNA, 614 bp, Homo sapiens
aaaccagaatgcctcttctcctccaaaggatcacaactcctcgccagcaaggaacaaaactggacagagaatgagtttgacaatctgayggaagtaggcttcagaaggtgggtaataacaaactcctccgagctaaaggagcgtgttctaagccagtgcaaggaagctaagagccttgaaaaaacgttagaggaattgctaactacaataaccagtttaaagaagaacataaatgacctgatggagctgaaaaacacagcacgagaacttcatgaagcatacacaagtatcaatagccaaatcgatcaagcagaagaaatgatatcagagcttgaagatgaacttaatgaaataaagcatgaagacaacattagggaaaagagaatgaaaaggaatgcacaaagtctccaagaaatatgggacaatgtgaaaagaccaaacctatgttttattggtgtacctgaaagtgatggggagaatggaaccaagttggaaaatgctcttcaggatattatcaaggagaacttctccaaactagcaagacaagtcaacattcaagttcagaaaatatggagaacactataaagatacccttagagaatagcaaccccaag

SEQ ID NO: 910188 - DNA, 644 bp, Homo sapiens
ggtgttcacattccattagctcattttataccataatgattttttgaattaagcaggaaagtgggaayattactttcattttatttaaaaaaaaaaaaaaaaaagaggagctcagaaaaatcaggcagacttcccaaagttcatctggcaaggtagtagttaaaatgatgttagaatagtggttttatatgctcttcttgctacaccgcaatatactcgaatgttctttttcaccttaacatgacaatgacagtcactctcttaaaccaaaaatgatgactagaacaagaatttagggccagaagcaaccatagtagattcaggcttgtgtcttattggagtttaaacttccaactagaattaatattttggttagtaataaagctataacccaaactccagcctgttactagatgattttcagcctttgggatatgtcccattccaatcaagctgttccttttcctgtcttgaaatgtgctaaccatatttaaacatttagctacaacgacttcaaccagatgctaaattaaatggaaaaatttgggaatttgatatttccctttcccaaatgtctaattttgtacccttgctacacttcttacacttacaattcacttcattttgtacttcacctttgttgt

SEQ ID NO: 910189 - DNA, 530 bp, Homo sapiens
cgctacctgacttcaaactatactgcaaggctacagtaaccaaaacagtatggtactggtgccaaaacagagatatagaccaatggaacagaacagagccctgagaaataataccacatatctacaaccatctgatctttgacaaacctgacaaaaacaagaaatagggaaaggattccctatttaataaatggtgctgggaaaactagctagccatatgtagaaagctgaaactggatcccttccttacaccttatacaaagattaattcaagaaggattaaagacttaaatgttagacctgaaaccataaaaatcctagaggaaaacctaggcaatatcatttagcacataggcatgggcaaggacttcatgtctaaaacaccaaaaggaatggcaacaaatgycaaaattgacaaatgggatctaattaaactaaagaacttctgcatagtaaaggaaactaccatcagagtgaacaggcaacctacagaatgggagaaaatttttgcaatctacagatctgacaaa

SEQ ID NO: 910190 - DNA, 437 bp, Homo sapiens
tattggacagatctaaatatagagttttcctgaaacttaaagacgtttcatgagactagcacttagtaagtgtggacaagagaggaatgagatgaagctggagtgggacaggcagtgatagatcmcacagggcctggtaggcttgggaaggagtttggattttatactaatggcattaggtcacctcctacaagaagtctttcctaatgtcccaaaaagagttaaccactccatctcttgtgccaccatggcttttgatgaaaaacccaatatggcaccccggattctttattatatcttttagtatatacatggctgatttctcctcaagggcagtgaatgtgtctttattcatctctttattcccaaggcctggcacacctcttagcatataataggtactatatatttattggaagagtgaatgagtgggggtg

SEQ ID NO: 910191 - DNA, 605 bp, Homo sapiens
ggaggctgagctccaccgctctgagcagccccttcccccttccctgtgtgtgactgccgggctcctgggtcccagctccctggccagcagtgcgggctgcagaggaagactgatctgggttcgacttatcatcctgttgcctcgcagccacgtggccttgggcaagtcacttcacctttaggagcctcggtttactcatctgtgaaatgggcatcacagagcctccttcaaggcattgctctccagattaaaggggaagctatatagtccctgcacatgagcatccctcgcttctggctgccagtttccgcagcattccctggccggggagcagccatccctgccctctcagactctccctctgcccacctggaccccacgtgggcatccactcagcatctcacattccccacggcccaggaacatcaccaagtcaggcggggctgagagaatggctcatagcaaaagcagaacrtggagaaaatcagatgcttttcttaaggggagctttctaatgaacgttcttattttactctttaaagctttcaaataaacaataaatataactccattcaaaacacaaattaacttctatgttataatat

SEQ ID NO: 910192 - DNA, 605 bp, Homo sapiens
ggaggctgagctccaccgctctgagcagccccttcccccttccctgtgtgtgactgccgggctcctgggtcccagctccctggccagcagtgcgggctgcagaggaagactgatctgggttcgacttatcatcctgttgcctcgcagccacgtggccttgggcaagtcacttcacctttaggagcctcggtttactcatctgtgaaatgggcatcacagagcctccttcaaggcattgctctccagattaaaggggaagctatatagtccctgcacatgagcatccctcgcttctggctgccagtttccgcagcattccctggccggggagcagccatccctgccctctcagactctccctctgcccacctggaccccacgtgggcatccactcagcatctcacattccccacggcccaggaacatcaccaagtcaggcggggctgagagaatggctcatagcaaaagcagaacgtggagaaaatcagatgcttttcttaaggggagctttctaatgaaygttcttattttactctttaaagctttcaaataaacaataaatataactccattcaaaacacaaattaacttctatgttataatat

SEQ ID NO: 910193 - DNA, 688 bp, Homo sapiens
ttctttgagcatgatgtttgagcatcacgtagtgctaaacaatttttggattttggagcattttggattttcagattaggtgtgcttaasctgtactctttttttttgccctttcagtttttaatacttaatgtttttgtattaaattctgtgtattgtatcatatttttgtgataatggcagagtagtttcaagtggaccaactcctctgtagataacagccagaaaattaaaaaatgtaaagaaaccaataacctgaaggcataggagggggaccaaaaataggcagaaactggagagggagaagagttagaaggcggagaacgctggggaagtttgctgtttttccaacttgctaccctgaatccagccagctctacagtaattggctaaaagtgggctgaaaccacagtcttaactggcctgaagaaccagaaaacaagattcagagctaccacagcactggaaaggggagaaatctggttaaaaaacaaaacaaaacaaaacaaacaaacaaaaaaactcagagaaaaccatacctgttatcatcatagtcaaattgctgataatcaaacataaaaatgaaaatcttgaaagtacccagagaaagatgacccattctatataagggaagaatgagatgaatgatgactgacttctcatcagaaacaacagaggctagaggata

SEQ ID NO: 910194 - DNA, 307 bp, Homo sapiens
gaattcatgccttccctttccattttgttgatcatcactgttttagattcttaacctctataaactcttataaaaattgaccactgctggcygggcacggtggctcatgcctgtaatcccagccctttgggaggctgaggtgggcggatcatgaggtcaggagatcgagaccatcctggctaacacggtgaaaccccatctctactaaaaatacaaaaaaattagccggtcatggtggcgggcgcctgtagtcccagctacttggaaggctgagacaggagaatggtgtgaacccggaaggtggagc

SEQ ID NO: 910195 - DNA, 572 bp, Homo sapiens
aagtgatgccatgggacttccaagatgaggtcataaacaggagacagttttctcctgcagctcccctctgcatctctctctccttctccttctccttctctctcacccccctctctctttccaattacttctggaatacatccatcatgctatgaggaagcccaaaccagcccatgctgaaagactacacagacaggggccacacagagaagaaatgagtttgcaaccgatagtcaacatcaacctctagacataagaataaatgggactcgagatgattccagctccagccttcaagtcttccagcagagattctaggaattgtggagctgagacaaaccattcctgctgttccctgtctgaattcctggccctcagaatctgtgagcatctaaatggttgttttacaccactgagttccggggcaatctgttatacagctgaagcaacagaaacaagactggartacaaaaatagagactcaaagaaattgtgaatgcgtagaaattaatcagaggggccattaaactcttatctctgtataagcaacgaccttgaagtcataactcatc

SEQ ID NO: 910196 - DNA, 572 bp, Homo sapiens
aagtgatgccatgggacttccaagatgaggtcataaacaggagacagttttctcctgcagctcccctctgcatctctctctccttctccttctccttctctctcacccccctctctctttccaattacttctggaatacatccatcatgctatgaggaagcccaaaccagcccatgctgaaagactacacagacaggggccacacagagaagaaatgagtttgcaaccgatagtcaacatcaacctctagacataagaataaatgggactcgagatgattccagctccagccttcaagtcttccagcagagattctaggaattgtggagctgagacaaaccattcctgctgttccctgtctgaattcctggccctcagaatctgtgagcatctaaatggttgttttacaccactgagttccggggcaatctgttatacagctgaagcaacagaaacaagactggaatacaaaaatagagactcaaagaaattgtgaatgcrtagaaattaatcagaggggccattaaactcttatctctgtataagcaacgaccttgaagtcataactcatc

SEQ ID NO: 910197 - DNA, 641 bp, Homo sapiens
ggaatcaccttggaactttaaaaaaatacagatcctgggcccacacccagagaatctcacataattaactcagggtgcaacctgggcatccgaatttctaaaagctccatggatgattccaagatgcaaccaaagttgagaagcactgtctagggctttgatttaatcttccatatttattcctaaagaaggagatatacccagacaccatttccttaggcagccacacagaccactggattattaatttttttcaaatttggttccagaaacatttgttaagcatctactatgttcctggaacattgttagccactgaataagcactgttcctgtcctcaagcagcttgaagtctgggtggccatacagtgagtaaacacagtgcttgagaaggccacaggagcggtgaggaaagaaacatcacccaaatgcaggaatacgttggaaagaagtgggtgcagggtcacacctaaagcacaacgtggaaaaatgagtagcagtcttctctagtagagaggtagggggaaggtggatagcccatgctgttcagggttgaacagcatgaacaaatgtgggttggtgaaraacttctagggagaagggacaaaatgaggagggaagttgcctataggcaggacta

SEQ ID NO: 910198 - DNA, 520 bp, Homo sapiens
aatacctcagaacagggaactgaggcacagagaggtctctataactttgtcaggtttgtgcatcttctaagtaggacttgaacccccatytttatgcaccaggcccagtgttcttggtcactccaatatttctatattgtctcatctcaatacaggtatttgcctacatagtcagtctgttggttatgagtgcaactcacactgcaggttcttgttaaaatccaactgagattcagggggtttcgctatgcagatggtgaacaatgggtcaaacatttaaactgtcaataaatgattactcatttctctatggtctttggcaggaagatgtcaaaaactgtctttttcatagtacatttcccagcatcttgcctccagggtatgacagtagatcttcagggatcaagggaatctactgtccacaccaagctgaggaagagaatactctgccactggcctcataactaggcgcaccccggaaagcagtcaactgaaagtactgtggaaattaaattgttaa

SEQ ID NO: 910199 - DNA, 595 bp, Homo sapiens
tcttgggaggttgtatgtttccagggatttatccatttcctctagattttctagttttatttgcatagagatattcrtagtagtctctgaggatctttcatatttctatataattggttgtaatgtctggatcatctcactgtttttcttttttaatctagtggcctatcaatgttgtttatcgtttcaaagaaccaacttttggtttcattgattcttcgtatggatttggggtctcagtttccttcagttctactctgatttttagttatttctttttttctgctgcctttcaggttagtttgttcttgtttttctcgttcttctaggtgtgatgttagatcatgaagattttttctatttaggtaggtgtatagcactatgaactttcctcttaatactgcttttgctgcatcccaaagatttttgtatgttgtgtctctgttttcatttattttaaagattttttaaatttctgccttagttttattgtttaccccaaagtcactcagtagcaagttgcttaatttccatgaaattgtgtggttttgagagatcttcttggtattgatttctgtttttatttcactgtgat

SEQ ID NO: 910200 - DNA, 671 bp, Homo sapiens
gggctattcttggcacttagaaggctgcatggatgtacagggagatctaaaacggcctggcggacattaaaagctgggagtatttgagaattgcctgaaaaccacacacarattcatcagaaatcggtggatgttttctgttgtttggatatttttgttccccaaatacgctgaaatttgtttccaaatgttggaggtgaggactaatgggaggtgtttgggtcatgggggcagatccctcatgaatagatttattcccaccttggagggggctaagaagattgagttctcaatattacttcccatgagagctggttcttaaaaatagcctagtatctcctcctcctctctcttgcttcctctctcaccatgtgatctctgcacatgccaacttcacatcagcttccgccatgagtggaaacggtatgaggctttcaccagatacctgatcttccagccagcagaattatgagccaaataaatattttttatttataaattacccagccacagatatttctttctagcaacactaacattaagtcagtgctttcctgactcaagttattggagtaaaacctcttaccatcatttgctgaccaatcatttactgaccattaaattgtgtaaacacaagggtgacccctaggaagccaggttaaaaataaaaa

SEQ ID NO: 910201 - DNA, 589 bp, Homo sapiens
tctacaatgagaattacaaaacactactcaaagaaatcaggaaagacacaaataaattgaaaattattccatgctcacggatagaaagaatcaatatcattaaaacggccacactccttaaagcaattgacagattcaatgctattcctattaaactatcaatgacattcttcacagaagtagaataaacacttaaaaatccacatgaaaccaaaaaggaacctgaatatttaaggcaatcttaagcaaaaagaacaaagctagagccattgttatccaacttcaaactatactacagggctacggaaacaaaaacatcatgccattgctacaaaaacaggcacatagaccaatggaacagaatacagagcgcaaaaataaggctgcacacctataaccacgtgatcttcgacaaagctgacaaaaacaagcaatggggaaaggactcattcactaaatggtggtgggataactgtctagcaatatgcaaaagattgaagctgaactcctctcttacagcatrtaaaatatcaactcaaggtagattaaacacttaaatgtaacacccaaaactataaaagctctggaa

SEQ ID NO: 910202 - DNA, 609 bp, Homo sapiens
ggagtggtgagagagggcatccttgtcttgtgcccgttttcaaagggaatgcttccggttttgcccattcagtatgatattggctgtggatttgtcataaatagctcttattattttgagatacgtcttcaggacataggcattggcaaggacttcttgactaagacaccaaaagcaatggcaacagaagtcaaaattgacaaatgggatctaattaaactaaagagcttctgcacagcaaaagaaactgccatcagagtgaacaggcaacctacagaatgggagaatatttttacaatctcctcatctgacaaagggctaatatccagaatctacaatgaactcaaacaaatttacaagaaaaaaatcaaacaaccccatcaaaaagtgggaaaaggatatgaacagacacttctcaaaagaagacatttatgcagccaacagacatatgaaaaaatgctcatcaccactggccatcagagaaatgcaagtcaaaaccacaatgaaataccatctcacaccagttagaatagcgatcattaaaaagtcgggaaacaacagatgctggaaaggatgtggagaartaggaacacttttgcactgttggtg

SEQ ID NO: 910203 - DNA, 588 bp, Homo sapiens
aattgtctctgtctgaatcttgtcctttagggcaaaacatttttattcttacctcttagaacagtgcttggcacatggttgttatgctatacatttatgttgaacaaatgaactaccaatttsctagcaggtcattatcatattagacattgtaagagtctaaggcagtatcagtggagacggagagaagaggctagtttcaggaagtatttataaagcggaatcaaaatgttatagcagactagatataaaaagagatttgaggtaggaaaactgctgattatgccattgcctgacatagggattccaagggagtgggagcaggtgaggagccatgataaactcagtttgcagcatgctagttttaaaaaatgcttggctaataatactatattatttccttgagatttggtaagagcaggtattaagttcctcatgacacccacagatggtaatgatgggtggcaatagatgtgttaattcatttgtggtaatcattacacagtgtatatcaagtcattacattatacacattgactatatacaatttttgtttttcaattaagtatttattaaaagggagcttgg

SEQ ID NO: 910204 - DNA, 588 bp, Homo sapiens
aattgtctctgtctgaatcttgtcctttagggcaaaacatttttattcttacctcttagaacagtgcttggcacatggttgttatgctatacatttatgttgaacaaatgaactaccaatttgctakcaggtcattatcatattagacattgtaagagtctaaggcagtatcagtggagacggagagaagaggctagtttcaggaagtatttataaagcggaatcaaaatgttatagcagactagatataaaaagagatttgaggtaggaaaactgctgattatgccattgcctgacatagggattccaagggagtgggagcaggtgaggagccatgataaactcagtttgcagcatgctagttttaaaaaatgcttggctaataatactatattatttccttgagatttggtaagagcaggtattaagttcctcatgacacccacagatggtaatgatgggtggcaatagatgtgttaattcatttgtggtaatcattacacagtgtatatcaagtcattacattatacacattgactatatacaatttttgtttttcaattaagtatttattaaaagggagcttgg

SEQ ID NO: 910205 - DNA, 457 bp, Homo sapiens
acgtctctggctagtgccccccgccctgaccccccaggaaaggcacttgcctgtgggtcctcaggccctcaagctctcttggccccgmacctgctaggtgggcctgctccctgtgggctcctcccatccagccccctacatgggggctggccttcctctctggggcccgtgagtgtaattgagcccttcacctacacctgtctgagtgtgatttctgcggctgtgctggaaagaccccaaaaggccaaaggggcttccctgtctccagcactccctccctctgtggaaacagcgcccctcacccattccttctgtgctctgctcctcacctcggcccccagaaacacatgcacatcacgaattgcccctcatcacctaacagtccctgaactcctttgtgttacacctaaatcatccctcttaagactaaatgtctttgatttcccaatcatccctc

SEQ ID NO: 910206 - DNA, 629 bp, Homo sapiens
catcctttattaaacccaaggtcatgaagatttaccactatgttttagtctaagagttttatagtcttagatctttcrtttaggtcatgatccattttcagttaattttatacatggtatgaggtgggaatttgctagccttttaaggcacacttcattcacattcaagccactgtataaataattttgataaatagggtaattatttactgagaattgtagcccttaaaattaaaaattttattaaagtgggattttgatgcatgtatggctcatgaaacctaaaattatctgatcctactctggaaatatataatattcaattaagtagaggcatgaaactactgtgccttcctaatctgtttgtgcagatcacattagcactgacccaccaggttggaacagtgactggataatatcttagtctatgatttctatgaacataaccattgatctgttgtatggtactcaaatatggagcaggagtggttcattattgcagttccttatagtcatatagattgtagttccttatagtgatatagagtttatttttttctccttctacttttattttagattgtgagggtataatatacacgtttgacacatgggtaaatcactgaggc

SEQ ID NO: 910207 - DNA, 591 bp, Homo sapiens
aacaaaaacagctggtgaatcctgcaccagcaactgaggtatccaggctctctcactgggattgactagacagagttrgtgcaaaccatggagaccaaggaaatgcagggtggtataatggcccacttgggagacacatggagcaaggggatctcccacccctagccaagggtggcagtgagtgattgtgctatgctgcctggaagatcacactattttcatggatccatgcaacccagagatcaggagatcccccttgtgagcccatgcaaagagccttggatcccaagcacagagctgggcaggttctcagtggccactcagttggagactgcctaagactactgagctcctgggggaggggaagccatcattactgtggctgcctgctgcctaagatgactttgcttctgggggaaggggcagtggccatcactgcagctccagtctgctgttttttcctgctggtgccaggaagatagacactttggatccaggaggaattctccataatgtagcacagtggttgtggcagattgtggccagactgcctctttaggacagaccctggctcatccctcctcactggag

SEQ ID NO: 910208 - DNA, 565 bp, Homo sapiens
tttatgagtgggagttcccctgcacaaattctcttgcctgccaccatgtaagatgtgacattgctcctccttcaccttccaccatgactgtgaagcctcttcagccatgtggaactgtgaaccaattaaaattttttgctttataaattacccagactcaagtatgtctttattagcagcatgataacagactaatacagtaaattggtaacagtagagtagggtggtgctgtaaagagacccgaaaatgtggaagatactttgaaactgggtaacaggcagagtttggaacagtttggagggctcagaaaaagataaaaaatgtaggaaagtttggaacttctgagagacttagagtgctcagaagacagagagatgtgggaaagtttgacactttctagagacttcttgaatggctttgaccaaaatgctgatagtggtatagacaataaagttcargttgaggtggcctcagatgaagatgaggaacttgttgggaactggaataaaggttactcttgctatgtttgagcaaagagacagacgacattttgccccagcccta

SEQ ID NO: 910209 - DNA, 622 bp, Homo sapiens
catcgctatgattgttaaattgatgtcaaataagccagatacagaaggacaaatactacatgattccatttatatgaggaaagtaaaatagtaaaattcacagaagcggagagcagaatagtgattgccaggaactgggggagagggggaaacaaggaaatattaaccaaaagttacaaagagttatgcaagatgaagaaattttagagatctcaggtacaacagaatgcttatagttaacaacacagcattgtatacttaagcatttgctaagagagtagatattatgtaaatattattatcacaaaaataattgtaataaataaataaagaggataggagtaaaataagctaattaatattaaattatattggaaaactagcattagaatccaggttgcaaagcctggtgtacattctattcctccagccctggttactatgtcctgtagtacttcagctgattccagtgtttttaggcaaaacatcttgttcagaatctttttaattctattttctccatttttctagccaaactgtctcatttctttaatattttctttcatattaagaraaaaggttatcaataaagtataatgaggtaaagattaattctttactc

SEQ ID NO: 910210 - DNA, 631 bp, Homo sapiens
ctaaaagtcgataagaacgagctaaaaaccctacagaaaaataggcagagcatatgtatagacagtttgtagaaaaatataagtgaatttaaacatatgaacatgtgaaatgaggtgcaacatcactaatagaaaaatatatatagtaggggatacattccaagacccccaactggatgcctgaaattgtggatagtactaaaccttatgaggattaagctctgatttttttttcttttatcttgcccaaattcctttctaagtggtctggggagtcatgccctacaaaccatacattctcatcagatgggttttatttaaccctgtatataattacttactttccgatctgactctggcataacaaggaagaaaatcaaaatgttttacccaaaaatatatttccgtgccatacattgaaattgccctgcaaaatctcttatgggaaaaatctacatgccttcctaatatgtctcatgccttcctaaaatatataaaaccaagctstaccccaaccaccttgggcacatgttctcggaacctcctgaggtctgtgtcacaggccgtggtcactcatatttggctcagaattaatctcttaaaatattttacagagtttgactcttttcgt

SEQ ID NO: 910211 - DNA, 598 bp, Homo sapiens
taatctccacttaagatcaaatcatctcattcatgttcaatcaaagaaaggattggtggtaaagataattaggacttctcattcccttggggtggtctagccagaaatgacgctatctgaggcaktcctactgaaacagtttactgaatatagcacaaaagacttgaagtactttcacttccattccacctagcccaaatatcaacatggtatttagaattcccacaatggtttctaacatttgacctatttcattttgattttctgtgtggtctaactgaagcagtatgaacatgtgaaaaagcattggactgacaggagactttgtttcatagcttgaaggatttttcagtgataaaatatttctgaaggcttacttttttttctcttggatttgctttgtagctttgggcaggtaatctcactttcctgagcttctgtttcctttactgtaataccaacgtgattacacaaccagatgataacctctaggaaagaagaactaactctatatcatacttggttataacattgtaacatctagcatagtaccttatactcagcaggccatcagaaaatattttgtatttggaaatac

SEQ ID NO: 910212 - DNA, 571 bp, Homo sapiens
ggatcttatccaagaccatcaaggtgataattctatgactctgcaagaactatagcattactacacttggggtgcccccaatagatacagcttggatcacaacacacaagtcctttagaatacctggaaagccttcccaagaagaacaggaacaaacaagctcaagctgcaaaaactataataaatgcctaactcatcaatgcccagaaatagactaacatccacaaggccacccaggaaaacatgacctcaccaaataaactaaataaagcaccagataccaatcccggagaaacagggatatgtgacctttcagacagggaatttgaaatagctgttatgaggaaactcaaataaattcaagataatacagagaaggaattcagaatactatcaaatgaatttaacaaagagatcgaaataatttttaaaaatcaagcagaaattctggacctgaaaaatgcaattgacatactgaagaatgcatcagagtcttttaataacagaaktgatcaagcagaagaaagtattagtgagcttgaagacaggctatttgaaaatgcagtcagag

SEQ ID NO: 910213 - DNA, 590 bp, Homo sapiens
ctgtattaaattagagctatttccttgtacacttctattaatgtgrgctatgactgcattattagttttgcttcagtctatttgtttttgttcttatcgaaatactggtgactcatacaatatttgagatattttccacttggagtgccgtcaggacaaatattcctcatgatgtagtttgacaattgactttttttaaaacccaaattcagttctttcactttatccttgcaatttcatcttcttggttttgacttgtccttttagcatatcaagattttgaaacttagttctgtcatccctgtatttactttctccactatctttatttcatttacaaacttgatgactactttcatctgtcatgtgaaaaaaaagttgaacagtgcaagatgaagaagacagctcttttgtatttccatagagaagcccctccaggttgtcagcaataacctggtatcagcaccaataatctacactctggttgcagccaccctaccagtggtaggtgtagctaactaaaataccatgcagcccttatataatgatcttgttctctaggatgtcaaacaaacctctgtcaaatgccc

SEQ ID NO: 910214 - DNA, 409 bp, Homo sapiens
ttaactaaaagagatctgtcaatctcttttataaaagtcttaaaatcttagaaatgttagaagtttgacatcatcagagttgacaaaatgccctatctgattcctacaaaaaaaattcaacattatttgcatttttgaagtggctctaaaagaatttgtttttgtttttactttgaaagttatagaaaataaatgtggccaagtattagcaacaaatgaatgtagatgaaggctatattctgttaaatttttcaaaataaaaagttagggaaacctagaaataacagttctaatgarccataaaattttcaatgcatattaaaaaattaaaaagttaatatataaataaataaaaatgacttggcaaaatataaattaaatttactttgaaatatgtggattcacaatt

SEQ ID NO: 910215 - DNA, 649 bp, Homo sapiens
tttaggtggtacatgatgaacattatgtctactctgtatataccacatggggaccagtcctgagtatggagaatgggtggtggaaaggagagacaaataggaaaccaatwtaaaggcagtatagaaagattagggattaaaggacacttttttagattgagaggtattaagaatgggcttttccagggtgttggaactactcttgtttaatacctttatgaatgctctaaaagtaagaatacatatttaattttctgtttttacaaataacactacattcttccagtaatggaaagtcaaattaatgcacataaaccagagggagatcttactagttagtgtacaaaagctagaaaatataaatgttttaaataaactttattgagatataattaacatataatagacttcacccatttttaaagaataccgtttggtgaattttgataactatattcacccatgtaataccatcaaaatcaccttcactccaaccccacttcaagactctgagaacaattgaattttctgtcatttacttttagttttcatttctggaatttcatatacatggagtcatacattatgtactcttttgtgtatggatttctttcattcaacataatgtctttaagattcatccatgtcg

SEQ ID NO: 910216 - DNA, 571 bp, Homo sapiens
ggatcttatccaagaccatcaaggtgataattctatgactctgcaagaactatagcattactacacttggggtgcccccaatagatacagcttggatcacaacacacaagtcctttagaatacctggaaarccttcccaagaagaacaggaacaaacaagctcaagctgcaaaaactataataaatgcctaactcatcaatgcccagaaatagactaacatccacaaggccacccaggaaaacatgacctcaccaaataaactaaataaagcaccagataccaatcccggagaaacagggatatgtgacctttcagacagggaatttgaaatagctgttatgaggaaactcaaataaattcaagataatacagagaaggaattcagaatactatcaaatgaatttaacaaagagatcgaaataatttttaaaaatcaagcagaaattctggacctgaaaaatgcaattgacatactgaagaatgcatcagagtcttttaataacagaattgatcaagcagaagaaagtattagtgagcttgaagacaggctatttgaaaatgcagtcagag

SEQ ID NO: 910217 - DNA, 666 bp, Homo sapiens
tctcttacatcatacacaaaaataaaatcaaaatggattaaagacctaaatctaakacctgctaaattcaactactagaagaaaacattgggggaaacgctctaggacattggtctgggcaaagattttttgtgtaagacctcaaaagcacgggtgaccaaagcaaaattaggcaattgggattacctcaagctaaaaagctttgcaaagcaaaggaaacaatcaacaaagtgaagagacagaccacagaatgggagaaaatatttgcaagctatccatttgacaagggattaattatcagaatatataaggagctcaactcaataggaaaaaaacgaataatttgatataaaaatgggcaaaagatccgaacaaatatttctcaaaagaaaacatacaaatggccaacaggtatatgaaaaaattctcaacatcaccaatcatcagacaaatacaaatcaaaactacaatgagataccatctcaccctagttaaaatggcttttatgaaaaagacaagcaataacagatgctggcaaggatatggagaaggggaactcttgaacactgttggtgggaatgcaaattagtacagccactatggagaacagtatggaggttcttcaaaaaactgaaaatagaactaccatatgatctagcaattcca

SEQ ID NO: 910218 - DNA, 584 bp, Homo sapiens
tgtaggaacttgcagtgattttctgcattttctgaatttgactattaagttctctagcaagattgggaaagttttcatggatgatatcctgaaatatgttttccaagttatttgctttctccctatctctttctgggatgccagtgattcacagatttggcctctttacataatccaatatttctcagagttgttttttttttcttttcattctttttttttctttatttttgtctgaatgtcttatttcagtgagccagtcttcaaggtctgagatttgttcctcagcttggtcttttctgctattaatacttatgattgcattgtgaaatccttatggtgtgtttttcagctctgttagatcagtaaggttgttttctagaccagctatttcatctttcagctcatgtatcattttattttgattcttagttcccttgaattgggttttgccattctccagagaaaagtaattctatatcatttttaaaartttgtcatgtagagatgcaaaaggtacatttatacaatgaaaagacacaaaatatttaatttttacctgtcaattaagccatcaaggataa

SEQ ID NO: 910219 - DNA, 619 bp, Homo sapiens
ctgctatatagctgtacttggagacagaaggtgttatgtggtaaagagcagaggttttgaagacagacatatctggactcatatatccactgtcttatgtattagccgtgtarccttgggaaggttatgtgatctctcacagcctcacttttgtatcatctgtgaaatgagataataaaacaaactcttaaagactttttggaagactggaaatgatatgtcacactgaatgcagttaatatatagtaatttttatggtcctcataatctttgtgtctaactgaggagtcagctaaaacccaactcaaacctcagctgttcaattactggctgtgtgatctgggacatgctaaactaaacattctgaagctaggtttaatcacctgtagcaagtagatgatacttacctcttgaagattaactgagatcatgtttgtaaagtgtctatgatggtgcctcacattggttcagctctatgaaacagtttttatactctctgttgcattctttaagcccccttttggtatcttactagaaaaacaaagatgtatcaggacattttatgaggatggaaaaatatcatgggtacacggactaagtggcttatttattcactcca

SEQ ID NO: 910220 - DNA, 652 bp, Homo sapiens
agaaaaggtaatagaaatataggcaattgtccatatttcttgcataggttgatggacattattaagcagtagagaactcttttttccaataatccaaacattttattacacttgattaggaaatggctcattaatgatctcactttatatcatataattggtagatactcgatttgagaatggcataacatatatacactcccaaatgaattaccactcattttattcaaaagtttatcatattttataaaggcatgatgtgcattctgcctcttggaattctatgttctagatgtattctatacatcaccttcattctattgtttcaaatccaagcatactatcaaaatatcccttagaattcccttaaaaaacattttgaaaatgtgaagctgcatctttggaatgaaagcttgaaatacttaaatgtaagtcaatcattgaacatgtggacttttgctaaacttacttaatagtttttcatatttagaagtcttaaccattaaacaaaataggcacccatttrtaatggcccagcagactaattactttagaaaacagtcttctaaaatccctctcccatctgtaccacaacccagggtcaatttatttaccaggttttaatcgctagactatataaggctaaattgga

SEQ ID NO: 910221 - DNA, 654 bp, Homo sapiens
acattttatgctttatttcatatcatttaaatgtttcgttctcacaacagcattttcaaatagctttccaagagtaaccaacacattctctacatagcagcctacgcgacatctctaaaatagcaggaaaagctaaaaatcagaccaaacactaaaattcacaagagacatttttcctaacatttacctcattaactctaaaatttattgaagaataaatcaatctggaagcttcagtgaatagttttaaaagctgctgctctgagcacattaattggtaaggttaagcctctgaactgaaatgtcaaaatgaaaaaaggaatttttaagatgtaacaactatatacttggcaagagaggaaacaggttttccctgttttctgtttccaaaatttaggactctaggaagacaaaggagtgaaactagcccatttttttcactcttaaaatgatgaattctctcaaataacaggtagtttttataagtccctggttgaattcaatgaaacagctgcccctgtgtatctttatgatgccatgtataccacctttaccttgagtratgactccaaaaccttgtataggttaatgttagttcttggcctaaaagccaattatctggagaacgatgctttaacaatgtgcatattaaga

SEQ ID NO: 910222 - DNA, 602 bp, Homo sapiens
aaatatctcaacctgttccctcccatgacatgtggggttatggaaactacaactcaagatgagattttggtgagaacccagccaaaccatatgaataccstaatcaacccttgcctggactatggtaaaaaccttgcctgcagctcctgtgatgatgagaatctatattcggaaaacattcaacatatgacactctcctagtggtaaccttttgactcctcattgcctttatgatagattccacactcccctgtgtagaggtcaaaacatcttatttgtcttttgtcaacctttcctacttcttcttcattactcccctaccataagcatttgctttatggcagtgtttctctatgttagggtattttgggtagtttctgtaatttgagtaattgaagttgtggttgtgcagaatttttatcagagactaaatgttgatggctcctcccaggaatattgacaaaacaattccccacaaatttctacatacccactatgtggacagtacagcctcaatgtgagaatcactgggcacacatggtccactgtttttatcctgagaaggtctgtggttgtgctaccttctgagcttgggatgtgaa

SEQ ID NO: 910223 - DNA, 602 bp, Homo sapiens
aaatatctcaacctgttccctcccatgacatgtggggttatggaaactacaactcaagatgagattttggtgagaacccagccaaaccatatgaataccgtaatcaacccttgcctggactatggtaaaaaccttgcctgcagctcctgtgatgatgagaatctatattcggaaaacattcaacatatgacactctcctagtggtaaccttttgactcctcattgcctttatgatagattccacactcccctgtgtagaggtcaaaacatcttatttgtcttttgtcaacctttcctacttcttcttcattactcccctaccataagcatttgctttatggcagtgtttctctatgttagggtattttgggtagtttctgtaatttgagtaattgaagttgtggttgtgcagaatttttatcagagactaaatgttgatggctcctcccaggaatattgacaaaacaattccccacaaatttctacatacccactatgtggacagtacagcctcaatgtgagaatcactgggcacacatggtccactgtttttatcctgagaaggtctgtggttrtgctaccttctgagcttgggatgtgaa

SEQ ID NO: 910224 - DNA, 638 bp, Homo sapiens
aaagggtataattggatggtttgccactcaatcaatggataaattcttgasggggtggatatcccattcttcatgatttgcttatttcacattgcatgcctgtatcaaaacatctcctataccccataaatacatacacctactaattatccacaaaaattaaaaataatgagaaaaaaagataaaaaaggcattatataatgataaaaaatcaatccaatgagaaggtattacaatccataactatatgcatctaacattgtagcttccagattcataaaaccattactaatagactgaagaaataaaatagacagtaaacccaataatagtgggggacatcaatactccactggcagcactaaacaggtcatcaagacaaaagtcaacaaagaaatgatgcatttaaatgacactcttgaaaaaattgacttaacagatatttaaataacattctacccgcaaactgaagaatatactttattgtcatctgcacatggaacattctccaagacagaccatatgacaggccacaaaacaaatctcaatcatttttataaaagttgaaatcatatcaaaaattttctcagactacagtggaataaaactagaaatcaactccaaaagaagccttcacc

SEQ ID NO: 910225 - DNA, 533 bp, Homo sapiens
gtaaaacaatctggcgggccctggagttttctttttctgtaatttaaaaattatgaattcagttttctcaataaagtgctatttaaatgatctatttcatattgtgtgagttgggataatgtgtgctttttgaggaatggggtcattttatctattgtctaattttgtctaatttatgtggtatttactcattatccctttgatatctgcaggatctgtagtaatatccctgctttctttcctaatattatgtttttttctcctttttaatttgtcagtcttgattgggatttgtgcattttattgattttttttttttttccaaagaaccatcttttactgattttctgtttccaatttcactgagttttgcttttctctttattattccctctctctgcttkctttgggtttttcttttccttttctatgctcttgaggtataatcttagattttaatttgagattttttttgctttttaatgtaagcttttagttctataagtttccctcttagcagtgtttttgctgca

SEQ ID NO: 910226 - DNA, 611 bp, Homo sapiens
ggttccacagttgctcagcactcatttatttgatgctgaagatgcttaatattctagtttctgtcattgaatctatctctatacttagctatattattcaaaaatatttttcagttttctaaaactgctatcttcaaggattccctgagaagctacaaaaaaggacatcatggtaatttatgggacgttggatatttttctaggacaaaaaatctcctatttctgcatgtatacttcagcttattctgatcagggaaagagcaagaccataatcacacagaatccttgcataagaatctgtgtgaccttgagagagctggttgacctccctgagcccgattcctatgaactgtaaccgtctttcatgtgtacgttgggaataatcataactctctgtcagaattgtgaggattaatttgagataaggtaagacaagcattctgtagagtgactgacacatagtaggaccgtgttgtcatgagttaccrtgattaaagtggtggatcatctcatccttcttttgtagcctctgtctaccagatcctatgggaagcctttcgtgtctgtcatttcattaagtcttcccaacagcctaacgagataggtcttat

SEQ ID NO: 910227 - DNA, 637 bp, Homo sapiens
cattcacttgatgtctcttcattttatttgtctatgtccataaccttttggaaaaatttcattgattaatttgctcgctattctgagatagaagtaaggcatcagagcagtttatttcttgatatcactcctgctcactgttttgaagaggcctagcaagtagaaaacttaaagtagttttcctagaatagaatatcaaccgggaccagtaactccacaatcgttgttacggaagagtccatacttatgtccacaaattacatatattatgtaaccctgacatctaaactcaaggaagaattttacattattctgattacaataaagggtgatgggtgcaccaaaatctcggaaatcaccactaaagaacttattcatgtaaccaaacaccacctgttcccccaaaaacctatggaaataaaaaaataaataggagcatttgtaaaataatatttttaacttaatatattgctaggtgactttttttgagttgaggctgatattttgcactgtkaattccaccagtctaaaaataaagcttctggaaagcttttcctggatatgaactgtagtaatgaggaggcacctgcatgtccacataggatatacatgggattgattgcaacctcctattttt

SEQ ID NO: 910228 - DNA, 658 bp, Homo sapiens
gcttttgacaaaaatcgttctgtgttttgccttcaaaactagaaattactatatacttctgtatataagactaagttagacaaactataccttaactaataaaaatgatcaaagctattgtctaacaccacagaattaggtcatgtgtttgtgtgtgcatgtgtataaaatttgaaaacatttttctggcaatcaaccagaaatatgccaatttttaaagttacttaaatttttttccaaactagatatataaaagttcaatgatttgaggatctgtatcagcaccagatgatctgttatttttcagcaagtgtatctggtttgcagttgattcttgtttgaactaacatgaggttttccttccaattattggcttagatcttgatcataccagaagttatgccagaaaagtccaaatgaccttttgtttttcttacaagtatttacttcttcactacacaacaccgtgttgaactctcaacatattaattcaacaccaagtaaatataaaatctattcatttgctytcataaattgtaactaatttcgtgacaaagttttaagttttggggtgtgagtcctagaactaagttttagcacttccaacttttaatgatacaggttttgtacatcatttgcatttaacatttacatcagt

SEQ ID NO: 910229 - DNA, 566 bp, Homo sapiens
tttcttcacagaattggaaaaaactactttaaagttcatatggaaccaaaaaagagcccgcatcgccaagtcaatcctaagccaaaagaacaaagctggaggcatcacactacctgacttcaaaagattttttaaaagcccacccacatgttgtgatggttaatttatgagttcacttgactgtgttaaggaatacacagatagctgataaaacattatttctggatgtgtctgtgagggtgtttcaggaaaagtttagcatttgaatcagtaagcttagtaaaggagatccacccttaccaatgtgggtagatatcccatcctctgagggccaagatagaacaaaaaggaagaggaaagatgaatttgcttttgtttcagttgcaccatccatcctttcctgccctcaggtacctgaactctttgcactcaggccttcagactcctggacttataccagcagcccccttcagttctcagaccttgatgtagatcttmgagttatgccataggctccctggttctcaggccttcacactcggactgaattacatcactggctttcc

SEQ ID NO: 910230 - DNA, 592 bp, Homo sapiens
ctttggagtctttcctccaaaggaataacacctggctttcttctatctagcctgatcttttaagtaaatggttgcttggccacacccttagtattctyttccgaatgttattgcttttcactctttaggaggccaggctgtgagttttcctttgcttctcttttaattataaattctgtctttaagtcattcctttccttttgcatctcactgtatgtggttaaaaggagccatgcagcaacctgaatgctctgctgcttagctgtttcttccatcagatatccccgttcattgctcttcagtcctgcactctataaagcccttagacataaacacagttcagccaaagtctttgctactttgtaacaaagatggcctttcctcttagtttccaataccttgttcctcatttctgtctgagacctcattagaatggcctttactgttcatatttctacggacattctggtcatgaccacttaaataatcttcaagaagatttaggctgtccttagttctagggccttcttttgagccctcagcaaaattgctcttaatgctccattcacaggaatctaggctttttctagcc

SEQ ID NO: 910231 - DNA, 568 bp, Homo sapiens
tcttttttttaaatttattttaagttcaggagcacatgtgcaggtttgttacatgggtaaacttgtgttgtgggggtttgttgtacagattatktcatcatccaggtattaaacctagtacccattagttatttttcctgatcctctccctcctgccatcctccaacctccaacaggcttctctgtgtgttgttcttctctgtgcatctatgtgttctcataatttagctcctacttataagtgagaacatgcagtattttgttttctgttcctgcgttagtttcctaaggataatcgcctacagccccatcgatgttcctgcaaagaacatgatctcattataaacatacacttaccatatgactcagaaataccattactgtgtgaaataaatttgcaaaccttatgttctcacaaaaacctgtacattcatttttattatcttttttcattttaatttttttttttttttttttgtagagatgaggtctcactatgttgcctaggctggtcttgaactcctgggctcaagagatcctcctgcttcagctacccagagcactggga

SEQ ID NO: 910232 - DNA, 581 bp, Homo sapiens
acaaaagacatactcaatactggaaaatttataaaggaaacaggtttaatggattcacagtaccacatggctgggaggccttacaatcatggcagaaatcaaggaggatratggcacatcttacatggcagaaggcaagagagcatgtgcagaggaaccccctttataaaaccatcagatcttatgggacttattcactatcacaagaacagcatgggaaaaacctgaccccatgattcagttacctcccaccaggtccctcccacaacatgtggggattgttacaaaattagagatgatattttggtggggacatagagccaaaccatatcaagtaatatgatcatttttagtggcctgatccattgtcacatgttctaactcctggttataagtattagaaaatgatcaccatactttcttgtaggtgaccctgatccaattgcttttgcatagaatgtttcctgaaagtcaagcactcctccactctaaccccacttcctgcaaaggattggcagcactgtctgcacggtgactttgcaggatatgagatactgtacattactggaatttattttgct

SEQ ID NO: 910233 - DNA, 459 bp, Homo sapiens
aggtgcttctaggttcttgcgctgagagttcagcagccacctccaggcactctacaccaggagaaatagsggctagtctcacatctattctggtgcacatgtgactcctcagtcctcacacttcagagggtgagaccgtaatgagaagttagtcagcaggccaggttccagagttgcacaagagaccacacaggggagatcaaaaggagctggggggagctgcaatgggaaaaattgttgggcatggacaaatctgtcagcacctggacattcagctctcaagaaacctagggctcagaacaagaggactttaggtaaagaaagccaataatgttccccgaagtgtattttattcccatttgaccttccatcttgtggcctaacttaataccttagccacacagttcatctttatttcacctcagagacattaacaagtgtgaaaagaagtgacttaac

SEQ ID NO: 910234 - DNA, 592 bp, Homo sapiens
attaaatctgctgggtgttctaaaccttcttgtacttgaatactaatatgtttcttgaggtttgtgaagttctctgttatccttttaaataaactttctaccctgatctctctctctacctcctttttaargccaataactctcatatttgccctttggggctacttcctaaatgttttaggtatgcctcattcttcgttttaatttttttcgttttgtctcctctgactctttattttcaaatagactgacttcaagctcactgatcttttttctgctagatcaattctgctgttaagagactctgatgcattcttcagtttatcagttgaatttttcagctcagaatttccacttgattctttttaattatttcaatttctatactaaatttatgtaatagaattctgaattccttctccatgttgtcttaaatatctttgagtttccccaatatggctatttttaattatctgtttgaaaggtcacatatctttgtttctccaatattggctcttggtttcccatttaggccatttagtgaggttgtgtcttcctgaattatcttgatacttgtagatgtttgtctgtg

SEQ ID NO: 910235 - DNA, 592 bp, Homo sapiens
attaaatctgctgggtgttctaaaccttcttgtacttgaatactaatatgtttcttgaggtttgtgaagttctctgttatccttttaaataaactttctaccctgatctctctctctacctcctttttaaggccaataactctcatatttgccctttggggctacttcctaaatgttttaggtatgcctcattcttcgttttaatttttttcgttttgtctcctctgactctttattttcaaatagactgacttcaagctcactgatcttttttctgctagatcaattctgctgttaagagactctgatgcattcttcagtttatcagttgaatttttcagctcagaatttccacttgattctttttaattatttcaatttctatactaaatttatgtaatagaattctgaattccttctccatgttgtcttaaatatctttgagtttccccaatatggctatttttaattatctgtttgaaaggtcacatatctttgtttctccaatattggctcttggtttcccatttargccatttagtgaggttgtgtcttcctgaattatcttgatacttgtagatgtttgtctgtg

SEQ ID NO: 910236 - DNA, 582 bp, Homo sapiens
aatgaatctttcaaatccaattgttcatactcaaggtgaccccaacaaggagtggctagaaacaaggcctgagccgatctgtacaagcccttttcagccttttaatatggatattaaaccctagaaatgggaacaaattatgcacacatcttttcattttagtttaaaatatgcacagatccatgttttaaaatggctctttggcctaaaacaatgaaggaactccattcacaatgagggacaagcattaggtatgctgacaaaaagggaattaatttgcttaatatgtccttagagtcagacttttggagagaaaatatccaggaactgaaaggcccttctgtccagacgctctcagcatgacactgaacacaacagttgtgttccatggagaggggcggccagagccagcatgttgtgcagcatcctggcttgtctgcttgctctttggtccttccttctttccatcccacaaatactcactgagmacataccaatgtgcttactgcaataggctccttcctttcagagaagaatttatacagtagcataagaagcaaaggatgtgaaaaagaaactttt

SEQ ID NO: 910237 - DNA, 645 bp, Homo sapiens
gtaaggagcagtttggaagttagtggtttagagcaggagtcagccaaatcatactcacccctatttttgtaaataaagttttattagaacacagctgtagctatttatttattatctatggctgttttcayactacaatggcaaagttggttagttgtgtccactgggcctgaaaaacctaaagtatttatcatctggccctttacagaagaagtttgccaacaccaggttcagaagtacagctacaaaactggaaatgtgagaactggagtctatacctggctctatcactgttaggagaaacaaaaataggatatgtatgaattactaactgaagtgtaaagtgattcacaaatatagggtggcatatgattagtaattaatctgtgaccttaagcgatttatttaacctttttgagccacgtaccacaatctaatgtgtggaatgttaatatttatcctaagcaatcatatgaaaacatgagaaaatgtatgttttgaaacattaaaagggctatgagatagggaagtttcatttcactctccattaaaaaggatcctgaatcagaaattctctctctctctcagtattccatattccatgtgattaaaaacaaaatatacaggactacaaacatttatcct

SEQ ID NO: 910238 - DNA, 604 bp, Homo sapiens
taaatgaaacccagctctgaaatatctaattcttaactggattaagatgatctactcctactctaaatayctgccagatattaaaggaaatgttatctagaggaagataataccattgagattctcctaacatattttatatacaatggtcaacattcagtaagaaactgaaccatgcaccaccaacaataataggattaagagaagaaatagaaaatataaatgaacccacaaattattagacatataatttaaaatcacttattaatatattcaaggaaaaatgataagctagagaatttcatcagagaactggattctgttaaaaaaaagaaattgaaattccaaaaaaataactaaaattaacaatgtgatatataggcttcatagcaagctggacatagctaaagagagatctgtgatctagaatataggatagtaaaaaaaaaatctaagctgaaagacagataaaaaggataaaaaatccggtacaaagtataatggacatatggaacatggtacaaaggtataatatatgcagtagaagacctagaatagacaggaagaaatggagctgaagcagtatttgaagagatagtagcca

SEQ ID NO: 910239 - DNA, 586 bp, Homo sapiens
catgttgaggtgagaaataaataaaataatacatgtgaactctctagcatggggcctgataaaaaccagttgttactaaatactagtttccctttatctctccacttatggagtttttatctattccattccattgtccttttctaagccacaaaaaaatttttggtcatgtaccacttatttgctcttatccaataatttactgagttttattagttatctgtctgtcttacttgtcccagtagattaggatggcgatcatgcccaaacctcacagtgacgaataatagcactaggcacagaggtgatgttaagtaaatctgttgtgtttcattttataatacactaaagcaaagacaatcttgactggcaaactgtgcaggatgcaggtaacaaaaaggaaaatgaaaatggattccacaattccagggaagttaaggagaacctgcttagggagcttggggtggagaagagagaatgstattacagtagggagaaagggcccttgattcatgatgcccagtttagagatacctgtggttatgcctgtgatcccaaactacatggtgaattaaaacaactgatt

SEQ ID NO: 910240 - DNA, 623 bp, Homo sapiens
cttcacatcccttgtgggtcgtattcctaggtatttcattttctttgtagtgattataaatgggaagtcagtcatgatttggtgctctgtttgtctattactggtatataggaatgcttgtgatttttgcatattgactttatatcctgagagtagggagttttggggctgaggtgatagggtttcctaaatatacaatcatgtcatctgcaaacagagacaatttgacttcctctcttcctatttgaataccctccatttccttctcttacctgattgccctggccagaaattctaatactatgttgaataggagtgctgagagagggcatccttgtcttgtgccagttttcaaaggaaatgcttccagcttttgcccattcagtatgatattggctgtgggtttgtcataaacagctcttattattttgagatatgttccagcaatacctagtttattgagtgtttttagcatgaaagggtgttgaattttatcaaagggctctcctgcayctattgaataatcatgtggtttctgtcattggttctgtttatgtgatggattacatttgttgatttgcttatattgaaccagccttgcattcacaagatgaagctgactt

SEQ ID NO: 910241 - DNA, 629 bp, Homo sapiens
acatggaatagagatctgtccatgttcatcctgaggaaaaaattgggcgaaaagaaaggaagttagaacaactgatctttgagaaggccaaggaccaggccgtagcagtttccatcaggatggggccrgggcacttggtcttgtgtgagtaatgtctacaccccgcttcctgtcacccttgcacagctacgttcagaattatagaacttctggaaacgtcatcagctcctcagcatttgctaaacgcccccaaacatccctcctccccctggagaggtagaatacaagtgtcttttcttggggactccctgcaggagagaagctgatttccctgctccccacggaaatgtgagagcagttagaaaacctgagaaggctggggtttgttctctgccctcctctgaaattgaggtgacaaagggagttaattatttcgtttttaattattgctataaaaatagcatgcatgtggcaaaacaacccaactgtatacaatgatatacaataaaaaaaataaaaagtgattctctctttgagcccaaacctcatttctactctgctgaggtaaagcccattacctggttcaaatgttacacatgtgagggctgggatgcacacccgcctacctt

SEQ ID NO: 910242 - DNA, 596 bp, Homo sapiens
ttatcctatgcaacctggctgggcctgaattaaagttgaaaggccttagaagctagtctgaggaaagaaagaaaaaaagagagagaaagatgagagaggagagagtaagagagagaagaagaaggaggagaaagaggaggaagaagaaattctacttgtggacaacagcttcagcttgtgcctgtggagtttcaacctgttggtgatcttcccttccttactaaggtctacaattacttatgccaattccttgtaataaatcaatcgatagatagatagatagatagatagatagatagctataatatgcaaatgttttagcagctgttcataatctgcaaaaactgcaagcaactaaatgtacttcagtgggtaaatggataaacaaaccatggtatatccatataatggaatactattcagtgataaaatggaataaattattgattcacacaacaacatggrtaaatcataaataaattttgctaagtgaaagaaaccagaaacaaaaggttatacattatatgattacatgtatatggcattctggaaaaggcaaaactatgcaaatgaaacacagatcagcttccccaagt

SEQ ID NO: 910243 - DNA, 661 bp, Homo sapiens
tctacaaaattgtcacaatatgtttaattttcaaatgctatagattttaggccattgctaggtatgtttatgtaatgcaatgctgattgctcttactttatggggcttcactttaaggtctttgtataaaataatgcatttaaaactcaacaaagatatatattgattctaattaaaggaaattatgaaaaatgtaaagatctatatatattacctattttcctcattgtctcacttattagatatggaagaaatatttcaaatttagacataaaaaattatctttataactccaagaaattaataaggaacttttaatttacttaaaaagatgatattcaatgtgcctgagtgggttatgtatgttaagagagagagagagagagagagagggagagagaaatgacataaataaattttaaaaatatgaagattaatgtatattcttcagctgagattatttgataattatagaaattactgtaacatcttgggatgttatgagtgccagatactttctagtcaccatgataatttcctgcaasgtccatggattaatgtaaaattttgtgacatgccagcacttacacttttccctttttcaggaatcaataatataaaacttatatttaatgaaagacaacacctgaaaactatcttt

SEQ ID NO: 910244 - DNA, 484 bp, Homo sapiens
aagcattgtcttttctctgcaaccttgccaatatcagttgttgtttttttttgcattttaataatagcccttctgactggtgagatggtatctcactctggtttttatttgcatttttctgatgattattagtgatgtggagcattttttcatgttttttggccttatgtatgtcttcttttgagaaatgagtaaaatttttgaagcattgatcaaatcacattttttgttgtatttgtcttctcacttagctaagccaaaacagatcagccagcaggggtcaggcttttatagtgtatgggtttgaactttccatctctcacagtatcttttaggaacctgcaggtttcttgattacaccattagcattgtacttttcaraaatgaatgcttaccagttaattttttaactagaaccaaaccaaattaatgtagaattgtgagactctgtagaagctttctgagacaaaattatttgtttaaa

SEQ ID NO: 910245 - DNA, 570 bp, Homo sapiens
aaagaataaataaaacctgttaataaataaaatctgttaattctatttcccacttctaacttttacattgcatatgcttctagtatatgtctgcaaaggtgtatatctgtgtrtattcatatatagatggagatacagatgttaggtaacactagcttctgaaacaaattccaaaatatcaatactttaacacaatgaagtttatttttcatcaattaattgctcaatgtgtgttcatctggtcattggctttccttcttgtggtgattccgggacccaggatcctgtggccttatcattcctagggctcagggtcatttgcattccgcctgctaatggagaaggacctgacctagaaggggcagaaatcacttccactttcaccacgttggttaaaataagtcacatggcctcattgaaatgcaagaggggctaagaatgtcatctatctttgggtacctggagaatgacaacactacagaaaggaagacatctctgctgcaatatatgtttttagtaaaattgactttcatctactcaaatgattccaagatttttgagttttaaaaa

SEQ ID NO: 910246 - DNA, 685 bp, Homo sapiens
aaggaatagctcaatgaaactcctgaaacagaaagaaaatgagaaaatggcagacgttaagcactaacatatcaataattaatagttaaacaaacgattacattcatttcatggaatattactcaacaatgaaaagaaacaccctaatggtacacacattaatgtgaatgagtctcagagaaacatgtggaatgaaaatgtctaatccaaaaggccacatattacatgattttatctatatgacattcttgaaatgacaaaaattatgaaaatggagaacatgttagtggttgccaagggtttgtaatggaacaggggagagagtaggaaaggatggaggtgcatgtggctataaagacaacatgaaggatccttgtggtgttggaatttttctgtgtcttaattttagtggaaagatcatcctagatgcacaataaaaatgcatagaactaaacaaacacaaaaagattaatggaatgtattaatgtcaattggttgtgatattgtattatgattttgcaagatgttcccacctgagtaaagagtacatgaaatctctctggattatttcttaaratggcatgccaatctatagttatctcaaaataaaaggtttaattttttaagtgacaggcaatatgatacgttttgggatatggaagtaagcaaaaaggattctgctccc

SEQ ID NO: 910247 - DNA, 694 bp, Homo sapiens
ggtaaaattcacccttttattacagaatttagtgagttttgacaarcatatatagcattagttcttaaatgctgtggaccaggagtgcacttgtcttcctctttttattctctatatttttattttttaaatcatattgttttctaattgtttttaagttttttaaaaaaacttttaagttcaggggtagatgtgcaggtttgttatataggtaaatttgtgtcgggggtggggggttgttgtaaagattaattggtcacccaggtattaagcctagtacccattagttatttctcctgattctctctctcctcccagcctccaccttccaatagtccccagtgtgtggtgttctctctttattcttttctgtccttgagactgtgttgcaattaacctgtccccatcccacagcactgctgttggatggaaggcacggacaacttgtctaccgggatattgatttctagatgctgagaagccacagttgggtcttgtggggagtactgatcatcaaccagaggtcttagaccttcagctccatgtactgactgggtaggacattgggttgtctttctgggggatggtttagaatactctgcatgggaagaagagtgcaaacagatatctctgctacaggatgacaaaatggacactaccaacattcaaatgcctcttcccataatgtagactt

SEQ ID NO: 910248 - DNA, 631 bp, Homo sapiens
gtggaggaaaaccgtaaaagtaaaaatatatgtcacctaaaatgatatagataagaatatatacacagctttattcattattgccaaattctggacatgatccaggggtctattgatagcaaaatgagtcaaacaatagtgctatagagtggaacaaactagtcaaatatagaaatacatgtgaaagtatcgaatacagcaaaggaacccaaacattcagaagcacacattgtatggttctatttatacaaagttcttggacagcaaaaattagtgtatggtggcaaaaatcagaacatgggttgcctcttgggagcaattaaggagaaaaagccacaaataaactttctagaataatgaaaatattccatgccttggtaggagtgtggttacaggattatatatatttgtcaacactcacctaattgtacacctaaattctctgcttttcactgtatagaaatttatctcaaacactttcaaaagaattgcagacaaaaattgaaaactagttagtagtatgggttctgaaacaacctkttaagtgtgtaaggcttgaaccatgactaactgttgaggaactgaaaacagaatcacagaatcaaaacggcagagtgaaatagtgagaccc

SEQ ID NO: 910249 - DNA, 559 bp, Homo sapiens
cccagagatggaggaagggttgcaagaagggcatcactggatgtcatggtgaggaagttagtcctattttcacattttggtgaaattttcgccctccacaattgaattctgsctatttgagaaacagcactgtatattgttcattcattcagagcatacactgcatcctgtaagtgagtacctcaactttgctaagtgctgtctcacagatgatgctaatactgaatcttcaataggacattccattgttacataaagccagctacttctaagtaatgggtgcatgttattattagtaaatttcatgggcattaacctatttccccttatttttttctttaagaatttctttttcagagcaatattgagtgagacacagttatagttttaaatgggcaatttattagtcccacagatggtatttttgggaaggaaagtgggtactcacactaagtattccaggaagaaaaacatcactgacctctccatgctgcaaggggtccaatatactcagtctgtcctcagattgaggctaatatgcctggagcatggtgctatg

SEQ ID NO: 910250 - DNA, 663 bp, Homo sapiens
agctctttgtagcatttgactttttaagtcagcatacgtaatattttgayttgtttttaaaaagaacagaaaaagcttgggaaaatatttgccatgtttctgcaaatgagttaatagtcattaggttttaaaagaaatacctctaattatatttagtagtatttacaatgctgttgtaaaaagggttttacagttttttcaagtgagaatgattgcgaacaccttaacaaaattttgattttgtctgttatagaaacacattttttatttggaaacattttaaacatttagaaaagtataaagggtccaatatacacatttctgtacccaccaaccaaagtaaaaaacaaatgataattttatcatttcccttcagttttttgtatcaaagaaatagaatgttatggacaaatttgaagtctttttcattctcctctagtctcattccctttcaccacctctgaaggcaattctcattacgaatttggtgcatacatttccagtccacattttatgctttcattacatatggaaatattctcataaaccatgtaatatattcttgcactgtttttagtattttgtaaatatattcatatggtgtaaattagttggcaactgcatctgtcatctaaaattctttaaatgtatctatgttaatac

SEQ ID NO: 910251 - DNA, 648 bp, Homo sapiens
ccaagtagggcagagttttacagaaaaaaaaaaaaatctacttttcttcaaggygaggaccttatacagaaaatagcatatgggaacagtttcagggaaggtctgagaagactgcgtgtctcctgacctagctctaccatctcatcaacttgctgagctcatatttaagcatacaagagctcttcagactgcacatagattttataatgccacctaccaagggcctaatttggagggctctggtagaggcttatgaaacaccaatatgtagggtgctaaaagccttacctttcattaatttaacaaatatttaatgagcatataccaagtgtcagatgttttgcctggtgccaggtctacaatggggaatcagacatcatctccgtctgccctgcagaaattgtgcctagaggacagccctctcaacacaggttagaactactgttctcaacctggatagatctcaatacatctacacattaactaacatcttcgtctaaaaagcagtattttaaaaaatttcatcatcaataccaatacctgtactgagtattactgtacctactgggttactgccctgtagatctgccttagtcttattcactgtcagtactcccaatatactcacattttggagaaataggatac

SEQ ID NO: 910252 - DNA, 522 bp, Homo sapiens
aaaaagatctaaaattaggggccagaatcttagactagaatttgagaataacaaaatacaatgcttaagctgaaccctaagcttgtacttaactatctctcctctacgctggtcctgcygccacttctgccccggccacggcctctcaggagccatctcactcaaagggccctgctgggctgcccagcttggagccatgatgctcacaggactgccaccccctcctccactttggccatggcccagaccctgcccacttggctcagctctgtggtagctcccaggccctacccgagatggagccaacctggagatgggggcctgaggccattccagtcttgggggaaaaggcatccggaagtgcagtgggatgcagggggcatacaggttcttcctgggtggggaatgagaaattaagttgaggtggtgagtaggagtgaaggctgaggagggaggattttaaaggccaggaggaaaaacagctgtcatggatggctgaggtgttcatccccctggggcaga
